United States Patent Application Publication US 2003/0194704 A1 - sequence listing, part 3

SEQ ID NO: 6013 - DNA, 508 bp, Homo sapiens
  MAP TO AC010320.7; EXPRESSED IN ADULT LIVER, SIGNAL = 1.7; EXPRESSED IN FETAL LIVER, SIGNAL = 2.3; EXPRESSED IN BONE MARROW, SIGNAL = 1.8; SWISSPROT HIT: P54613, EVALUE 1.00e-26; NT HIT: M31786.1, EVALUE 1.00e-94; EST_HUMAN HIT: BE909890.1, EVALUE 1.00e-94
catcccatggaacctacacccaccctagaaagaccggacacttctcaactttgtctgaggtgctcctttccctcctctctcttattgaatccaatgcatcttttaaggccctatttcctgggtcccttccttcgactccccaggcagttgtcacagcctccactaagccttcaaagccccgtttccccatcacagccctggacatactgcacctcccctgaggcagcactgcctggcccccaggcctcctcactcaccagctgtccagccaggaggggcatgtactcaatgatggccagccgcacccgccacttggcgtcctcagccagctccacaatggcagggagcagggactgggacagctgccggatgccaatcacctcgttcacacagtccaggttagagatgatgttcagccgtacctcagggcactgaggagaggaaagaaggattctgagagaatgcaatgcacacagcaacccaggacaggatggaaagagctcagctg

SEQ ID NO: 6014 - DNA, 518 bp, Homo sapiens
  MAP TO AC010328.4; EXPRESSED IN HELA, SIGNAL = 1.2; EXPRESSED IN BRAIN, SIGNAL = 1.7; EXPRESSED IN BONE MARROW, SIGNAL = 1.5; EXPRESSED IN PLACENTA, SIGNAL = 1.4; EXPRESSED IN ADULT LIVER, SIGNAL = 1.8; SWISSPROT HIT: P48563, EVALUE 1.40e-01; NT HIT: AJ251973.1, EVALUE 1.90e+00; EST_HUMAN HIT: AW876796.1, EVALUE 1.80e-01
ctgtccacccaacacacatctcatcctatgcacacgcttctccctttccccgttgtcctctctatgatgggaaactaatgcttccccaggcgggtgattgagggagaggacgggttggtctgtttgtctctctcctttctcccctccctcaggtctcctgcctgcctttctgctgctctgttcagactctcacttcctgcagttctgcagtcagtttgccccacgcaagacccaaggatctgggtctgtgaataatattcaagccaacatcattgccaagtgagaaatcttagaccccaggaccttttttccatggaggggcctgggcacagagacaaactcttctttttgcagaatttagggtcttttattggccacgtgggtctgctgagcctcagacagggatcccatagtcagccagatgtgtttctgggtggacttgcgcttgcccttccacaggttggtaagcagagtggtctccatgaagggcccttggctctgcccctcagttagtcctg

SEQ ID NO: 6015 - DNA, 505 bp, Homo sapiens
  MAP TO AC008997.5; EXPRESSED IN BRAIN, SIGNAL = 0.86; EXPRESSED IN FETAL LIVER, SIGNAL = 0.74; EXPRESSED IN BONE MARROW, SIGNAL = 1.3; EXPRESSED IN ADULT LIVER, SIGNAL = 0.87; SWISSPROT HIT: P05554, EVALUE 6.20e-02; NT HIT: gi14762990, EVALUE 2.00e-95; EST_HUMAN HIT: BG571742.1, EVALUE 4.00e-95
ccacacatgcctgatgtttcaaggggcttactcttacctggagtcagggtacttggtgagcgtggccaggctgctggtgtacatgtggccgcccacatcgatgtgcacaggtgcattggacttggtgagctgggctggcagggggatgccctgggcagccaggggagacacaggcgaccgggtgagagacagccgggacatgtttcctccctcctagagatggaaacaaagcggaacacaagagtttcaaagcggaacacaagagtttctccacaacacagccatgcactccctttattgagagtgtgatcacagatctaatcagatcacttctgcccgtgcctgatcatatattcagctgacaaattatggccaccactgtaattaagtgtatttgcatcattttcttcaaagtaccagagggaaaaagaaagatgcttattagcaataagaaatcaagaaaaaaaatttttcaaggtgtcagcctccaggggcataaaacaaa

SEQ ID NO: 6016 - DNA, 524 bp, Homo sapiens
  MAP TO AF230666.1; EXPRESSED IN ADULT LIVER, SIGNAL = 2.3; EXPRESSED IN HEART, SIGNAL = 1.5; EXPRESSED IN BRAIN, SIGNAL = 2.2; EXPRESSED IN BONE MARROW, SIGNAL = 1.4; EXPRESSED IN PLACENTA, SIGNAL = 2.5; SWISSPROT HIT: Q59001, EVALUE 3.80e-01; NT HIT: gi14149899, EVALUE 2.00e-65; EST_HUMAN HIT: BG183210.1, EVALUE 1.00e-112
ctttgcaagtgtcatctgccactgaccatgtccttaatggtgtttcttctcctgggtgggcaggaacgctgaaggtgtggaggagctcttcctgcaccagttcctcagaacgctgtcttactctttttgaatctgctcctagtgctagagcttgccttgcttaatgagcaacgttagtaggttagcagttgatgaaaaatccgagtaagtgcagtcctctgtgatttaatatcaacttcatctgcaggtcagaggtggagtgcaaaatatcgttatgataaggagtggttgaataatgggagaatgtgcgggttatcatttttcaaagaaaattattctcatctcaatgccaaaaagatagtttctacacatcacctgcttgctgatgtctatggtgttacagaagtgctacacgggctacagctgaagattggaatactaaagtaagtgaagggcagcaaagggagggtcacacttcagtggacgttttaattcaaaccaacactgttggccttttgatggtc

SEQ ID NO: 6017 - DNA, 570 bp, Homo sapiens
  MAP TO AL121892.9; EXPRESSED IN BRAIN, SIGNAL = 0.38; EXPRESSED IN FETAL LIVER, SIGNAL = 0.56; EXPRESSED IN BONE MARROW, SIGNAL = 0.57; EXPRESSED IN ADULT LIVER, SIGNAL = 0.68; SWISSPROT HIT: O30706, EVALUE 7.10e+00; NT HIT: Y09472.1, EVALUE 2.00e-03; EST_HUMAN HIT: BG827894.1, EVALUE 3.20e+00
tcctaagtggggctgtcttggtagaaaatattcctataggaatacagacacaaaaaggagattataggctcagcagacgcaagggaaatgaatttccccatccagcctaaaatctaaaagtacaaatccatttgctaaggtttcatataaaagaatctatcaaatgaaatcttatccagggcatatcctggcttgttcctcctatcattgaggtttgcatctgcctcactctggatgcctgaaattatcttctgtctgtcctgtcagagtgaattatttctaaggaaaatccagagaagacataaagagagtctctgagttaaatgaagatttaggcagtgcagcatggtcccccatccgtggcagctgtagcagcagcatcactttggaacttgtcagaagggcagattctcaggcccatccagacctcctgaatcaggaactctttgtaggcccagcctcctgtgttgtcataagccctccaagtgattctcattgcactcaaggtgacctggggtctcaggtggggcctggcccagggaacactcctgagggtgaggacaactctgc

SEQ ID NO: 6018 - DNA, 512 bp, Homo sapiens
  MAP TO AC010336.5; EXPRESSED IN BRAIN, SIGNAL = 1.3; EXPRESSED IN BONE MARROW, SIGNAL = 2.1; EXPRESSED IN PLACENTA, SIGNAL = 1.3; EXPRESSED IN HEART, SIGNAL =   1; EXPRESSED IN ADULT LIVER, SIGNAL = 1.5; SWISSPROT HIT: O43615, EVALUE 2.00e-25; NT HIT: AF026030.1, EVALUE 3.00e-79; EST_HUMAN HIT: BF982989.1, EVALUE 7.00e-75
aaatagggtgctgtgttgcccaggttggtcttaaaactcatgacctcaagcaatcctccctcctcagcctcctaaagtggctgagagctcatttttttttcagcactgaataatattctgttgtctggatataccacacttttatcacctgctgtttctttgttttttatgattattataaaagagatagctaatcatcattaaatgtatatcaaccgaaaagagaacatttaaaaaaatccctgagtccctctgtggggcatttcattctatgttctactatgttctttaaattttttttcttgtacattctttctagtccaaatcatattcttctggaaacagaaaaggctttctgtccggcttgctagataatgtcaaacaagaattagccaaaaacaaagaaatgaaagaaagtataaaaaaattccgtgacgaggccagaaggctagaagaatcagacgtgctccaggaggccagaaggaaatacgtgagtttctttgctgcttttt

SEQ ID NO: 6019 - DNA, 597 bp, Homo sapiens
  MAP TO AC010979.3; EXPRESSED IN HEART, SIGNAL = 1.7; EXPRESSED IN ADULT LIVER, SIGNAL = 1.7; EXPRESSED IN HELA, SIGNAL = 2.1; EXPRESSED IN BRAIN, SIGNAL = 2.4; EXPRESSED IN BONE MARROW, SIGNAL = 2.4; SWISSPROT HIT: P23795, EVALUE 5.00e-16; NT HIT: gi16162880, EVALUE 0.00e+00; EST_HUMAN HIT: BI833967.1, EVALUE 0.00e+00
tcgcctctgagctttgtctccttggagccacctcacttagacagcttcggatgtggatgcagatttgaaccatgttgcgtccccagggactgctatggctccctttgttgttcacctctgtctgtgtcatgttaaactccaatgttcttctgtggataactgctcttgccatcaagttcaccctcattgacagccaagcacagtatccagttgtcaacacaaattatggtaaaatccagggcctaagaacaccattacccagtgagatcttgggtccagtggagcagtacttaggggtcccctatgcctcacccccaactggagagaggcggtttcagccaccagaatccccatcctcctggactggcatccgaaatgctactcagttttctgctgtgtgcccccagcacctggatgaaagattcttattgcatgacatgctgcccatctggtttaccaccagtttggatactttgatgacctatgttcaagatcaaaatgaagactgcctttacttaaacatctatgtgcccatggaagatggtgagtacctcactggaacagaaaacaatacttcttgtgcagtgtgtggagaga

SEQ ID NO: 6020 - DNA, 548 bp, Homo sapiens
  MAP TO AL022579.1; EXPRESSED IN BONE MARROW, SIGNAL = 0.9; EXPRESSED IN PLACENTA, SIGNAL = 1.8; EXPRESSED IN ADULT LIVER, SIGNAL = 1.9; EXPRESSED IN HEART, SIGNAL = 1.3; EXPRESSED IN BRAIN, SIGNAL =   1; EXPRESSED IN FETAL LIVER, SIGNAL = 1.5; SWISSPROT HIT: P31792, EVALUE 9.00e-13; EST_HUMAN HIT: BF983020.1, EVALUE 1.00e-107; NT HIT: AL163246.2, EVALUE 0.00e+00
ctatgaacaatgtggccgtggtggcagggatggaggttacgcatgggctcagcaatatgaatttccactcaccatggctgacctggctactgccactgctgagtgcccaatttgccagcagcagaaaccaacactgaaccctcaatatggcatcattctttggggtgatcagccagttatctggtggcaggttgattatatcggacttcttccatcatggaaacggcagagatttgtcctcactgaaataaacacttactccagatatgggttttcctatcctgcacccaatgcttctgccaagactaccatccgtgggctcacagaatgccttattcaccatcatggtattccacacagcactgcctctgaccgaggcactcactttacggctaaagaagtgcagcagtgggctcatgctcatggaattcactggccttaccatgttcctcatcatcctgaagcagctggattgatggaatggtggaatggccttttgaagtcacaattacaatgccaactaggtgacaatactttgcaagcctgca

SEQ ID NO: 6021 - DNA, 543 bp, Homo sapiens
  MAP TO AC007162.1; EXPRESSED IN ADULT LIVER, SIGNAL = 0.88; EXPRESSED IN LUNG, SIGNAL = 0.52; EXPRESSED IN FETAL LIVER, SIGNAL = 0.46; EXPRESSED IN BRAIN, SIGNAL = 0.85; EXPRESSED IN PLACENTA, SIGNAL = 0.83; SWISSPROT HIT: O35973, EVALUE 1.30e+00
ccaagcctggagcttagatgaccccaggagcagcaggaagggcccatctggcatcccagggaaatcctcaaggcctctggaaactcagtgctggagctgggtcaccaggggtgccctaaggagcctgggactgaagcctcaggaccctgccctggccgatttttgtctgagctgtggcagttcccagcccacgggagggcaggggaaaagagccttgggcccagggataggagtgaccggcctatccacgctccaccctagaccacggaggggggccacacattctctacggacactgtccccaaacaactgtggcatctgacagagccaactcctgccctgctcccagttcaccttagacctgggaaacgaggttttgacttcactgctctgcatggcctggtgcagggctcccgtgagcagacggcccatgggccacgagccaggtatgtggaagagcctgtgccttctgtcctccaggccggcccagtccaacggcgtggctcaactgaaaccacacccagaactcggagaggggaagac

SEQ ID NO: 6022 - DNA, 535 bp, Homo sapiens
  MAP TO AC008886.4; EXPRESSED IN BRAIN, SIGNAL = 0.87; EXPRESSED IN PLACENTA, SIGNAL = 0.62; EXPRESSED IN ADULT LIVER, SIGNAL = 0.86; EST_HUMAN HIT: AL555611.1, EVALUE 8.00e-07; NT HIT: Y10129.1, EVALUE 9.00e-06
ggcacctagatggcactcactgcacgaatgaatgaatgattgcattctggtaaagaggttcaaggcgctcctgctctgggccttacaatgagatgctgaggaggttttaggcccttcctcttcttcagagtgcagcaaacataacacatacctgtttcttgttattgttgactgctctatagatactccaggcattgttagagggacagtttcttctctttactgtgttttccaccctccccatctccttgatgggcaggtggttagaggaggaaaaaaagggggtgaggggaaaacaaaactttatcttgccattcatccatgacttcatttacatttagttcttacaacaacccattttacagaagaggaaactgagactcacaaagattaagcagctgtcaaggtcttgagcaagttaatgccaaggagcctcagcccctggatctgtgctcttacccattacactagatggcagggcaaagaatgcaatatcactattctgcattttttctgttgtttcgcttaccccatc

SEQ ID NO: 6023 - DNA, 594 bp, Homo sapiens
  MAP TO AC009510.9; EXPRESSED IN PLACENTA, SIGNAL = 0.73; EXPRESSED IN ADULT LIVER, SIGNAL = 1.1; EXPRESSED IN FETAL LIVER, SIGNAL = 0.41; SWISSPROT HIT: Q01628, EVALUE 1.50e+00; NT HIT: AF254822.1, EVALUE 2.20e+00
acaggcaacaattccaggtctggcccctaaaatcttcccataacatttaaacacccaaacattctcttcctacttgatgaagacaagcatggtgacctccagccattgtttgaagatgcagagccacaagattgagggacagtgggtttccgaatcatagtgtagagatgaggtgccactaatcagggacatttgtttcagacttgatgtgaacaagaaataagcttctactgtgtgtgagccactgttcatggctatggttatcttaactagtggagatgccaatagtaatgagaagtagcatcaaaaagcaaggagaaatctataaattcatcttttggaaacaaatgtgagatgctctaaagaacttaggtaagcaacattagtgtctcagtatttacaaacactacattaaaaaaactataacagaacacaatgtgaatatggctaccatgaaatggaaaaaaaaatcatggacttcccatgggagtaaaaatttgtacaactgtagaattttgtctgaataacaatttggcaacatacatcaaaacctaaaacatttctccaaccattagcaatcacactcaaatccga

SEQ ID NO: 6024 - DNA, 502 bp, Homo sapiens
  MAP TO AL096791.12; EXPRESSED IN ADULT LIVER, SIGNAL =  14; EXPRESSED IN PLACENTA, SIGNAL =  13; EXPRESSED IN HEART, SIGNAL = 3.5; EXPRESSED IN BRAIN, SIGNAL =  13; SWISSPROT HIT: Q04735, EVALUE 2.00e-12; EST_HUMAN HIT: AW752284.1, EVALUE 0.00e+00; NT HIT: gi14758443, EVALUE 1.00e-63
caaggctgaagggaagtgagactaagtggtcatgggaaagtaggaggctggggagccaataagaaaggggaggccagtggtaccaaagtcagccagcttgagctctcccctctcgttgatgagcaggttctggggcttgaggtctcggtgtagcaccttctgccggtggcagtaggccaggccacggagcagctggaacaggaacagctggggacccaggaatggcaggcagaggtcaaagactatccactagcccgacccccagcaggcactgctcccctcccaaacacagacactaggcccagagccttgtcacacaaaagaggacagggtcccagtgccctccaagggctcctagcaaaaaaagccaaagggaaaagtccgtttctgggagatttgtgggttggagtgggtgagtgggggcccccttgtgcccctgcttcctgccccacacccactttcacgttgtgcatgttgatgatgttcccacagtcatccaggt

SEQ ID NO: 6025 - DNA, 520 bp, Homo sapiens
  MAP TO AC011358.5; EXPRESSED IN ADULT LIVER, SIGNAL = 0.98; EXPRESSED IN LUNG, SIGNAL = 0.98; EXPRESSED IN BRAIN, SIGNAL = 1.1; EXPRESSED IN BONE MARROW, SIGNAL = 0.54; EXPRESSED IN PLACENTA, SIGNAL = 0.89; NT HIT: AF070933.1, EVALUE 2.00e+00
tgggcaaatcctctcacttctctgagccttagcctcctaatctgtgagatgtcagtaatagtacctaccttgcatgttcgccacagagattcaattaatttaaataggtagaggacttggggcagtgcctaggacaacattacactcagggatggtgatgatgatgatgatgattataatgatgatgatgatgatgatgataatgatgatgatgatgatgatcatgatgataatggaaaagaagatagaggaggaagaagaggagacaatcatgatgttggaggtagactccaatcttcagaatcagaagctcagggttggaaaggaccttaagtagtcaccccgccaacttccacaatccaccccaagaccctaagaaataggatttgacattgctcaagttgaggaaactgaggacgagcttgcccattgctggtcttttagccaaagaagtgggagagatggccatgaaacccaagacagttagcttcaaagcctgggctccctttaccagagcctt

SEQ ID NO: 6026 - DNA, 513 bp, Homo sapiens
  MAP TO AL118558.2; EXPRESSED IN BRAIN, SIGNAL = 4.8; EXPRESSED IN BONE MARROW, SIGNAL = 3.8; EXPRESSED IN PLACENTA, SIGNAL = 3.9; EXPRESSED IN ADULT LIVER, SIGNAL = 3.5; EXPRESSED IN HEART, SIGNAL = 3.5; SWISSPROT HIT: Q9JHU4, EVALUE 5.00e-50; EST_HUMAN HIT: BF333718.1, EVALUE 6.00e-57; NT HIT: U53530.1, EVALUE 0.00e+00
ctgcagctctgggttctgtgtaataccatctcatgagtaacatttctctcatctctgaaagtgaatttgccttttggaacatttactgaaagccattgtaactggacctagaacctcaatttcagtttaacagtccacaaacccggagaatgcactgtattgctttagtgtagatgaacttttaaagtgactctctttcttcagattacagagttggttcaccagagagatgttacaaggtccttgatcaaaagcaagattgacaacgccaaatcttttgaatggctcagccagatgcgattttactttgaccctaagcaaactgatgtgttacagcagttgtcaattcaaatggcaaatgccaaatttaactatggctttgagtacctgggtgttcaggacaaactggtccagacccccctcactgaccgctgctatttgacaatgacacaagccttggaggccaggctggggggttccccatttggtaagttcttccacagatctggacag

SEQ ID NO: 6027 - DNA, 595 bp, Homo sapiens
  MAP TO AL118558.2; EXPRESSED IN ADULT LIVER, SIGNAL = 2.7; EXPRESSED IN HELA, SIGNAL = 6.4; EXPRESSED IN FETAL LIVER, SIGNAL = 4.8; NT HIT: gi15300984, EVALUE 1.00e-121; SWISSPROT HIT: Q9JHU4, EVALUE 3.00e-54; EST_HUMAN HIT: AU122332.1, EVALUE 1.00e-121
acacacgaaccctgcttttcctcccccagggcaggcagaacatctcaccggataagatcccgtggtctgcactaaagaccttaatggcccagtccatttatggcgggcgcgtggacaacgagtttgaccagcgtctgctcaacaccttcctggagcgcctgttcacaaccaggagtttcgacagtgagtttaagctggcatgcaaggtcgacggacataaagacattcaaatgccagatggcatcaggtatgctgctgcctgctggaatggagacagttgtgatgtcagggcgtctggtgtcactcagaggtgacccctgacatcatttccaaatgcactggttttctaggcgagaggagtttgtgcagtgggtggagttgctccccgacacccagacgccctcctggctgggcctgcccaacaacgccgagagagtcctccttaccacacagggtaggcaacaaggatcctccccacacgcagggtgggtggcgagggtcccctcacgcggggtgggtggcgagggtccccacacgcagggtgagtgtgcactgctgtcccagggccctccctggttatgctgggtgtggctct

SEQ ID NO: 6028 - DNA, 508 bp, Homo sapiens
  MAP TO AC004784.1; EXPRESSED IN ADULT LIVER, SIGNAL = 0.74; EXPRESSED IN FETAL LIVER, SIGNAL = 1.3; SWISSPROT HIT: Q9UQ72, EVALUE 6.00e-66; EST_HUMAN HIT: BI054022.1, EVALUE 0.00e+00; NT HIT: AF106562.1, EVALUE 0.00e+00
cagcatgggacataatgcagagagggacacaggcaatgtccaggcctgacaatcctgtgtgtgtgatgtagaagtgacccctgtcccccaacacccagggatcatgtggaatcacttacggtataaggtgaaggtgaaatatccagttactcctctagtcccatcacctcgctttatgatgtgtaaggtgtaggatcctgcgtcctcccgggtgacattctggatcagcagggatgcattggaatatactgtttctcgtccactgtatgccggtccatatataattatttgaccgtctactacatatgatgtaatgtaatggtagaggtccctgatttgccctttgtaccagatgtagccagtaagattctggggcaaattgtggacaagtagaagaacatccttcccctcggacactttgggtggctgggcttcaatcatgacttgggcagtggtaggcaagttccagaagtttaaaagtaatgctaggaggtggagagagcatcag

SEQ ID NO: 6029 - DNA, 581 bp, Homo sapiens
  MAP TO AC011400.4; EXPRESSED IN HEART, SIGNAL =  22; EXPRESSED IN ADULT LIVER, SIGNAL =  20; EXPRESSED IN LUNG, SIGNAL =  21; EXPRESSED IN BRAIN, SIGNAL =  21; EXPRESSED IN BONE MARROW, SIGNAL =  22; EXPRESSED IN PLACENTA, SIGNAL =  21; SWISSPROT HIT: P39188, EVALUE 1.00e-18; EST_HUMAN HIT: AA551582.1, EVALUE 3.00e-22; NT HIT: AF253322.1, EVALUE 7.00e-16
tgagcccaggagtttgagaccagcctgggcaacacggcataaaacatacccgatcacctctacaaaaaatgaaaaaattagccagatatggtggcatgtgcctgttgtcctagatactcaggaggctgaggcgagaggattgcttgagctagggaggtagaggctgcagtgagttgtgttcacgccactgtactccagcctgtgcgacagagtgagaccctgtctcaaaacaaaacaaaacaaaacaaacagaaaaaaacacaaaagcaaaagcaggattcaaatccaagttgagatattccgaatcaagggtctttccatagtgccgtgataacaggtgaagacgtatgccttgaagctcattttactcacattcctgaatcttccgctggccaattacacacttcctgctgggctccgcctggttacctcggtatgaatgatactccacactcactgactgatggccccataacaattgcaaccaactggacaagggcttctggttgctgtttgggggatacccggacacagctccactgctctcagtgtagtcattaacacccagctgttaaagggaa

SEQ ID NO: 6030 - DNA, 536 bp, Homo sapiens
  MAP TO AL109856.3; EXPRESSED IN ADULT LIVER, SIGNAL = 1.3; EXPRESSED IN LUNG, SIGNAL = 1.6; EXPRESSED IN FETAL LIVER, SIGNAL = 1.2; EXPRESSED IN BONE MARROW, SIGNAL = 1.3; EXPRESSED IN PLACENTA, SIGNAL = 1.7; SWISSPROT HIT: Q60478, EVALUE 2.90e+00; EST_HUMAN HIT: AW899965.1, EVALUE 7.00e-32; NT HIT: AF003529.1, EVALUE 2.00e-19
gtacctgttgcatggtgtgcatgcttcttaaattctgtaaacacattgaacaaaacaagcgaagtccttgttcttaaggagcttatgtgacaatgggaggaagacaacagtcaataaacaaatagaaaaataactgatactgaatcaggttgtagtgttagtccgttttgcattgctataaaggaatacctgaggctgggagatttataatgagaagaagtttatttggctcatggttctgcaggttatacaggaagcatggtgccagcatctgcttctggtgagctcagcaaactttcagtcgtagtggaaggcaaagcaggaccagacaactcatggcaagagagggagcacaagagaggggatgaggtaccaggatgctttttagtgatcagatctcattgtaacgaacagagtgagtaaccctcgattactgtgggaggggcaccaagctacttatgagggatcttccccgataagccaaacacctcccagcaggccccacctctaactgtggggagtcacgttttcacgtt

SEQ ID NO: 6031 - DNA, 533 bp, Homo sapiens
  MAP TO AL049840.4; EXPRESSED IN BONE MARROW, SIGNAL = 2.9; EXPRESSED IN BRAIN, SIGNAL = 2.9; EXPRESSED IN PLACENTA, SIGNAL = 2.1; EXPRESSED IN ADULT LIVER, SIGNAL = 2.7; EXPRESSED IN FETAL LIVER, SIGNAL = 2.6; EXPRESSED IN LUNG, SIGNAL = 3.1; SWISSPROT HIT: P21328, EVALUE 2.20e+00; EST_HUMAN HIT: AI304801.1, EVALUE 5.00e-79; NT HIT: AJ318887.1, EVALUE 5.00e-78
ttctggggtatgactttgccccattgatctatatatatatctactgctgtcatgttgttttgagcactttataagatagtgctctttcttttctattactctcctcatttggaattttcctgacttgtctttttcatctttctacatgaactttagaatcagcttatctattattatttccagaaaataattctgtaggcattttgggggcggggggtgggtagagggatcactttaaatttacagattaatctgtttgtgataaggaatctaaattacagctttactcttttgtcttacagatgatattaactgttttcttgagcaacaatgaacagattttaacagaagttcctataacaccggaaacaacctgtcgagatgttgtagaattttgcaaggaacctggagaaggcagctgccatttagctgaagtgtggaggggaaatggtatgtattaggtcctgtaaagattgttacattgataaaatcaaatcaccatcttttagctaagcttgtgctggatttgcttt

SEQ ID NO: 6032 - DNA, 553 bp, Homo sapiens
  MAP TO AC008625.4; EXPRESSED IN LUNG, SIGNAL = 0.48; EXPRESSED IN BRAIN, SIGNAL = 0.63; EXPRESSED IN ADULT LIVER, SIGNAL = 0.92; SWISSPROT HIT: P12021, EVALUE 2.70e-01; EST_HUMAN HIT: BG428944.1, EVALUE 0.00e+00; NT HIT: AF149301.1, EVALUE 5.30e-01
atgcccaggtattcgatttgttagcacaggctcaaacacaaacatgaacaaacacatgcacacatcccagtgtccattgttggaatgagggggatacttttcacctcctgctggggtgcccagtttgaacagaaggagcttcttatatttggggtatcataagctcaaaagcaaacaaggagcactggcctggacatgctgtggcaaaagactctcagccctggagaggcatcttgttcccattcagggacccagatggctgtctgggtggagccatagatgacccacatcacccagaagccaggtggtgtgatgtgagtcttgccagcaatgccacatggctcctcagtacctattccatttgagtctgtcacagtgcctgaccttccaccactggttacccgattcttgtgggtcaccgctgtcctcctctggggggcattaagaaattatacaagtcatattaataggtgctcatgttagaaattgttgaaaatcagatatgtaaacataaattaaacaccaccaattaacccactgtctagatggcctc

SEQ ID NO: 6033 - DNA, 531 bp, Homo sapiens
  MAP TO AL049856.1; EXPRESSED IN FETAL LIVER, SIGNAL = 1.9; EXPRESSED IN BONE MARROW, SIGNAL = 2.3; EXPRESSED IN PLACENTA, SIGNAL = 1.8; EXPRESSED IN ADULT LIVER, SIGNAL = 2.1; NT HIT: U16175.1, EVALUE 2.00e+00; SWISSPROT HIT: P11035, EVALUE 1.50e-01
tctttgggtaggtgcctgaggttctgatatagttccttggctatatgctctagactgatagacctccttagatctataccccaaattctgctatacctccctgggtataaacctgagatcctgatataaatccttagctagatacttaaagcctcaagatatgccttcttgagtatatacctgagactctgctatacctctttgggtaaatacccaagattctgatatatctcactggttacacacctgaggttctcatctgtctcactgggtacacacctgaggttctgacctgtctcactggctacacgcctgaggttctgacctgtctcaacaggtacacgcttgaggttctgacctgtctcaccgggtacacgcctgaggttctgatctgtctcatcgggtacatgcctgaggttctgatctatctcattggcatacacctgaggttctgacatggctccttagtttatgcccaagattctgatatacctctctctcttcacaaaaactcaaatccctgctgcaact

SEQ ID NO: 6034 - DNA, 545 bp, Homo sapiens
  MAP TO AC026432.2; EXPRESSED IN BONE MARROW, SIGNAL = 0.9; EXPRESSED IN PLACENTA, SIGNAL = 0.81; EXPRESSED IN ADULT LIVER, SIGNAL = 0.8; NT HIT: AF410785.1, EVALUE 5.20e-01; SWISSPROT HIT: P38242, EVALUE 3.00e+00; EST_HUMAN HIT: BE173615.1, EVALUE 7.60e-01
acccgattgtgctacctttgaaactttttttgtaaatctggagttatctcaaagtagagataagaatatttcatgaatcacaattttaatgccttatttatcttctggtaggtcagtttagagaatttttacaatagtattgacttttgattataatttaatgatccatatggaatcacagactattaaagccagatggatttgctctgttgattgacggagggaggaagaagaaagcagtatttagcgattaagtcaccaggtgccaggctgcagctaactctgttagttgtgtcctggtgtccacttgcctgtggtttcttgccatgcaaaccctgattttccgtagggccccagtgtgcccagcctgggtgatggatcatcctggtctctgattttccactcgcccttgcagctggggagggccatgtcagccagttctgccaagaagataaagtgagaggatacaaaaagtatttctagaaaaactttgctttcctgataaaaggaacaaatgcatctggtgcctccctatccatccattt

SEQ ID NO: 6035 - DNA, 587 bp, Homo sapiens
  MAP TO AL021366.1; EXPRESSED IN PLACENTA, SIGNAL = 1.4; EXPRESSED IN HEART, SIGNAL = 1.2; EXPRESSED IN ADULT LIVER, SIGNAL = 1.9; SWISSPROT HIT: Q9Z1B8, EVALUE 2.00e-25; NT HIT: gi13645877, EVALUE 6.00e-81; EST_HUMAN HIT: BI018247.1, EVALUE 0.00e+00
tgttacccttcctgtgggagcctcccatccacagcctctcccaagccttttcctctccccacccctctgaagccacccacctgtcctgtctctgcagaggggaggtgccctgaagaagggcccctatgcccgggccatgctgggtatgaagctttctctgccatatggactgaaggggctggactgggatgctggacatctgagcaaccgacagcagagttactgttactgtggtggccctggggagtgagtaatgagaggggagcagactgtggaatgaatgatgtggtggtggatcccaggaaatgaaggaaaaagaacaggatgagggtagcactcagggggataggaggtaagtttagggtttgggacagttatggggaagggggtttctggaggccagaagtcctgtgttccccctcaggtggaacctgaaaatgctgcagtgccggagctgcctgcagtggttccatgaggcctgcacccagtgtctgagcaagcccctcctctatggggacaggtgagaccaaggcagactctctaggagccaaggatgccctctttcttcgtgttccaccctcagttct

SEQ ID NO: 6036 - DNA, 599 bp, Homo sapiens
  MAP TO AC009145.4; EXPRESSED IN ADULT LIVER, SIGNAL = 0.73; EXPRESSED IN FETAL LIVER, SIGNAL = 0.51; EXPRESSED IN BRAIN, SIGNAL = 0.61; EST_HUMAN HIT: BG745888.1, EVALUE 5.40e-02; NT HIT: gi9635250, EVALUE 3.70e-02
gtgctgggaggagaacagtcacttcatacagaaattaaatacataaattaatagatgcctcttcagaaaacctttcaaacacggagtccagctgcttcggcaacactgcagtcaataggtcaaggccttggctaatggctagggagaggcagaggagggatgaaaacgggctgagagactcagcagagatcaacaaatatgcccagagacttaaccacttaggtgaatatttgcctttgccagagggttatggtgagaacttgcccaaagcaagaagcaaatggaaacaaggacacaaagaagagggaagaagaggatgaggagaaaggagaagaggaggaggaaaaggaggatgaggaagaaaaggaagagaaggaagagagggaggaagaggacagagaggaggagccaccagccagggttgcatgtgcgtgcccaagtacacaggacattctgcccttcacctgtcgtcttcaaagaccagaaaagaatgccactctcaagttctgcctttggcaggagtgagctagaaagagtctttaggtgtttaatgaaacaaataaaatttaaacatgtaccctttagcttcagaacctccg

SEQ ID NO: 6037 - DNA, 589 bp, Homo sapiens
  MAP TO AC008974.6; EXPRESSED IN BONE MARROW, SIGNAL = 0.87; EXPRESSED IN PLACENTA, SIGNAL = 0.55; EXPRESSED IN ADULT LIVER, SIGNAL = 0.8; SWISSPROT HIT: P07566, EVALUE 1.30e-01; EST_HUMAN HIT: BF796285.1, EVALUE 2.00e-94; NT HIT: gi15302254, EVALUE 1.00e-91
atgctgaatctcagaagcccggttcccaataatgtttctccacttccccagaggcgggaaacacgagccagacccgtgcctggagccagcccctggccgccgggtagccatgcggagcctgccatccaacggagagctggaccccgacgtcctagagagcatggcatcactgggctgcttcagggaccgcgagaggctgcatcgcgagctgcgcagtgaggagtaagaccccaagacccctgcacccgtgtacccacgtggggcgagctgcagcagctccctgcgcacatgcagagtgctgggcgaggaaccctggcctctcatggggcatggtttgaagctcccgcctgggagtgatggaaccagcggagaaaacggcccagaaacacgctgagaaagtattaatagatgctgcgacatagtacttacatatacatagtacttacaaatagttcttgcctggatgttaggtgttacagtgttattataattgagtgaaacacagctgagatgtaccctaaaccagagaaactgaccatactgatacctagaaaaaatggaaccatgggcagaaatacagggagcggag

SEQ ID NO: 6038 - DNA, 557 bp, Homo sapiens
  MAP TO AC010423.5; EXPRESSED IN PLACENTA, SIGNAL = 0.95; EXPRESSED IN HEART, SIGNAL = 1.1; EXPRESSED IN ADULT LIVER, SIGNAL = 1.2; EXPRESSED IN HELA, SIGNAL = 0.69; EXPRESSED IN BRAIN, SIGNAL =   1; SWISSPROT HIT: P53227, EVALUE 6.10e-01; NT HIT: gi13907843, EVALUE 1.30e-01
tgtgtgtctcttctcctggcatgtgtgctgtcgagaaggagaagaattttgatacagtggtgatttatctaacctcgactctggagagaaagaaaaataagcctgacacactatctacagtcttagaagactgtgaggtagaatctgctatctctcggcagaaggtctttaaaattagtcagaacacccccagaaagaaacatttctctgagtctaagactcttctcaaaaaaattcttcctacttcacataatacccaaaagaccacaagtttaagtactgcagatttaagtaaaatgcctttcgaggattctaaggatgtggaaaaagagagaaaaatcaactttgatatcccaggaaatatcacatcagactcacatgtacagcaaagcacagaaggaataaattatttgccaagtaccattactgacatctttccactcaagatggcaaaaacttcacctttagttcttcatcttctgtgagtatgtagctcacagaagcaaaggtagccaacatctactgcaaaggaagcaagactccacctgcagaatgct

SEQ ID NO: 6039 - DNA, 529 bp, Homo sapiens
  MAP TO AL022069.1; EXPRESSED IN PLACENTA, SIGNAL = 0.65; EXPRESSED IN ADULT LIVER, SIGNAL = 0.62; EXPRESSED IN LUNG, SIGNAL =   1; SWISSPROT HIT: P41950, EVALUE 1.10e-01
cacctggcagttagcaggaccatgctgccactcaccatgctcttcgggcagctggcgagtcacgctgccatctcactgtggccggggccgcccccctggcagattgcaggaccacactgccacctcgccgtggctggggccaccgcctgtccccagcatcgcctgctgcccctttctcatggctcttgggcagacactgggtgctttcgtccagagcaagtgtgagtggataatgggcagtctggcccgtgccttccctcactcgtgggctaggctctggggacccgtgaagccaaagtgtggccctcatgctcgtgggctctctgacagcaaacagcaaggccagctgcagcccagacgcgcacaaatgcctgcagccagggcagagaagcagatgaggcacaaaatggatctcagaagaggggagagggcctgatggaaggggaagaaagagcagcagcgaaagaggagaggggagcgtgtgggagaggctggagtccagggcagggcacagaagcaaagtgaagcg

SEQ ID NO: 6040 - DNA, 554 bp, Homo sapiens
  MAP TO AC009731.6; EXPRESSED IN ADULT LIVER, SIGNAL = 2.6; EXPRESSED IN LUNG, SIGNAL = 0.7; EXPRESSED IN FETAL LIVER, SIGNAL = 2.3; EST_HUMAN HIT: BF743811.1, EVALUE 2.00e-07; SWISSPROT HIT: P11680, EVALUE 1.60e-01; NT HIT: AL163278.2, EVALUE 1.30e-01
tgcagaaacaacaccctcaccccacgaagcccgacctgttctctccctggctgactttgaagccgtggttgtagcagagtgggtaggttctgatgatgggtagagaaggcagaggccagagcgaggcagccaaggccaggaacgccaggagccaccagaagctggaagggccgaggaagtatcctctagagcctccaggggagcatagccgtgctcacacctggatttcagacttgtggactctggaactatgaaagcataacttcaaagcatgttcctgagagtggggcaggtaccactccagggggcctggagtgagttgcagggaatgggaataggtagagaaggcatctcggggacagggttcagctgagggcaaggctaccttcaggcgggaccatgacttgcagccgcacagcacaggacacatagtctgagctaaagaatatttgcttaatgagtgagcttacatcatatgtatataaaatctagaaacatgtctggtttgctgaagactgactacgtgggtgggtgctgagccccatttcaactgt

SEQ ID NO: 6041 - DNA, 594 bp, Homo sapiens
  MAP TO AL031033.5; EXPRESSED IN ADULT LIVER, SIGNAL = 1.3; EXPRESSED IN HELA, SIGNAL = 2.2; EXPRESSED IN FETAL LIVER, SIGNAL = 1.6; NT HIT: gi15317709, EVALUE 8.00e-99; EST_HUMAN HIT: AL520203.1, EVALUE 1.00e-105; SWISSPROT HIT: P39219, EVALUE 7.00e-03
ttaccaatgccaggtaagccttggtcacgcgccgctccttgaagcacctgtacgcgctgccggcggctgccttgtttagggccacgcacagcgccccgctggtggagaaatccagctggtggcagaacctggagtgggacagagtccagagtctgagccactttcctccacagacgccaccgtggggctccggccgccccccctacctgaacccgtagcaggtgtcagggtcggccagctcgggaaagcggtaccgcagctgcttctgcagggtcagagtctcccgccacgccttgctgtcaatgcgaacgtcccagtgcttgttgaccaccaggaagtcgcggctccggtacacgatggacaggttctccacgctgcctggctccatggccggcctgccgagccacgcgtgggtgcgtgtgctgtgagcacgtggtgcgcccccagcccagcatacagaggtacccgcaccgccccacccgggctccggtgcgaagccaccgagccgggtccgcagccctactgtgcacctgcatcctcagtccccgagatcagtccccagggcgtcagctggggagtcaaggagtcagcctg

SEQ ID NO: 6042 - DNA, 596 bp, Homo sapiens
  MAP TO AC008456.4; EXPRESSED IN PLACENTA, SIGNAL = 0.52; EXPRESSED IN ADULT LIVER, SIGNAL = 0.68; EXPRESSED IN BRAIN, SIGNAL = 0.55; EXPRESSED IN BONE MARROW, SIGNAL = 0.84; NT HIT: gi13376748, EVALUE 0.00e+00; EST_HUMAN HIT: BE018556.1, EVALUE 1.00e-109; SWISSPROT HIT: O54827, EVALUE 3.00e-34
gaaatgcctttgctacctgctagtgaggatcccaagggagggaacctgcctggtttctgaatggtagaaactcatctcttttcaggtgctgatccccatctctttgtatgtctccattgagctggtgaagctcgggcaagtgttcttcttgagcaatgaccttgacctgtatgatgaagagaccgatttatccattcaatgtcgagccctcaacatcgcagaggacttgggccagatccagtacatcttctccgataagacggggaccctgacagagaacaagatggtgttccgacgttgcaccatcatgggcagcgagtattctcaccaagaaaatggtatagaagctcccaagggctccatccctctttctaaaaggaaataccctgctctcctaagaaacgaggagataaaagacattctcctggctctcttagaggctgtgtggcatttccacaagttgcttcctgtatccctgtggtcttccttgtcacagatcagggctgttccaattacttgtaaactttcatttgtttacaaaggttagaagttatcccatatgtggttccccttcagctgatctttgtctggtgcca

SEQ ID NO: 6043 - DNA, 585 bp, Homo sapiens
  MAP TO AC010422.6; EXPRESSED IN BONE MARROW, SIGNAL = 2.5; EXPRESSED IN ADULT LIVER, SIGNAL = 1.5; EXPRESSED IN LUNG, SIGNAL =   2; EXPRESSED IN FETAL LIVER, SIGNAL = 2.1; EXPRESSED IN HELA, SIGNAL = 1.2; SWISSPROT HIT: O00754, EVALUE 3.00e-39; NT HIT: U60898.1, EVALUE 1.00e-100; EST_HUMAN HIT: BE349032.1, EVALUE 2.00e-85
ctctctcccgcagttctcagggctgcgcagggacctgccgccctcggtgcacctgctcacgctggccagctggggccccgaaatggtgctgctgcgcttggagcaccagtttgccgtaggagaggattccggacgtaacctgagcgcccccgttaccttgaacttgagggtgagaagggcaaaattgagaaggagatcggagagaggcaagagagagggagagaagagaaacctggctttgccccaactcatctgggcccatccccttccccgcaggacctgttctccaccttcaccatcacccgcctgcaggagaccacgctggtggccaaccagctccgcgaggcagcctccaggctcaagtggacaacaaacacaggtggggccctggtcaggggtagggaaggggtggagtcttacctggggccggcaggtgggggcaatgtgtgaggcatgggatgttggccaggacccaaaaaggtcatgagggtatggggcagagtccagacccaggttaggggcttaaaggatctgaaatgggtgcggcaaaccaggaatgggtcttgaggtttgtgggtgctgttt

SEQ ID NO: 6044 - DNA, 510 bp, Homo sapiens
  MAP TO AC010451.5; EXPRESSED IN ADULT LIVER, SIGNAL = 0.69; EXPRESSED IN LUNG, SIGNAL = 0.59; EXPRESSED IN FETAL LIVER, SIGNAL = 0.38; EST_HUMAN HIT: AL598314.1, EVALUE 1.80e-01; SWISSPROT HIT: Q91660, EVALUE 2.80e+00; NT HIT: AF268193.1, EVALUE 1.20e-01
gaaacccaggcaagaaaatgcatgtgaaaaactaccatgtgatgtgtgctgtaatatcaatatataatgtatatatgtatatgtatacattattatgtatttgtttagtaattatacaaaaatgtatttagtacctacaatatgctaggcttgatgtgctactggatgtgaaaaatagagtgcagaatataaaatatgtgctgtttgcctttctgaaacttgcattctggtggaaaaggcgggttgaaacacaggtactcaacgacagtatcacaaatgtggtggacaagcagtacagggcactgtgggagcatttgcaggagatccccctgctggggctgctgggggaacatgagggattttgctgttgttgatgctggaaccacagcattaatgttaataccactttcttcttggctctcagtaaccttttctgaaagaagctgaaatacagatcgtgaactggcaagcaacttaagtgcaactggaagcggcttaattcaaggtcaa

SEQ ID NO: 6045 - DNA, 520 bp, Homo sapiens
  MAP TO AC010499.4; EXPRESSED IN ADULT LIVER, SIGNAL = 0.81; EST_HUMAN HIT: AI628867.1, EVALUE 7.30e-01; SWISSPROT HIT: P23811, EVALUE 4.80e+00
tccaagccctggttttattgtaatgtcaagagccagtaagtagggtgcatgatcttccattctgatttggcttcccctaccctccacctatccatcagggaataattgatttctcactgtacagtctagtccccccattatatacttactcttagaaagtatgtacagataatgggtgcagtttcttcttccctgtaggagggttgcaggaagagctcctcccataggctctcacagccagttgttttttcacaggtccaagaacacagcagctctgttccacagttgtcctgcttggggagtggactgagggctgatggcattctgaaggcgttttttctaggattggacatggcctactggaacacacaggtcactggaggaagatgaagtagtatgcccagccctgtgccccagtgcatcttcagaagctggtggccaggcagccaacatctaggggcaggtgtatatccttcagggcttatgaatccaccttctttcttccttcaaggggaaaagg

SEQ ID NO: 6046 - DNA, 524 bp, Homo sapiens
  MAP TO AL078581.11; EXPRESSED IN BRAIN, SIGNAL = 2.5; EXPRESSED IN FETAL LIVER, SIGNAL = 1.7; EXPRESSED IN BONE MARROW, SIGNAL = 1.3; EXPRESSED IN ADULT LIVER, SIGNAL = 1.8; EST_HUMAN HIT: AI880208.1, EVALUE 3.00e-74; SWISSPROT HIT: P24368, EVALUE 1.00e-04; NT HIT: U08988.1, EVALUE 9.00e-09
ccagtcctatgcataccgttcctatccataccactacgtgttaaacatctcaatattaaaacattctagtacattcagatagcaaattgtaaccatacctgatatcctgatatggtacaaagtccttgtcaacaaaggtctcattaattttcttaattatgtccatgccttctgtcacctcaccaaacaccgtatggacaccatcaagataatctagattttctcctgtggtgataagaaactataaagaaggacacataataaataccataaaaataatacataactcaaactgaaatcagttacagactgacaaaaaaatacatgaaagttaagagtccacatttactgcaccaattcttagacacttgttaccaaaactaagtaaaaagtacaaagcttatactggcatacctcattttattgcactttgcagatactgcattttttacaattaaggatttctggcaaccgtgtattgagtaagtctattggtgccattttcccaacagcataggctcact

SEQ ID NO: 6047 - DNA, 552 bp, Homo sapiens
  MAP TO AC008804.5; EXPRESSED IN PLACENTA, SIGNAL = 0.56; EXPRESSED IN ADULT LIVER, SIGNAL = 0.83; NT HIT: U81961.2, EVALUE 3.40e-02; EST_HUMAN HIT: BF910600.1, EVALUE 2.00e-01; SWISSPROT HIT: P07916, EVALUE 9.00e+00
cacagatggcaagtgaccaggccagagtccacacccagactatttaactctagactccatttaactctagactctaagcttttaatcactaaactttcagaaatgtctaccaagaaagatggctaaatttggcgagcaatatctaaaatcaagtccaaaggaatatgaataaaagcatttgaaagagaaggctatgatttctcacactatgactagcatttttccttaggtgtcatctatgctgaatctccactgggcaggaaacacaatgaaatacaactgaaactgaatggaaagttaaccatgaaacgactggaggaatctcagtcagaactaggtctcgctttaccaagagaggtcagtcatacttgacaatagaggctttagggcccttttcgatgttccacaccataatttaaatgatgcagtaaaaacagaaaaagcaaagagttaataatcatctgaagaaatgtgcttccattctaaacttccaagggggttgggggtgtaagaagactaaatattgtggaaagcagcttggtgacatctgaa

SEQ ID NO: 6048 - DNA, 596 bp, Homo sapiens
  MAP TO AC007207.22; EXPRESSED IN BRAIN, SIGNAL = 0.43; EXPRESSED IN PLACENTA, SIGNAL = 0.6; EXPRESSED IN ADULT LIVER, SIGNAL = 0.71; EST_HUMAN HIT: BI036384.1, EVALUE 2.00e-04; SWISSPROT HIT: Q33821, EVALUE 1.50e+00
ggcctgagagtctgcatttctaagaagttcctaaataatgttactgatgagtaggggatcacactgagggcatgagttctggaggtagcatagattagggacagagcacacttaccttcacaagctctgattccaacacttgccagatgcttggtgaatgtttggtgagtgcttgagttgggagctactttattttacctcctgtaatctcagtttcctcatctggataagagtccaccatttaaaggaagtattaagggaagagtctgagtatatccagtactcagaccaaggagtatgcccagaggacaggggacagatggcctctttccagtgtgctgttcgattttcccactgcctttcaggtctgcctagccctgaacgaaaggagaactaagaaatgaaggagaagtgaagaagaaacaggagggcaactggaagtggcgagtcaccaacattagaaacgttaaagagagaaacgagaagcaagcctggaagctgagcggaggccatagtgatagagcaggcagagtggcagagtccagtcaaggctaaggaggagggaaggacaggagagttaaggcccaggtttcaca

SEQ ID NO: 6049 - DNA, 586 bp, Homo sapiens
  MAP TO AL049740.2; EXPRESSED IN PLACENTA, SIGNAL = 2.7; EXPRESSED IN ADULT LIVER, SIGNAL = 2.7; EXPRESSED IN HEART, SIGNAL = 2.1; NT HIT: AJ276492.1, EVALUE 1.40e-01; EST_HUMAN HIT: AV725230.1, EVALUE 7.00e-20; SWISSPROT HIT: P10266, EVALUE 6.00e-34
acagccacagaaacctttgctttcaccatccttcagacaaaattgtgcagttttataaagtctattctttcattcttcctgtgattactcatcacaagcctattccaggtggacaaacctattttactgatggctcttccaaaggtggtacagctgtttatggacccaagcatactcaaacaataatgacctctggggtttcagctcaatactcagagttgattgcagtcatacaggttttacagctcacagcttcagatgctatcaacattgtctgtgattcagcttatgttgtaaatgtagccagttgcatagaaactgctacaattaaaagtaccctagaaccagaactgcttaattttttcctaagacttcaacaaactattcggtcttgtgcagctccttttcatttttctcttatttgctctcacacacaacttcctggagccctatctctaggtaatgatagagcaaataaattgattggttctgtgtttcagcaagctcaaacctctcatgtattactgcatcaaaacacttctgcccttacttgtacgtttagcttgcctcacagccaagctaggtc

SEQ ID NO: 6050 - DNA, 592 bp, Homo sapiens
  MAP TO AF048727.1; EXPRESSED IN ADULT LIVER, SIGNAL = 0.78; EXPRESSED IN BRAIN, SIGNAL = 1.1; EXPRESSED IN FETAL LIVER, SIGNAL = 0.72; SWISSPROT HIT: P23246, EVALUE 4.40e-02; NT HIT: AF048727.1, EVALUE 0.00e+00; EST_HUMAN HIT: BI036012.1, EVALUE 8.30e-01
gtttggtgcaatggactgtgcgcccccaaaatccacaggccaaacccctaacacacagcgtgatggtgcctggaggtggggcctctgggaggtgttagggttggatgaggtttgagggcgggtggagtccctgtaatgggattcgtgtccttctaagacaaggaagagaccagagtgcagcttccactccccaccctcgctccccatataggggcacagagagaaagtggcatctgcaggccaggaggagggccctccccaggaacccgccatgctggctcgagatcgcatgccttccggcctccagaacggtgagaagcacatgtctgctgctggggccagcctgtctgtggtgtctgttgtgacagcccggggtgactgagcctggaggaagcatgatgtctccaaacagagaggcggggcccacatgaggaggcctgaggaggcctggcctgggtcccaggagcctagcatagcaggtgcagccagatcagggaagagcagatctgggtaaggcctgaccgtggagtcgggcggggagccagggtcccccatcctctgggcaaagccccccatcagtacagagcagcca

SEQ ID NO: 6051 - DNA, 532 bp, Homo sapiens
  MAP TO AC068323.6; EXPRESSED IN BONE MARROW, SIGNAL = 0.47; EXPRESSED IN PLACENTA, SIGNAL = 0.58; EXPRESSED IN ADULT LIVER, SIGNAL = 0.63; EST_HUMAN HIT: AU121795.1, EVALUE 1.20e-02; SWISSPROT HIT: Q01728, EVALUE 8.00e-05; NT HIT: gi14729797, EVALUE 1.00e-113
tcagcctgaaatttggttattatccatgtttctaatatctattctatcaagtttatcagtattacatgaatattttggattaaaattttcgttatgaaatgttgtgattcttccaaacctttaatatcaattaatgtaatgagtagtctactatgtatatatcttaaatttgttgtagttgacttattttgtatatgcttcttatggtagttcaggtgaactgatatttgaacctggtgagagagaagctacaatagcagtaaatatccttgatgatacagttccagaaaaagaagaatccttcaaagttcaacttaaaaatcccaaaggaggagcagagattggcattaatgattctgtaacaataaccattctgtctaatgatgatgcctatggaattgttgcatttgctcaggtaatgatactgaagaccccacacttgcaatgcaaaatgttttatttattgtatttgtgtattagctattattagcactcagcaagtcatagtttgagtgtcatcagcctctctccc

SEQ ID NO: 6052 - DNA, 513 bp, Homo sapiens
  MAP TO AL078640.7; EXPRESSED IN BONE MARROW, SIGNAL = 5.4; EXPRESSED IN PLACENTA, SIGNAL = 3.8; EXPRESSED IN ADULT LIVER, SIGNAL = 4.6; EXPRESSED IN BRAIN, SIGNAL =   6; EXPRESSED IN FETAL LIVER, SIGNAL = 3.8; EST_HUMAN HIT: AA758668.1, EVALUE 1.00e-107; SWISSPROT HIT: Q9TV36, EVALUE 3.20e-01; NT HIT: AJ295844.1, EVALUE 7.60e+00
cgtgtgtttttctcacccagcagatcaccagtggtttaacagctgtgggcggaggagtatcaagcactcccatatcctcgggggaaatggaagctcatgctgcctctgcagagggtgaatggtcagcacagaagacagccacagatcaagaaaaactagttgtcaacaaggcccactcacttagaaacaatctaaataaaacccggaagatcagagcagattattttaacatttaatttgtgttttacccttaacaatatgtaaaatccatgaacaaaatttttgttctatactttgtgctatataaatttcttaatgcaactcattatccgaagactcagatgttgactctgggttttcaagcgtggtttttccaaataaacgttatgatggtagaaaccttttccactatttcagggcaggaacgtagttttatgcaatattgaatggcttcatcaggttccccaagggcctctcttggccctgatatcaccacacctgccttgtgtctgt

SEQ ID NO: 6053 - DNA, 525 bp, Homo sapiens
  MAP TO AC008509.5; EXPRESSED IN ADULT LIVER, SIGNAL = 0.97; EXPRESSED IN BRAIN, SIGNAL = 0.8; EXPRESSED IN PLACENTA, SIGNAL = 1.2; EST_HUMAN HIT: AW418806.1, EVALUE 1.00e-106; SWISSPROT HIT: Q05998, EVALUE 2.20e+00; NT HIT: gi14734568, EVALUE 1.00e-94
gggaagggacaattatgaagcagtataagtattttatgtcttttaaggtaataaaatatttccatagttgttatcacatacaattagatttattagtcattcctatcaaattctcaaatagtgaaatatttggctcccaaattgctgtgtaatggttttttaaaaaaattaataagcaaatatgaacaaactgtatttttttttctttctgatcatttggctctgttgtatctaactttgcatgctctgctttttttttttttttttttttttttttttttttttttgccccctttctcacttccaggaagagagccccctgagtgtgtctagcccagagggtactggtacctggctgcattataccagtggtgtgggtactgggcgtcgaagacgcagatcaggggaacaaatcacttcttcccctgtctcccccaaatcattggctttcacatccagtatttttggctcatggcaacaggtttttaaactttacttcattaaacatttttcctccctgcattc

SEQ ID NO: 6054 - DNA, 516 bp, Homo sapiens
  MAP TO AC007165.3; EXPRESSED IN BONE MARROW, SIGNAL = 0.85; EXPRESSED IN ADULT LIVER, SIGNAL = 0.58; EXPRESSED IN BRAIN, SIGNAL = 0.53; NT HIT: U33448.1, EVALUE 1.90e+00; EST_HUMAN HIT: AI693967.1, EVALUE 2.90e+00; SWISSPROT HIT: P38889, EVALUE 8.30e-02
tgctgagataagatgcacggtgaaatttcccctagatgtgacaaaggtggtactgtcactaattcctgctggaataattggccaaagagagctaacattcccaagtcatgggttctagacctaaccatagaaatcgaggtgctcccactgacagcaggagtaagaatgtcctggagggcttgcggaacgaggatactgggccaccctgtggctctaatcagcagagggatgctgatgatactggactgaggtccacctgcatcccccattctttcccctgatatctccgaactgctgctgtggtcactgttactgctgggtatggattcctgggagcaacatttgtccagaaaaactgctccagggaccagagaatggcttgtcttaaaattcattgcaggtggggtcagggctgtgctgatcttgtataaatgcctgggacacattaaaaggggacatgcgaggccaatgcaatgccctaaggagccacacccttccttgcagaagacggaagac

SEQ ID NO: 6055 - DNA, 528 bp, Homo sapiens
  MAP TO AC005853.1; EXPRESSED IN BONE MARROW, SIGNAL = 0.55; EXPRESSED IN PLACENTA, SIGNAL = 0.45; EXPRESSED IN ADULT LIVER, SIGNAL = 0.59; SWISSPROT HIT: Q90334, EVALUE 1.00e-06; NT HIT: gi7706770, EVALUE 8.00e-03; EST_HUMAN HIT: AW884187.1, EVALUE 2.00e-04
tgtgctggcttctgttcaagcttccctttgtaatcttcacattgacaatgtatggagatactgtatccctgtttacagagaaggaaactgaggctctgggaggttctttgaggtccagggtggctgccccacagtgatccttttctatagcagactccattgtgctcccaaaaatggttgccacatacccagacattcctctcttttctttgggcagaaaagcaagccagggtcctcattgtgatcgcctggagcctgtcttttctgttctccattcccaccctgatcatatttgggaagaggacactgtccaacggtgaagtgcagtgctgggccctgtggcctgacgactcctactggaccccatacatgaccatcgtggccttcctggtgtacttcatccctctgacaatcatcaggtaagaagccgtcaggacaggaccacacgggggggtggggcggggggggctttcctgtttctccagctgttgctctcctccccaacagacccatttttcctagtgccct

SEQ ID NO: 6056 - DNA, 558 bp, Homo sapiens
  MAP TO AC009533.9; EXPRESSED IN PLACENTA, SIGNAL = 0.82; EXPRESSED IN ADULT LIVER, SIGNAL = 0.84; EXPRESSED IN BRAIN, SIGNAL = 0.71; EST_HUMAN HIT: BF983100.1, EVALUE 0.00e+00; SWISSPROT HIT: P22516, EVALUE 6.00e-05; NT HIT: gi14765691, EVALUE 0.00e+00
tcacgcatcaggagagaatgggttaaggtgccatcaacctgaccacggtggggggcatcccccaaactacagtgtgatgaggacgcccctcatggcctagaccacagtgagagccaagagcggctttctggccctgcagggccctcaccttggctgcagggatggcaaggcggctcctgtaatagggacaggcccgggcctccttcccaagggccagcagctgctccatgtccttcacctctgccagggcctcatcccggagaaggcccatctgctcgtggttgtagaaggggcaggctgcctgcttctcctgcctcctcctctttggcttctcctcctcagctcctttcttcttctctgagggtggcacaggcacaaagagagaaaacagagaagacagcaactgtccacgggcccgagagggggttgtgtaatgttgagacccacttccacagggtggggtctataagaccctcccaagtactgcctactgtgtctcatcggaacactaaggttttacttttgttctccagaaagagcccgtaaaatcatctccaa

SEQ ID NO: 6057 - DNA, 520 bp, Homo sapiens
  MAP TO AC008282.2; EXPRESSED IN HEART, SIGNAL =   7; EXPRESSED IN ADULT LIVER, SIGNAL = 5.1; EXPRESSED IN FETAL LIVER, SIGNAL = 6.2; EXPRESSED IN BRAIN, SIGNAL =   4; EXPRESSED IN HELA, SIGNAL = 3.4; EXPRESSED IN BONE MARROW, SIGNAL = 3.5; EXPRESSED IN PLACENTA, SIGNAL =   7; SWISSPROT HIT: P20730, EVALUE 4.00e-10
ctgctgagcatcctgcatagacagtcccacacaggcatcccgggcagccctgcgtgggcatctcccagtaggcatcccgagcacccatgtgggcatccccctgtaggcaccccgagcaccatgtgtaggcagtcccgtggaggcatcccgaacacccgcagacatcccgcataggcatcccaggaatccccaggtaggcatccccgcataaacatcctgagcaccccatgtaggcatccccgcataaacatcctgagcaccccgtgtaggcatccccgcataaacatcctgagcaccccgtgtaggcatccccgcataaacatcctgagcaccccgtgtaggcatccccgcataaacatcctgagcaccccgtgtaggcatccctgcatgggcattctgagcaccccatggaggtagcccgagcaccgtgcgtaggcagccccgcatgggcatcccgagcacccagcgtgggcatcccgagcatctgcataggcagcccccacagccaagaactgtccag

SEQ ID NO: 6058 - DNA, 570 bp, Homo sapiens
  MAP TO AC008953.4; EXPRESSED IN ADULT LIVER, SIGNAL = 1.6; EXPRESSED IN BRAIN, SIGNAL = 2.1; EXPRESSED IN FETAL LIVER, SIGNAL = 1.3; EXPRESSED IN BONE MARROW, SIGNAL = 1.4; EXPRESSED IN PLACENTA, SIGNAL = 2.1; EST_HUMAN HIT: AI432158.1, EVALUE 7.00e-29; NT HIT: AF223391.1, EVALUE 1.00e-44; SWISSPROT HIT: O35831, EVALUE 5.50e+00
acacgaacacacacattggcctaggcctgcacagggtcagtgtcatcaatgccactgtcttccacctctgtatcctgtcccactggaaggtcttcagcagcaataacaagcatggagctgtcatctcccatgataacaatgccttcttctagaatacctcctgaaggacctggctgaggtggttttacagtggactttttaaaaaataagtagaagtacactaaaaataacaataatatagtaaatacatgaaccaataatagttatttactatcattatcaagtattatgtattgtgcataatcatatgtgctatatttttatataactggcagtgcaggtttatttacaccagggccaccgcagacatatgagtgagtaatgcattgcattacagcatcaagacgcaatagaagcttttcagctctctatcataatcttatgggaccaccatggtatatgtagtccatcgttgactgaaatgcatgagtgtagttaatggagggtgcacctcatattatgcaaagggataggacaagaaaattctatagagatggtccaaaagtggga

SEQ ID NO: 6059 - DNA, 553 bp, Homo sapiens
  MAP TO AC008527.4; EXPRESSED IN ADULT LIVER, SIGNAL =   1; EXPRESSED IN FETAL LIVER, SIGNAL = 0.56; EST_HUMAN HIT: AV704687.1, EVALUE 7.00e-63; NT HIT: AJ271735.1, EVALUE 7.00e-59; SWISSPROT HIT: P11260, EVALUE 1.00e-08
ctggattccaatgtttctgatgagaaatctgatgataatcttatagaggattccttctatgtgacaagtcacatctcttttgctgctttcaagtttttctctttgcctttgcttttgaaagtttgattgaaatgtgttgtggtgtagacccctgagttcttcttacttagagtttgctgggctttttggatgtttgtattcatgcatttcaccaaacttgggaggttttcattcattatttcatcaactattctctttgtccctttatccttgtcttctctgtgtgggactcccagagtatgtaagttggtatacttggtggtgtcccacagtattgggggaacccgcccccagtatttcaacgtaggttctttctgttttccgtaagtgtcggctggctgagaaataaagagaaagagtacaaagggaggaattttacagctgggactccaggggtgacatcacctatcgataggaccgtgatgcccacctgggccttaaactagcaagattttttattaagggtttcaaaaggggagggggtgtaagaata

SEQ ID NO: 6060 - DNA, 501 bp, Homo sapiens
  MAP TO AC009509.7; EXPRESSED IN LUNG, SIGNAL = 1.6; EXPRESSED IN BONE MARROW, SIGNAL =   1; EXPRESSED IN PLACENTA, SIGNAL = 0.61; EXPRESSED IN ADULT LIVER, SIGNAL = 0.97; SWISSPROT HIT: O60931, EVALUE 4.60e+00; NT HIT: gi14739475, EVALUE 7.40e+00
cctctccctctctctcccacaccctagggcatcttctctagttctttacaactgtttactggcctctgcctaaggctcctcacttagggcttcatccttggaagtttcttcttatttttgcccaagcatatcatgaatacttaccatccttccgaagacagcagctcctactgcacttctggccagtgctttcagaataatacttcaagaactgggctcccagcttctgagactcctccagattgattagaagacctgggaagcgacggatccagcagtctctgtaaaaaattgtgggtgagcagagagagtctgatgtccaccccatgcttaggagcaatatcacgttcactgctacctctgccacatgcatttttcctgtatgaaggaagactcgaagataagtctgatttccagacagaagctgaacactggagtttaggacagtctctggaacgtcagaggtgttgttaagggagagcttccttgcagcttttctgg

SEQ ID NO: 6061 - DNA, 504 bp, Homo sapiens
  MAP TO AC008413.5; EXPRESSED IN HEART, SIGNAL =   5; EXPRESSED IN ADULT LIVER, SIGNAL = 2.8; EXPRESSED IN FETAL LIVER, SIGNAL = 2.3; EXPRESSED IN PLACENTA, SIGNAL = 2.8; SWISSPROT HIT: P47068, EVALUE 1.10e-01; NT HIT: gi15321314, EVALUE 4.00e-66; EST_HUMAN HIT: BE048201.1, EVALUE 8.00e-50
acactacctgtgaggctccggttcctccctccaccttcctcccctttcccttccagcccctcttttccaggaaccttgccacacccgcacctgcaccctgtccccgctggccctcccacagctgctgcagcaggcacagcacgcccttgctctgcgcttgcctcaccagctctctgcttgcttttctcactcgtgttttctctctgctttctctccaactgccagccgatcgggtcaggcaagtccatcctgtcctgagagccccaggcaccccttgacctctaaacagatccctcctccctttccaagcctgcctgggcaggtgtcctgtgacttgacagtggctcccccagtcccaaagccagcccccttcatctgtgacttagtctgttgtagtggtaagctgacacatccaggggtgaccgttgctgaaaacttgtgccccttctgtgtgtattgcttgttacctgaattccaaagtagcctgggatcaagggttgaatc

SEQ ID NO: 6062 - DNA, 584 bp, Homo sapiens
  MAP TO AC010345.4; EXPRESSED IN HEART, SIGNAL = 1.2; EXPRESSED IN ADULT LIVER, SIGNAL = 1.7; EXPRESSED IN LUNG, SIGNAL = 0.82; EXPRESSED IN FETAL LIVER, SIGNAL = 1.2; EXPRESSED IN PLACENTA, SIGNAL = 0.97; SWISSPROT HIT: Q01844, EVALUE 5.00e-01; NT HIT: AJ277546.2, EVALUE 1.00e-04; EST_HUMAN HIT: AW000950.1, EVALUE 1.00e-05
ggtcaggatctccttcctcctacctcctaaccccaaggcctgagcaccaagacgccactgccctgtctcagcaccgcaggcccaggacttgagcgggagcccgtggaaggctttttgcttggaggaaacatctcaaagtcctggactaaaggctctggacatctagagcagtgttctctgactgtcgcgtgcatgggagccaccggggagcttgtggtgcaggttccgcttcaggaggtctgggttaaagtccaagatgctgcatttctaacatgccccaggccatgctgatgctgctggttctgggactacaggttgagaaaggagggtctagggcaggtctcagagcgaggaccacccatcagcagcagccgcaccccctgggaacttgtaagaaatgcaaattttggggcctgaccccagatgtgctgaaactgcaactcaagggtgagggtctgcggtctgtgtttcagcaagctctccaggcgattctgatgtctgcgagcacttgagaaccgctctgctggacaacgaagcccatcatcacttctcctaccacccgacctgcgtgtctgagagcactc

SEQ ID NO: 6063 - DNA, 504 bp, Homo sapiens
  MAP TO AL109910.27; EXPRESSED IN ADULT LIVER, SIGNAL =   4; EXPRESSED IN LUNG, SIGNAL = 3.5; EXPRESSED IN BONE MARROW, SIGNAL = 2.9; EXPRESSED IN BRAIN, SIGNAL = 3.2; EST_HUMAN HIT: BE617434.1, EVALUE 4.50e-02; SWISSPROT HIT: P46804, EVALUE 8.10e-02
aatcccgtttgtcagtgagggaaggtggaaactgtggaatggatttttctggaccaaaaggtaggtgattccccccttccgtgctgcccagccacagcccagagagacagaaaggtggagactcacggcagggccgcacgcagggctgtgttgtccgcttcctgggacggtaccctgcgtccagcacactcacggccagggccgcacgcaggcctgtgttgtccgcttcctgggacggtcccctgcgtccagcacactcacggccagggccgcacgcaggcctgtgttgtccgcttcctgggacggtcccctgcgtccagcacactcacggccagggccgcacgcaggcctgtgttgtccgcttcctgggacggtcccctgcgtccagcacactcacggccagggccgcacgcaggcctgtgttgtccgcttcctgggacggtcccctgcgtccagcacactcacggccagggccgcacacaggcctgtgttgtccgcttcctg

SEQ ID NO: 6064 - DNA, 521 bp, Homo sapiens
  MAP TO AC007570.23; EXPRESSED IN FETAL LIVER, SIGNAL = 0.57; EXPRESSED IN PLACENTA, SIGNAL = 0.53; EXPRESSED IN ADULT LIVER, SIGNAL = 0.73; EST_HUMAN HIT: BI015975.1, EVALUE 3.00e-80; NT HIT: AL163279.2, EVALUE 1.00e-20; SWISSPROT HIT: P32225, EVALUE 2.80e+00
ttacgtgttcgtggtgatgctggtgtaaacagaactactttgctgccagttgtataagtctagcacacacaattatgtacagtacataatagtcgataatagtaatgaacttgatagatatatcactggttaatgtatttactattaatggttattttagaatatactcctacctgcctttttttttttaagtgaaaactgtaaaacagcctcaggcaggtgcttctggaggtatcccagaagaagggattcttacgggagatgacagttccatgcgtgttactgtccctgaagaccttctagtgggacaggatgtggaggacagtgatactgataatcctgaccctgtgtaggctaggctaatgtgtgtgtattttgtagttttggataaaaaagtttaaaaagtaaaaaaagagaaaaaagcttatagaataaggatataaagaaagaaaatatttttgtacagctgtgcaatatgtgttttaagctatgttattacaaaagggtccaaaagttaaaaa

SEQ ID NO: 6065 - DNA, 509 bp, Homo sapiens
  MAP TO AC011387.4; EXPRESSED IN PLACENTA, SIGNAL = 1.6; EXPRESSED IN ADULT LIVER, SIGNAL = 1.3; EXPRESSED IN FETAL LIVER, SIGNAL = 1.1; EXPRESSED IN LUNG, SIGNAL = 1.6; EXPRESSED IN BRAIN, SIGNAL = 1.4; NT HIT: gi16160158, EVALUE 0.00e+00; EST_HUMAN HIT: BE618224.1, EVALUE 0.00e+00
gacggtcaaaaggagaatgctaacttttgaaaatgaaagccctggacattctgggtaggtgtttggcacccaaaatttcactgaagaagaatgctgtttcttaatatcaaaccaaagtgcaaagcaatataaattagaggccaagtcttctcttgacggtcgatttacttctgtaaaacagattctatgttccttttctatgaacaatttacatttgaaacattagattttttcactgatgagggaaggaaacgggcttctgttctacttgaagccggggaagctaaggtctccttctcaaaggagagccggaatcagaggtgagaaatgtcggtacttgaagagttaggctgctttgcatctacccagcgtctagaaccaattccagcttcataactcagctgtgaacgaactcccttaggcatttggtagccacgtagccagtagttcaagactagaaaaccctgaggaaagaaaaacagaagcaaagggagtgtgggtgaacattc

SEQ ID NO: 6066 - DNA, 588 bp, Homo sapiens
  MAP TO AC007788.1; EXPRESSED IN PLACENTA, SIGNAL = 0.83; EXPRESSED IN ADULT LIVER, SIGNAL = 1.1; EXPRESSED IN BRAIN, SIGNAL = 0.92; SWISSPROT HIT: P10267, EVALUE 4.00e-17; NT HIT: gi16191829, EVALUE 0.00e+00; EST_HUMAN HIT: AU140604.1, EVALUE 0.00e+00
aaaccttcctgattgcaacggagacccatctaactaatcccacttcttctgattacctttctttttctccttaaaaatccaaaaatctcaccatttatattagcaaaaaaatgacatccctttgttcttctcttcctccttcaccactaaatctcgcttacactaggttttatttaattattctcctccttatactttctctctcaccagtttcctttcacactgatttacctactacacaaaattattcttattgggcttatgtgccttttcctccacttattcgacctctcacctggaatgatgctcctgcagtaatctgcactaacgatagtgtgtggctgcctggagctgcagaagaacattgccttgctcaaccaggagaagaaggcacagcatttaatgttaccattcattataaatacccacctctgtgcctcggacatgcacctggttgtatccatctagaaattcaagtgtgggttgcttgtcttctggagaaatcagctacagaggaactggacatttggtctctggcctctccctttatcctttaaaacaaatgaaagggggagtaacgggagatac

SEQ ID NO: 6067 - DNA, 581 bp, Homo sapiens
  MAP TO AC012467.9; EXPRESSED IN ADULT LIVER, SIGNAL = 0.65; EST_HUMAN HIT: AW880701.1, EVALUE 3.00e-25; SWISSPROT HIT: Q19196, EVALUE 1.90e+00; NT HIT: AF202635.1, EVALUE 2.00e-13
acctcacactgatggggaagcactcgtctccagcaggttgtcttctctttgttcctctagtgtggttatctgttagctcttgaatttctccaagatccgtatcttgaaacccttcaccccccaccttttttgccacatctacaatctctttccttgattggctctgttgtaaatcctgtgaagtcatgcacatcatctggacagttttctcctgcaggaatttattgtttcaggcttgatggctttcatggcttgctctgtcacaatgatggcatcttcagtgatgtaattcttccagacttccatgttgttctctctgttggtgttctcgtccatagtgttgacaatcctttccataaagtactgtgtgtaatgagccttgaaggtccttatggcctcccaatctagaggccaaattatgatgtgtttgggggcaaggagaccactctgaggactttagtgttgaactcatggggctctgggtggctgggggcattgtccaatatcaaaagaactttaaaaggcagtcgcttcctgggaaggtacttctgacttcagggacaaagcatcagtggaaccaa

SEQ ID NO: 6068 - DNA, 545 bp, Homo sapiens
  MAP TO AC005569.1; EXPRESSED IN BONE MARROW, SIGNAL = 5.2; EXPRESSED IN PLACENTA, SIGNAL = 2.3; EXPRESSED IN ADULT LIVER, SIGNAL = 1.2; EXPRESSED IN FETAL LIVER, SIGNAL = 4.8; EST_HUMAN HIT: BG478169.1, EVALUE 1.00e-100; NT HIT: gi16171535, EVALUE 1.00e-100; SWISSPROT HIT: P06748, EVALUE 8.00e-27
tcttgcccttttgatcttggtgttgatgatggttctgagtcttttcattttgatttgacttgtgtgcatttttggctggagtatctcatatatatttcttcactggtacttttcttcagttttctcattatcaaaatcatcatcatcatcaaaatcatcatcatcatcattttcatcatcatcaaaatcgtcatgaccagcatcatcttcatcggcagcaagttttacttttttctgtggaaccatgctaccacctccaggggcagcctgcttcccagatatacttaagagtttcatatctttgtcttcgtcttctgactctgcatcttcctccacaggtacaaagtgctgtccattagcatgcactcgccctgaaccacacttcaaccgtaagagcactggtggtatgatttcaaagccccaagggaaaccattgctgtacagacattttcaaagctgccagtgttactttaattggactgccttctaattcactgcctctgcttccacaatgtacgattcatccttcacaccagcccctaaac

SEQ ID NO: 6069 - DNA, 519 bp, Homo sapiens
  MAP TO AC007883.3; EXPRESSED IN LUNG, SIGNAL = 0.85; EXPRESSED IN HELA, SIGNAL = 1.3; EXPRESSED IN BRAIN, SIGNAL = 1.2; EXPRESSED IN PLACENTA, SIGNAL = 1.7; EXPRESSED IN HEART, SIGNAL =   4; EXPRESSED IN ADULT LIVER, SIGNAL = 1.3; EST_HUMAN HIT: BE930569.1, EVALUE 1.00e-95; NT HIT: gi14724029, EVALUE 6.00e-96; SWISSPROT HIT: P16157, EVALUE 2.00e-06
gaaagtccctgagcctacccagtctgtagcaattctgcctcacaatatgaaagtgcaggaatagtaggagcaaaagacagcatgaaggacagattaggggtagatctgttcacccagcagattggtagggaagagaatatcaaagactttgcctagaggtgaagggtctagcccagatttattctttattagcttttgattaagagaccatgtttattttctgtttttaacacttactttgtatggcccatttgtgcagctgcatgaataggtaactgccaactgtcctcattacagtaaagatcaggatctgccccactggagagcaaaagctccacacattttgtgtgtccctcttgagcagcaatgaacaagggtgtagctttgtccaaggcttgacaattgacatttgcacctaagggtacaaaataaaacatttaacagataaccctaatacttaaaaaaatcaacacaaatttcaaaggaactaccataaaagggtttcgtagcacggtaagc

SEQ ID NO: 6070 - DNA, 567 bp, Homo sapiens
  MAP TO AL117191.4; EXPRESSED IN BONE MARROW, SIGNAL =  13; EXPRESSED IN ADULT LIVER, SIGNAL =  10; EXPRESSED IN HEART, SIGNAL =  10; EXPRESSED IN LUNG, SIGNAL = 7.4; EXPRESSED IN BRAIN, SIGNAL =  15; EXPRESSED IN FETAL LIVER, SIGNAL =  14; EXPRESSED IN PLACENTA, SIGNAL =  10; EST_HUMAN HIT: AI223374.1, EVALUE 9.00e-13; NT HIT: Y16736.1, EVALUE 2.00e-16
attactattggggttggggcaagggttgaaacactacctattggtaactatgctcactacctgggtgacaggatcattcatacacaaagtctcaatcacatgtaatttgccgtgtaacaaatctgcacatttatctcttgagcctaaaataaaagttgaggaaaaaacaaaaacaaaaataaaactaccaactgtgggccacgtctttatcatattaagtcactccatagtgattcctcttctgcctccctcttgtacatttaagaactcttgtggttacattgaccctaggcaatccaagataatctccctaaagtcagctgattagcaaccttaattgcatcttccattttaattaccctttgccaaataacaggcaacgtagtcacagcttctggcgattaccacaggacatctttgggggatcattattctgcctcgcatctttgggggaatcatctcttctataaccaagccactccccactcaactggaggaggcttttccacttgggctgcttctgtggcctccacattcttcttcatctgcctaatctctgctgactga

SEQ ID NO: 6071 - DNA, 567 bp, Homo sapiens
  MAP TO AL109617.2; EXPRESSED IN ADULT LIVER, SIGNAL = 1.1; EXPRESSED IN HELA, SIGNAL = 1.2; EXPRESSED IN FETAL LIVER, SIGNAL = 1.1; EXPRESSED IN BONE MARROW, SIGNAL = 1.2; SWISSPROT HIT: P70920, EVALUE 7.10e+00; NT HIT: gi14775268, EVALUE 2.10e+00
tgtagcagtaaaggtgggggctggagcaggctagagtagaagcaatagcaaaatcatcagaactatcaactactatttacattgatttgcaatttcctttcttcctcctaatcaaattaatagtttcttcagggctgggatggtgtctgatttgtccctatttcccccacccttagcaccacgtccagcactattgtaaatgcttaatgatattcggtgaactgaactgacctaggaagctaaaattacatttggcatcaaacgatctatcagaagttgtgtactgtcaacagaatcaaagctgtaacaatataaagcagccaatgcagaagaaataatcagaggagagctccatcacaatttgtgttagaatcaggggaccaagactcttacaggtaaagttggatttggagaccttaccagaatgtggccattagcagacccagaaatgtgggaaatggagagcatggaacgagagcaagatgaagtgcaaatggtgacatttgaagcagctgcagtgaaaagcaaaagaagttgtttatgaccaccagcaatgacacataaccg

SEQ ID NO: 6072 - DNA, 534 bp, Homo sapiens
  MAP TO AC008831.7; EXPRESSED IN FETAL LIVER, SIGNAL = 2.2; EXPRESSED IN PLACENTA, SIGNAL = 1.3; EXPRESSED IN ADULT LIVER, SIGNAL =   1; SWISSPROT HIT: O93803, EVALUE 5.00e+00; NT HIT: gi14729951, EVALUE 2.00e-65; EST_HUMAN HIT: BI032136.1, EVALUE 1.00e-103
ttccttaagaaaggccagtccattaacagtatgaactaaactttcactaaccttcagatagctggggaggaagaagggaaagaggaaaggagggttgaagtgaaaatgcagaaaagaaaggaaaacttgtccctttacccatgatctttaaaatcaaaatgaggttatgtaagtcggaatccccaaaaatatatgatgaaattaaatactcatggatatgcttgatgagatagagatttagatagaaagaggaaacctaatgagactacaatctcaatattgttgttattgttaaagaaaactttgtgattggtgtgccatgataacaacttaccctggggttgaaggccaacatctgaggatcattaggatctaccacagaaggatatggctcgaaaatcacaacttttctaggagattccaacgcagacctacacatggatactagtagatctaccaccttgaaatatacacataagatagttactacccttcaggttttatccagtgctttgccattgtttctccctctca

SEQ ID NO: 6073 - DNA, 600 bp, Homo sapiens
  MAP TO AC013248.5; EXPRESSED IN PLACENTA, SIGNAL =   9; EXPRESSED IN ADULT LIVER, SIGNAL =  15; EXPRESSED IN BRAIN, SIGNAL = 4.8; EST_HUMAN HIT: BG716748.1, EVALUE 0.00e+00; SWISSPROT HIT: P25232, EVALUE 2.00e-71; NT HIT: gi14771545, EVALUE 0.00e+00
tgaacatactgctttgtaactttgctgttaatattattcatcttttcaataatttttttttggtatataaactatttattaacaaacaaggcctacagacttatttcttcttggacacacctacggtgcggccacagcggccagtggtcttggtgtgctggcctcggacacgaaggccccagaagtgactcagccctctatgggcccgaatattcttcagtcgctccaggtcttcacggagctcgttgtccagaccgttggccaggacctggttatattttccatcctttacatccttctgtctgttcaaaaaccagtcggggatcttgtactggcgtggattctgcataatggtgaccacacgttccacctcatcctcaatgagctctcccgccctcttggtgaggtcaatgtctgctttcctcaataccacatgagcatatcttcggcccacacccttaatggcagtgatggcaaaggctattttccaccgcccatcgatgttggtgttgagtactcgcaaaatatgctggaacttttcagggatcactagagacatggcagcagcacaagcggcggcgtgtaggcctcctgtggaag

SEQ ID NO: 6074 - DNA, 538 bp, Homo sapiens
  MAP TO AL109764.2; EXPRESSED IN ADULT LIVER, SIGNAL =   5; EXPRESSED IN FETAL LIVER, SIGNAL = 5.8; EXPRESSED IN BONE MARROW, SIGNAL = 4.9; EXPRESSED IN PLACENTA, SIGNAL = 4.9; EST_HUMAN HIT: BG010294.1, EVALUE 1.00e-127; SWISSPROT HIT: O14400, EVALUE 2.20e+00; NT HIT: gi13507739, EVALUE 8.00e+00
taatccctaagcctgggaggtgcaccaaaagaattttgtaagccagtggtgccatcagtgtctaacggtgcctggaaaatctggtgtttgcaaataggacctacctggctggagcgggtcattaagaaggaggttctagattgcctgctaatagggcaactggaaaccagagaggcaaattgaacaaataagaagatgcaagtatcttcccctagtttaggaagccacttgatgtagcgatgcaagcttgaaaacactgattttgggttttttacatcagctcactcagctagctgcgcttcttcgtttctcaggtattgagaaagggtcaaactccagtgccttcaggcataaggctagcaaaacaattgtcatataataagaaacacttgtgttgcagctcagaaaatgataccctcaaatatgccgctttaaaactcaaactgagagcacctggaaagcagcaaatgcaggtaagggttttctctgatcttgccttatctgactcagggaagttcccccagaaaaatagcaacca

SEQ ID NO: 6075 - DNA, 521 bp, Homo sapiens
  MAP TO AL109797.18; EXPRESSED IN HELA, SIGNAL = 1.4; EXPRESSED IN BONE MARROW, SIGNAL = 1.6; EXPRESSED IN ADULT LIVER, SIGNAL = 1.2; EST_HUMAN HIT: AW838632.1, EVALUE 1.00e-119; SWISSPROT HIT: Q93008, EVALUE 1.00e-41; NT HIT: gi14764091, EVALUE 0.00e+00
tgttgcttaccaaatcctgcaggtgaggatttttttcttataattttgtagaaatcttaatcagaattaaggattctgttttaaaagaagagaatcatgagaacttggggttgtcattttaagttaactttgaagtattccaaatcctcttatctatatggttttattttcttttgcagggcaatggagatcttaaaagaaagtggacctgggcagtggaatggcttggagatgaacttgaaagaagaccatatactggcaatcctcagtacacttacaacaattggtctcccccagtgcaaagcaatgaaacgtccaatggttatttcttggagagatcacatagtgctaggatgacacttgcaaaagcttgtgaactctgtccagaggaggtaaaaaaagccaccagtgtgcagcagatagaaatggaagagagcaaagtaattctttattttataggccagtgtttatgtattaatgatattattaaaagattatgttgaagttttgggttttgaaaa

SEQ ID NO: 6076 - DNA, 536 bp, Homo sapiens
  MAP TO AC009001.6; EXPRESSED IN HEART, SIGNAL = 1.4; EXPRESSED IN HELA, SIGNAL = 1.2; EXPRESSED IN FETAL LIVER, SIGNAL = 3.6; EXPRESSED IN ADULT LIVER, SIGNAL = 2.8; EST_HUMAN HIT: BG685221.1, EVALUE 0.00e+00; SWISSPROT HIT: P13686, EVALUE 4.00e-61; NT HIT: X67123.1, EVALUE 0.00e+00
ctggctttggagtgttttcctggttagacagcaagatttgagggacagtctagacattctgaaggccacaggagaccctcaaacagcaggaggaccccagccatgtggacatcagctgggatggggacccccctcacccagctcccaccccacccacagggccctcacctgcagattgtgatcgtggccgcacaggtaggcagtgaccccgtatgtggccagcagtggccgtagctgcttgaccaggcagtgggtaggcccgtgctcggctatggaccacacggggtagtggccagccaccagcacgtagtcctccctggccgccgccagctgtttcttgagccaggacagctgtgtgcgggccagcttcacgtctcggggcctctcaggctgctggctgaggaagtcatctgagttgccacatagtgtcactgtgtccagcataaaaatggccacagacacattggtctgtgggatcttgaagtgcaggcggtagaaagggctggggaagttcctgtggaggggatagaggtcgt

SEQ ID NO: 6077 - DNA, 539 bp, Homo sapiens
  MAP TO AC010209.13; EXPRESSED IN ADULT LIVER, SIGNAL = 1.3; EXPRESSED IN HEART, SIGNAL = 1.2; EXPRESSED IN FETAL LIVER, SIGNAL = 1.5; SWISSPROT HIT: P26809, EVALUE 1.00e-50; NT HIT: AJ271736.1, EVALUE 0.00e+00; EST_HUMAN HIT: AL043643.1, EVALUE 5.00e-36
aagggctttgtcaaatctggtagtcctagggctggggccgacataagtttttcctttaacttacaaaaggcttgctgttgtagaggcccccattcacagggctcccagtcacccccctttgtaaccccgtacaaaggtttggctagcactgcaaagtttggaatccataatctgcaaaacctcacagctcctaggaattcccttacttgccttctggttttaggtgccggtaggctgcagatgacctgctttctttctgaccccaggctgtgctcccctttctgaatagtgaatcccaggtagcgtacctgctgtctgcagatctgagctttcttcttgtccaccaggtcccgaagcagggcatccatcccttttgcgcacccgactgccgtggagtgttccagcagaaggtcgtccacgtacaggagctagatgcatcctgggtctttagcatgaaacttttgcaggtctccagccagagcctccctgaagatagtaggagagttcttgaacccttggggaagtcgggtccaagtgta

SEQ ID NO: 6078 - DNA, 596 bp, Homo sapiens
  MAP TO AC016628.5; EXPRESSED IN HEART, SIGNAL = 2.8; EXPRESSED IN LUNG, SIGNAL = 1.4; EXPRESSED IN HELA, SIGNAL =   2; EXPRESSED IN BONE MARROW, SIGNAL = 2.6; EXPRESSED IN ADULT LIVER, SIGNAL = 2.6; SWISSPROT HIT: P10272, EVALUE 4.00e-11; EST_HUMAN HIT: AI570213.1, EVALUE 0.00e+00
cacctcccaaaaagctgaactcatcaccctcattcgagctctcactctagcagccagtcaacagatcaacatatatttaaattctcattatgcgttccacatagtgcattcacactcgtccatctggaaagaatggagtttcctaactgcaaaaaaacactcctgtcataaatgactctatcagcaagctccttcaagctgccagactcctgcagaaagctaccgtcattcattgcagggaccatcaaaccccagacaatcctattttggtgggaaatctagcagatagagaagccaaacaagtagccctacaacctgtacaaggccagtttctgtgcctgtcctcgttctctcctctttactctccagaagaaaaggaggactaccaagcccaaaaccttcaaaaacaaggaccatggtatgtcaaggaagggtgcttccttcttcctcactctcaaacaatctctatcctccaaagcctccacaactctttccatgtcaattacaaacctctcctgcaacttctccaccctatcctcacttgtcttcacctttccagccgtgtttgagagattacccagtcctgctctatctgc

SEQ ID NO: 6079 - DNA, 564 bp, Homo sapiens
  MAP TO AC008527.4; EXPRESSED IN ADULT LIVER, SIGNAL =   1; EXPRESSED IN BRAIN, SIGNAL = 1.1; SWISSPROT HIT: Q9UN74, EVALUE 4.10e+00
gtttctacccagatgccagcttctagttaactattcttttttttttttttaagctaccaaccatctggaggaaatctgattggggctagggtcatttttgtaccttttaaaatgcggtgtaggtaaaaggatttgtcaaacccatgaatgacccttctcagatctcagaggcacttcagattggcaagggactccttcatgaagaagctgactcaagcagaggtagcaacagaggcaaagaggagcatgctgaagctacaagatgggttgagaaatatagatctgcccaattataattcaaacaaaaacaagtgagaaactgtagtcggttgaggcactcttggccgagcatctgggcttggcatgcatgcatgcataattaggcttcaggcagctgcaggcttccacagtgcaacagggcaggcaggatatcataatacacagtaggttgcatatcaatgaaactctttttaaattcacatgaagcctaagataaaaagacatcagcaaaaattaaacagcattcaaaacggcagtgaattgtgatacaggccaccaggaaaa

SEQ ID NO: 6080 - DNA, 550 bp, Homo sapiens
  MAP TO AC013646.3; EXPRESSED IN PLACENTA, SIGNAL = 1.4; EXPRESSED IN ADULT LIVER, SIGNAL = 1.6; EXPRESSED IN BRAIN, SIGNAL = 1.7; EXPRESSED IN LUNG, SIGNAL = 1.5; EST_HUMAN HIT: BF922594.1, EVALUE 1.00e-61; NT HIT: AL163227.2, EVALUE 4.00e-51; SWISSPROT HIT: P13983, EVALUE 3.00e+00
tataccaaggcaacaaccccaggatacagaaagccttctgtccttgccataaggcagagggtttaattgagctgattaacacaagccacccacagatggcaaaactaaaagagcaactgtaccacacgcccactggggcttcaggagctgtaaacattcaccgctagatgctgccatggggtcggagcccacgtggcccatgagcccacgtggcccagtacctgccatctgcatgcttccctgagaggtttgaggagcaggacaccaaagaagggagccacacctccttctcacaccctgtgagggcgataaaagaacttttcctgtttcattgccatctgaaaccacctcaggctggacttcattgtccatatcactatcagcattttggtcaaagccattcaacaagtctctaggaagttccaaactttcccacatctgtcttctgagccctccaaacctctaggaagttccaagcttttccacattttcctttcttcttctgagccctctaaactactccaacttttgcctgttaccctgttccaaa

SEQ ID NO: 6081 - DNA, 548 bp, Homo sapiens
  MAP TO AC008959.4; EXPRESSED IN PLACENTA, SIGNAL = 0.86; EXPRESSED IN HEART, SIGNAL = 0.98; EXPRESSED IN ADULT LIVER, SIGNAL = 1.1; EST_HUMAN HIT: BI915502.1, EVALUE 4.90e-02; NT HIT: U33058.1, EVALUE 2.10e+00; SWISSPROT HIT: Q02384, EVALUE 4.00e+00
tctatgagcccctgaacaccggctcactgtgtgtctgagagcagtcaccttggctgccctgggactccatggtgtttctcctgcttccctcagccccctttgggcaagtcttgtgcaagactagagagtagcaagcactctctagagctaacgcctgccccatatctgtgccgagagtagtcatttactctccttttgctgtgaaagccacccttgttgattcctctctatcaaaccggctgccctgaacgtactgcaaagttctaccacgaaaagtggaaactgcagcaccaataggcttgctcttcaaattaccagctcggtgcttatgatgaaattgaagatctgtttctctacctataaaataagagttgtattaaataaatttttgaagtgcttttctactttaaaattgtatgcttctagatggctagtaatttttgtacttgtagcacgttagagttatggaactctccaacagcagctgttttggctcatatgatttcccaatctgtctgtgggctccctgcttgggaggtgtcctctct

SEQ ID NO: 6082 - DNA, 513 bp, Homo sapiens
  MAP TO AC008971.5; EXPRESSED IN PLACENTA, SIGNAL = 0.84; EXPRESSED IN ADULT LIVER, SIGNAL = 0.85; EST_HUMAN HIT: AW629511.1, EVALUE 0.00e+00; NT HIT: gi13569927, EVALUE 0.00e+00; SWISSPROT HIT: Q9UKP4, EVALUE 9.00e-08
ctgtctgcctcctctgaaccctcagtgcccttactctttgtatctctcaagtcgatctcttttatttattaaatactttctcgccaaccactttggaggccaggatcatcacatcacaggggttcaactcccatatgtcagtgcatctgtgaacctgttggtagtaggtctaccagctgagactctaggggccagggcagaggaaggagatgccagagcccacactcaccagtccatggcaggcactgagggctgccgtcccaactctggtgccctgctgtagaaccgtgccactgagatggcagaggggggcagaggaagccatcatcttaacatgggagaggttcccatatctcttctccatgatgtagctattggaaagaaatccttgattgaccgtcaagttaaaaaacaggtccttctcctcgtgagaaattctgtagtacacccagtcctctgagccatccaaatctctcttcctcctgctgctcgtgatgggatagtgcaagccat

SEQ ID NO: 6083 - DNA, 563 bp, Homo sapiens
  MAP TO AC010163.7; EXPRESSED IN BRAIN, SIGNAL = 3.4; EXPRESSED IN PLACENTA, SIGNAL = 3.4; EXPRESSED IN HEART, SIGNAL =   2; EXPRESSED IN ADULT LIVER, SIGNAL = 3.5; SWISSPROT HIT: Q13469, EVALUE 8.10e-01; EST_HUMAN HIT: BE819380.1, EVALUE 2.00e-01
accacaatacagctcccaggacttttttgccacattaggctgtgccctggcccagacttatcactaggggtctctacgtgctacacgcgagccatccttcttgaaagcgtagctatttgggtcctgaaacatcttcacttttttctctgctagtttcatagcttgcacaacattttccagggagccatctgacataaatccataggttccaggtttgtttaccgcgagcggttttaggcagatagggcacgtctcgctaaaagcattccatagataagagagcttctgctggccaacatcattagagtgtttgccagaggctctgtccctggaaggattatgaggggatttgatggggtcatctttctgtcttgcctggggtgtctctcctacaggtagagaatgaactgcaggcatacagctgaccctctctttccccgtcctgctctgcccacctccaacatgctggtgcttcccagagctctgaccttggtctcttctcttcttactctacatgtgtaatatggagcacctcctcctcctcctcagcagcttcctttctc

SEQ ID NO: 6084 - DNA, 563 bp, Homo sapiens
  MAP TO AC018359.7; EXPRESSED IN LUNG, SIGNAL = 0.67; EXPRESSED IN PLACENTA, SIGNAL = 1.7; EXPRESSED IN ADULT LIVER, SIGNAL = 1.2; EST_HUMAN HIT: BG329230.1, EVALUE 5.10e-02
tttccaccaatagcagaccctgagtaagaactcgtgtccaacattgactcaggaggtgatccaaggaggaggagtgagaacaggagagaatgaaggaaggaggaaaagacaataagtcatgttccttagtccactgctgtgggaagttgggctcaatttcattgtaagcatttgatttctaaagtcactcctgacactaactatcttaatttgggtactcctgaaaagcagtcagtgacaaggatttgtgggcagatatttattcctggatgcaggagtaaaggagctgagagactgagggagaaagaaagcttcagtagaaagttacactcttgatcacttactgagagtagtgggcaagatcctctactgcagactttgaggaacatatagtttgcctcacagaattttccaccagagagctgaccagaagttttaaatcatcagctcccatcccattacacatttgttgagggctgtcctgggtcattcactctctgcacttccagacttaaactaatgtacatgtacttaaactaatgagctcctgacagtgtccaaca

SEQ ID NO: 6085 - DNA, 581 bp, Homo sapiens
  MAP TO AC022153.3; EXPRESSED IN ADULT LIVER, SIGNAL = 0.47; EXPRESSED IN HEART, SIGNAL = 0.93; SWISSPROT HIT: P34624, EVALUE 5.00e-14; EST_HUMAN HIT: BI754970.1, EVALUE 1.00e-86; NT HIT: gi15304226, EVALUE 6.00e-04
cacagatgttggctttggtggttgacagaaaaccccccttagtgactttatcgccttacttccaggttctgtgccctttctttgttgagaagataaactggaaaatgcaagctattgtcctttgccaaggatcgaagatcaaaatagtacttggcataaacacttccagaaacttcgacgttatagtcaattagctgcaaaaactgtctttcaagctcattcctgtgggaggagaaacacaagaaaaccaacatgggacaatgttagtccactgggctatcttcaaaaacattattctgatgtaagaaatgtgataaagcaattataagttctagttctttaagaacacatgaaaaagcacacactagagagaaaccctattatgtaataaatatgggaaagcctggaattttctcagttctctttgaaaacttagaaaaactcatactgggggaaaagcataaatgtaaaacatgtgataataaacttgattttcccacttgcttttaaagacattttaggatttaaaatggagaaaaaccacaaaattttaagaaacatggtaaagccttcggtttttg

SEQ ID NO: 6086 - DNA, 582 bp, Homo sapiens
  MAP TO AC020951.4; EXPRESSED IN ADULT LIVER, SIGNAL = 4.8; EXPRESSED IN PLACENTA, SIGNAL = 3.3; EXPRESSED IN BRAIN, SIGNAL =   5; EXPRESSED IN LUNG, SIGNAL = 2.1; EXPRESSED IN BONE MARROW, SIGNAL = 3.8; NT HIT: AF042861.1, EVALUE 8.70e+00; SWISSPROT HIT: P10266, EVALUE 2.00e-36; EST_HUMAN HIT: AV725230.1, EVALUE 1.00e-104
gcaaatgatgaccgacaatgtcaccgcacatgagcagctgtctcgcctgtttggcatgtagaatgcagcatatgagattaagtgtctatagttacatgaacatagctaagcttgccaaaggctgctatatgtgtaacatccatctgccaaatttcatttggagccaagccttgtggattgcatccttccacaggtataacaccagggacatgctgacaagtgggacaggcttgcgccatagttcgagcctggctgtgaggcaggtgaaacatacgagtaagggcgaggtgttttgaggcagtattgcctgagaagtttgagcttgttgaaatacagaacaaaccagtttatctgctctatcattacctagagatagtggtccagggagttgtatgtgagagcaaatatgagaaatatgtaaaggagcagcatgagagcgaacagcttgttgaagtcttagaaacaagctaagcagttctggctctagtgtgcttttaattgtagcagtttctatgcgactggctacatttacgacataggctgaatcacagacaatgttaatgggagttgaagctgtgagct

SEQ ID NO: 6087 - DNA, 521 bp, Homo sapiens
  MAP TO AC009320.7; EXPRESSED IN BRAIN, SIGNAL = 0.8; EXPRESSED IN PLACENTA, SIGNAL = 0.92; EXPRESSED IN HEART, SIGNAL = 0.98; EXPRESSED IN ADULT LIVER, SIGNAL = 0.77; EXPRESSED IN FETAL LIVER, SIGNAL = 0.78; EST_HUMAN HIT: BG773159.1, EVALUE 1.00e-76; NT HIT: gi14764139, EVALUE 4.00e-26; SWISSPROT HIT: O67178, EVALUE 4.90e-02
ccgtattggagcagaggttcaaaccatggaccgtcttccctaaatctaagcctagacatttggaaatgtacctattagaagagaaatgtcatttagattttctccaaactcagcgccctgcaggtggcacacaaagctgagatattgtcacctttgggagcactgtattacaacactggccgatacgaagaggctttgcagatttaccaggaagctgcagcacttcagccttctcagagggagctccgcttggcactggtgagtaggatgaaagaaaatgaagctggcaacctaagcacaggcagccatagagagagctgtagtcctcacgcctcaaaactggagctggaatgccgtaatatatccactgtatgaatattcatacagctaatgttagagccattctctaaagacatggacaccaaaaatactgcatttttgttttgaaataacttcaaacttatgaaagtgttgcaagaatagtaaaaaatttacatataccctttcatccagctccaatg

SEQ ID NO: 6088 - DNA, 519 bp, Homo sapiens
  MAP TO AC004196.1; EXPRESSED IN BRAIN, SIGNAL = 2.9; EXPRESSED IN ADULT LIVER, SIGNAL = 2.8; EXPRESSED IN HEART, SIGNAL = 3.2; EST_HUMAN HIT: N40434.1, EVALUE 1.20e-02; SWISSPROT HIT: P29362, EVALUE 4.00e-08
ttctcagtggtccttgggtctgcagtgatggagtccttggtggtccctgggtctgcagtgacaaagttctcagtggtccctgggtctgcagtgacagaatccttggtggtccctgggtctgcagacacatagtccttggtggtcgctgggtctgcagtgacagagccctcggtggtccctgggtccacagtcacattgtcctcagtggtccctgggtctgcagtgacagagtcctcggtggtccctgggtctgcagtgatgtggtcctcagtggtccttccatctgcagttacatcattttctcttattcttgagtctttagggctggtctctgggtgcttagtggaaatgctttggcttagtcctactaaaaagtaatctcatttaatgtgaattgttgatggcctatcctcatctgctctgctcagtattttcataactatcctcacatccaaatgacacctctccccaggtaatgtggtgagatttattcgagttagggatcatttggcatttttg

SEQ ID NO: 6089 - DNA, 567 bp, Homo sapiens
  MAP TO AC004189.1; EXPRESSED IN ADULT LIVER, SIGNAL =   1; EST_HUMAN HIT: BF991563.1, EVALUE 1.00e-14; NT HIT: AF283519.1, EVALUE 3.50e-02; SWISSPROT HIT: P47953, EVALUE 4.20e-02
acatatcacacaggcccctccctcttacacctcccagaagggtgatgcagatgggctgcctcctatcggggagaatcccagcccttggggaaggcctcagggtatgcaccttcagtgtgttggtgtctaattccttggccgtcctttccagatcaatgaccaggcttctgagctgtgttactgccctggagatgtcaaggattctggccgcttctgctggcatgtgctccagctggcccagccactgctgagggagggcacccagctgttccctggtttggtgctggctctccggcccagcctccagcctgtggttcccgtggtctacctgaaactacaggaaaggggctccctaagactcagtgtcaggtggctccctcctggcccttcacagtctctgaatgtctgagcaggaatgctgattcctcagtcctcttgccctcatggtgttgcctctgtgtgtcacaggtatagcagaagcagctttgattctcataaaggcagggacacctcacctttccacctcactctctgaatatctacagatgccatgtgaccaagaggaat

SEQ ID NO: 6090 - DNA, 599 bp, Homo sapiens
  MAP TO AC008462.5; EXPRESSED IN BONE MARROW, SIGNAL = 5.8; EXPRESSED IN ADULT LIVER, SIGNAL =   6; EXPRESSED IN LUNG, SIGNAL = 8.4; EXPRESSED IN FETAL LIVER, SIGNAL =  13; EST_HUMAN HIT: BE420422.1, EVALUE 0.00e+00; NT HIT: AL163210.2, EVALUE 0.00e+00; SWISSPROT HIT: P52167, EVALUE 8.80e-01
tccagccatgactaaaaggggccaaggtacagcttgggctgttgcttcagagggaggaagcccccagccttggcagcttccacatgatattgagcctttaagtgcacagaagtcaagaattgaggtttgggaacctctgcctagatttcaaagggtgtatggaaactcctggatgtccaggcagaagtttgctgcagggatggggcccggatggagaacctctgctagggcagtgcagaagggaaatgtgggatcagagcccccacacagagtccctactggggcactgcctagtggagctgtgagaagagagccactatcctccagaccccagaatggtagatccactgacagcttgcaccgtgcacctggaaaagctgcagacactcaacaccagcccgtgaaagcagccaggagggggcctataccctgcaaagccacaggggcagagctgcccaaggcagtgggagcccacctcttgcatcagcatgacctagatatgagacctggagtcaaagaagatcatttggagctttaagatttgactgcctcactggattttggacttgcatgggccctgtagcccctttattttggcc

SEQ ID NO: 6091 - DNA, 515 bp, Homo sapiens
  MAP TO AC008620.5; EXPRESSED IN PLACENTA, SIGNAL = 0.61; EXPRESSED IN ADULT LIVER, SIGNAL = 0.55; EXPRESSED IN BRAIN, SIGNAL = 0.52; EST_HUMAN HIT: AL539244.1, EVALUE 1.20e-02; NT HIT: AF102535.1, EVALUE 2.00e-49; SWISSPROT HIT: O43869, EVALUE 2.00e-50
tattaacccgacatccctggagctaagagatggcagagccaggcactggatgccctgggttcagtgctggctgccgatcctgcagcggtccagccccttcctcagtgcccccatcacctccctgttcctcaagctgtaaatgagggggttgagcatgggagtaaggaccgtgtagaagatagaggccaccttgtcatggctgggggcccggtagtgcctaggcctcaggtagatgaacatggctgccccatagaagagggtgacagctgtcaggtgggaggagcaggtggccagggcctttttccaggcctgagcagagtgcatttgcagcacagtccctagaatgtgagcataggaggccacgatgatggagaatgggaagagaagcatgaagacacagcaagcaaatatcaccttctcaaacagggatgtgtctacacaggccagcttcaacaaggatagcatctcacagaagaaatggttcaccttcctcaagccacagtaggggaaattca

SEQ ID NO: 6092 - DNA, 578 bp, Homo sapiens
  MAP TO AC004201.1; EXPRESSED IN ADULT LIVER, SIGNAL = 1.6; EXPRESSED IN HEART, SIGNAL = 1.8; EXPRESSED IN FETAL LIVER, SIGNAL = 1.8; EXPRESSED IN BRAIN, SIGNAL = 1.4; SWISSPROT HIT: P14713, EVALUE 4.30e+00; NT HIT: U76597.1, EVALUE 1.00e-04; EST_HUMAN HIT: BF918436.1, EVALUE 1.30e-02
tagcacggaccctagaatggggtacttgattaataaatatttactaaattaaaaccatgccctaatttctcttttcccgcgaaagactgatgtcttggaaatcccactcaattttcgtggaccagctccacctcacctcctccaggaagccttccccaggcagggttcctggtactttctgttggaaaagtgtgcacactcccaaagccactacagccatctccctgcagcacttaccgcaagttgactgtgaagtcctcgagaacagaagcagcatctcactccttttcgtttcactctcccaccctccttgagcactacagggcctggttcctaaagggatgtaaatgaaggaagggttcaaagtaaatgaaagaatactttgtagcaaggtttaaatttggggaggtcttccaacctggaccttaaccttaaacgatgatcacactcttctcagccgtgagggatgggggtcgcctctttaggagcctctcagaagctcatttactcaaagagagtcctggccattcattcgatgttatggccgggaagtcaagtgaatactgaaccctggccaa

SEQ ID NO: 6093 - DNA, 599 bp, Homo sapiens
  MAP TO AC009533.9; EXPRESSED IN BONE MARROW, SIGNAL = 1.4; EXPRESSED IN PLACENTA, SIGNAL = 1.6; EXPRESSED IN ADULT LIVER, SIGNAL = 1.6; EXPRESSED IN FETAL LIVER, SIGNAL = 1.8; EXPRESSED IN BRAIN, SIGNAL = 1.3; SWISSPROT HIT: Q13635, EVALUE 2.30e-01; EST_HUMAN HIT: AA252449.1, EVALUE 1.00e-113; NT HIT: gi14765679, EVALUE 4.00e-79
tagtcagggactgggagcagtggggatgaggagccagaagcctgtcccgacccgatgagcacaagagctcccaggaggactcagtggcactgtcctcacaagtggcaaggctgccgacaggccactcaccttcttcctggcagccagacggcccagcaggccacccttctcccagtgggcatggacctggcgcaggtactcgtaggaggagaagaaacagaccacccctccagaaaccacaccgcacaggttacagaggatgcgacccacctcgtccatctaaggaaggaagggagggagggagcccccatggagcaacccctcagccacccacaaaccgcgtcttcaccttgagactcaaaactgaggagagacccttggcaggactacagccaaggaagaggacttggctcccctgggtgggaaccacggggtggtaggtgccacctcccaccaaacacacccagccgctgctgctgactgcgcctttctgacacatgtcacagcactagcgtccctggggggcctccctattgccctggcactgagtcctcccttcttctgtccagggtcctgatgggcaccacaatgacaatcag

SEQ ID NO: 6094 - DNA, 571 bp, Homo sapiens
  MAP TO AC008033.8; EXPRESSED IN ADULT LIVER, SIGNAL = 8.2; EXPRESSED IN FETAL LIVER, SIGNAL =  10; EXPRESSED IN BRAIN, SIGNAL = 7.7; EXPRESSED IN BONE MARROW, SIGNAL = 6.2; EXPRESSED IN PLACENTA, SIGNAL = 9.4; EST_HUMAN HIT: AL556355.1, EVALUE 0.00e+00; NT HIT: AL163207.2, EVALUE 1.00e-125; SWISSPROT HIT: Q14940, EVALUE 3.20e+00
ccaatttctcccatttggaacaactgtgtttacccaatacttttacccccattgtatctaggaagtaactagcttgtttttgactttacaagcttatagacagaagggactttccttgtctcagatgagactttgaactgtggacttttgggttaattctgaaatgagttaagactttggggaactgttgggaaggcatgattggttttgaaatgtgagggcatgagatttggaagggccaggggcggaacgatatggtttggctgtgtccccattcaaatttcaactgaattgtatcgcccagaattcccacatgttatgggagggacccagggggaggtaattgaatcatgggggccagtctttcccatgctattccgtgatattgaataagtctcacaagatctggtgggtttatcaggggtttctgcttttgcttcttcctcagtttctcttgctgccgccgtgtaagaaggaccttttgcctcccaccatgattctaagtcctccccagccacgtggaactgtaagtccaattatacctctttttcttcccagtcttgggtatgtc

SEQ ID NO: 6095 - DNA, 574 bp, Homo sapiens
  MAP TO AD000813.1; EXPRESSED IN LUNG, SIGNAL = 2.6; EXPRESSED IN PLACENTA, SIGNAL = 2.1; EXPRESSED IN ADULT LIVER, SIGNAL = 2.5; EST_HUMAN HIT: BI460486.1, EVALUE 4.00e-92; NT HIT: gi15297003, EVALUE 3.50e-02; SWISSPROT HIT: Q39190, EVALUE 4.00e-03
ttgacaaccctctagccctgcccagtacagagcccagcagcagtaacgaccccaccttccctagaatgggcataggcctgctgtgcgcatctgggatgtggaggagaagaatcaggtggcggagatgctaggccacaagtatggtgtggcgtgtgtggccttctcacccaatatgaagcacatcgtgtccatgggctaccaacatgacatggtgctcaacgtctgggactggaaggtaagagccgaccagcaggcctgtggcaggcagccagctgccacagcatcctatgtcttgggcacagggagagctacatgagaggacgcagtaaagtgctcactcacccaacagataacagctattgagcacctgtgacatgctgatcccttattgtagggcacaaggcaggctcccagctagaagcattatacatatttttatattgaccagctgtgaccttaggcaagtgacttaacatctctgtgagtctgtttcctcctctgttagatggatatagtagtacttatcttgttgagttgtgagactttaatgagttgataagcactggaaggctgg

SEQ ID NO: 6096 - DNA, 518 bp, Homo sapiens
  MAP TO AC007570.23; EXPRESSED IN ADULT LIVER, SIGNAL = 0.73; EXPRESSED IN BRAIN, SIGNAL = 0.58; EST_HUMAN HIT: AI985152.1, EVALUE 7.00e-38; NT HIT: AY057620.1, EVALUE 3.20e-02; SWISSPROT HIT: Q9WTI7, EVALUE 3.00e-09
ggacatcgcaaattctgaggagttcaatttcttgtgcagcatccttgggaagaagggctttgccagggcagccctttcaagccaaagggaggcagcacaaagacatgcaagagttaagcttcgtcagtgcccgtgctacttacaacactggaaatcccagattagtccttacattttccaagatgccaggaggcctcagccagctcttgtccaggacagtctttggaaggtgataccggagattcaagatgtaattcttccgcacaaacacgataaattcctcgttgtcaggacagaggggtttgttgcgactgatgaatcctttaatgaacctaaaaaggaaaatgttttcttacttttctggaccatttcttcaccgagatttacattctcttcccccttctttgattcagaggcggccaaagtggtagaggctgtggagatgaccacataggccagaggccaaatctgccccacatatatgttcgatttcacccacacggccttttgttttgttt

SEQ ID NO: 6097 - DNA, 544 bp, Homo sapiens
  MAP TO AF198095.1; EXPRESSED IN ADULT LIVER, SIGNAL = 0.76; EXPRESSED IN FETAL LIVER, SIGNAL = 0.8; EST_HUMAN HIT: AV761670.1, EVALUE 7.60e-01; NT HIT: AF108009.1, EVALUE 2.00e+00; SWISSPROT HIT: Q9D099, EVALUE 1.50e-01
tgctcctgatgtctgtccacataaaaataagtgtttaccatctagtatttctctctagctactgtctcttcccatattgcagatttacttgtgttaaatctgcttgagcaaaaacttccataaattatttttgaatgatcttctacagggcacatggtgttactaaagggatagactatgttcattccaaagtacctactaggtgtatcacttatattaacagtttatactcagttttattacttacagtaaatatgtcttcatggccaacctgaaatcgagccccatctgttccataaagatatatgggggctgaacttctatgttgtccatacagaataatataaatctgtgagctggtccctgcatctggcaagtcactggtgattataaaaactttccagttactacctataaaagaaaaaataacatacagcattatggcaactgatagaaatggaagactcagaacagcaggtcatcataaaactaggagagttcaggatagacaaaacttattcttcatctcctctgaaaaagtgcc

SEQ ID NO: 6098 - DNA, 556 bp, Homo sapiens
  MAP TO AL008724.1; EXPRESSED IN ADULT LIVER, SIGNAL = 1.1; EXPRESSED IN LUNG, SIGNAL = 1.2; EXPRESSED IN HELA, SIGNAL = 0.46; EXPRESSED IN FETAL LIVER, SIGNAL = 1.2; EXPRESSED IN PLACENTA, SIGNAL = 0.83; NT HIT: AB038958.1, EVALUE 3.40e-02; SWISSPROT HIT: Q9RSH4, EVALUE 5.30e+00
ccttagcagtaggactgcggctaaacaaaggcagttgttcaaataattatatgccccatgtgaagaggctaatcgttttagtcttgaagtgtcagtgattcacagtcttggacttttggctttgatgtgcattctcactgaaaatgtggagaagggtctggcttggcagctgacagcggcagctctggagccggctagcggtgttatatcgccctcttgtggcctctggagcagtgcgtgggtgcttgcagccagaagcaggaggatgatccaggccttcccctccacctgggcagcgcaggtgacgggtgccaaaccctcccgagatgacggggtcactgaggctgacctgccacaattcggcatggcccaccggcctcgggtgctggcctccatcaccaccattagcagtctgtgagtgaccagacatgagaacacaggcccctggcccagattttcacctgtcttccccaggtttaggacagtgtgtgcctggcacaagtcagtaaatatctgttgaatgaatggataaaactggggatggagaggactccta

SEQ ID NO: 6099 - DNA, 576 bp, Homo sapiens
  MAP TO AC007013.1; EXPRESSED IN ADULT LIVER, SIGNAL = 7.2; EXPRESSED IN BRAIN, SIGNAL = 7.4; EXPRESSED IN PLACENTA, SIGNAL = 8.4; NT HIT: AF111846.1, EVALUE 2.00e-03; SWISSPROT HIT: P32946, EVALUE 3.20e+00; EST_HUMAN HIT: F00771.1, EVALUE 3.00e-03
ttttgcttgggttggttctcaattcaattcagtctattcatttacttgtactggttggagggtttgataacaagatcagcagtcacaacaataaaaatgcctcctgaaactacaccatttttgactgatggctctttggaaaacccttctctcattccccatccaataagactcatcaatcaacccgagggttttacagaagtggcccacaaagaggcccccactcttgtgctgacctgctggttggtaagtccagagccacaacagccctctggccaccacgcacaggaaagctccccgaggatgaggacgatgtgatggaaagtaggttgggagacgaagagagcctctgaatccagctgttcctgaagccaaactatccctggactttccagctaagagagtcaatgcatccctctttatgtttaatctagcttggtgtccaccactgaaggattcctcattaagaaattggattttctttaataacaaaacagataagaggaggatttttgaaactaattgaggttgcctttaaaaaggaaagactgagacaggaggatcagttgaagccag

SEQ ID NO: 6100 - DNA, 594 bp, Homo sapiens
  MAP TO AC007788.1; EXPRESSED IN ADULT LIVER, SIGNAL =   1; EXPRESSED IN BRAIN, SIGNAL = 0.87; EXPRESSED IN HELA, SIGNAL = 0.91; NT HIT: L41825.1, EVALUE 1.00e-42; SWISSPROT HIT: P04022, EVALUE 7.70e-02; EST_HUMAN HIT: AA618338.1, EVALUE 2.00e-54
tcagataatggctccagcagcaaactacaatttacctataattctccaggccctcccccatccactacagcccctcaccctcctgtcattttggttcctcaaccagccactttgccatccactcaacctgcttgtctgtagccttcttcacacatggatgccagtcatcatcagtatacctctgcctcttttactccttcaatgtccctttctcacattctcaaactagtctgcatcagtatgtgggactcaatcttacctttttaaaagaatttaaggattcttgtactcagtatggtcctacttctcctaatgttaaaacagcattacaaactttgtgtggaggcaactttgcttcctttagactgggaccttttgacataagctcttctaaccccatctcagcctggcgggcagagaagggccatctccaggctcagctaaatcagactaatggcattctaattactcaggctcagctcacaggctctgatagtttctctgatacttatgcccaattaggctttgatgctcttaccagaaaacaagtaacaaaggtgtgtatgagagcttgcaatacattacgtgccccag

SEQ ID NO: 6101 - DNA, 501 bp, Homo sapiens
  MAP TO AC010499.4; EXPRESSED IN ADULT LIVER, SIGNAL = 0.59; EXPRESSED IN BONE MARROW, SIGNAL = 0.87; NT HIT: gi15920163, EVALUE 1.20e-01; SWISSPROT HIT: O84422, EVALUE 4.60e+00; EST_HUMAN HIT: AW297908.1, EVALUE 7.00e-01
ctgagcagtgtatccgaaacctctaaggattttcggaacagtgttctatagttatactccactgggacagttcacgaaataaaaaagccctgatacacctttattatagaagaaacctagctcttcaataacccttgcatttcagagtggattaattgatgctgatgtcttggaaaagcaggcactgaaaaactgtgctcaagcaatagaggaacatggaaccatgaataggggcagtaagcccaaggtcttaaaaatgatctccagggaaacctcaggaaatctgaatcatcaacttccactagtccatacggaagagactgagacacagaaaaagtaaatgaatatgccacatttccaaagcacacacctatgtattctactctaaacctcaatcttctcattatcttcttgtacctctcttaggaattccagatgactgttgccattgagtgcagttggtctttccgtactcttctccaccattcgtttgacaggttt

SEQ ID NO: 6102 - DNA, 599 bp, Homo sapiens
  MAP TO AF172277.1; EXPRESSED IN PLACENTA, SIGNAL = 0.73; EXPRESSED IN ADULT LIVER, SIGNAL = 1.1; EST_HUMAN HIT: BE045739.1, EVALUE 2.10e-01; NT HIT: AF111168.2, EVALUE 2.00e-06; SWISSPROT HIT: P22055, EVALUE 2.60e+00
acaaacctctttcacgtgccttataaaaattacccgtttaggatttcttaagatttaaaaactcaatgtactggaacctcactatgtaagatgtgcctaaacataataaaaatatcgtatctgattctacggacattaaagtggaatggaaaaactgtgggctatggagtaacacagacgtggctttgaattatggttcttctatctacagccataccaccctgagcgtgcctgatcgtgtctgaattatggttcttccacttaatagctgtgtctgcaaaatgggaggggaaacacttcacaggatttgggaggattaaataaagtaaggtacagaaagtacttagaagaatggctgatacatgttaatcattcaataaatacttccttttccacatcaaatctttttttcttttctcctattccttttcttccacctccttccttttttttccgctttcttcttcccctactcttacttgttcgcctttttatttttatttgttcattccagtgagtattgttctacataaaggaatcatttcactgaatctctatcatcattttcatttattgaggatgcacttaatttctgaaaa

SEQ ID NO: 6103 - DNA, 598 bp, Homo sapiens
  MAP TO AC006138.1; EXPRESSED IN ADULT LIVER, SIGNAL = 1.2; SWISSPROT HIT: P18480, EVALUE 1.70e-01; EST_HUMAN HIT: BI963988.1, EVALUE 0.00e+00; NT HIT: gi4506008, EVALUE 0.00e+00
cctgaggaaggcaaactgagagaatatttctattttgaattggatgaaactgaacgaggtaagaggtcatttcctacgtaataggtgtgtttaagggattttgaaaggacttggttgtgcttactttccctcttgcttttcttcccctgccgacagtaaatgtgaataagatcaaggactttggtgaggcggctaagcgagagatactgtcagaccgacatgcatttgagacagcgcggcgtctgagccatgataacatggaggagaaggtgccctgggtgtgcccccggcccctggttctgccctcacctcttgtcacccctggaagcaatagtcaggagcgatatatccaggctgagcgggagaagggaatccttcaggagctcttcctgaacaaggagaggtgagcagagtggggttcgtgccctgggatgttgagtgcttggacactcctgagggaacatgagctggggtaattacggggtggaggttagaaattactttcagggtctgaattaataacttgactatcattcttttttctctcacctgtgttgttcctgatagtcctcatgagcctgatcctgagccctacgag

SEQ ID NO: 6104 - DNA, 509 bp, Homo sapiens
  MAP TO AC025447.3; EXPRESSED IN ADULT LIVER, SIGNAL = 5.5; EXPRESSED IN BRAIN, SIGNAL = 5.4; EXPRESSED IN LUNG, SIGNAL = 2.8; NT HIT: AF091863.1, EVALUE 2.00e-74; SWISSPROT HIT: P72655, EVALUE 1.20e+00; EST_HUMAN HIT: BF381135.1, EVALUE 0.00e+00
ggacaaaaggcagagagcacagtgacaagattttgcattaattgcattaatttttctgcattaactttaatgcaaaatattgcaaataatttaacagcagcacataacacagcattttcatttttcataatggcattgcaagaagactgcatggactctccaccctgttgacaaacaccccaggcaatgaaagagagcgtgatagcctcttacttaccattcagaaggcaggtgttgagaaaaagtagcagagtgaaaacggttgcagatgccacattttccttcatgttggctgccttctcttgctgcaggaaatgtatcagaagttcactggaagagaaggtagcaggtaacttttgtgaaatggcagtctggtcaggcacatccaccactttattctgggtatttgcaactgattgttgctccttgcttaatgtgaatgacaaaataggaggaaaggaatgtaggaaaatgtaacagggttggatggcttggcacagaaacatcaa

SEQ ID NO: 6105 - DNA, 585 bp, Homo sapiens
  MAP TO AC004712.1; EXPRESSED IN HELA, SIGNAL = 0.52; EXPRESSED IN ADULT LIVER, SIGNAL = 0.48; NT HIT: AF181897.1, EVALUE 1.00e-51; SWISSPROT HIT: P54860, EVALUE 9.70e+00; EST_HUMAN HIT: H52869.1, EVALUE 0.00e+00
gccactctcccatctgtctccctcccatcgggcctccaaattccctgagacacaatattaaaattaggaaaattaataagcctaaaagggcctctaagtgttcaattaatacaaagagttgttcatctctcactttaagtcaaaggctagaaatgattaaacttagagaagaaggcatgtcaaaagccgagagaggccaaaagctaggcctcttatgcctaacagtcagaaatgcaaaagaaaaattattgaaggaaattaaaagtgaaacaaccttattgctgatacgcagacagttttaatgttctggatggaagatcaaaccagccacatttccttaagtcaaagcctaatccagaacaagatcctaactctcttcaattctatgaaggctgagagaggtgaggaagctgcagaagaaaagtttgaactagcaaaggttggttcatgaggtttaaggaaagaagccatctccgtaagataaaagtacaaggtacaacagcaatgctgatgtagacgctgcaagttatccagaagatctagctaacataactgaggtaggttgctgcactaaacaacagggca

SEQ ID NO: 6106 - DNA, 512 bp, Homo sapiens
  MAP TO AC006162.1; EXPRESSED IN ADULT LIVER, SIGNAL = 0.59; EXPRESSED IN HELA, SIGNAL = 0.66; NT HIT: AY051802.1, EVALUE 4.90e-01; SWISSPROT HIT: Q9NPA2, EVALUE 7.20e-01; EST_HUMAN HIT: BE535681.1, EVALUE 1.80e-01
acaggaagccacatcaaaccctggggcctttgctgggcctctccatctgcccagttactgggaggtagatagccccaggaaggaatccagtcaggcctgggcaccaggccaggagtggataaagctagaaagagacaccacagaagagaagatgtttgaacagctgaagccaatcgaacctgtacagaagacgctcccatgggtgggcgaggtagctgccaccctgcaggaagccatgaagagagattgctggagggaggcacgggtgaagaaggtgaggagactaagctagagagaggtggggtccaggtcctggactccaggagctctttcatacatactcctgcctgcaggtcaaatgaaatctcagattgttccagactgaacgacatccagaaaaaggagctgcaagacctttctccatctcccgcaccatcctggcatccttcatggagtacttcctgaaatttgttagagtggcagcattttttccttcgctttgctttcctgtt

SEQ ID NO: 6107 - DNA, 515 bp, Homo sapiens
  MAP TO AC020914.6; EXPRESSED IN ADULT LIVER, SIGNAL = 0.57; EST_HUMAN HIT: AA632445.1, EVALUE 7.00e-04; NT HIT: AB051448.1, EVALUE 2.00e-03
taaggctgtcctgtgcattgtgggacatttagccgcataactggcctttttccattagatgctagtggtaacaaccaccaccaccccagttcagaaaaccaaaaatgtctctagacactatgaagatcacatgggaggcaactttgcctggttgagagtcagtggagtagatgttagaaagtgcagtgatgcttgggaggatgatgacgttaatgatggagataatggtaccaatggtgatggtggtgattatagtgggaatggcaatgatgatgtagattaatagtggaaatggcattattgtgatggtgatgatggtgatgatagtaatagtggtggtggtgatagtggtgatgatgatgatgacaaagatgatggtagtgttgctagtgatggtgacattggtagtgatgatgacaatggtgatgatgatggccataatggtgacaatagtattatggtgatgatgttggtgatggtggtgctaatgatgacggtagcaaatgcagtgctga

SEQ ID NO: 6108 - DNA, 545 bp, Homo sapiens
  MAP TO AC040171.3; EXPRESSED IN PLACENTA, SIGNAL =   1; EXPRESSED IN ADULT LIVER, SIGNAL = 1.1; NT HIT: M25704.1, EVALUE 2.00e+00; SWISSPROT HIT: O74377, EVALUE 6.70e+00
taattcagtggatggcccacagtagttactcggtaaacattacatcaaaacactgaaaaatcttgagctaggtgattttaaaggtctggccgttttttgatatgtatgtttctacttgtaccatttatcaggtaaattcatgaaatttgtaccagatcttttttacattttcatttatgttttgttttagaaataaagcacatttttcaaaactgcaaattgatgaaagtgtatgttaatgatgtccatgtttaatgtttcaaagaattttcacattatgacatttcctcttcaaagcaatcctatccttatgaacgatactattgccatttttttcagatgatggaatgggttcattatagggccttaggaaaattcctaaattattctgtgtttcagtgatttctctgtcccccattttactctcccattctgatttctgactgagcacaatgttcaaatgccttttctgcataaaatatacaaaaagatactgttggcagaaaaaaaaatttctgtctaaaacgtgtgccaaatatgaacaa

SEQ ID NO: 6109 - DNA, 564 bp, Homo sapiens
  MAP TO AC026693.3; EXPRESSED IN PLACENTA, SIGNAL = 0.99; EXPRESSED IN ADULT LIVER, SIGNAL = 0.92; EST_HUMAN HIT: R20625.1, EVALUE 7.90e-01; SWISSPROT HIT: P25661, EVALUE 4.10e+00; NT HIT: D90701.1, EVALUE 1.40e-01
gattcctggctggttctcagagcttgttgacgatgagccccatgctggtgcttccaaagataaggaatgtgaccaggcaaagttgcctggaatattgtctatgcgcgtcgctgaaaaattggatctgggtgaagatccaatagtaagattaattcagtctctttccctgacataggataaaacattgtgtggctctttcccacagcagggagaatgcccaatgtttcctcttgaagatcttcctccaacttggcctcgggagtggtcctcgctggaaatcaaggcgagtcgtccttagttgcagagccatggctgagcccgctggccagagttaaggttaaggcaccttttcaattacaaacctctgattatcttcggtagtctctatcttcagtgcctgcctgcaatttgcctttctgccacttccagcagaacacagctctattactaaagtgttttaaaaacatgttgtatcaatattcacagaaattagagtcctatgaggcactagaatccaaattcaacttttgtcttcctttaattagcattttcctgcagtgtcaa

SEQ ID NO: 6110 - DNA, 506 bp, Homo sapiens
  MAP TO AL117187.3; EXPRESSED IN BONE MARROW, SIGNAL = 2.6; EXPRESSED IN ADULT LIVER, SIGNAL = 2.1; EXPRESSED IN HEART, SIGNAL = 2.1; EXPRESSED IN PLACENTA, SIGNAL = 2.5; EXPRESSED IN LUNG, SIGNAL = 1.3; EXPRESSED IN BRAIN, SIGNAL = 3.1; SWISSPROT HIT: Q15149, EVALUE 5.00e-08; NT HIT: gi14748155, EVALUE 1.00e-105; EST_HUMAN HIT: BE250329.1, EVALUE 1.00e-104
aacccagggtcctattttgcctctttgttcagtgtataccctcctattccatttggctggaaatggaaatgtgagtggttcagggcagctctcccatgctcagggatgaaggcgtcttcacctggcgaggtcggcagctctgccccactcaaaaactcacgcggctgctgcatgctgaccttgcacctttgagtctgtttactaaccagcatcctggccgccgctgctgtttttccttcaggtatggcgtggcggtgcaggactttgcgggcagttggaggagtgggctggctttcctggcggtgatcaaggccattgaccccagcctggtggacatgaaacaggccctggaaaattccacacgagaaaatctagagaaggctttcagcatcgcacaggatgccctgcacatccccaggctcctggagccagaaggtagcagtggttctctctttctttctaataatttttttttacaaatgtaccacttgctgtcccatgtggaa

SEQ ID NO: 6111 - DNA, 595 bp, Homo sapiens
  MAP TO AC020927.4; EXPRESSED IN ADULT LIVER, SIGNAL = 0.98; EXPRESSED IN PLACENTA, SIGNAL = 0.98; SWISSPROT HIT: P32605, EVALUE 9.90e+00
taagtccaccctgggctatgaggttcgctttaaacaagtctggtttcattagcgcttccttgggctctcaaagatgctgcaggccctggcatgccccatgctaggaatgacctcccttcacttcgttctggatgtaggagttacccgcatgagcagcatcactacccagctgagttcaatctgctttgaaggttgcctttgccctcattccatcatttccctggtgtgccaggccgaaagggtcacctggggtgtgtgtgaagcacagaggtgcccaggcatctctctggagatgctgattcaggagtctgcagctggcatctggaatctctatgttgagcaagtgctccacgtggttcttgtgacctgacagttttggaaaacatcgtgaagaccctgcctgctctgctggcagctgctgctgtcaccctgagaagaataaaaggttcacggcccagcagatgcccgagcctctttcagggatgaaaccctctttctggatacctctttcaggatgcctgtggagtctgctcctgtgactttccagaagtccacagtcaaaccacatggctttacggttggctcttgtgattct

SEQ ID NO: 6112 - DNA, 583 bp, Homo sapiens
  MAP TO AC008625.4; EXPRESSED IN HELA, SIGNAL = 0.48; EXPRESSED IN PLACENTA, SIGNAL = 0.63; EXPRESSED IN ADULT LIVER, SIGNAL = 0.68; EXPRESSED IN LUNG, SIGNAL = 0.5; EXPRESSED IN FETAL LIVER, SIGNAL = 0.48; NT HIT: AF145488.1, EVALUE 1.40e-01; SWISSPROT HIT: P13648, EVALUE 7.40e+00
agcaggtcccagttcaacaccttcacttcaagacaaggtccagaaaacatttcttgtccaaggctacacagctaacaagttatgtgctgaagataggactcagatatagtttgcttcgttcaggaatcttcactactctgtgtaatcagatcaattcccaagtggaatatttcagagtttcaatctctgatgccactgagccttgcagaaacagcactgaggagcgccaaaagtagaagagctctactgtcccatgctctggcaggacgcagagcatctgggagagcaccccatggagcagcccaagagggaagaagaggaggagcagcagaagggaagcagggagggggccaccaaccagatgagtcagcagcatcaccagcattggttctctggctgctggggtgctgctaaccttgcagaggcttggactggctctgggacctgtaggtgtcccgggtcttgtcaaatcttggctctgcttggcttctgctcttaaagcaccatagttcatctgtttcctgggatagacttattcacttgtaaatcttggtgtgtcacaaggtactggcaatccatttgg

SEQ ID NO: 6113 - DNA, 590 bp, Homo sapiens
  MAP TO AC011452.5; EXPRESSED IN BONE MARROW, SIGNAL =   3; EXPRESSED IN ADULT LIVER, SIGNAL =   3; EXPRESSED IN BRAIN, SIGNAL = 1.8; EXPRESSED IN PLACENTA, SIGNAL = 3.7; NT HIT: gi11424606, EVALUE 0.00e+00; SWISSPROT HIT: Q14157, EVALUE 3.40e-02; EST_HUMAN HIT: BG823259.1, EVALUE 0.00e+00
ctagagcagacttgcccaccaaactgggcactcctgagggaaggatgcaggtccgactcctatctggtgccccaacatcatcacacaaaggcctgactcatagaaggtcccaggaaatgtttgttgaatgaacgaatttgtaaaggaacagtattttgcgtgctgtttcactccccatctaacttttctctcctggatggtgcttttactttattcttacatcctcctgcaggctccgggagcagacccccaacccccaaaagcagccctcagaagaccaggaagagccctcaggtgaccaggggtagccctcagaagaccagctgtagccctcagaagaccaggcagagccctcagacgctgaagcggagccgagtgaccacctcacttgaagctttgcccacagggacagtgctgacagacaagagtgggcgacagtggaagctgaagtccttccagaccagggacaaccagggcattctctatgaaggtacactctgtccatgggcggccagggactgggtcgtctcagcaccaggacagtgggaggggaccccgttctgagaatgggaatggaagccacatcccta

SEQ ID NO: 6114 - DNA, 594 bp, Homo sapiens
  MAP TO AC004490.1; EXPRESSED IN ADULT LIVER, SIGNAL = 1.4; EXPRESSED IN PLACENTA, SIGNAL =   3; NT HIT: gi14765151, EVALUE 7.00e-13; SWISSPROT HIT: P06924, EVALUE 2.30e-01; EST_HUMAN HIT: BG390562.1, EVALUE 2.00e-20
cttgcttgcgttaccctctctgctcggggactccgtccccatcctgagagacgctgggtggggcgcgaggcctgtggctgttgtgtggaaaggagtgtcgctggtcctccctcggctcttggggtgctggtgtgggcttctgctgtggcccaggtgccctcacccccaactactccagcccccagcatgaatccccttcctgtctctggatgggcctgtcccggacatttcacagaaacaggatcacacactgcgtggccctctgtgtccggcgtctctcactgagcgtggcgtcctcaaggtgcatccgcgatgtggcctgggttggagcctggctcctgttctcattggggtcctgcttccaggtgtgcgcggcctcgctgtgctgtgttgatctttcatctgctgatggacgcttggctgcttccaccttttggctgtgatgagttgtgttggcttttggaggcatttgtgtccgggcttttgtgtggacatgtttttatttctcctgggaatggaggtggtagtgtttttgaaggatttgaaaggcggtgtcttgattgtccagatgctaccgtgttggacagctaggtt

SEQ ID NO: 6115 - DNA, 574 bp, Homo sapiens
  MAP TO AC004858.2; EXPRESSED IN ADULT LIVER, SIGNAL = 0.72; EXPRESSED IN PLACENTA, SIGNAL = 0.7; NT HIT: AF109907.1, EVALUE 0.00e+00; SWISSPROT HIT: P97887, EVALUE 7.00e-09; EST_HUMAN HIT: AW376884.1, EVALUE 1.00e-48
tccttgagcttgccctaatcaacaactcctaacaggttttaaaatgggaatgctggttccccaatatctaaacattttctttctttctattcatattgaaaactctcttgaatcaacatcaggtagaagacaattgcttgcaaggaaacaaagagatctgcaggagttccaggaatgctgtgcatttaagatgagaacaagtaccatgaaaatgaccatagttacatgtgcttcagttccgataaattctacactgattactaattcaatatccttctcaaatacttacaggagtaaatgagagctggaaaaagcgtttcatttctctcctgagctgtttcaaccagcatacgaagtggacctttcggacacaaaacagccactaaatctagaaaaagaaaaacataaaagacatctaataaaatgtatgggctaaacttgtaaatgggtggtagggaggaattaacgaaggaaaaaagtttaatgttttttgtctctttttacacaaaaagacgttgaatgaatatgaaataaatggcaggtgaactggtgggggtgggggagacaacataaa

SEQ ID NO: 6116 - DNA, 548 bp, Homo sapiens
  MAP TO AC020945.6; EXPRESSED IN ADULT LIVER, SIGNAL = 3.7; EXPRESSED IN BRAIN, SIGNAL = 3.4; EXPRESSED IN BONE MARROW, SIGNAL = 4.7; EXPRESSED IN PLACENTA, SIGNAL =   4; EST_HUMAN HIT: BI254675.1, EVALUE 0.00e+00; SWISSPROT HIT: P10569, EVALUE 8.00e-05
cgtaacctaggaatggcagctgcacccaccctggagggccgggagagggcggaacttagtgagccccagcacctggtcctggctcagtcactgccactcaccaccttctcctctcccccaggggtcctgctgggtgttcgggctgtgcccagtctcggctacactgaggaccctgagctgccgggcctgttccacccagtgctgggcacgccctgccaaccaccatccctgccagaggagggctccccgggagctgtctacctgctgtccaagcagggcaagagttggcactatcagctgtgggactacgaccaggtccgggagagcaacctgcagctgacggacttctcgccctcacgggccactgacggccgggtgtacgtggtgcccgtgggtggggtacgggctggcctctgtggccaggccctgctcctcacaccacaggactgcagccattagctgcggctgcggtctcaggctgcagcctagctcggtaaccatttgaagtgtgcctacacttctcccactgtgtgatggcgacaagattg

SEQ ID NO: 6117 - DNA, 515 bp, Homo sapiens
  MAP TO AC025445.3; EXPRESSED IN BONE MARROW, SIGNAL = 2.6; EXPRESSED IN PLACENTA, SIGNAL =   2; EXPRESSED IN ADULT LIVER, SIGNAL = 1.9; EXPRESSED IN BRAIN, SIGNAL = 2.1; SWISSPROT HIT: P10071, EVALUE 9.40e-01; EST_HUMAN HIT: BE735359.1, EVALUE 8.00e-81; NT HIT: AL163246.2, EVALUE 2.00e-65
gagctcatgccctttgaatcactgacattctcttttccaggtaaactatatctgtcaacagaggggagattttctagttcctggcacccgacaaaattatacatactgtcatacaggagagaggcaaaaatacaccacttagggtacaagaaaagataattcggatcttgtttaattttgttcctttgttacagctccctaaaatgtctcttgactgatgtaatatatatagagagaggagtttattaaatattaacttacatgatcacaaggtcccacagtaggctgtctgcaagcttggagcaaggagagccagtccgagtttcaaaactgaagaacttgggagtccgatgtttgagggcaggaagcctctagcacaggagaaagatgtaggctgggaggctaggccagtctcacctcttcacgtttttctgcctgctttatattcgctggcagctgattagattgttcccaccagattaagggccggtctgccttccccagtccactgactc

SEQ ID NO: 6118 - DNA, 582 bp, Homo sapiens
  MAP TO AL117259.3; EXPRESSED IN BONE MARROW, SIGNAL =  15; EXPRESSED IN ADULT LIVER, SIGNAL =  14; EXPRESSED IN HEART, SIGNAL =  12; EXPRESSED IN LUNG, SIGNAL = 8.5; EXPRESSED IN BRAIN, SIGNAL =  16; EXPRESSED IN PLACENTA, SIGNAL =  14; SWISSPROT HIT: P08547, EVALUE 1.00e-21; EST_HUMAN HIT: AW576808.1, EVALUE 1.00e-08; NT HIT: X87344.1, EVALUE 4.00e-05
caaaagaaagcaggagtggctatatgaatatcaagtaaagtaaatctcagagaagagaaaatcaccagagacagacagggacattataaaatgataaaagagatgaatccaccaagaaatagcaaacctaagtgtgtatacaacaaactgagttgcaaaatatgtgatgcaaaaactgatgagactgaaaagaaaaacagacaaaaatacacaggtgcagctggagatttcagaacccatctctcaacaactgacagaactacacagggaatcagcaaagatatagaagaactcaagaataccatcaaccaagatttagtagacatttatagaacactctatccaacagcagaatacacattccattcaagtgcccgaagaatatatatcaagacagaccacaaaacaaacctcaacaaatttttgaaaatttaaataatacagaattttctctaaccacaatggaatcaaactagaagttagtaaaagaaaggtaacagaaaaatctcccaactcttggaaactaaacaacaaacttctgtattttcccatgaatcaaagagaaaggtctcacgggaaatc

SEQ ID NO: 6119 - DNA, 597 bp, Homo sapiens
  MAP TO AC000123.1; EXPRESSED IN ADULT LIVER, SIGNAL = 0.89; EXPRESSED IN BRAIN, SIGNAL = 1.1; EXPRESSED IN FETAL LIVER, SIGNAL = 0.81; SWISSPROT HIT: P29240, EVALUE 2.60e+00; EST_HUMAN HIT: BE378684.1, EVALUE 0.00e+00
tttccctgactactgcagcctgaaatgatctctcttctgaactctgacaatggttcctatctttgacagttctcaaaatgtggttctgagaccaccacctttaaaaatgcaccatattatgtatttttacaagcaccagaaagagctgtggtaatttttcctgttttcctgaatcttctttgcaactcttaaaagaataactcacttcccagatggatggagagaagactgacaatgattatttttgctggggtgatcaactgactcatctgaatcattcctttctgtactcattttcacacaaatgttttgatttgtcagttgtgtatctgtcaggtctgtagtgtcactgctgactgctgaaatcctacatttacccatggacttttcaatcacaacctcccagtgccatggccatccttctaaggattcagatgttgctaccattttcaaaataacttcacactctatgagaaagaatttaagcagagcttaaaatgaaggcaagcacagttagatggaaatggctacaactgacatcatatactcaaataagatgtaaaatcaaatgtattctggaactgagcagcaacttca

SEQ ID NO: 6120 - DNA, 576 bp, Homo sapiens
  MAP TO AC008772.5; EXPRESSED IN ADULT LIVER, SIGNAL = 1.1; EXPRESSED IN BRAIN, SIGNAL =   1; EXPRESSED IN FETAL LIVER, SIGNAL = 1.2; EXPRESSED IN BONE MARROW, SIGNAL = 1.1; NT HIT: gi9910563, EVALUE 3.00e-92; SWISSPROT HIT: Q09295, EVALUE 5.00e-03; EST_HUMAN HIT: BF376605.1, EVALUE 1.00e-89
cttcctttccacaaattgccaattactattaaaaagaaaaaaaaagccttcattacatcaaaaatactttaaatgtttcaaaatcattaaaatttctttgtttaggatttcttacttcagtggcctgtctccaaacataactccattaaaagcaagggcccttggtacagaattttggtctgcaaattccacaaaagcaaaccgagttggctgagtctcatcacctgccatccgcacaaacttcacttctccaacttgtttaaaaaattcaagtagttgatcagctgtcgttgtctaagggaacaaagtgacactttgataaaatatatccatttaaaaaatcagataaatattactgtatccactgatatgatttttaagaagagaaaaagaataagggctactgctgctttgtttcttctttaattagttacctgggaattcagatttccaacataaaccgttctcctaatttcatctattttggaaggatccacgtttcccataagtggtggctgtggtatctctccaagtgttgcaatgttggggtctagtgctgctgctggtatagctccc

SEQ ID NO: 6121 - DNA, 501 bp, Homo sapiens
  MAP TO AC026888.4; EXPRESSED IN ADULT LIVER, SIGNAL = 0.74; EXPRESSED IN PLACENTA, SIGNAL = 0.69; NT HIT: gi14861871, EVALUE 1.90e+00
catgttggaattgtgggtcctttttgtatattgacttgagaaaaaataaaaatattgatacagaaaaaagagaatgcatatgatctttttatcttagccaatatattatgttttcttgtttttgtatatctacatattcataaaaacaagtatgtgtgaagaagtttacatcacagtgcaagtgtgatccttcatataaaactaaagcaagtgaggatgaattcctaaataattaaacggtaaattacttgtgtttgtatcagctcttgagccatcttaaactactaatcaatttctcataatcatcagtgcttttcatctgtgagcggattatttggtcaaacatggagacaatggcacagccgtgagtagagcccaggtgtttttctccgatttctccacagaactacaatgccagcagaaaggtagagtggagtaataataaaaaccaggtttaagagaacactaagtttttttttcagtgttgttcacggaactgca

SEQ ID NO: 6122 - DNA, 508 bp, Homo sapiens
  MAP TO AL118556.2; EXPRESSED IN ADULT LIVER, SIGNAL = 7.5; EXPRESSED IN HEART, SIGNAL = 7.6; EXPRESSED IN FETAL LIVER, SIGNAL = 7.8; EXPRESSED IN BRAIN, SIGNAL = 7.9; EXPRESSED IN BONE MARROW, SIGNAL = 7.7; NT HIT: gi14746897, EVALUE 5.00e-69; SWISSPROT HIT: Q13043, EVALUE 4.00e-07; EST_HUMAN HIT: AI866570.1, EVALUE 7.00e-69
tcggactagcccacaataggttttggatgagattactcctaaatcccttacaatacctttactatttttcattcttaaaaatgagcttgatgctgagttatcagcatttcactttccccatagacttgatcaataactggataattataaataatgagaacacctcattgggtggagatcaaacataggtggctgaagttctccaagttcaattgctgttattcctactgcccagatatcacagagttggttgtagccaccattcttctctactgctgcaacttctggggccatcctagaaggaatcaatgaatacaacatttttgttgttaaatattgatctgaatctgttacttcctgttataatcaccagacttgttggagggaaggaagctgagaggtgtttactaggaaagaagaaacattactaagtaaaggcttaaatctctatttcacacacatacacacttttaaaattaattaagaatcttgaatgccctcctctgaa

SEQ ID NO: 6123 - DNA, 580 bp, Homo sapiens
  MAP TO AC021092.1; EXPRESSED IN BONE MARROW, SIGNAL = 1.3; EXPRESSED IN PLACENTA, SIGNAL = 0.9; EXPRESSED IN ADULT LIVER, SIGNAL = 0.88; NT HIT: gi12741365, EVALUE 0.00e+00; SWISSPROT HIT: Q9UK10, EVALUE 1.00e-121; EST_HUMAN HIT: BF876105.1, EVALUE 0.00e+00
ggcctcgtgtcttttgaatcatcagagaatccacagtggagaaaaaccatttaaatgtgaagaatgtgggaaaagatttactcagaattcacaactttatacccatcgtagagtccacagtggagaaaaaccattcaaatgtgaagagtgtgggaaaagatttactcagaattcacaactttattctcatcgcagagtccacactggagtaaagccatacaaatgtgaagagtgtgggaagggcttcaacagtaagtttaatcttgacatgcaccagagggtccacaccggagagagaccttataattgtaaagaatgtgggaagagctttagccgggcctcaagtattttgaatcataagagactccatggtgatgaaaagccattcaaatgtgaagagtgtgggaagagatttactgagaattcacagcttcattcccatcagagggttcacactggggaaaagccatacaaatgtgagaagtgtggaaagagcttcagatgggcctcaactcatctaacccatcagagactccacagtagagaaaaactacttcaatgtgaggactgtgggaagagc

SEQ ID NO: 6124 - DNA, 580 bp, Homo sapiens
  MAP TO AC006479.2; EXPRESSED IN BONE MARROW, SIGNAL = 0.78; EXPRESSED IN PLACENTA, SIGNAL = 2.2; EXPRESSED IN HEART, SIGNAL =   4; EXPRESSED IN ADULT LIVER, SIGNAL = 8.2; EXPRESSED IN FETAL LIVER, SIGNAL = 5.8; EST_HUMAN HIT: BF433428.1, EVALUE 1.00e-125; NT HIT: gi14745427, EVALUE 1.00e-125; SWISSPROT HIT: P14652, EVALUE 4.90e-01
gggaagaggagagggatttgaggcggggacctcatgactcttccaccgattgaaggagcgtgtgtcatgaccctctttctcttccagggctatatatccagcctgctcaccctggcaggctttgctacagctatggctgctgttgtcctctgcgtgaatagcttcatctggcaaactgaaccctttttatacatcgacactgtgtgtgatcgctcagaccctgtcttccctaccactgggtacagatggatgcggcgaagtcaagagaaccaatggcagaaggaggagtgtagagcttacatgcagatgctgagggtgagcaggaagagtccagtcttcggggacccatcacagctcttttttcccagggagctgggggccctggaggacagagatgtaggctctttgagcttggacttcatgctgggtctttcattcaggaggttttaatgtaagctacagacatttttcagacctcatgacacgaagattctctgaatcaaggagggtgaggaacaaagaggagacatttcagagaggagatagtgggtcacccttctggcttttctggtgtgttggt

SEQ ID NO: 6125 - DNA, 579 bp, Homo sapiens
  MAP TO AC007920.18; EXPRESSED IN BONE MARROW, SIGNAL = 2.5; EXPRESSED IN ADULT LIVER, SIGNAL = 3.9; EXPRESSED IN PLACENTA, SIGNAL = 4.4; EXPRESSED IN LUNG, SIGNAL = 1.2; EXPRESSED IN FETAL LIVER, SIGNAL = 7.6; EXPRESSED IN BRAIN, SIGNAL = 3.6; NT HIT: AL139076.2, EVALUE 8.60e+00; SWISSPROT HIT: P53976, EVALUE 1.90e+00; EST_HUMAN HIT: AW237754.1, EVALUE 2.10e-01
ttaggtttcctggtccatgcaccgtgaagggagtgccagcacactggagcacgcccgaggacatatgagccgggtggcatggaactctgagggtcagcaaatgaggccactgccccagctagctctcagatcacatgaaacatgggaaaggaaagaagcctgagcagagaattccaagaccctgaccatcattttctcgagccttctgcctacccttgtcaggcttcaggaatgcagacaggcaaagaagaactgctgtatatccaaacctattcagcccctccttgtctagacctaaaaatttaaaaggtccacaaatagttcttgagcgattcaggctcaacatccaatactgggaaggacaggcttctgaaatcagagaacttcatattaaataaaattactagggaatagagagaacatttcatttggattctgagaatcttaaataaatatttcttttaaaatgacatcatgcagttttaaagactgcaaacaaagaatatcaccaacaaaattcaaacggcaaaggggcactaaatatcatggaaaaccaaagcaggagggcaaaagttcaaa

SEQ ID NO: 6126 - DNA, 558 bp, Homo sapiens
  MAP TO AC010526.6; EXPRESSED IN ADULT LIVER, SIGNAL = 0.63; EXPRESSED IN BRAIN, SIGNAL = 0.69; EXPRESSED IN FETAL LIVER, SIGNAL = 0.61; EXPRESSED IN BONE MARROW, SIGNAL = 0.9; NT HIT: AJ307670.1, EVALUE 3.40e-02; SWISSPROT HIT: Q07008, EVALUE 6.10e-01; EST_HUMAN HIT: AW753590.1, EVALUE 0.00e+00
aagctctccctctctccctgaaaacgcctcgcgccttgaattctttgcttatttttctctgttcaaatttagccacacgttgaagttttctgtgtcatttttggaaataggtatgacaatctgtaagcggcacagagagagagaaccgcagcctccatgggaacgaggaagtgggaacgggatgagagtttggaatcgatctccgtggaaggtctgaattgcaaggcgggtttccctggggacaatctcaaccataaaaaagttctgctcacatgactgatggcttttcaataacaagtatatggcggtcttgaatgtgcacaggttgacagttttcccgggagcttctacatgcacgagctggcagagtctagggacagggacaaggaatggagaaaatttcctcaactcctgaaggacacaggtgcccatggggacgtactgaatttctgcagaggcaccgtgaaacagaatcataagtcagaaggaaaatgcacctatttcacattccatcgtgacaaaagggagacgacttttagcttacctcctgattctgcg

SEQ ID NO: 6127 - DNA, 504 bp, Homo sapiens
  MAP TO AL121592.14; EXPRESSED IN LUNG, SIGNAL =   4; EXPRESSED IN FETAL LIVER, SIGNAL = 8.1; EXPRESSED IN PLACENTA, SIGNAL =   9; EXPRESSED IN ADULT LIVER, SIGNAL = 6.4; EXPRESSED IN HEART, SIGNAL = 8.1; NT HIT: AF223391.1, EVALUE 1.00e-106; SWISSPROT HIT: P32530, EVALUE 8.10e-02; EST_HUMAN HIT: AW178600.1, EVALUE 1.00e-85
ctccaagcacatgagcaaaccaaatgaatagggcctgaagtaaacccccaggaaaccgcaccaccccttcagaaaatgcacctgatcattgaaggaaaaacaaacaaacagaaagcaacaacagcatcaacaacaaaaaaagtccccacaaaaccccatccaagggtcagcagcttcaaagatcaaaactagacaaactcatgaagatgagaaagaatcaatgaaaaaatgctgaaaacccaaaaggccagagctcctcttctcctccaaatgatcacaatgtctctccaggaaggatgcagacctggatagaggatgagatggatgaactgacagaagtaggcttcagaagatgggtaatagcaaactctgctgagctaaaggagcatgttctaatccaatgtaaagaagctaagaaccttgataaaaggttagaggagctgctaactagaataaccagtttagagaggaacataaatgacatgatggagctgaaaaacagca

SEQ ID NO: 6128 - DNA, 500 bp, Homo sapiens
  MAP TO AF235097.1; EXPRESSED IN PLACENTA, SIGNAL = 1.3; EXPRESSED IN ADULT LIVER, SIGNAL = 0.97; EST_HUMAN HIT: BG531245.1, EVALUE 3.00e-03; NT HIT: AJ006216.1, EVALUE 0.00e+00; SWISSPROT HIT: O60840, EVALUE 4.00e-25
gctgaggctggtcttgattctgcattttgagccataacttgggggctggggctagagttgttgcagatcaggcctgggtgggtctcaggagggcagaccacatctaaggcatgcagggaatgggccagattggagttgcctacgatggcccgcccggccctcttcagccatagaaccaaggttgtcatcggcggaggggtcctccatgtccagctcttcggcttgagtgatccagtccaggtagccccgcaggtcttcctccatctgctgcttctcccgctgcttctggaagtccccgcgagctttcgctttctctctctccttggagaactccctgagggaggaggatagagggctagggggaggagccaatctgaacaccttgctttcatcactccagccacactagcctcctagctactctttgaatatgccaagcacattctagcctcagggcctttgcactgaccattctctttgcttggaatgcttttccctca

SEQ ID NO: 6129 - DNA, 517 bp, Homo sapiens
  MAP TO AC006275.1; EXPRESSED IN PLACENTA, SIGNAL = 2.6; EXPRESSED IN ADULT LIVER, SIGNAL = 1.5; EST_HUMAN HIT: AW370632.1, EVALUE 2.90e+00; NT HIT: AL161500.2, EVALUE 1.90e+00; SWISSPROT HIT: Q28247, EVALUE 9.40e-01
ctcccttcagagctggtcacagctggcagcccgcgtgctgtaaacacccacccaggcgtgccagccagacctggctttctgtcactcccggctgattctgaattcccagtctcacatgggccagagggtgactggctcgagacttgcctctcattacgagcaaagctctgattcagccggaatattagtcagggtacagcatgtcacattccaggaggctgatcagctccgacctcaacaccggcagctgactcagcccggggagttgcatgtgctgactactccttctgagcctcacagttatgttctcgagatttcactcagtgtcctatggtgtcactggtcctggtcgcagacacagactcacctgtgtgcaggaggtcaggtgaggatcggtcccagcaccttcattctttgtttctttcactcactcagtaaacatctggtgaagacttggaccagatccctgatcttaatgaaggaggtgacggtccggcccaggtgacaggcacagtta

SEQ ID NO: 6130 - DNA, 577 bp, Homo sapiens
  MAP TO AC008050.4; EXPRESSED IN HEART, SIGNAL =  30; EXPRESSED IN ADULT LIVER, SIGNAL = 3.2; EXPRESSED IN LUNG, SIGNAL = 1.1; EXPRESSED IN BRAIN, SIGNAL =   3; EXPRESSED IN FETAL LIVER, SIGNAL = 3.5; SWISSPROT HIT: P00009, EVALUE 2.00e-44; EST_HUMAN HIT: BF792506.1, EVALUE 0.00e+00; NT HIT: M22886.1, EVALUE 0.00e+00
ttgttcagaagtgtgcccagtgccacactgtggaaaagtgaggccagcacaagactaggcctaatctccatggtctcttcgggcggaagacaggtcaggctgctgtattctcttacacagatgccagtaagaacaaaggcatcacgtggggagaggataccctgatggagtatttggagactcccaagaagtacatccctggaacaaaagtgatctttgccggcattaagaagaagacagaaagggcagacttgatagcttatctcaaaaaagctactattgagtaataatgggtcactgccttattaattacaaaacagaaatgtttcatgacttttttatgtggactataatagatctcatacaccagaattcagatcatgaatgactgacagaatattctgttgggcagtcctgacttaaaactaaggctggcttgtggttaaatgagtatgttcagtttttgaatgttaatagtaattccaattcagtaaatgctatcactgtttaccccttctaaagatatgattagacttcattagtagtgttcaacttttcacaaagatggtgaatgcca

SEQ ID NO: 6131 - DNA, 591 bp, Homo sapiens
  MAP TO AL050316.15; EXPRESSED IN ADULT LIVER, SIGNAL = 0.98; EXPRESSED IN HEART, SIGNAL = 1.3; EXPRESSED IN HELA, SIGNAL = 0.79; EXPRESSED IN FETAL LIVER, SIGNAL =   1; SWISSPROT HIT: P53726, EVALUE 7.50e+00; EST_HUMAN HIT: AW262284.1, EVALUE 1.30e-02; NT HIT: AF079558.1, EVALUE 8.80e+00
aattgctcaccaggaagtgggctggccagaatacaagtcagaatgagatggatgcagtacgaagtgtagaaatccaacaaatgtgtaaaaggtaaaggcaaaccagatttttttaaagcttatgattgttggaaagttcaagtatacacagactaaacagctggacaaaacttgcaaaacaatgaagaaaggaaagaaaatagtgattgctatgtctgagtttcagggactcataataaaggactattcagattaagaaaaggctacttggaaactatagatactaattatttttaactatagatactaattatagtctgaattttaaagaaaaattcaggcacatctactctgtgccagggaaggtgctgaaggaactagcatgtgtattactcgtttttcaacagagatatgtattgttagtcccatttaacagatgaagcaattgaggcttagagaagcaaatgacttacttgaagtcatccagctcatcagaaagaaccccaaccctcccaaggtatttgaccttgcaggtcagtgtttttcccactcaaccacagatgttttatgtcctcttttgtcgctgacgtt

SEQ ID NO: 6132 - DNA, 511 bp, Homo sapiens
  MAP TO AC067967.2; EXPRESSED IN PLACENTA, SIGNAL = 0.49; EXPRESSED IN ADULT LIVER, SIGNAL = 0.67; EXPRESSED IN BONE MARROW, SIGNAL = 0.93; NT HIT: gi14739516, EVALUE 2.00e-56; SWISSPROT HIT: O15230, EVALUE 2.80e+00; EST_HUMAN HIT: BF031329.1, EVALUE 1.00e-70
ctaaggtgcaggagtcggagcacttaccgcaagcatccactttgggaggaagcactctccacgtagtgtttcagagcgagctggaattcttccaggtcctcttctatcacagacatctgccgctgcacaagcatgatgtgctgccaaggaaggggcgagggtcactgcgttggctgtcacggagcccgatttaagctgactcctactgcccatcccattcctcctcacaaaaacagatgattgtcatccaaaaatatgaccaaggaaggccatgactattccaagtataaaactgtataaaggctgtaatctaggcaagatattttccttgcctctagtcccagaagctaaacaacgtgttctttacaatgacgtgtttccctttaaaagcagtgattctcaatgactcgagaagttttaaaattatctttatatcaaaatctctgggagtggggcccaggcactgctatttttaaaacctccctaagtgtctgtattgtgcaggcagagc

SEQ ID NO: 6133 - DNA, 586 bp, Homo sapiens
  MAP TO AC010327.5; EXPRESSED IN HEART, SIGNAL = 1.4; EXPRESSED IN LUNG, SIGNAL =   1; EXPRESSED IN FETAL LIVER, SIGNAL = 1.7; EXPRESSED IN BRAIN, SIGNAL = 1.2; EXPRESSED IN PLACENTA, SIGNAL = 1.8; EXPRESSED IN ADULT LIVER, SIGNAL = 1.2; NT HIT: gi14762597, EVALUE 1.00e-32; SWISSPROT HIT: P51461, EVALUE 9.70e+00; EST_HUMAN HIT: BG422023.1, EVALUE 0.00e+00
cctcaggtgtgaaatgaccccctggacctcaggcgaggcggccgggaggctggagatgggggaagaggggcaggctcgagggcaactgcaggagcctggtgctcactgggagccttaagcctgagtgatggaggcagtgagcctgcgggcagtcccggggcggggccgggctcagcatgaggcagagggctgggacttggggagaggctgtgcccaaggtgggcactcagcccctgtggtcagtgcctcgtccagtggggactccctggggcgtctgacgcggcgctggttgtgtctatgcctgcagggcgccatgttttggaagtttgacctgcacacaagctcgcacctggacacgctgctggagcgggaggacctgagcctgcccgagctgctggacgaggaagacgtgctgcaggagtgcaaggtcgtcaaccgcaagctgctggacttcctgctgcagccaccccacctgcaagcaatggtggcctgggtcacccaggagccgccagatagcggtgaggagcggctgcgctacaagtgagttccccagctcctggccagcccgtccctatcagcatcacac

SEQ ID NO: 6134 - DNA, 568 bp, Homo sapiens
  MAP TO AC005932.1; EXPRESSED IN HELA, SIGNAL = 0.6; EXPRESSED IN PLACENTA, SIGNAL = 0.57; EXPRESSED IN ADULT LIVER, SIGNAL = 0.58; NT HIT: AF196779.1, EVALUE 2.00e-03; SWISSPROT HIT: Q9WV32, EVALUE 2.40e+00; EST_HUMAN HIT: BI044938.1, EVALUE 2.00e-04
ctggagctttgcttacccagggagcaggttggggggtttgctcatccacctgcaggtggatttggtgcagcctgggctcaaactcaaggggtccaacagcccttcctccctgagcctctgtttcctcctctgtaaagcaaggattattcatcattaactcatgtttattaagcacttaaggcatccaggtctgttaggacaccctgccctcagggacctcatgtctggtagacaagggaacgaggaaatgacttctgacaggattttgcaaaagaaagaaaaccaggcaaagcaccaggtcaagactgcagtggttgctgaaggctactttgtggaggtggtgattcagggcaatagcacgcccaaaggccctgaggcagggatgtgttcagccccttgggacagcattgaggaggcggctgtgactgaagcaaagtgagttgggcagagtggggagggcaccatgtaggcagggagggctacaggctgggcatcagggacctgtgggtccccaggaaggaatgcagactttatacttagagcactggggagccacataaggcttttg

SEQ ID NO: 6135 - DNA, 570 bp, Homo sapiens
  MAP TO AC008999.5; EXPRESSED IN ADULT LIVER, SIGNAL =  38; EXPRESSED IN HEART, SIGNAL =  94; EXPRESSED IN FETAL LIVER, SIGNAL =  36; EXPRESSED IN LUNG, SIGNAL =  17; EXPRESSED IN PLACENTA, SIGNAL =  30; NT HIT: M59258.1, EVALUE 0.00e+00; SWISSPROT HIT: P06731, EVALUE 4.00e-51; EST_HUMAN HIT: AW376508.1, EVALUE 0.00e+00
gactcagttgggctgagaggtgggagatgccaactctgattgatagatgcccgtggaggaatcacaggtgccacacagggcaatcttctctctgttatctgcacagcagagccacccaaacccttcatcaccagcaacaactccaaccccgtggaggatgaggatgctgtagccttaacctgtgaacctgagattcagaacacaacctacctgtggtgggtaaataatcagagcctcccggtcagtcccaggctgcagctgtccaatgacaacaggaccctcactctactcagtgtcacaaggaatgatgtaggaccctatgagtgtggaatccagaacaaattaagtgttgaccacagcgacccagtcatcctgaatgtcctctgtgagtatcttctgttcctctgtggctcaggctgccagcccaaatccacatagccaaagtccaggcctctcagtccctctcaggcccaaggacagagacttttacccctggacatccaggctggccctacccccagcaaatccatgcaggcccagtcctgaccaagaataggaggggagggtctg

SEQ ID NO: 6136 - DNA, 539 bp, Homo sapiens
  MAP TO AC009318.11; EXPRESSED IN ADULT LIVER, SIGNAL = 0.59; EXPRESSED IN LUNG, SIGNAL = 1.1; EST_HUMAN HIT: BG545550.1, EVALUE 1.00e-126; NT HIT: gi14764160, EVALUE 1.00e-126; SWISSPROT HIT: Q08891, EVALUE 2.00e-09
gcttaaaagccacgatgctctcactgtctgacctatttttttctgcattcaaagctcttggaagcaacagaaacattttaagtgactttgaatatgagaacttctgaagatgtaatcttttgttatttctcttccttttcaggaacctctttcaggagctataaaagaaagggaggaatcatgtccacaattgcagctttctatggcggcaagtccattctcatcacgggggccacaggctttctgggcaaagtgctgatggagaagctgtttcgcaccagcccagacctgaaagtcatttacatccttgtgaggcccaaggctggccagacactgcagcagagggttttccagatcctagacagtaaggtatgccttataggaaagcgtgtgtgatgggcaatgccttagggcaagatgattcactacaatgttctcttatagtctcatattgcaagtggggaccaggctacctgcacaggtagaggaaggcagacaaaacaagacagcaacaagctgctggtggaaatcggtgtttt

SEQ ID NO: 6137 - DNA, 556 bp, Homo sapiens
  MAP TO AC012152.12; EXPRESSED IN HEART, SIGNAL = 1.3; EXPRESSED IN ADULT LIVER, SIGNAL = 1.2; EXPRESSED IN BRAIN, SIGNAL = 1.1; EXPRESSED IN FETAL LIVER, SIGNAL = 1.4; EXPRESSED IN LUNG, SIGNAL = 0.66; EXPRESSED IN PLACENTA, SIGNAL = 1.3; SWISSPROT HIT: Q9W727, EVALUE 9.00e+00; EST_HUMAN HIT: R68935.1, EVALUE 3.10e+00; NT HIT: gi15925705, EVALUE 2.00e-03
ccgtgtgaagcacatgtaagtgtgacataaatctgtacccttaagcaatcataatcttatttgaaaaaatcataggcaaagacaatatggctttcaagagttgacatctgtggtagatcttcttagggctgttaatttaatttctttatatattatagagactgtctttacctatttcttgacctctgccctccacccctctgcatggcaaaagtcagcatcttttcttctctcttaaacaaagaaacgtcataaatatcataccaattttcaggatagatggttttaggccaaagatctgcagatacatgatgctgtgagatctctgaatatcccatgggttttcaagttacttcaaattagttataaaattatcatagataatgaatttgaaaaattatgaataaaacaaaactcaaacaagatcttatgcctttgaagacagggtaatatttactaagtcaaacaaatagtcagagactgttaatagtccagaagagttgagatttgctgttgaaaggatgaactcttaaatggttcacaatacccctccatt

SEQ ID NO: 6138 - DNA, 551 bp, Homo sapiens
  MAP TO AC000356.1; EXPRESSED IN BRAIN, SIGNAL = 1.1; EXPRESSED IN PLACENTA, SIGNAL = 1.1; EXPRESSED IN ADULT LIVER, SIGNAL =   1; SWISSPROT HIT: P11260, EVALUE 4.00e-09; EST_HUMAN HIT: AI872137.1, EVALUE 1.00e-125; NT HIT: gi11421705, EVALUE 1.00e-107
aggaaccagaaaaccaaccctggtaatatgacaatacaacgctcttcaacacccacaaaaaaatcacactagttcaccagcaatggatccaaaccaagaataaatccctgatttacctgaaaaagaactcaggagtttagttattaatctaatcagggaaggaccagagaaaggtgaagcccaatgccaggaaatccaaaaaataatgcaagaactgaagggaaaattattcaaggaagtagatagcttaaagaaaaagcaatcaaaaattcaggaaactttagacacacttttagaaatgtggaatgctctggaaagtctcagcaatataattgagcaagtagaagaaagaaactcagagctcaaagacaaggtcttcaaattaacccaatccaaaaaagacaaagaaaaagaataagaaaatatgaataaagcctccaagaagtctgggattatgttaaacaaccaaacctaagaataattggtgttcctgaggaagaatagaattctaaaaccttggaaaacatatttgggggaataatcgaggaaaa

SEQ ID NO: 6139 - DNA, 579 bp, Homo sapiens
  MAP TO AC009509.7; EXPRESSED IN LUNG, SIGNAL = 0.81; EXPRESSED IN ADULT LIVER, SIGNAL = 0.56; NT HIT: AJ414146.1, EVALUE 1.40e-01; SWISSPROT HIT: Q49460, EVALUE 3.20e+00; EST_HUMAN HIT: BG191096.1, EVALUE 0.00e+00
gccgtacagctggaaatctgagtagtttcaggaaacacagcatcatcatcttcattgtctttcagattttctagaaatgtctgaaactcttgcacaagattattcagtttgctgacagatagttttgtcctctcttttgggaacttgtttatccacaggttggctccatttagaagcctattagctattgagtctgtgttgtcagagccaacgtccatgtcccaggccaggaagatgttcagtttgcaaaactgtctggttcgtcctgaatttggtattgtctcttcatgtgtttccttatcctttcagtcccccatgccccttggatgggagggagaaagtggatggaaggacccttggaaggtgcgtcttcccaggaggttgtgtcctcacagggggtgtcctcacaggggaaatagcccacagagaggatcaggttggaattggatttggagctgtcgtcctctatgtcgctgttagaggatgaatatgccatggagttcaaaggcacaaatctctctcaacttgagaagcttcaaaaaaagaaaagaagaaaaaagaaaaagtaggtgggaccgg

SEQ ID NO: 6140 - DNA, 556 bp, Homo sapiens
  MAP TO AC000361.1; EXPRESSED IN PLACENTA, SIGNAL = 0.41; EXPRESSED IN ADULT LIVER, SIGNAL = 0.35; SWISSPROT HIT: P04052, EVALUE 3.10e+00; EST_HUMAN HIT: R43269.1, EVALUE 2.00e-01
ggagaaagaagaagtgggggagtctggtgtgcgtggtggaaagcagcacaaggtgggtgccacataaagtgatgctggagacaggcaagggccaggtcaggtagggctgaaagatatggatttaactttgaggacaatgagatgccacttaggaaggatttttagcagtagaatggcatatttagctcttattttttaaaggtcagtctggccactatgtgaagaatggactggaagggaacaagaatggagcacatttagaaggccattgcaatcacccagatgagaagtgcagtgatctggacagaagcagagacagggtagatgaaggtgaacagtttcaagtcaacagggactgactgtgcgtgggggatgtgtgaacagcaggagctgataaggagccctcattttcggacagggagggtaccaagaccattcagaagactggaaccatggaggaaatgctacttcacaccaggtacgaatccatttcaagtgtgttttagaggtagaggtaggagtgaaggtccattccagcaccaattctccctaccaa

SEQ ID NO: 6141 - DNA, 576 bp, Homo sapiens
  MAP TO AC008886.4; EXPRESSED IN BONE MARROW, SIGNAL = 0.46; EXPRESSED IN PLACENTA, SIGNAL = 0.41; EXPRESSED IN ADULT LIVER, SIGNAL = 0.41; EXPRESSED IN LUNG, SIGNAL = 0.9; EST_HUMAN HIT: BG210108.1, EVALUE 0.00e+00; NT HIT: gi14523048, EVALUE 5.50e-01; SWISSPROT HIT: P10105, EVALUE 5.60e-02
ggatgccagagaaagactgctgcaaggtacgcgccactcacagacctctccatttatctcactgatgcaaaggaccctgaggtaatttttgaaaactttttttcctgtcttaagaagataaatgaaatgaattgaaatgttggaaaacttattaagatagtatgaggattatagtaaatggaaaaatgagataacctctaggaatttcactctggagtactcgtctatccatttaactcactgtgcctcttccttttgtgcacagtagggatcctctggaaacagaacagagggaagaagataccttccctgaagcccagatgttccagaagcctgcgcctcattcacaaagtcaccccaaaaatgccctagagtttggagttttgaagaagcgggaagaaggcctgagtaagggcctgggaaccaagttagatcctacttcagcatcagcacatgccagcgatggtgcacacaggtggagagcggcctgcccgtcttttccatggtgcccacagacccatttaggatgaaagatcagaaaattctctccatgtcaccgcttctgaaacatgtgaa

SEQ ID NO: 6142 - DNA, 531 bp, Homo sapiens
  MAP TO AF201337.1; EXPRESSED IN FETAL LIVER, SIGNAL = 0.78; EXPRESSED IN ADULT LIVER, SIGNAL = 0.51; SWISSPROT HIT: Q9HCS5, EVALUE 6.50e+00; EST_HUMAN HIT: BF030738.1, EVALUE 1.90e-01; NT HIT: AL161577.2, EVALUE 1.30e-01
ctcgaatgatggaccaagtgaatcttgaaaacagctctcattatcataccacattgatttgagtttcttcttgttcttgcagaaaaagttcaaagtcatgtactcagagtactttcaacagtattgtgcaagtgtcgagttgactaaatgcacatatttccatctgatgtcaaacatgctgccaaaccttaattttacaatgagaatacagtttgccaaacagaaaatcagagcaccacagctcctctgaattccagggtgccagttgaactgtggacacatacttgtcctagtgctagaattaaggagtgctccactagggccatttggttcacaggatgaataagcctgtttatgtgacctgatatctttatggcagtgatttacttcactgtctcttcaaattaagtttcagggaacctacttttctttatgtcagttgttcttgctgaagtctaaataaaggaaatttaacctaatcaaactatagactgaaaataaacaagaaaggggaaaagcaagcagcctatg

SEQ ID NO: 6143 - DNA, 503 bp, Homo sapiens
  MAP TO AB014085.1; EXPRESSED IN ADULT LIVER, SIGNAL = 0.55; SWISSPROT HIT: Q10571, EVALUE 6.10e+00; EST_HUMAN HIT: BF750344.1, EVALUE 2.00e-04; NT HIT: AJ010770.1, EVALUE 8.00e-03
tcctgactgggacctgattcccatgatctcccacatgagaggaatcacttagtgactgagccatgaaatcgaaactcagtttccccactgctatcccactgtagacatgttcagtcacatgcaatcataacacactcaagacaaacttagccaaagatcagattaagtgtgcaagagtcgagctcagtcatcccaaattaaacttactggaggagccatggaaggtgagctgaggatgcaaaggacccaggtatgcacgaggtgttactttcaggctacacatttttgttggactgaaagttgacccaggtaggcactatttccagaaataaaatgtcaaaggatgactcagaaacatttacttacatgtacactgtttagtattttctacgcaaataatttactgacatgtgaaggaggcagtggagagaccaagtcagggacaaaggcaaaacaagaatgtggtagatgagtgatccccaacctttttggcactagggaca

SEQ ID NO: 6144 - DNA, 595 bp, Homo sapiens
  MAP TO AC009567.8; EXPRESSED IN LUNG, SIGNAL = 0.53; EXPRESSED IN ADULT LIVER, SIGNAL = 0.52; NT HIT: AL445565.1, EVALUE 1.00e-04
gcatctaccgtgagccagacaatatgttatgtgacaaaatgattcaaaaacagatcctgcattcaaggtagtcttagtgatagcattcattcattaagaatagattgatttttgaaaaatccaaaagtcatttggaagtaatggggtgaatgagttgaacaaactttaataatcatgtttgaggctataagaagatactaagataatgagattaattttttttatatggcccatctagtagagcttttgaaatatttatttataccattcattcatgactttatagtcatatttttgtatacattgtggtttggagatcttcttatacactctttactgccttcagtaaagagaaagccaatgcagctacatttttacacattaaatttttcagtgagaaattcaccaacacggattgtactttaaaaaacataaaatttatttttgaaattatgtatgcacagacatgggtgaataagatcactattttcactgaggcagagcatctgcttgtagtgacataattattaattaccattagataattaaatcttacctcacatctgtgaaaaatggccgttggtttgcaattttg

SEQ ID NO: 6145 - DNA, 516 bp, Homo sapiens
  MAP TO AC012467.9; EXPRESSED IN ADULT LIVER, SIGNAL = 0.41; NT HIT: D43734.1, EVALUE 0.00e+00; SWISSPROT HIT: O73700, EVALUE 7.00e-06; EST_HUMAN HIT: AW296057.1, EVALUE 1.00e-05
tgacatgcagtttttcctggtgcattctaacctctccacattcatctgagcctgggcctcccctggagctctctactaagcagctttgtctttctcatcttcctaggcttcagcagaggcatttggctgaaaaatcacaatgcttctacttcacttggtcagggtacatcttgccacagatttggggctacccagtgaaagggcccctgagggcgagatggctggagcttacctgcatgccaatgaccgcatagatgaagaacagcatggctatgaggagggccacatacgggagcgcctgggagagaaaaggcacttggctcagcaccagccggctgtccccgtgacggcccgccacagcctgagaagacccatgagtggccacatgcttcctttctattccacgtgttaccgtgaaagaatatcgacagtgaggaagaaccgtttaaatcccagccctgcccaactactttagtcctgaagacaccatccacatgcacgcccagtgttacaata

SEQ ID NO: 6146 - DNA, 544 bp, Homo sapiens
  MAP TO AC000125.1; EXPRESSED IN ADULT LIVER, SIGNAL = 0.45; NT HIT: AL163201.2, EVALUE 4.00e-14; SWISSPROT HIT: P96192, EVALUE 5.10e+00; EST_HUMAN HIT: AU134918.1, EVALUE 4.00e-24
aaggaaaatgggaatccaccataattgtgaaggacacctcagaatctgtgaaggataatgtggggacagcccctataatggcatctggctgataaaagtgagtgaagccccagtgtgtgaggaggcagagagtccttctctgtgactcacctttccactggggatccaagcaacccagtcgaggagaaactttgtttctcccaagccctggagctaacttggggagagacttggagactctgtgagggaaagacagtgggcaaagctgcagacattttctcagacctaggaccaagagtaggatgccatttttaatccaggcgcatacaaaggcaaccattcttaggcaattcagcagcgtaactgtgcaggcattttagtctcaagccagagattggaatgcctgctctggagaaaggtaggggcctccacagccagaactgtgaaaaacacctcagcaataggtgctgcaattgtgctctcccatattgcaagcctggaaccagaggagagcagctacatctgcagtttctcctcagcaacc

SEQ ID NO: 6147 - DNA, 599 bp, Homo sapiens
  MAP TO AF222684.1; EXPRESSED IN FETAL LIVER, SIGNAL = 0.49; EXPRESSED IN PLACENTA, SIGNAL = 0.58; EXPRESSED IN ADULT LIVER, SIGNAL = 0.81; NT HIT: AL163208.2, EVALUE 0.00e+00; EST_HUMAN HIT: BF929698.1, EVALUE 3.30e+00
cagctttgtcttgcatcctgcaaaaccaaagccttagttgtccatgtatacttggaagaactgacctgaaatgcccttccagaagacatatgtgtctagatcattatgttgcaacccttcgttagttttgagtttttgcactattaaaagaagagcaaagtgatcacctttttagtctcttattccattaccatagctcaagatgggcttccttttattctttgtctataaaaatattcttatccacctggagagtcaggccaaataccactctctacataaaacttttcttccggtataatatttctcttatacttctttgttagtatttcatccaggcttgaatatggtcacatttccagatgcccttttctcggttggactgtcaggtcctggaaggcagggacttttgacaaatctgggagcagctaaagaggcagtgtcagtagaggcggcatttgaggcgctgacccatgacaggaggagcacgggctacagccgaggacacactgctagcagccataacggtggcaagtgttgaacaagcagaaaagatgtaatagttgtgaagtcagaggagtagtcagcgacattggcct

SEQ ID NO: 6148 - DNA, 577 bp, Homo sapiens
  MAP TO AC010209.13; EXPRESSED IN HEART, SIGNAL = 6.4; EXPRESSED IN ADULT LIVER, SIGNAL = 3.4; EXPRESSED IN FETAL LIVER, SIGNAL = 3.3; EXPRESSED IN BRAIN, SIGNAL = 3.5; EXPRESSED IN PLACENTA, SIGNAL = 3.5; SWISSPROT HIT: O73673, EVALUE 1.40e+00; EST_HUMAN HIT: BG705017.1, EVALUE 2.00e-50; NT HIT: AL163227.2, EVALUE 3.00e-58
cccatttttcccttctaggcctcctggcctgtgatgggaggggcttctgccaaggtctctgacatgccctggggacattttccccattgtcttggttattaacatttgactccttgttacttatgcaaatttctgcagcaggcttgaatttcttcccagaaaatgggtttcttttttattgcattgtcaggctgtgaatttcccaaacctttatgctctgcttcctcttcaacacttttccgcttagaaatttcttccactagataccttaaattatctcaagttcaaagttccacagatctctagggcaggggcaaaatgctgccagtctctttgctaaagcaagaatgacctttattcccattccctgcaagttcctcatctccatctgagaccacatcagcctggacttcattgtccatatcactatcagcaatttgatcaaagccattcaacaagtctctaggaagttccaaactttcccacatctttctgtcttctgagccctccaagtctctaggaagttccaaaatttttcacattttttctgtcttcttctgagccctccaaactgttc

SEQ ID NO: 6149 - DNA, 542 bp, Homo sapiens
  MAP TO AL121886.22; EXPRESSED IN PLACENTA, SIGNAL = 0.93; EXPRESSED IN ADULT LIVER, SIGNAL = 1.1; EXPRESSED IN LUNG, SIGNAL = 1.3; EXPRESSED IN BONE MARROW, SIGNAL = 1.1; EXPRESSED IN BRAIN, SIGNAL = 0.91; NT HIT: gi13386117, EVALUE 7.00e-59; SWISSPROT HIT: P13007, EVALUE 4.00e-13; EST_HUMAN HIT: BG773132.1, EVALUE 0.00e+00
aattagcgccatcgacattccagatatcggggctgggaaggcagggtgagacctgctgggtgtcatcgttctgctctgaactaggaggactgactttcagagggttctcggtgtcctcttcttccacagcgctcctgttgacacaaacagcctcatgttcctccagatttttgatggggaccacgtggcaggcgttgtatttgcaggtggccatctttttggctttcttggggttctttctcctgcacgatgccaggtggtactggaatctgctgagtgggattcggtggtgaggatcataagggcaaatttcaaaggcttctggctccatgagaaattcttgaagcagggtatctcactgctagagtctaacggaaatgcttcttgtggagaagcccttttgtaagaaggatggagttgtcctctgcccagttttggcccttgggattctgtaggtgacggtcttaacttgtggtctgttctctaggactgtgagtggtggattagaagagagatgaggagctgccaaaagcagctacaca

SEQ ID NO: 6150 - DNA, 534 bp, Homo sapiens
  MAP TO AC000369.1; EXPRESSED IN ADULT LIVER, SIGNAL = 0.76; EXPRESSED IN BRAIN, SIGNAL = 0.84; EXPRESSED IN PLACENTA, SIGNAL = 0.84; NT HIT: AJ236921.1, EVALUE 0.00e+00; SWISSPROT HIT: O00222, EVALUE 6.00e-41; EST_HUMAN HIT: BG216961.1, EVALUE 0.00e+00
atgcccctggaaacatgtagcacaatccccaagactaggagaagaatgttcaacgtacatctattaggaagtgctcccgctcttgaccatcggaaactctacagatgacttactgttggtttcaagactctcacagagttcacttttcacctcgccatttggtctgtcatttcctttttggatcagtttgctttgcatggtggcagctgtcaccacagccttgaagctcctcttgcgtttttgaacattctgttctggatgaaaaattataatataaaccttgggcatatagagcatgcccagagatactgaagcacttaaactcatggagacagtaagtgttgttgtctggatgtacatctgagggaagaaaaaaaaaagaatcactgttggtaagcctaacagtaggagataaagcaaataacatactattttctaaaattgttccagcttctctgctaaaggcacattaaaaggcacttattgaaattgtccttaattatagtcaaccattcctgtgtcctaacctgcaaa

SEQ ID NO: 6151 - DNA, 512 bp, Homo sapiens
  MAP TO AC016943.7; EXPRESSED IN ADULT LIVER, SIGNAL = 0.76; EXPRESSED IN LUNG, SIGNAL = 0.51; EXPRESSED IN PLACENTA, SIGNAL = 0.81; EST_HUMAN HIT: AW064008.1, EVALUE 0.00e+00
gaaaccaaacaacagccctctccctcagagaggttaaatatattgcagaaagtcacacagtaagatgcagagctgaaaagacgtaattgtttttaggcttgcttctcagtgttatgtctgtatgctttaaactattttagctattgaaactattgctatttcaaatatagtatgctagtttatgcccattttatataaagaaattaggttatgtattaaaatgcaatggttgttttaagggagtggagctttgagtcattgtatgtattaatgctactatcatttaatgttcttatagcactgaaattgaaggatggagaatttaaagaaaaaaaaaaagtacaccaatactttatccctgattttagtcagtttattaccactgataagaaaagcctgagattagaaaacttgcaagaaattagtaccctggagctgaagaagaaatcactcatcatcagttcagtgttggaagtgaaaagaagtgaattcaacatgcaaagtattgtgcc

SEQ ID NO: 6152 - DNA, 526 bp, Homo sapiens
  MAP TO AC000032.7; EXPRESSED IN ADULT LIVER, SIGNAL = 0.62; EXPRESSED IN FETAL LIVER, SIGNAL = 1.9; EST_HUMAN HIT: AU144050.1, EVALUE 2.00e-44; NT HIT: L41825.1, EVALUE 1.00e-121; SWISSPROT HIT: P10267, EVALUE 9.00e-09
cttctcgagctccaaccaacattacacttttcctggagtcaaaacgggagtcaacacaagtgtataaatgacaatgcattggacagtttgattgtttgtccaaattttgatatttgccactaacagcatgtaaggaagcttaacacaactctgtataggaatagtcaggttggaggtaaacaaagcagaatgcttgaatctatgttgatactgagggagaggagcggcggtggcaatgcccgatgttctccaccataaagaagcaaaccgaggtgcctggggatgctgaagaagtagaggggcatacctgggtcgataagaattatcgtaatgccaattggagtcccgtaaaggaggatcggcatcaaaaagaggaaaaaggttcaaaggggatttatcatggggttcagaatcacagatactggcagtccagacatgacaatagccaatttcgaaagttctgggtgttctgggctcagaatggggaatatcatacaaggccttgggggtggagggtaatgtcctt

SEQ ID NO: 6153 - DNA, 500 bp, Homo sapiens
  MAP TO AC013602.2; EXPRESSED IN ADULT LIVER, SIGNAL = 0.36; EST_HUMAN HIT: AL532730.1, EVALUE 1.00e-125; NT HIT: gi14767838, EVALUE 1.00e-127; SWISSPROT HIT: P39060, EVALUE 9.10e-01
gagacattgacaagccccactggagtgctgcccatggaagtgcagggggcaggagacccctaccattctgagggaggatgaacagctcctctgtgacctgcctcttgaggcgactgtcattcgggggttgggggctggcaggtgcagtgggctcctccgtagacctcagtgaatagtctgcatagttgatgacctctggagccgtcacagctggcctgggtccatagatgtctgggaacttgaggagggcacggggctgaacaggttccgtggactttttaacattgaactgcaaacacaaattactctgattagtccacaaaggagccctcttgtctgtttccccccatggaagggagaaacggtgaactgacctgttgtaggatgcagagggagagttgtggtttcattctgctctgaagagcacaacctaggaaggtctaacatcatctccaaacccactcaaatccacaatccactgagatgtgggccttgttcat

SEQ ID NO: 6154 - DNA, 549 bp, Homo sapiens
  MAP TO AC000388.1; EXPRESSED IN FETAL LIVER, SIGNAL = 0.56; EXPRESSED IN HELA, SIGNAL = 0.43; EXPRESSED IN ADULT LIVER, SIGNAL = 0.74; SWISSPROT HIT: Q03363, EVALUE 1.00e+00; EST_HUMAN HIT: AI566543.1, EVALUE 0.00e+00; NT HIT: gi16162096, EVALUE 1.00e-78
caggtccttctcctaacccccatggctcagaggatactctgcaaggcgtggccctgggggacccagggagggacagatacggttcctgggcactgtgaaggcacaggcccctgagagggcatttgttttctcagccgggagacccttgggccaccctctctgtccccacctcccaggccctgaaatcctgctctaagtccaggtgcctctcttccaggggacggttactacctggccgtgggcggggccgtggcccagcacaactggtcccacatcaccaccgtgctgcaggaccagaagtcccagtgccagctcatcgacagctccgaggacctgggtatgatcagtatccagggcccagccaggtgagagaggactgggagcccgcccctgggtgcacctgctgcctggacccaggtcctccaacaggcccttgggcagaacagcttgtccagaatgggccattctgaatagttaagcgctctggtaaaccagagatgccattctgaataaatatcttcaaagcactggaatgcagataagccggta

SEQ ID NO: 6155 - DNA, 585 bp, Homo sapiens
  MAP TO AC016955.12; EXPRESSED IN ADULT LIVER, SIGNAL = 1.3; EXPRESSED IN BRAIN, SIGNAL = 0.69; EXPRESSED IN HELA, SIGNAL = 1.4; EXPRESSED IN PLACENTA, SIGNAL = 1.4; SWISSPROT HIT: P11260, EVALUE 8.00e-08; EST_HUMAN HIT: BE505156.1, EVALUE 1.00e-113; NT HIT: AJ229041.1, EVALUE 1.00e-100
gcaaggctagggaagttttcctcaattatttccccaaatatgttttccaaacttttagctttctcttcttcctcaggaacatcgattattcttaggtttggttgttaacacaatcccagacttcttgaaggctttgtttatatttctttgtctttgttgaatttggttaattcaaagaccttgtcttcgagctctgaatttctttcttctacttgtttaattgtattactgagactttgcagatcattttgcatttctctaagtgtgtccattgtatcctgaagttttgattgttttttatttatgctatctatttcattgaatatttctcccttcacttcttgtattcttttttggatttccttgcattgggcttcacctttctgtagtgcctccctgattagcttaataactaacattctgaattctttttcaggtaaatcagagatttcttcttggtttggatccattgctggtgaactagggtgattttttggtggtgttaaagagtcttgttttgtcatatcaccagagttggtttcctggtttcttctcatttgggtaggctctgtcagcaggaaggtc

SEQ ID NO: 6156 - DNA, 514 bp, Homo sapiens
  MAP TO AC009087.4; EXPRESSED IN PLACENTA, SIGNAL = 1.1; EXPRESSED IN HEART, SIGNAL = 1.2; EXPRESSED IN ADULT LIVER, SIGNAL = 1.1; EXPRESSED IN FETAL LIVER, SIGNAL = 0.84; EXPRESSED IN BRAIN, SIGNAL = 0.89; SWISSPROT HIT: Q92620, EVALUE 4.00e-27; EST_HUMAN HIT: BF765440.1, EVALUE 1.00e-110; NT HIT: gi14779295, EVALUE 1.00e-84
ctcctttcctctcgaccctcccctcatcccaacatcctgctcatccaccactctaccttccgcatggccttagcatggatgaaatgatcgttacaccagatggtggagtaattattgttcttccactgcaggtaaacattcaggtaggtcaaatgatcgctctcaggaacagcgaacttctcccggatttgatcactctcctcctctcgaccctaggaagggaaaaagaaccttcactctaagtacaggggggtccaggcccactgagcacatcccagaggttctaacactaccacctacccacacatagaacttcaaacatgtcaataggttgccctgacaatttgagaaaaattaaaataatttttaaaaaggtctactctaaaacatgagggctcaagagcaaccatactagaagataaaaaatgctcttgcaaatttccaaagcattccctgagaaccactggcccagcccttcctttcccctaccccaacctgcttaaccgagaacagc

SEQ ID NO: 6157 - DNA, 533 bp, Homo sapiens
  MAP TO AC004035.1; EXPRESSED IN ADULT LIVER, SIGNAL = 1.1; EXPRESSED IN LUNG, SIGNAL = 0.78; EXPRESSED IN HELA, SIGNAL = 1.1; EXPRESSED IN BRAIN, SIGNAL = 1.1; EXPRESSED IN BONE MARROW, SIGNAL = 0.73; EXPRESSED IN PLACENTA, SIGNAL = 0.92; NT HIT: AB010971.1, EVALUE 3.00e-61; SWISSPROT HIT: O78694, EVALUE 4.00e-52; EST_HUMAN HIT: AI065101.1, EVALUE 7.00e-35
gttggtcatagcggaattggagatatgctgtttgaattcataaaaacagggtggttaaagaaaggtcttggtaatgaaatttgtggtatagagttctggtgaatatatagtgtgtagtgctcctagaaaaatggtaatagttaagtcatttattacgataatattcatatattctgctataaagaagagggcaaatgaacctgtggcatattcgatgttaaagcctgagactgactctgattctccttctgttagttcaaaaggggctcggtttgtttctgctagtgtggagataaatcatattatggctaggggttatgatggtagaagcagtcagaggaattcttgcgttgtgataaatgcatgtaagttaaatgagccacttattagtagaactgataaaaggataatggctagagtgacttgatatgaaattgtctgggctacagcttgtaatgtgccgattagtgcgtaatttgaattagatgctcatcctgatcataggatagagtagatggctaggcttgatgtgg

SEQ ID NO: 6158 - DNA, 517 bp, Homo sapiens
  MAP TO AL096870.3; EXPRESSED IN FETAL LIVER, SIGNAL = 1.2; EXPRESSED IN BONE MARROW, SIGNAL = 1.3; EXPRESSED IN BRAIN, SIGNAL = 1.1; EXPRESSED IN PLACENTA, SIGNAL =   1; EXPRESSED IN ADULT LIVER, SIGNAL =   1; EST_HUMAN HIT: BI827247.1, EVALUE 0.00e+00; NT HIT: U07561.1, EVALUE 4.90e-01; SWISSPROT HIT: Q05512, EVALUE 2.00e-09
aggaaagccatggagttgtgagcagagcccaaagtagggagagagacagaggatggtatctgaggaccaccgggagctcaccattgtatttcataaaatgctttgcatacagtgagtactttatcagtatccttgaccatatgattaaaatagagtgcatgaataggctagatattgaggagggagttcgaaagaggaaaaaaggacaggaaatgggagatgtgcataaaacccccttgagggcaaaggccccagtctgggtggcagcgccctcaccggtgcacgatgctcttgctgtgcaggtaggcaatgcccagggtcagctgggagaaccacttgccagcaaggggctcagagcaggccccgtagcgctggatccattcaaggacatcaccaccctgagccagttccagaatgatgtatactcgagatgtgctctcaatggcccgatagaagttgatgaggtacttgtgccgcaagactttcattacctgaccccagaagaaggacccatcaa

SEQ ID NO: 6159 - DNA, 520 bp, Homo sapiens
  MAP TO AC010280.5; EXPRESSED IN ADULT LIVER, SIGNAL = 3.7; EXPRESSED IN FETAL LIVER, SIGNAL = 3.2; EXPRESSED IN BRAIN, SIGNAL = 3.8; EXPRESSED IN PLACENTA, SIGNAL = 3.9; EXPRESSED IN HEART, SIGNAL = 5.5; EST_HUMAN HIT: AW813783.1, EVALUE 0.00e+00; NT HIT: AL163282.2, EVALUE 0.00e+00; SWISSPROT HIT: P48000, EVALUE 1.60e+00
caggctgcttgaatttctcctcagaaaacgggattttcttttctattgcattatcaggctggaaattttctgagattttatgctctgtttcccttataaaactgaatacctttaacagcaccccagtcacctcttgaatgctttgctgcttagaaatttcttctgcctgataccctaaatcatctctctcaagttgaaagttccacaagtctctaggacagggggaaaatgtcaccagtctctttgctaaaacataacaagagccatctttgctccagttcccaacaagttcctcatctccaactgagaccacctcagcctggaccatattgtccatatcattatcaacattttcgtcaaagccattcaacaagtctctaggaagttccaaactttcccacattttcttgtcttcttttgagccctccaaactgttccaacctttgcctgttacccagttccaaagttgcttccacatttttggttatcttatcagcagcgccccactctactggtacca

SEQ ID NO: 6160 - DNA, 531 bp, Homo sapiens
  MAP TO AC012083.6; EXPRESSED IN HEART, SIGNAL = 1.4; EXPRESSED IN ADULT LIVER, SIGNAL = 1.5; EXPRESSED IN LUNG, SIGNAL = 0.68; EXPRESSED IN FETAL LIVER, SIGNAL = 1.7; EXPRESSED IN PLACENTA, SIGNAL = 1.5; EST_HUMAN HIT: AA348064.1, EVALUE 3.00e-03; NT HIT: AK024440.1, EVALUE 5.00e-01; SWISSPROT HIT: Q9YBK6, EVALUE 9.80e-01
ggctttcatgagaccctgacagaaggttcattcctgtcctatgttctcacagcattcactccatctacccctctgatatgtacacaggaagaaaggggcaattgctttgctcattttctgggtcccaactgtcaagtaagctccctgaagccaaaatctgccccagagggtagcacacagtaggtgctccatatatattcgtagaatgaatgaatgggcaaataaatgaattaattaccattcattacccttgttcttttccatatctcttactgctgtgtatccttcactggtgtctcttcttcctcctatggtgaaatgtgctacctcagccttttccacacaggagttaaggcctccatagtagacctggcttcccagacctagaagactgggaccgtcttctctccatctgaaaaaggcaaccgaacacagcttcacattaaacatccaagtacaaccttcatgctggtcagttctatttcttcatgggctctcttttctttgggcccctttggtgtccttggttgt

SEQ ID NO: 6161 - DNA, 515 bp, Homo sapiens
  MAP TO AC008974.6; EXPRESSED IN BRAIN, SIGNAL = 2.6; EXPRESSED IN PLACENTA, SIGNAL = 0.7; EXPRESSED IN ADULT LIVER, SIGNAL = 0.99; EST_HUMAN HIT: BE222941.1, EVALUE 1.00e-103; NT HIT: gi15302254, EVALUE 1.00e-109; SWISSPROT HIT: P31873, EVALUE 1.90e-01
ggtcttggagtctgaggctgtcacctagctatcagagtcctcatgatgttagggggatgtccaaccattcctcccttactcgctgataggatagagaaagctacaagtccttgcaggcagtggggcctcccaatgcatttcctgtccttctttccctccagtggctcatgggactcgtagttccttggccagagctggtcgtggggctgggtatccatttcctgggctcaccccttcctgtgttcctacctcgctcagatccccagcctgagtcacagtgtgctgtcacagaccagcttcagggccgagtacaaggccagtggcggcccctccgtcttccaaaagcccgtccgcttccaggtggacatcagctcctctgagggtccagagccctccccgcgacgggacggcagcggaggtggtggcatctactccgtcaccttcactctcatctcgggtgagtctcttggctaggctgcctgcagcccagtgctgggactgttcacgacagctga

SEQ ID NO: 6162 - DNA, 549 bp, Homo sapiens
  MAP TO AC008983.6; EXPRESSED IN PLACENTA, SIGNAL = 0.8; EXPRESSED IN ADULT LIVER, SIGNAL = 0.72; EXPRESSED IN BRAIN, SIGNAL = 0.57; SWISSPROT HIT: Q13360, EVALUE 1.00e-04; EST_HUMAN HIT: AW157012.1, EVALUE 4.00e-64; NT HIT: gi13236592, EVALUE 1.00e-10
tgggtagcaaagggatcttgcccaatagctaatgaactcaggacccaacccacaaacaccctcccctctgccccaaggggctgaggctgtctcacctcagaagcctggggccaaattcaaggagacccaaacagggccttactacagagggaaagaagtcaatgcaacagatgaagctttgtcatcctgtggacgctaagtgccacaaagcctaagccacgtctgtcttcttcacatggcaggcgcttaagaagcatttagtgcctgcgtacaggaaggagccaggtgacgccagccttacccctggaggccagggtcctgcactggtcaagcatcctgtatttgcacaggctcctccgtgcgctgtccagcaatgcccactcctggatgaactccacggccacatcctcaaaggtgacggattcctaaaacagcacacacattctggctcggcaaataccacccccaccactgagcagaacgactggttatcactggagaagagaaaatgttcagacacagcaggcatggaaaatccagcctaaagcc

SEQ ID NO: 6163 - DNA, 501 bp, Homo sapiens
  MAP TO AC010320.7; EXPRESSED IN BRAIN, SIGNAL = 0.86; EXPRESSED IN HELA, SIGNAL = 0.89; EXPRESSED IN PLACENTA, SIGNAL = 1.2; EXPRESSED IN HEART, SIGNAL = 1.4; EXPRESSED IN ADULT LIVER, SIGNAL = 0.85; SWISSPROT HIT: O75346, EVALUE 2.00e-12; EST_HUMAN HIT: N94749.1, EVALUE 0.00e+00; NT HIT: Z35291.1, EVALUE 6.00e-96
gaagcctacactgatttacgggatatcataatctcctattgaattttaaaacaaacttaaattagggacacataaccttctcacagatgccttgcatggatatgtgaaaacacacaatcaaattgatgtgacagttctctcctcttctcattttatgtatagataagagctctcccattgctcatgttgaaatgtgtttttcatttcagggacctttgacattcagggatgtagccatagaattctctcaggaggagtggaaatccctggaccctgtgcagaaagctttgtactgggatgtgatgttggagaactacaggaacctggtcttcctgggtaaggataattttgctctagaagttaagatctgccctcgtgtatttttgtattttctctgttgtctttcttgggagcccttccattatttgactgagactgaagccttgttgactcacaaataaaaagcttcataatgctgcatctggcctttcatttcccata

SEQ ID NO: 6164 - DNA, 600 bp, Homo sapiens
  MAP TO AL121768.2; EXPRESSED IN ADULT LIVER, SIGNAL = 0.97; EXPRESSED IN FETAL LIVER, SIGNAL = 0.75; EXPRESSED IN BONE MARROW, SIGNAL = 1.2; SWISSPROT HIT: P32479, EVALUE 1.30e-01; NT HIT: AF109075.2, EVALUE 8.90e+00
ttcatggcaacctgttgttcttgagtcacaaaatggattttgatgttaaacagactaaaaacagtaccactacaattattcaaacattattattacttgctttaacttccacagcttaaacaagttgtgctaaattttccctatatttttgttcaagtattataaaatgacgtacccccatcttcttcagaatcaatgtcggattcttcactatcacaaggccttttttctcgatagccttccatctcatttgtccacaccattaaagacatatctgtaccgcctagggtaaccaacatgctgtcatcataagtccagcgaacatttgtgacatgtgtactatgggccacatacctcttaaactttccaaatttcccctaaagaggaagaaaattcaaacaatctttctgagaaatttcattatttaaatatttccattatgattttgaattttattaataattaaaaattaatcatttcaagtgcaatgtgttaaaaaaaatgagaaaatactgaaactcagcagaataaaagataccaattcctaaacctgttaaggacaagatctaaaaccagtagtttcacaaaatgctggtaccc

SEQ ID NO: 6165 - DNA, 535 bp, Homo sapiens
  MAP TO AC020923.4; EXPRESSED IN ADULT LIVER, SIGNAL = 2.2; EXPRESSED IN BRAIN, SIGNAL = 2.2; NT HIT: gi14733613, EVALUE 6.00e-53; SWISSPROT HIT: P08855, EVALUE 1.70e-02; EST_HUMAN HIT: AA634118.1, EVALUE 1.00e-122
tgaccctgtctactcccctgccccagccccagatgtctttttcttccaaggaaacaggttccctcctgaaaagatggagttcctgggctaatttgcctctgatacagtttggctaatgagtgactaattcagcattatttacttttcagcagagtgacaaagacctcgatgatgccttggataaactctctgacagtctaggacaaaggcagcctgacccagatgagaacaaaccaatggaagataaagtaaaggtaaaaaaaaaaaaaaaaaaaaaaaaaattcactaatagtgaaattttaatccttgggtcttgactctgtcattgtcataggaatattgatgtgaacttaacctatattttaaacatgaaattataatgaaatagaaaaatcaatctgtactccactggaggggaaggtcactgaatctgtgacagagataccagcggagcctccctgaggggattctgggaggtaggtgtggggtatgcatggcttcctcccatgcaacacaagcagtcagcacatccat

SEQ ID NO: 6166 - DNA, 501 bp, Homo sapiens
  MAP TO AC000354.1; EXPRESSED IN ADULT LIVER, SIGNAL = 0.36; EXPRESSED IN BRAIN, SIGNAL = 0.51; NT HIT: M60676.1, EVALUE 1.00e-10; SWISSPROT HIT: P08548, EVALUE 1.00e-17; EST_HUMAN HIT: AI634856.1, EVALUE 3.00e-15
aggggacttcaataccccactttcaacaatagatagatgaagcaaaaaaaaaaaataataaggaaatactggacttgaatagcacttttgaccaaatgggcctaggagacatagacaaaaatttctgtccaacagcagtataatacatgcacatttttcttcaacacacatagaacattctccaggatagaccatatgttaggccacgaaacaatcttaacaaatttaagaatactgtactcatatacagtattgtttcaggccacagtggtatgaaactagaaatcagtaacaggaagaatcttggaaaattcactaatatgtggaaattaaataacatgctcctaaacaaccaatgggtcaaagaagaaagcaaaaggaaaacttaaaaataacttaggacaaatgacaatgcaaacacagcatagtaatttttgtcaagggcaccaagggaaaacaatggagaaaggtgagtcttcaacaaatggtgcagggaaaact

SEQ ID NO: 6167 - DNA, 566 bp, Homo sapiens
  MAP TO AC010646.4; EXPRESSED IN PLACENTA, SIGNAL = 0.7; EXPRESSED IN ADULT LIVER, SIGNAL = 1.5; NT HIT: gi14785833, EVALUE 1.00e-109; SWISSPROT HIT: Q02926, EVALUE 8.20e-01; EST_HUMAN HIT: AA181709.1, EVALUE 0.00e+00
atgcactgtctgtctgtggctcttcagggacctccaaaaaccctcccatctcattggccagcctgaaaggcactgctagatgggggcaggggacagacggaagacagacaaggtgggcgggggtctttatttgagtttaggcatgattcgaatgaagaggatcatgctaatgaagatgaagcagacgataatgagcatggcccagagcagccagttgactgacttctgcgtgtgctgctccagacgctctgactccgtcttcagtttctccaggttctggtccgccattttcagtgagtgtgacagggtctgtgggggaggtggaaaaggtgtcaacaggactggggccaagaatggcctctctctacttccctgggactggcctgcacctcttgtcgcttgctggtgctgtgccctctgctgggaatgccatttttgccttctacgaaactcctattcatcccgcaaagccccagccacaatgctcctgtgctgggaagccttctctgatgccccagggcagaggctggagagctcccccagtccccacacctggttgtccttct

SEQ ID NO: 6168 - DNA, 509 bp, Homo sapiens
  MAP TO AL121784.2; EXPRESSED IN LUNG, SIGNAL = 2.5; EXPRESSED IN FETAL LIVER, SIGNAL = 1.3; EXPRESSED IN BONE MARROW, SIGNAL = 1.3; EXPRESSED IN ADULT LIVER, SIGNAL = 0.99; EST_HUMAN HIT: BG678667.1, EVALUE 0.00e+00; NT HIT: gi16191245, EVALUE 0.00e+00; SWISSPROT HIT: P48760, EVALUE 1.60e+00
tggacccaagttcaaattccagctcaccatttccacctgggaaaatcccctggatctctcagagcctcagtctcttcgtctatgaaatcaagctatgcagcttacaacggagttgttctgagctggaaggagaatgctctgtactgcagatgctgattccctccagcctccgtccacaaagcccgtttggggaaatggaccaagcccatctcactgcttaccttgctcaacagcatcttcaacaatcttctggtgcaagttccaggctctctggtcaacgattatggcgacctccttctccaaggcctgcaggaaggcaaccagagcaacagctcctggtgggccatctgtctcttctggaggctcatgattgaaatgtgtggggaacccagtggtgatgagcactgagcgggcatgggacagcgagagagaggccttcagcagctcatctttacagagcaggtgcccaatcccccggttccctgaaatgacaaaaatagaatgtaaaa

SEQ ID NO: 6169 - DNA, 569 bp, Homo sapiens
  MAP TO AC009429.3; EXPRESSED IN ADULT LIVER, SIGNAL = 0.97; EXPRESSED IN FETAL LIVER, SIGNAL = 0.67; EXPRESSED IN BRAIN, SIGNAL = 1.2; EXPRESSED IN PLACENTA, SIGNAL = 0.87; EST_HUMAN HIT: BE155662.1, EVALUE 9.00e-87; NT HIT: AF240765.1, EVALUE 5.40e-01; SWISSPROT HIT: Q24155, EVALUE 9.40e+00
tgtcatctagggtccttgggggaccacacataaatgagtctcacttcaggcctgcccacccacctattataatcttgtgcacaacagctgaaccatctgtgtttgagtcattcttatatttggggtccaactcatatagcaatttgttcatccaagccagcaaatgtttctgcacaaaacaaccttataatatgtggcagtgattgctcaagtaaacgtggatatgatgtgcatggaattgagctgtggattaagagtgtctgttcccttacaaattcatgtttctatgattcattcacatgcttagctccaactttcaaccccaatattctcactctgtcctagactaataacacaagtgtacctatttactgctgtaaggggtcaaagggccattcaattaataaataaacagaggtttatgtaattacaatactgggaaattcactaagggtcatcttgaccaaatgtcacgtgatgttgggtccttttgtatgctgtcagtaacccacagaggaggattttctgtgaaactgatgaagcttgtttcaggaccccttgcttgtaaa

SEQ ID NO: 6170 - DNA, 591 bp, Homo sapiens
  MAP TO AC010205.5; EXPRESSED IN PLACENTA, SIGNAL = 0.79; EXPRESSED IN ADULT LIVER, SIGNAL =   1; EXPRESSED IN FETAL LIVER, SIGNAL = 0.77; SWISSPROT HIT: P54854, EVALUE 9.80e+00; EST_HUMAN HIT: AA219211.1, EVALUE 3.00e-19; NT HIT: Y18000.1, EVALUE 4.00e-14
tttggttgatacagctggggcatggcatggggttgatgctactggcatttagtgggtagaagccagggatcctgccaaacatcctatagtgcacaggacagcccctacaacaaagaatcatccagcccaaaatgtcgatagtgctgaagttgagaaatccggaattagaaggggcaagaatggctgcagggcagttagtctacaggactggcctgggactaggtcagtggaaggacataggaagagaaatggacagattcaagaggcttaagaggcaaaatcctccagtccttatgttccattatgtgctaggcactccaccaacatcttgggatacaaaagtaagcgagatagacaagttcatttgctctcgcagaccctacttgtagttcttaagtgaatatttgttgaatgaatacttataagcatcaaaatttatttttgttgctgattgtgactgaacttaggaagagtagtttaagtgaggtgcctaatgtatgtaagacatcttgcgtagaggctggtcctaggcgttcagctaattaagtgccaactgtcccatctcaggattgttttccatgtggccagagt

SEQ ID NO: 6171 - DNA, 546 bp, Homo sapiens
  MAP TO AC010206.8; EXPRESSED IN PLACENTA, SIGNAL = 1.1; EXPRESSED IN HEART, SIGNAL = 1.1; EXPRESSED IN ADULT LIVER, SIGNAL = 0.87; NT HIT: gi10946795, EVALUE 1.30e-01; SWISSPROT HIT: Q03368, EVALUE 6.70e+00; EST_HUMAN HIT: BG718118.1, EVALUE 4.90e-02
atgcctcaccaacgctttacacatcttgtgattctaggaagctttaattgggtttgtaataagaatggatgcctcatcttaacctgtccagggaatagagttttatttgtcctggatctcacgctgggctggatttataaatgcagaatcccagcaccaaatttagcagagtgaattatttggtttcccaaatgtaggccacagtatctaattggagctgtaatgcagtaactgtgtgggcaattacccagcgaggtgatgggtgatggacatgttcaagatggaatctgggagcactgtatcaaataatttccttttctctttctttttccacaagaaacaattttcttccctgttgtccatcttggtggtttcaggtctccttttggaccttggagacaacattgaaggtatggctcaaagaccagccagccagcaagacattatggaactcaagtcccgtaccacagttgcttgctacgtgaggctgggttacctcttgaggctacgtgaggctgggttacctcttggagctctctgggtctg

SEQ ID NO: 6172 - DNA, 576 bp, Homo sapiens
  MAP TO AL109839.11; EXPRESSED IN PLACENTA, SIGNAL = 1.1; EXPRESSED IN ADULT LIVER, SIGNAL = 0.66; EXPRESSED IN FETAL LIVER, SIGNAL =   1; EXPRESSED IN BONE MARROW, SIGNAL = 1.1; NT HIT: gi5454095, EVALUE 2.00e-83; SWISSPROT HIT: Q13043, EVALUE 4.00e-26; EST_HUMAN HIT: BF744787.1, EVALUE 9.00e-81
acaagaaaatgcttgggcactaatgtgtgatatttcaaataacttcccctgaagacataaccatttacttccaacactacttacaaactcgtagtctccatcctgtggtattttccaatctgaagaatttttcagtggaccaggtacactcttgccaaagctgttgatctggttttccttttctttttgttcaaaatattcaagaaaggatggtttcgcaggctgcatggtctcatcccttcctgaaaacaaagaaaaatgaaaaatgaaaagaaacattctaaattttaggtaagtttaataaatagacatatctccagatgggctacaatctctggatcagtggatatttctgttagataaaggactccttcaagaatctagtgaaactacaaaaaatgcacaaatccttgcccaaaaaattctcatggaattccagaggagttaagatttcccctaaaatacattcagaaatttccctggggtccctctttctaaatggaaagatttgggtgatgcaatgattctgataatctgcaaataatacatttggagtctcccatagcaaacagctcc

SEQ ID NO: 6173 - DNA, 599 bp, Homo sapiens
  MAP TO AL109800.25; EXPRESSED IN ADULT LIVER, SIGNAL = 2.1; EXPRESSED IN BRAIN, SIGNAL = 2.1; EXPRESSED IN PLACENTA, SIGNAL = 2.5; EXPRESSED IN HEART, SIGNAL = 6.1; NT HIT: AL163210.2, EVALUE 4.00e-73; SWISSPROT HIT: P78018, EVALUE 4.50e+00; EST_HUMAN HIT: BG957173.1, EVALUE 1.00e-123
catgtttgcttccccttctgccatgattgtaagtttcttgaggcctcctcagccatgctgacctgtgagtcaattaaacctctttcctttataaattacccaatctcagtatgtctttactagcagtgtgaaaaaggactaatacagtaaattggtaccggtagagtggggtgctgctataaggatatcggaaaatgtggaagaaacttcggaactgtgtaacaggcagaggttggaactgcttgcagggctcgaaagacgacaggaaaataagggaaggtttggaacttcctagagacgtggagggctcagaagacaggaatatgttgggaagttcggaacttcttagagacttgttgaatggctttgaccaaaatgttaatagtgatatggataataaagtccaggctgaggtggtctcagatggagatgaggaacttgtttggaactggagcaaaggtgatacatgttatgttttagcaaagagactggcggcattttgccccagccctagagatctgtcaaactttgaacttgagagagatgatttagggtatctggcaaaagaaatttgtaagtggcaaggtgttcaagaggaa

SEQ ID NO: 6174 - DNA, 539 bp, Homo sapiens
  MAP TO AF196968.1; EXPRESSED IN ADULT LIVER, SIGNAL = 1.4; EXPRESSED IN PLACENTA, SIGNAL = 1.7; EXPRESSED IN BRAIN, SIGNAL = 1.4; EXPRESSED IN LUNG, SIGNAL = 0.63; NT HIT: AF281074.1, EVALUE 3.30e-02; SWISSPROT HIT: P11046, EVALUE 1.20e-01; EST_HUMAN HIT: AV762328.1, EVALUE 3.00e+00
ggctccaaggggtagtaaggatgggtcttggggacagagccaacaccagtgaaacagagctggtgttcatgtttctgcagcagcgtgaacgccaggactcccatctgggacacaccagcgtgtgtaccaaaaggacagctgtcatcatggcctctttcccaggtctgtccctgtagcagccaggccagtaccctggaaaggtgctcagctctgcaggtgcctggggggtggtgcactgaacttcagcctccttgtctgtgaaatgggtcctgctgttatgatggggaagggggaagccctcagagagggcctgagatagggagggccccacagagggctctggaaagaaagcttcttctttgttttttaaacaaagtatgtggaagccttaaaggccaggtgcctgggcgctgggaaaagctgccacctcctgctccttcccatggacacatggctgccacatgtgggcctctgacagcaaggctgggctcagaggaggccccctgtcttctgaagaccctgaaaaccaagggaaacca

SEQ ID NO: 6175 - DNA, 577 bp, Homo sapiens
  MAP TO AC021085.2; EXPRESSED IN BONE MARROW, SIGNAL =  33; EXPRESSED IN PLACENTA, SIGNAL =  33; EXPRESSED IN ADULT LIVER, SIGNAL =  33; EXPRESSED IN BRAIN, SIGNAL =  28; EST_HUMAN HIT: T63184.1, EVALUE 6.00e-08; NT HIT: gi14575809, EVALUE 9.00e-06; SWISSPROT HIT: P51590, EVALUE 5.50e+00
atcctctctcctcagcctcccaaagcattgagattacaggtataagtcaccatggctggccaatgagatgattttaaaacctgttcactttatctcctcggtaaggaaaagtacacttgtaacacttcattgtaatttcccccattgtgtttaagaaaaagattaaaaatcatcaatagcttggaccccactgaatgtagaggtcatcattcacacaaaagaggagagaggaaatgtgagcaaattaatgaaaatttacattcagcctgcaaatgcagctacagcatatgtcacaagggcatctgagcctatcgtttctcaccatcagcctccctatcctattgcttttcatttgctgaattgtgttcccatatggcagcatgtcataattagagttttgaaggtgaggcttctgctcaccctccatcacactgatcaccttgctgcagccacctgtgttcttgcacactagtgcagaggagacctcttgctgctgggtaaatgctgcagagcagatgcaggcccactgagtgttccgtgtggtctctgtgcaggaaggatgttctgacatgggctt

SEQ ID NO: 6176 - DNA, 581 bp, Homo sapiens
  MAP TO AL121594.3; EXPRESSED IN PLACENTA, SIGNAL = 0.57; EXPRESSED IN ADULT LIVER, SIGNAL = 0.73; EXPRESSED IN FETAL LIVER, SIGNAL = 0.86; SWISSPROT HIT: P35716, EVALUE 1.10e+00; EST_HUMAN HIT: AW900093.1, EVALUE 0.00e+00; NT HIT: gi14749944, EVALUE 1.00e-14
tttaaacacaatccctgggccccgtagctcccgcaccaggcacacaagcacctcccggaagttgcagcgactgcttccggggtaccagccgcgtttcttccgctcttgcatgccgaactcacggctctggagccagttcgagcactgagctctgaggccccgccccctaagggggtggtggagtgagggcgggaggcctttgaaggtatgcgcctgcgccaagcaggcctcttgagtggatagacgtgaaacttgggtcgtggcgctttcaggctttcatctggagaatgaattgactatagcaaggacgaaaaggcttcctgggggcccagaatagcgatttgcctatcagtgtgacctaaatagaacgtgtaattaacaagtctcttacatgcatcctgtgtctggtcagactgctggcttgccttcttcctaacctcttttatcctccactttcattcctattacgggggaaacaggttgcagctgcagctgcagccgttaaatttaggcactgaaggaagcgggttcaagcagccgctggaaagaacattattttctgacagccaggcaagatcttc

SEQ ID NO: 6177 - DNA, 519 bp, Homo sapiens
  MAP TO AC004779.1; EXPRESSED IN PLACENTA, SIGNAL = 0.51; EXPRESSED IN ADULT LIVER, SIGNAL = 0.48; EXPRESSED IN HELA, SIGNAL = 0.45; SWISSPROT HIT: P50644, EVALUE 3.20e-01; EST_HUMAN HIT: BF698071.1, EVALUE 7.30e-01; NT HIT: D78508.1, EVALUE 1.20e-01
ttggttaggtgggacagacctgagaataacattcttgaggaactcaatcttattttagtgacgggatgtgtctctgaggctcccaggggaaaattgggcctagtggagcagggtgtgtgcccggtgcatgtgatcaaatttgagggaggggacctctgtctaggagctgaggggttgaaaggaggaggagcccttggcagcctgagaaacaggagctacttggactgcagtgcatgtctgtagagactggcctgtggggccaccagtgtcacttagatgtgtctgtgaagggtggcagtgagctgagagaaaaatgcacccgacattggggagctgctcagccagggtgctgctcatctgggggcatggatgttgcaaacagcactcccgaaggtcatgcagcacctcagagtgatgaatgtcactgccactgatgacaaacaagttgccgaagcctgggaagcttatgcagagatgatgcagaaatacggaatgtgctgcgaatgagggtagcaagag

SEQ ID NO: 6178 - DNA, 554 bp, Homo sapiens
  MAP TO AC008953.4; EXPRESSED IN ADULT LIVER, SIGNAL = 1.3; EXPRESSED IN FETAL LIVER, SIGNAL = 1.2; EXPRESSED IN BRAIN, SIGNAL = 1.6; NT HIT: U72395.1, EVALUE 4.00e-94; SWISSPROT HIT: Q92973, EVALUE 2.00e-27; EST_HUMAN HIT: AU142986.1, EVALUE 6.00e-94
cattcatgtgaaatgctgctgtagtttccacaccaagtatgtatttactttaagaataccacatgaaaggggatatacttgctgcctttgtaagatctatactcttaaagtagctaacgctaactattcacatctcccaaaacatcttaatttccaaatatatgctaatctattaattgtaactatgctacacattattttccctaatagttcttaacagatacttactggtttgtttaaatgatgtcctactgaatctgctaatgttcctatggcatcgtaaagaatgagcaggttcttatgctggtatttactaaatgcaaagaccagggtatcaagtatataagcaaggtaaggaacaagttctgtacaagcctcctcttctagggtagcaaaggcactgtttaaaaaaaaaaaaaaagaatacttattgactgtaagatatatctaactcttaattgctaaaatgtttatgttctgttttacccaatcaggaatttcctaaaatggtctaagccatctgttaatgaaagccctggtcatcagcactgtga

SEQ ID NO: 6179 - DNA, 561 bp, Homo sapiens
  MAP TO AF198097.1; EXPRESSED IN ADULT LIVER, SIGNAL = 0.73; NT HIT: AF111168.2, EVALUE 2.00e-09; EST_HUMAN HIT: BF513571.1, EVALUE 1.00e-111; SWISSPROT HIT: O96008, EVALUE 8.10e-01
tggggagttactgtttgttgggtacagaatttctgtttgggatgatgaaatagttctggaaatggatagtcgtgatagttgcacatagtaagtgtactcaatgctactgaattgtatacttcaaaatggttcaaatggcaaatgttacgtgtaagggacttgaagatcattgttataagcctcctatttttctttctgcacaggtgccatggataacagaggctttcagcaggggagttttagtagcttccagaacagctccagtgatgaagacctgatggacattccagcaaccgctatggatttctccatgagagatgatgttcctcccttagaccgagaagtaggaggtatcattattggtgatgataatttatcttaattttttaaaatttatgtacaataaaattttatttttttttaattttattttctagcacacagtcctgtgagtttttaacaaatggctagattattgtaactaccaccactgacaggatacagaacagttcaactccctaaagaattccctcttgccactcctttgcagtcagacctcct

SEQ ID NO: 6180 - DNA, 544 bp, Homo sapiens
  MAP TO AC000127.1; EXPRESSED IN BRAIN, SIGNAL = 0.45; EXPRESSED IN PLACENTA, SIGNAL = 0.45; EXPRESSED IN ADULT LIVER, SIGNAL = 0.61; EXPRESSED IN FETAL LIVER, SIGNAL = 0.41; EST_HUMAN HIT: AL040832.1, EVALUE 0.00e+00; SWISSPROT HIT: P07789, EVALUE 1.00e-02
aagccagctgaaagttttggttttctggttttttgctggccacctgcagccgacggactagttgatttagggctttcagagtcttgtttaactttatttttctgtgctgccggtgtgttctttttttcatttgaatgatttgttccctttaattcattctgtggagaatgggtaatggaagggggtgaagattctacagaatctgctggttcaactttaacttttatttctgaactgttggcagtattattagggcctttttctcttttagagtttgttccagaaagagttatcttgtggacaatttgcatatgtcttttaagcattatttgtgaactatatttcctcttgcaaaggaggcatttgcatgcagttaaattgtattcagcctttgaagaagacttttgttttcgagtcttaaaagattttttaggagaaatagaatccaggaacaaaggttgcccaggctttgttgctatatcaggagtaattgaatccctccttagtcctctatgaacttcatcaaaatgcctccttacattcg

SEQ ID NO: 6181 - DNA, 525 bp, Homo sapiens
  MAP TO AC008970.4; EXPRESSED IN ADULT LIVER, SIGNAL = 0.8; EXPRESSED IN BRAIN, SIGNAL = 0.76; EST_HUMAN HIT: T81784.1, EVALUE 4.70e-02; SWISSPROT HIT: Q04978, EVALUE 2.20e+00
tgatgatcactgtgaaacgcttctaaattggtagccactcctacctgtggctcattgccttgtgccaaaaatgaattgggcactttaagcaggccacctgcaattggataattgcagcaaagacaatgcccagacttcaggccattgtttagctggcaatgatcataccctaaacaaaagggaagagaatcatcttcagataaatgtgtttaatgccaacatttttatttaaaaaataagccagtgttcgtatactacaaagtatgctttttcagaatcataatgtaatctttccaccctcttgactattaacacctcttgcctggagttcacaccttcactgagacaactacttttgagtggagcttttcaacctttatatccaagtatcttaaaacagttggggaattcttaaaatgctattttttttcttcatgtgtttgttcttattgtaagctctctgttccattcttggtcagagtcacgataacattttcctaatttggaggatgcttttcggcatat

SEQ ID NO: 6182 - DNA, 589 bp, Homo sapiens
  MAP TO AF129108.1; EXPRESSED IN ADULT LIVER, SIGNAL = 2.8; EXPRESSED IN BRAIN, SIGNAL = 2.5; EXPRESSED IN BONE MARROW, SIGNAL = 3.9; EXPRESSED IN PLACENTA, SIGNAL = 1.9; SWISSPROT HIT: O19883, EVALUE 8.60e-01; NT HIT: AL163267.2, EVALUE 0.00e+00
gttgaaacagcctgggtttgagcagggctatggcatacacaaacagagatgtgtagaagacggctgcagaatcaggactggagctccagcaaggcccaggtagggtgaaactacctgttaggagtattactgatgccctattattccagaaaaattatgaggaaggggtaactaattttccgtgtacttcactttttttgcttgttttagggataggatctgtttaaattctgcttaactacaagccaataatatttgggctgtgttgattcaaatataagaaagtaaattaacaggagggggactgtccaggtgtgcctgaccgaggggtctcagaacgtggacaccagtgctgaaatgggaaagtccggggcagatcaggccaccccaacaggccgagaagaaataggaggaggtgagatagtgactcctgactccttgatcatcacatagttgctaaaagggactcaagtggctattagtggagtagcaagtgcagctggcacgtatcctagtttaataagaaaaactctgtagagttacagggtcttgttgcatttagggaagagccagaaatgtctctccaggg

SEQ ID NO: 6183 - DNA, 520 bp, Homo sapiens
  MAP TO AC010328.4; EXPRESSED IN PLACENTA, SIGNAL = 0.9; EXPRESSED IN ADULT LIVER, SIGNAL = 0.92; EXPRESSED IN FETAL LIVER, SIGNAL = 0.68; EXPRESSED IN BRAIN, SIGNAL =   1; EST_HUMAN HIT: AI038627.1, EVALUE 2.00e-04; SWISSPROT HIT: O87386, EVALUE 4.80e+00; NT HIT: AF029701.2, EVALUE 1.30e-01
agtttgcatccccttcacagacaattctggggcttttaaattaagttgctaaactttttcaatagcaggaattttcctggatccaatcaccaacggtttgccctgccccagggagatcctgctgagttgcttcagcctcactggtaaatgttgcctcctaaacccgaaaaatagagatgccatgggagccagaagaggaaagcataggcccccccactccgcggaggccccgcccccttccttcttccctcccgacgccgtcgctcgcgggacccgcccaggattccgctctgcgcttagtttcctgcagacccggaaacagatcgcgcggagtgaacctggtatggcggcgcgtggatttccctctgtctattattaagattaaacttgggcttcgcagtcctctcacctccataccccggatttggaggttcgtacacgcctgaaaattctcataccgctcccctcactgctagtaagtcacacatcgctatgagactcttggggtcgtttcagtgat

SEQ ID NO: 6184 - DNA, 535 bp, Homo sapiens
  MAP TO AF260011.1; EXPRESSED IN BONE MARROW, SIGNAL = 1.1; EXPRESSED IN PLACENTA, SIGNAL = 0.97; EXPRESSED IN ADULT LIVER, SIGNAL = 1.1; EXPRESSED IN LUNG, SIGNAL =   1; EXPRESSED IN HELA, SIGNAL = 1.1; NT HIT: AL163248.2, EVALUE 0.00e+00; EST_HUMAN HIT: BF758791.1, EVALUE 1.00e-118; SWISSPROT HIT: O94822, EVALUE 6.00e-34
tatgaaggtcagagccggagattcccaacaaaacatttgagcagtaggctattacctggcaaatgtgttttttctttgctctgagcacataactgaaagagagttaataataaatcttcagatgatggcattagcaagcatcctttcgctgagctgaaatagttataggccacatcacagataaaagacactgatgagtcactgctttcagcttctgataatttctttgttttgaataaagtttcatgaagtctaacaatgattctttcaacatatacgtctccaatcaagtaatctggagaaaaaaaggttcaaacagacaaaaaataaaaatattaacgtgtatttttaaatatcttactttggattaataattctatgggtctttcctggattttaaaatgtattagacaaaattttatcaacaaatcaacacattctctcacacataaaggccctcaagtaaaaaaggcagttttaaattaagtagaaaacagaaatggtctacagttagggtgagcaagtttgtacactg

SEQ ID NO: 6185 - DNA, 523 bp, Homo sapiens
  MAP TO AC000390.1; EXPRESSED IN ADULT LIVER, SIGNAL = 1.3; EXPRESSED IN FETAL LIVER, SIGNAL = 0.6; EXPRESSED IN PLACENTA, SIGNAL = 2.2; SWISSPROT HIT: P25059, EVALUE 2.00e-08; NT HIT: gi14861872, EVALUE 0.00e+00; EST_HUMAN HIT: BE064410.1, EVALUE 1.00e-73
ttgtgtctcctggtgtcagcgttcctccctctggaaatgagatctctaagccagcagaatgtaatgtcggaggaacacgaagcaaaaattttgctagtggatcactaggggtgatggtgagtggtgccatgtccacttccaccttttgattctgggacctgtgaatcctggtgatgggagaaacagtaccatacattgaatgctgattcacggcatacacagccttctgaagaactttgccccagccctgcatagtattgtcacctagttggcattgtaattgtgacttcaaaagtccattccacagttctatcaatccagctgcctcaggatgatggggaacatgacaagaccagtgaattccatcaggatgagcccactgtcacacttctttagccataaagtgagtgccttggtcataggcaagtctatgtggaataccatgatggtgaataaggtatttcaggagtccacagatgatagtcttggcagaagcattgtgtgcaggataggcaaacccata

SEQ ID NO: 6186 - DNA, 543 bp, Homo sapiens
  MAP TO AC005601.1; EXPRESSED IN PLACENTA, SIGNAL = 0.9; EXPRESSED IN ADULT LIVER, SIGNAL = 1.7; SWISSPROT HIT: P14148, EVALUE 6.00e-41; NT HIT: gi14781591, EVALUE 0.00e+00; EST_HUMAN HIT: BG675447.1, EVALUE 0.00e+00
acattccttggcctttgttgtacgcatcgaaaggattgatggcgtgagtttacgggtgcagagaaccactgcaagacttcgcctaaagaaaatttttagtggtatctttgtaaaagttaccccctagaatctaaaaatgctgcatatagtggaaccttatgtgacctggggatttccaaatctgaagtctgtccgagaactcattttgaaacgtggacaagccaaggtcaagaataagaccatccctctgacagacaacacagtgattgaggagcacctggggaagtttggcttcatttgcttggaagacctcattcatgaaattgccttcccagggaagcatttccaggagatctcatggttcttgcgccctttccacctctcagtggcccatcatgctaccaaaaatagagtgggcttcctcaaggagatgggcacacctggctatcggggtgaacgcatcaatcagctcatccgtcagctgaactagacccaggtgaggcagggctgaaaactgcccttgggctgacttttgataggcca

SEQ ID NO: 6187 - DNA, 512 bp, Homo sapiens
  MAP TO AC006005.1; EXPRESSED IN ADULT LIVER, SIGNAL = 0.69; EXPRESSED IN BRAIN, SIGNAL = 0.53; SWISSPROT HIT: P24653, EVALUE 6.20e+00; NT HIT: AF224262.1, EVALUE 1.90e+00; EST_HUMAN HIT: BI090717.1, EVALUE 2.80e+00
gctgagatcctttgctgtcctctttcctaataggactctgactattcttcacggttaggtgtggactttccagtaatttctcaccagtggaatgttatcgaagtgttgtacaaaattcatgaccagtgtctctttatcgcagaatggaatacagacgtgatgtctggggctccaggatccatcttggaccatgactagggagcatgtgcagcagcaatggtagaggagcaagacagaaggaccctgacagcataggatgccaagggagctcttggttacttatattcaaacttcatttatgtgaaaaggaaataagcttctatcttccttaactgactctattttaggctttttgtaacatgcagcaaaatccatttttaacgacacgtgtacttttattccaaggatttgatataatcaaagagctgtttactagactgacctctaaagtagtattctccaaaatgaggtcagtatatactacagtgtgtacaagatgatccaaggggaaa

SEQ ID NO: 6188 - DNA, 508 bp, Homo sapiens
  MAP TO AC010393.4; EXPRESSED IN BONE MARROW, SIGNAL = 0.83; EXPRESSED IN ADULT LIVER, SIGNAL = 0.82; EST_HUMAN HIT: AV731676.1, EVALUE 0.00e+00; SWISSPROT HIT: Q9PVZ9, EVALUE 2.70e+00; NT HIT: gi4557450, EVALUE 4.80e-01
attttgccaaggtaacgtgctctaaccagccaattccactcacctcagtgggacaccttcgctttacctccataacagccatgttattctgttcttctgtgttcttctatggcttttcctcctctcatttcctcccctcttgccaaggaacccctggccccacctctgcaccattgcagggaggccttaggtcacctgctgctccctatgacttctaatcccttattttcgtgcagacgagcaactcaggatcacacacaggaggactcacccaaagcaggggaaggcggactccaggcttccagcttttgccccatcatgattcagggtcctaactggagagaaatgttccatgggacagccctggtgatcattttggatctgctgaccactgtgcccacctacaagtcccaagtacagccctaaacctcattctgtcttctgtgcgcttcagccagaactacccctggaaccttcccagtttctctgctgaccacaagcagtcaaa

SEQ ID NO: 6189 - DNA, 506 bp, Homo sapiens
  MAP TO AC008716.6; EXPRESSED IN BRAIN, SIGNAL = 0.48; EXPRESSED IN BONE MARROW, SIGNAL = 0.5; EXPRESSED IN ADULT LIVER, SIGNAL = 0.34; NT HIT: AL163213.2, EVALUE 1.00e-04; EST_HUMAN HIT: AA969670.1, EVALUE 7.00e-04; SWISSPROT HIT: Q10213, EVALUE 1.80e-01
agctcgccaacatcattttccactgcttctgtataggtttcttttgtgttgctctattattgtcctcacttcttttctagtgagaagtggtttagatacaaaaaaaagttacctatgctccattagtcagttaacaaatctatatctaaaccacaaacacactatattcatttccatttatttgacttctattttttatagtacctgtattctggaatgctgaaaacagggacaaaataaagtccccagtgaccaatccaaaagaagtgaagttgtataaactgtctagcaaagaattcaaaataagtgttttaatgaagcttgctgcctacaacggtaagttttacctatcaataattaccttgaatataaatgaattgaattctctaataaaaaaaaaaacataaaggagaggaggcagaacaagatggtcaaatagaacactccagtgatgaccctccatgcaggagcaccaaactgaacaaccatccacacaagaaagcagc

SEQ ID NO: 6190 - DNA, 585 bp, Homo sapiens
  MAP TO AC011525.4; EXPRESSED IN HEART, SIGNAL = 0.92; EXPRESSED IN ADULT LIVER, SIGNAL = 0.95; EXPRESSED IN BRAIN, SIGNAL = 1.1; EXPRESSED IN BONE MARROW, SIGNAL = 0.53; EST_HUMAN HIT: AL046799.1, EVALUE 1.30e-02; SWISSPROT HIT: P34458, EVALUE 1.10e+00; NT HIT: gi11496534, EVALUE 8.70e+00
tgacaaggattgagtgagcggtttttaatacagataatattgtccgtgtagtctataaatataaaattaaatgctgacctctctggtccatgtcaaaagtccaagccagtgtcagcacatattgtttttatttgtttcaagagaaaatagatcaacaacattaacctcccaatgaagagagaattgaatgaattaaaaagcagagccataaatcgcaccggttttattggcaccatgataaacatgcccgaggcctcgcagggagtggggtctaggatattctcaataccctgcagcctctttgccaccaagaaaggaagagagatattaagaactaagaacggggcgctgttctcccacttccaccacctctatccatcaccatctgacaaaggctccagcacacgcttcgagaaaaatattgagaagaaaaagaacctagaaacagggcaatttggagaggccttcggggagccaggggtgcccaagcggcccactcgccagctgcaattaacaagaggacttgtcagggaagagggggaagctgggcgtgggatttccaggacacaactcacaggccatcag

SEQ ID NO: 6191 - DNA, 580 bp, Homo sapiens
  MAP TO AF165141.1; EXPRESSED IN BONE MARROW, SIGNAL = 0.66; EXPRESSED IN PLACENTA, SIGNAL = 1.4; EXPRESSED IN HEART, SIGNAL = 2.3; EXPRESSED IN ADULT LIVER, SIGNAL = 1.3; EXPRESSED IN HELA, SIGNAL =   2; EST_HUMAN HIT: BG190698.1, EVALUE 6.00e-82; SWISSPROT HIT: P97697, EVALUE 1.00e-23; NT HIT: Y11365.1, EVALUE 0.00e+00
cgttccaagtttcttcaatcgacacttaaagtgaagttaaggaggaatatcttacttgaaaggattattttttccaattttatttctaaattctatttgttaggatccggagtgttggaacagcagctgttaatatgtgccttgtggcaactggcggagcagatgcatattatgaaatgggaattcactgctgggatgttgcaggagctggcattattgttactgaagctggtggcgtgctaatggatgttacaggtaaaattatggagagtgaagcagatctccacacatctgttggacttttgtccatatgtagaatttaaaaaactttttgatatatgttatactgcagtttttgaagcagaaacaagctatataattgtgtgcaaaatcaaaataagctttaggagatagaggtaaggataagaggtaatggtaatgtgagacttacaatgataaatggctaatccttttctagtgtgagtttcaggtactcctgaaaggctgtagaaaaagcctagaccaagtttgtccaacctgcagtccatgggccacatgtggctcaggatggctttgaatg

SEQ ID NO: 6192 - DNA, 579 bp, Homo sapiens
  MAP TO AC005582.1; EXPRESSED IN ADULT LIVER, SIGNAL = 1.2; EXPRESSED IN HEART, SIGNAL = 1.2; NT HIT: AE006490.1, EVALUE 2.20e+00; EST_HUMAN HIT: BI759932.1, EVALUE 8.10e-01; SWISSPROT HIT: P80074, EVALUE 7.30e+00
ttgagctcactgtccaccaggcagcagccatgcccacgactgcaatagcttggagaaatgccacagtggaggaggtacggggagagtgaagaactgcctggagcaggaagcctgtcaaagagcagcagagatggaggagaaaatatttggactatgtttgatgtcaacgaccaacgcaggttggctcagcagggatgggagtgcaaaattgtccaaagcagaacgtcttagataggttattctcaaacaagagaaagcctaatatcttgtgggaataagaggtgtcactgttcaggttccctgggaagtagaccctgagacacattttcatgcaggaagcttgttggggtatagtcaatacaggaattaccctgtgagggaacacaactaggaagcacgattggacagaaggaaaagttaaactgcaaggcagttgccgaagaggcctcagcaaaccacatggcagctctggaacaggggaagccctgcaaaggaatgtcaaattgaggcaaggaatctaggcttttgcaaaccctaaaagggcaatgataagatgaagctgatcttggagaggggtca

SEQ ID NO: 6193 - DNA, 553 bp, Homo sapiens
  MAP TO AL022069.1; EXPRESSED IN BRAIN, SIGNAL = 0.94; EXPRESSED IN PLACENTA, SIGNAL = 0.76; EXPRESSED IN ADULT LIVER, SIGNAL = 0.65; SWISSPROT HIT: Q15349, EVALUE 1.00e-23; NT HIT: gi13642626, EVALUE 1.00e-75; EST_HUMAN HIT: BE857569.1, EVALUE 2.00e-75
cctcacgctttgaggatttcggcttcaggcaccggcgggcttcgggcactgacgggcttcgggaagcactcacatggtcccgcttttgctgagcagggctctgctgcgcccacctggagagggggcagagcccacagaaggacgctgatgcccgcctgagtgtggacccccgaacacacccagagactgaggcagtgtgtgtgctgtgtttgcatgtagatttcggcctgagtaaggaggccattgaccacgacaagagagcgtactccttctgcgggacgatcgagtacatggcgcccgaggtggtgaaccggcgaggacacacgcagagtgccgactggtggtccttcggcgtgctcatggtgagcctgccccgaccctcttctgtgccatggcggctgttccccacgtggacccctgtccccaggttggttcagaggtcccgaaatgcggaagaaggcagtgcctgagggcttgggacactgggcaagtgtccaggccaagcatttcctggcagcctcctccccatcccacatccccaccatcagaaagt

SEQ ID NO: 6194 - DNA, 558 bp, Homo sapiens
  MAP TO AC008795.5; EXPRESSED IN ADULT LIVER, SIGNAL =   1; SWISSPROT HIT: P14736, EVALUE 2.40e+00; NT HIT: gi11416983, EVALUE 0.00e+00; EST_HUMAN HIT: AA418699.1, EVALUE 0.00e+00
gtcaccaaacatggtaagcggttgtgtcattcagtagtcttcaatgtaccagaaccctttggccaaaatgattctgtgaagtaattgctgttttattacctgtgaaactgaatttggtttttgctgcatagaaacttggaaattactcccttttttcatgacactggctgaaaggatatatggttcataactgaaagtctttgccttatataaaatgtttatttttatttcaaaagcatctaatcttttttttttttttttagcatcggcgtgtcataagatccatcacagctgcaaaatacagagagaaacagcaagtgaaagatgtgcaaaaactgagaaagaaagagccgaagactcttcttccacatgatcccactgcagatgtttttgtaacaccagctgaggagaaaccaatagaaatacagtgggtaaaaccagagccaaaagttgatttgaaagcaagaaagaaacggatttacaaaaggcaaagaaaaatgaaacagaggatggacagtgggaaaacaaaataagtcaatggaaacctgatttgttttt

SEQ ID NO: 6195 - DNA, 590 bp, Homo sapiens
  MAP TO AC005605.1; EXPRESSED IN PLACENTA, SIGNAL = 0.47; EXPRESSED IN ADULT LIVER, SIGNAL = 0.41; SWISSPROT HIT: O95013, EVALUE 7.00e-47; EST_HUMAN HIT: BG218617.1, EVALUE 3.00e-03
tctgacttccttctccttctcttcttcaaggtaactgcagaggctatttcctggaatgaatcaacgagtgaaacgaataactctatggtgactgaattcatttttctgggtctctctgattctcagggactccagaccttcctatttatgttgttttttgtattctatggaggaatcgtgtttggaaaccttcttattgtcataacagtggtatctgactcccaccttcactctcccatgtacttcctgctagccaacctctcactcattgatctgtctctgtcttcagtcacagcccccaagatgattactgactttttcagccagcgcaaagtcatctctttcaagggctgccttgttcagatatttctccttcacttctttggtgggagtgagatggtgatcctcatagccatgggctttgacagatatatagcaatatgcaaacccctacactacactacaattatgtgtggcaacgcatgtgtcggcattatggctgtcgcatggggaattggctttctccattcggtgagccagttggcctttgccgtgcacttacccttctgtggtcccaatgaggtcgatag

SEQ ID NO: 6196 - DNA, 520 bp, Homo sapiens
  MAP TO AC006541.1; EXPRESSED IN PLACENTA, SIGNAL = 0.59; EXPRESSED IN ADULT LIVER, SIGNAL = 0.84; EXPRESSED IN HELA, SIGNAL = 0.52; EXPRESSED IN BONE MARROW, SIGNAL = 0.88; SWISSPROT HIT: P56522, EVALUE 6.30e+00
gatacaccacccattgaggggttcatatttacatcttttgttgatattttttatagattaaaagcgcctctttgctaggtgataattctgctaagtactgtaatttgctgccattaatatttgtctgagtcctagtttgcaaaatatatttgaaaccacgttagaaagtcgcataattgcttctttaagctggggaaataagcagtttctttacccagcctttatcctgttaacctcagaggggaggggtgttcatggagtcctggaatcggctgagcacatcggccattgaattccagtgcctactgggggagacggtgcggcccggctgggcccagctgcgcccagctgctggtggcttctgggctgctcctccctgggccaccgagggacaggagacccatggagaatgcaccacccctgcctgggtcttaggccctggggtgtagggagagctgcctaacccctgggagccaagacaccgctcttcctgggcctctcttgggtcctcatctggaaa

SEQ ID NO: 6197 - DNA, 598 bp, Homo sapiens
  MAP TO AC064878.7; EXPRESSED IN PLACENTA, SIGNAL = 8.1; EXPRESSED IN ADULT LIVER, SIGNAL = 4.4; EST_HUMAN HIT: BI828263.1, EVALUE 2.00e-60; SWISSPROT HIT: Q16825, EVALUE 1.30e-01; NT HIT: AL163227.2, EVALUE 3.00e-52
cacacctctgcctggacatccaggtgttttcatacagcctctggaatctagtcagagattctcaaacctcaatttttgacttctgtacacccacaggctcaacaccacatggaagctgccaaggcttggggcttgcaccctctgaagccatggcctgaaatgtatcttgaccccttttagccatggttggaacagctgagatgctggttaccaaatcccaaggctgcgcacagcaggggggatctgaacccagccctggaaaccatttttccctcctaggcctccaggcctgtgatgggaggggctgctgtgaaggtctctggcatgccctggagacattttcctcattttcttggtgaataacattctgctcattgttacttaagcaaatttctgcagctggcttgaatttctccccagaaaatgggttttccttttctactgcatcatcagcctgcaaatttttcaaccttttatactctgcttcctcttgaatgctttgccacttagaaatttcttctgccaggtaccctagatcatctctctcacattcaaagttccacagatctctagagcaggagcaaaatgctgccagtct

SEQ ID NO: 6198 - DNA, 526 bp, Homo sapiens
  MAP TO AL109767.3; EXPRESSED IN PLACENTA, SIGNAL = 5.2; EXPRESSED IN HEART, SIGNAL = 9.2; EXPRESSED IN ADULT LIVER, SIGNAL = 9.6; SWISSPROT HIT: O69203, EVALUE 2.80e+00; NT HIT: AF107890.1, EVALUE 5.00e-01
tcctgcagatggtcactcactcgccctccccctgaccatgtagacggtcactcacttgccctctccctgacctgctggctttgtgttattgctttcggggacttgtgtgctgaccccacctctgtcgctgtctcctatagggagtgtgtctcagaccccatctccatggaacacctgggcagccgacaccctctccagagtagtggccgtggctgcctggggatggggaggggccgtgttatgcagatgacttttaatgaagtcccttttgaggagcagtttgaccagctgggattcccagtgcacagcccttggtctctccttatgggtgtcacaggaaaatttaaacccaggcccaacaagctggacaaagtctccacaggacaggagactgtgtgactctgatggcaaatgtcataactctggtgttattgaatttggaaggaaataacgtgccatgctcttgtgtgaacagccaggcccctcttacattcccatcgtggggaccagtccagcttcataggga

SEQ ID NO: 6199 - DNA, 533 bp, Homo sapiens
  MAP TO AC006117.1; EXPRESSED IN BONE MARROW, SIGNAL = 1.5; EXPRESSED IN PLACENTA, SIGNAL = 1.1; EXPRESSED IN HEART, SIGNAL = 1.3; EXPRESSED IN ADULT LIVER, SIGNAL = 0.76; SWISSPROT HIT: P50552, EVALUE 2.00e-12; NT HIT: X98534.2, EVALUE 0.00e+00; EST_HUMAN HIT: AV652596.1, EVALUE 0.00e+00
ggccccaaaaatacttggacttgcccaatttataaggcagagctcaatgtgacccctggaataggaggcggggaagcaggtcctctctctaatctcattgctgtcccaaaccacaccaactcccccaggatgaagtcgtcttcttcggtgaccacttccgagacccaaccctgcacgcccagctccagtgattactcggacctacagagggtgaaacaggtaacttgggggggaagttggggaccacagcaagagagatctaggtctggcccctgccactggcatgccgtatgatcctagataacatctcagaaacctcaggtttccaatctgacaaatggagaaactggattgggtcaaggatgaccgagactccacacccccttttctggcacctgtgacagacattattaatctatcaccgcgctcattccagatgagtgccttgaattctttccgcacattgacccagctgtccatcaccaattggagttggcaggaggctggaatgcgcttgccaaccttggtactgg

SEQ ID NO: 6200 - DNA, 509 bp, Homo sapiens
  MAP TO AC009757.8; EXPRESSED IN ADULT LIVER, SIGNAL = 0.39; NT HIT: AF361252.1, EVALUE 3.10e-02; EST_HUMAN HIT: R78583.1, EVALUE 1.80e-01
aaagctgcaagccaaaaatgaaagtgtgaagcctctaatcatttccttgatgatataagcaagaagctacaaccagagaatgcactgatgccctatattccattttcccatgtggaaggatgcaccgattgagagtaaagtagatcaacacagatgtggggggagggggcatcatttcactgttgagggagcctgaacaaaagtctttaacagttttacggtccccatagacctgagggagaaaaaccagaaagagtcagaactggaaaagtacaaagtagtaagtcagagcagagcaaagtattttcaagctttttccctcctcccttaaggtatctgaacttcttcagatacctttatctgcccaaggcctcagataaagaatgaaggcacctaggcttggaatgcaaacatgttaggagcatcaccagccagaggagcctgagtccttcactggcacttcttccaaggaccgacgcataagctgtgcactgactctggtgttggga

SEQ ID NO: 6201 - DNA, 529 bp, Homo sapiens
  MAP TO AL035361.2; EXPRESSED IN PLACENTA, SIGNAL = 0.92; EXPRESSED IN ADULT LIVER, SIGNAL = 1.1; EXPRESSED IN LUNG, SIGNAL = 0.61; SWISSPROT HIT: P57266, EVALUE 7.00e-08; NT HIT: gi13632538, EVALUE 1.00e-78; EST_HUMAN HIT: BF893064.1, EVALUE 2.00e-53
atcaagatgtgccaaaagcccaggcagctgtacccacacacacccagaccctgttacctcatcaatggcagactcttcaatccgccggggggcgtcagaagacaacaagccatgagttgccatcacaaagatcttatatgcacctctttccttcagggtctctgctgcagcaagaaagctgtcaacatcatcaatgatgtcatcctgccaaagcacagatggaaaagaatgtatatgagcacttctacaataataggttagacaaccaggaaaaaaaaagggtctgcctacatttaccgtgaaaaatctgctcttccacttggccttgtgcagacggcatggccccatgtccccatcaccgtgccccatggcagccctccagtactttcacacgagcctcttcctgcacagcacctgccactattggagctatctcccaccacactccaggctcccaggggtagcactgttttctgcaccataactggccaacattgtgctgtcacaatgcaggtcacaccagaaatga

SEQ ID NO: 6202 - DNA, 529 bp, Homo sapiens
  MAP TO AF172277.1; EXPRESSED IN BONE MARROW, SIGNAL = 1.3; EXPRESSED IN PLACENTA, SIGNAL = 1.1; EXPRESSED IN ADULT LIVER, SIGNAL =   1; SWISSPROT HIT: P02469, EVALUE 3.00e-21; EST_HUMAN HIT: AW103588.1, EVALUE 2.90e+00
tctgcctttgtgaaatgtgccaacttttactcatttttcctagacttttcggcctgctgcaatgttagttgaacgttccacagactatggacacaactggaaagtgttcaaatattttgcaaaagactgtgccacttcctttcctaacatcacatctggccaggcccagggagtgggagacattgtttgtgactccaaatactcggatattgaaccctcaacaggtggagaggtagcatttccttccttgtatttattttgtataaattaaacttttaaaaagtataattaacttaaatgaaaaactttcgatagtgtttactgtaatgtaagttgggctgttgcttttttgaaaatgaaagtgtctaaattgaaatgagtcccaaataaatactaaatacatttttagaagcaatcctgcacaagagtgctcagctgaaggtgggcatgggataacacttaaacggggcaccatggccccaggcacccagaagaaggaacacccatttctaatgcttgcaaaggagcc

SEQ ID NO: 6203 - DNA, 558 bp, Homo sapiens
  MAP TO AL109753.9; EXPRESSED IN BRAIN, SIGNAL = 1.1; EXPRESSED IN BONE MARROW, SIGNAL = 0.69; EXPRESSED IN PLACENTA, SIGNAL = 1.1; EXPRESSED IN ADULT LIVER, SIGNAL = 1.2; EST_HUMAN HIT: BG193836.1, EVALUE 0.00e+00; SWISSPROT HIT: P46100, EVALUE 9.00e-23; NT HIT: X83753.1, EVALUE 0.00e+00
caggaagaaatggtatgccctatttaaaaaaaaaaaaagtaaaactaatatggaagattggcatttaaggggaccaaactatttatacagttgagttctgttaagtcattgattcctaaaaaaataaaagatctttctatgattttaacaatccattaagcttttagtgcaaaatcacattgatttcccttgggaaggtcctggatttttgcttctcattgggggtggtgcacgctgtaatggtggtggctgcataccaccagccactggctgatacattcctctcatatcaatctgctggtagttagaaggattcatgatcaaatttgggggctttggcatcatgaggtgacccagtgttgcttgttgataagtcatttgttgctgttgctgctgattgtactgctgctggagccttctgttcataagtattcgctgaacacagctgattaactatagagaaaaaatgggagtcattacaagtgcatgacctgtctcaaaagaggtatcaagttttgacttaaaatcaatttgttaagggggtaccataccaaaagg

SEQ ID NO: 6204 - DNA, 505 bp, Homo sapiens
  MAP TO AC010169.7; EXPRESSED IN ADULT LIVER, SIGNAL = 0.35; EST_HUMAN HIT: W20459.1, EVALUE 7.00e-04; SWISSPROT HIT: Q10141, EVALUE 9.20e-01; NT HIT: L78810.1, EVALUE 4.80e-01
gaaaaccaagttcacgggagagcaggtgatggagaaagaatcatcctgacataacagatttggaaatgaagctcaaggacaagttctgaaatggctattcctggtcctggaggctggggcttagagctctgttgcggggaagggtggtgctaactataggtgtgtcagttcaggtcctctagtgagcaaatgctaaggtggagttaggagtgtgaatgtttattggatggcagggggacctgtgagagacaaaagaggagaaagtaggattgggcagagagaaactcagactgcattgcagatctgaaaaagtctttgccaatttgataacgagttccagggcaaaggctggaatagaagccttagtaaccctactgtgctttgtcaatgtctggggctgtctgggaagagcattgacaggcccagtcatagacctattgacaagagcctgaaggcaatgtggctagaggctccaactcattgccctcctcacagttgagtggca

SEQ ID NO: 6205 - DNA, 504 bp, Homo sapiens
  MAP TO AC010316.5; EXPRESSED IN BONE MARROW, SIGNAL = 2.9; EXPRESSED IN HEART, SIGNAL = 1.9; EXPRESSED IN ADULT LIVER, SIGNAL = 2.5; EXPRESSED IN LUNG, SIGNAL = 1.9; EXPRESSED IN BRAIN, SIGNAL =   2; EXPRESSED IN FETAL LIVER, SIGNAL = 1.7; NT HIT: gi15296472, EVALUE 6.00e-93; EST_HUMAN HIT: AW589300.1, EVALUE 9.00e-93
ttgctgtttccttttctgccaaattaaactgagaaaaaaggtggcttattcagattctgccacgctctgcttttggaatcccttatggcagtgtgaaatcgtcatctgctaagaatatcaacatttttacacacacacacacacagaagatttcaatataagaaaacacagaactttgtgagagtgctgtttttcttctcttgcttttgatctattcacagggaagaaagaaaccagacccaagtgctgagacaacagcaggatgaggcctacctggcctctctcagagctgaccaggagaaagaaagaaagaaacgggaggagcgggagcgtaagcggcggaaggaggaggaggtgcaacagcaaaagttggcagaggagagacggcggcaggtaatggacgtgtggctttactccctgtggttcccaaactgccgagactttgccatcttggtcttaagtgtgaaaggaaaaaatgatagccaccttaaacagactaagagg

SEQ ID NO: 6206 - DNA, 553 bp, Homo sapiens
  MAP TO AC008648.4; EXPRESSED IN PLACENTA, SIGNAL = 0.75; EXPRESSED IN ADULT LIVER, SIGNAL = 0.75; EXPRESSED IN HELA, SIGNAL = 0.54; EST_HUMAN HIT: BI015447.1, EVALUE 2.00e-78; NT HIT: gi14732953, EVALUE 1.00e-78; SWISSPROT HIT: O58810, EVALUE 5.20e+00
gccctatttgcagagcagacactgcaggtgaaaacccttgtaaacagtgaagtgctttctacacgcacgcccgtgttattagccttaataatcgggcttgttttggataatgcatgcgctctaacgggagttaatatatgttaagtgttcaaaacggtgcctggctcatggtaaacaactatataagtgttaactattgtttttactattatgcttccctttttttctttccccaggcttggtcggaggaggacctgtgcgtcgccgaactgttttatgtgttcatgttcctcttctctttcaggtcagaacaaaatctgcttcatcccaggcatggtaggacctatattagagatgacacttatccctgaggctgagctccggaaagccaccataccaatcttcttcgacatgatgctgtgtgaatatcaaagaagtggggatttcaaaaaggtaaaaaatgaggccggaaactcatgccagcatgcctaatccccagcccatttccccataatgatatcctcattccatctccctgagcttcattgagagg

SEQ ID NO: 6207 - DNA, 577 bp, Homo sapiens
  MAP TO AC011387.4; EXPRESSED IN LUNG, SIGNAL = 0.69; EXPRESSED IN ADULT LIVER, SIGNAL = 0.68; SWISSPROT HIT: P43470, EVALUE 3.70e-01; EST_HUMAN HIT: BG181183.1, EVALUE 1.00e-05; NT HIT: AB009777.1, EVALUE 1.40e-01
atttagcccagtgcctgatgcatcaagaacacccaataaatgctggctatcctcaccagccttattattatgatgatgatgactattattatgactaccatctccacttctctcatgtgtgacagatagctgctgacataatttccagtgatccccaccccatagtattcatgccgtgtgtaatcccataccttgagtggtgggctggacctagtgtcttgttcctaacaaacagaatacaccaaaagtgatggaatatcacttccatggttagctttaaaaagactgtggattccatcttgctgacatgttcctattgctgtctcccttcttgtacactttgatgaagcaagcagccatgctggagaggcccacatggaaaggaactgagggaaccctccagccatcaggaaatgaggagctaaagctggcagcctaccaggaactgaatcccaccaacaaccatgtaagtaaacttggaagcagatcttccccaatccagccttctgatgagtatagcccagatgaagccttgtgtgctgcctgtgagataccctgaagcacaggacccagctaa

SEQ ID NO: 6208 - DNA, 524 bp, Homo sapiens
  MAP TO AC008150.8; EXPRESSED IN PLACENTA, SIGNAL = 8.4; EXPRESSED IN ADULT LIVER, SIGNAL = 5.3; SWISSPROT HIT: P57615, EVALUE 5.60e-01; EST_HUMAN HIT: BF802716.1, EVALUE 3.00e-03
aaagatgccttctgacacggagcttgcaatctatcagaggagcaaaccatgaacaataaatgagtaaaatacacagtgcttacagtggaataagtgctgaggaaggtggacataaactgtgagggagataggtggccagtagaggccttattgagaaggtgacatttgacaaaagactggagggaagtgaggggaccagccatgcaaacacctcagggaggagctttccaggcagaaggaccagcagtgcaaatgccctcgggaaaaccatgcagggtgtgagaggaacagtggggaggtcagaggtcactggagtgagagaggggagtgatgagagaagagtcccaagaggtgatcagagccaggctgtgtgaggtcttgcaggtaacagttatgactggatttcactccgagtaaggtgggaaaccactgaaaggttttggcaggggacataatttggattatccacgttatcctgtactgcagctttttgcgtatctgtctctgcctccatactgtgggtt

SEQ ID NO: 6209 - DNA, 515 bp, Homo sapiens
  MAP TO AC008727.5; EXPRESSED IN BRAIN, SIGNAL = 0.63; EXPRESSED IN ADULT LIVER, SIGNAL = 0.78; EXPRESSED IN FETAL LIVER, SIGNAL = 0.81; EXPRESSED IN PLACENTA, SIGNAL = 0.58; NT HIT: gi14761690, EVALUE 4.90e-01; SWISSPROT HIT: P26016, EVALUE 8.20e+00; EST_HUMAN HIT: BE793849.1, EVALUE 4.60e-02
actttccaggagcaaagcaggaatgggaacatttagatgaagccagctctgggctttgtttctgtatttgtcaaataaagaaggtgaaccccttgggggtgtcatcacagccactgtagccctgtgtgtacatagggacctgtctttaagcattgatataaatccccctgcagatgatcagtgcctgttcaccaagcttccagttgcaacacctgaagatggttccttccttcattcgggaaacacggggtcctcaaatctacacctgactgggggcagcctacagccctataggagaatgaaagagcttggtttcagagctcttcagacttggaccagcatggatggctccacgttccataacaggcatgccaagggtgtttggatgacgctcaaggccagtgattcctgcctggtaggcttgcagtctcgctgctgacctgacatgttctctggaagggagaagagtggacactgaaccttaaatcagagcatcatcattcccactgtgatgc

SEQ ID NO: 6210 - DNA, 503 bp, Homo sapiens
  MAP TO AC000372.1; EXPRESSED IN ADULT LIVER, SIGNAL = 0.54; EXPRESSED IN HELA, SIGNAL = 0.51; EXPRESSED IN PLACENTA, SIGNAL = 0.44; EST_HUMAN HIT: AW895337.1, EVALUE 7.00e-01; NT HIT: gi9838361, EVALUE 4.80e-01
aaccatgattggtctgagccaaccacagtgctgctctcttccccctttcccagatttcatgcagccacgtttgaccagcgacatgagcaagcctgtgatggtccctccggaaaaggattgtgctttcctagtgacaacttcaggctctgaatgggcatgtgcaggaaggggacaaaagaggtaggcaaagaagaaagggcctgacattgaatcattttcacttgatttgctgcttttcactgattaacggttttgaagtttatggcttaagggcatatgatcccattactagcaatgaatttattttgcttctttttctaattggtattagttttattaggtgtttcaattaagagactataatcttagcttaacacatctgcatttagccatgatattctgctttgactttaaataaatgtgtctgccattctttatacagaaggcaaaaaaaaaaaaatacgtatacgtgtggctttgtatctcacccagctttggaaatc

SEQ ID NO: 6211 - DNA, 575 bp, Homo sapiens
  MAP TO AC025754.2; EXPRESSED IN ADULT LIVER, SIGNAL = 2.7; EXPRESSED IN PLACENTA, SIGNAL = 2.3; EXPRESSED IN BONE MARROW, SIGNAL = 1.5; NT HIT: AJ404852.1, EVALUE 9.00e-03; SWISSPROT HIT: Q28203, EVALUE 4.20e+00; EST_HUMAN HIT: AW510937.1, EVALUE 1.30e-02
aagatgtggaatggcctcactcatacactcagtagctgctggtggtccctggctggagtcagctagagattgttggctgggacctcagttctccttcacatagtttcttgggcttcctcataaaatggcagctggattccaagaaggagtgttccacaaggatgcaccccagtgtgcaagtgcttatcaatctctgctacatcatgcttgccaacatcccatggacaaaaattagtcacatggccaaggccagggtccacatgggaagggctgtacacaggcatgaatgctgggaagcgtggttcactggggacacaaaagtcacagcccaccataggtaagcatctagccatcttagcatggataaaggtttgtgagcacatttctgttacagggagatgggagccactaaaatagtcattaaagaaatatttttcatgtttttcatgtcattatccttcctccccgtcctccaggaggtacagagaaaagtgtgatatctctgcccaccagattcaaaacagacaactgtatggagagagtgctcacttgcttgccttgtcaggtgatccagt

SEQ ID NO: 6212 - DNA, 512 bp, Homo sapiens
  MAP TO AL121768.2; EXPRESSED IN BONE MARROW, SIGNAL = 0.42; EXPRESSED IN PLACENTA, SIGNAL =   1; EXPRESSED IN ADULT LIVER, SIGNAL = 1.1; SWISSPROT HIT: P37788, EVALUE 7.20e-01; EST_HUMAN HIT: AA252702.1, EVALUE 7.20e-01
caagccagagctatgagttccaaatttaaattaaaataatatgaattaaaataataaaaactctaaaactgtaggaaaaaagtttggggtaaattttatttataatctgaaaataaaactcattctaaagaattctttactcttcatatcctagaacataaaagagatatgtgattaatttatttaaactcaaacaaaggtgtagcttatctggcttattgtcagtctgtcaaacctacctggcctgttgccacgtagtctttcaaaggatgaatagttaggcagagaatatcatcatcatgacccagataaaaacgctgtgtgttttgctgtcgattataaatgacacccactgctgccacatggtacacaatttcaccaatttgagtataaaacagattacttcgacagtcataacctctgtaactaatatagaaaacaaatcatatataattaattttggccttttatctgatcaatacagaatatacaggggagaagtaggtaccctt

SEQ ID NO: 6213 - DNA, 510 bp, Homo sapiens
  MAP TO AC010389.6; EXPRESSED IN BONE MARROW, SIGNAL = 0.47; EXPRESSED IN PLACENTA, SIGNAL = 0.53; EXPRESSED IN ADULT LIVER, SIGNAL = 0.58; EXPRESSED IN LUNG, SIGNAL = 0.84; NT HIT: AB031005.1, EVALUE 4.00e-26; SWISSPROT HIT: P70275, EVALUE 6.20e+00; EST_HUMAN HIT: AI202661.1, EVALUE 6.00e-17
cccttctccacagcaaagagctttcttctttggcttattaaactttcactccaacctcaacctttgtgtccacactccttaattctcttggttgtgagacaaatcattccaggtgatacctcacaacaagagaatgctacattgtggtgcattggtgagactctgccactggtttgggtaccataaaagggatcatctgctgcacatggacaaaagtgtctgatatatggaaaaacagccccaactgggtcaatcaggagtacccacgaggccactcacctctgaacactgaccataggttctcaagctgcaccccatgcttctgtgcacctggaagatgagcccttcccccatctccagcagcatcagagtccaagtgtctacaatgggtaacaacacaccccacctaccagctggctcctgaagtcaatactgggtgtatagcatctcctaggccatgcccaggaagagtgcttgattccattgtgctcaagccccagacaaaattgt

SEQ ID NO: 6214 - DNA, 595 bp, Homo sapiens
  MAP TO AC000127.1; EXPRESSED IN PLACENTA, SIGNAL = 0.68; EXPRESSED IN ADULT LIVER, SIGNAL =   1; EXPRESSED IN BRAIN, SIGNAL = 0.95; EST_HUMAN HIT: BF700757.1, EVALUE 5.40e-02; SWISSPROT HIT: Q59637, EVALUE 4.40e+00
tatacccacagcctcatgccatagcaaaatcattaactccccactactgcatccataggctctttaatgcaaactgagcagaacagactatttattgaccataaagtaatataataaatatattcctaaaaaatctgaaggtacatttcaacaactaaagcaacctgtgtcaaccaaaaacttaattcatatatacaaaactagacaaaaaactaaaacctaagaatgggtaatgtgtacactcttcaaaggttttcttcttaaagagtaaaggggagggggagggaatggagacataaaccaaaaaaaaaaagaaatggttgttgtgtattcaaggcatgtctaatgaacacctgcccaatgtcagctatacttcagctctcatttgcactattcaaacttataaagttgaagagcaacctacgcctgttgtttctcctctcccaccacacttaggaatggaaggcatctttaggaaggaaggtaagttgaattccataggaaaactcttaattgatcaaatagcagcaaaggtagatataatttatagccagataggtcttatataaaataagcagtttctgatggctctttg

SEQ ID NO: 6215 - DNA, 527 bp, Homo sapiens
  MAP TO AL096870.3; EXPRESSED IN PLACENTA, SIGNAL = 0.51; EXPRESSED IN ADULT LIVER, SIGNAL = 1.5; EXPRESSED IN LUNG, SIGNAL = 1.5; EXPRESSED IN FETAL LIVER, SIGNAL = 0.72; SWISSPROT HIT: Q9SDT1, EVALUE 7.40e-01; EST_HUMAN HIT: AV761815.1, EVALUE 1.00e-130; NT HIT: gi16162596, EVALUE 3.00e-76
aagtgacatggctaggtggctcttaccctgccttccgcctctccacagtgtgacaagctggctgctgactgtgcccacgagctgcggcgccatggggtcagctgtgtgtctctgtggccggggattgtgcagacagaactgctgaaggagcatatggcaaaggaggaggtcctgcaggatcctgtgttgaagcaggttggcaaggggagggcgaaggaagcagagaacaggggagtcggcctctgcatcctcaataacaagatcagatactcccactcaccaggtgcttactgtggcaggtgcagggctgagcatgggacacacattatttcctttaatcctgtaagggagataccagctccattctacagatggcaaaactgaaacccagagaggtttagaaacttgttgaaggtcacatatgtcctaagtggaaaggctgtctagctccaaagaccatgcacttgacccccacaccagctagcttagaaggtccaaacactatttggcactaccagatccttcca

SEQ ID NO: 6216 - DNA, 522 bp, Homo sapiens
  MAP TO AC004826.3; EXPRESSED IN ADULT LIVER, SIGNAL = 0.42; SWISSPROT HIT: P04706, EVALUE 7.30e-01; EST_HUMAN HIT: AL046422.1, EVALUE 0.00e+00; NT HIT: gi14781171, EVALUE 0.00e+00
ttgaggcttttccagctttggaaataagagctcactgttacctcagagagaaagtggaggaggttctggtggctggctttccttgccgcttcctgagattcctcactgcctccatccccaacaagcagttcactaggttctctctccgggctgctttcctctagttcctcagcctctggatcctcagtttccctccagttgcccacatcaagatccagactggagtcccatgagctgaagagggacctgcagtcattgctcaactcagagtcattgggatgatcttgttcagaatccagccaaacccactcgtgtcccatctgtaaatacacaggaaaacatgcattaaattcattcaaataaatattcctgaggcatctccatctcccgagttcagtagaaaaataaggggccagaaatttatttgtattcaagtattcatcattaggaagaattaaaatcttgctgaagggagacatgagatgaaattatatttgtctttgggaataaagaaagccccat

SEQ ID NO: 6217 - DNA, 570 bp, Homo sapiens
  MAP TO AC008821.4; EXPRESSED IN BONE MARROW, SIGNAL = 0.95; EXPRESSED IN PLACENTA, SIGNAL = 0.48; EXPRESSED IN ADULT LIVER, SIGNAL = 1.1; SWISSPROT HIT: Q02916, EVALUE 3.70e-01; EST_HUMAN HIT: AA877216.1, EVALUE 6.00e-94; NT HIT: AF414080.1, EVALUE 5.40e-01
ttaaaccctggcactgaaccagtttttattcttcatcttgacttaatgcctctccattctcttctctcatcttcttctcctggctccactcacctcctctgtagccaggagcccacagttggctatttcggccgtgtgtccagagtctggaatccctcgtccccttgggcttgcactgtggccagttagcttgcccatcctcagcctcggcaccctccttgtttgtcccctcccttcccggtgcaccctccaaaggtgcacccctcttctctgaggtcagccccactgcctggccctctgtcccctcctccagtgctgttggtgactttgctccatcaagcatcgtctttctctctctctgtctctctctctcatattctcccccctcaactagttgcttcctctctgcaaaaggaaaaaaataaaacaaacatagtcgagtttcccttaaatgaaagatgctttttctcaatcctgctattccctcaagctgttattgtatctcatacccttctgccacagttctttaaagtctagtccaaacgggtttctccaactccctacatccca

SEQ ID NO: 6218 - DNA, 500 bp, Homo sapiens
  MAP TO AC003966.1; EXPRESSED IN PLACENTA, SIGNAL = 1.5; EXPRESSED IN ADULT LIVER, SIGNAL = 0.51; NT HIT: AJ006345.1, EVALUE 5.00e-10; SWISSPROT HIT: P08547, EVALUE 4.00e-19; EST_HUMAN HIT: BE675828.1, EVALUE 5.00e-05
ttttgaatttgggcagtgtgactcctcccactttgttttttttcaagattcttttggctaatcagggtcccttgcagtcccttatgaatctgaagatcagcttttccttcctgcaaaaaaaaaagaccactgaaaatttttttagggatgcattgaacttgtagatcactttggggagtattgtcatattaccaatattaaggctttccaactataaatacaagatgtctttccttttatttatgtttttctttcagcagtgttttgtaattttcagtgtacaagtctttcatctacttggttgaatttattcctaggtattttattattttggatgttattgtaaattaaattatttttataatttcctttttaatttgtttattgatgatatattgaaacacaactaatttttctatgttgctcttatatcctgcaactttgctgaattaatttattagttttagtagtttttatgtgggttctttgggattttctgt

SEQ ID NO: 6219 - DNA, 542 bp, Homo sapiens
  MAP TO AC010485.4; EXPRESSED IN ADULT LIVER, SIGNAL = 1.2; EXPRESSED IN LUNG, SIGNAL = 2.2; NT HIT: AF283320.1, EVALUE 2.00e+00; SWISSPROT HIT: P54259, EVALUE 1.20e-01
tatggaaggatgggatgaggggttcctggagggaggggtgatggctgggaatccctaaggccatcactgggggaagggggtctgccaggtcatttcagggagaggaaggggtgtgcccactatcaggctgttccctctaggactcaaagaagggggcatgtaacccagacccagaggcagggggcacctctatcacacccattgtcatacacatgttgagagcagggcttggctgtgtcaggtgcccgggatctgactttctccctgtgaccgtgagggttttatgtcctgctggtcctgatgtcctctgcaccgtcatgtctgggcctgtgaaggtggcaagattttcaaagtcatctgtggaacataagctctaatgacagaaaagaatgtttgaaatcaggggacctctgctgaggctcctggggccgggcagagaatgtcctacaagatgggtggcaccaatgtttataaggaccttcaggactggtgagagcgcagccacacaggagcaggcaatctcccggctaacaacactcagt

SEQ ID NO: 6220 - DNA, 512 bp, Homo sapiens
  MAP TO AC025457.3; EXPRESSED IN BONE MARROW, SIGNAL = 1.9; EXPRESSED IN ADULT LIVER, SIGNAL = 1.6; EXPRESSED IN BRAIN, SIGNAL = 1.4; SWISSPROT HIT: P31600, EVALUE 4.80e+00; EST_HUMAN HIT: BI052199.1, EVALUE 7.20e-01
ctcatcctgacactcactttggaactttatacttaccacactaggttaatttccatatgtagcatcttgatgatcaggataagagagtattccagactaatgggcctcctgtttgtagagtttcctgaagttcctagctcaccttcctcttgctccataactcactgctcaggacatttcctggccttctttgttcttttaagaacaaagttctgcagttatggcctaacccctatgcatgtctcatacctcttggctcacatttaaccattcttttggctatgcttatgttgtactgcttcagcctcacattctcatagaccgctttggatttcccagtgtgttcccacctcattcaagtgacatgccttcctccaatctagcttatgtgctccctctacattgtgggtatagggtggctctaccttctcaccattctgaactggagaacagcaagccagttaaagtcccacatcttctctgctagtggcacaaaccaggcattcctcatt

SEQ ID NO: 6221 - DNA, 590 bp, Homo sapiens
  MAP TO AC010219.4; EXPRESSED IN BRAIN, SIGNAL = 1.6; EXPRESSED IN BONE MARROW, SIGNAL = 1.3; EXPRESSED IN HEART, SIGNAL = 1.2; EXPRESSED IN ADULT LIVER, SIGNAL = 1.6; SWISSPROT HIT: P15365, EVALUE 9.80e+00; EST_HUMAN HIT: BF984404.1, EVALUE 2.10e-01; NT HIT: gi14780785, EVALUE 1.40e-01
tgagctgcagtgcatttacccagcccttctttcatgagcttagctgcatcgtttccttgttattggcctggcctgtttgcctgcatgtttattcctagatgttttgctgtttctcttgcttttttgaaagatgtctcttctccattgtagtggctgagcagttagcatcttgggtggaatcaatatcctacctctttctggcatcagtggttatgagcacacagcttcagagtccagcagatctgggtgtgaatccacttaataagtgcatgaccttgagaaatgaccttccacctcgagtctcagtttcctggcctgtgacagagaagaagtaacatatgtgccacagtcttgctgtgaatattaaattagatactttgagtaaagcttttagcgtggtaccagtacaaatacgcaagaaatgtcttctattatggttatttagtaatatcactggcataaatattttataactctaaacaatgtactatcatgctgggcgttttgttattactatacacaaaaaacatttctgatgccacacccccgaccccatctctttggtagctaggggacggcactattttctt

SEQ ID NO: 6222 - DNA, 600 bp, Homo sapiens
  MAP TO AC004037.1; EXPRESSED IN ADULT LIVER, SIGNAL = 3.1; EXPRESSED IN LUNG, SIGNAL = 1.5; EXPRESSED IN PLACENTA, SIGNAL = 3.7; NT HIT: gi15791399, EVALUE 8.90e+00; SWISSPROT HIT: Q9UKP5, EVALUE 7.00e-07
aattccttcacttatgcctggtaataacaaatacaggtactaccataggctggaattactttcatttgtactaagcgtttgaaaagtttatagctttgtagtctcaagattatggaaatatttgtatcatttacaaatctgtagtgaaatcaatcatgcactatgtaatgactgtcttgatagggattttaataatgtaataagattttattcaaagaagcaggaatagttgcaacactcaaaagacattctttaaatgtagtcagtcttcaccccttcttgtctccctagtttttcaaaaacttgaagcccaaattaaaaatcagaagatatccaggtaattcagtaactcgaattacaaagttatatgctaacatatttaacatagccatgatttttacttacttgtgacccatttcatgagcaattgtaaaagcaagattcaagccattgtcttcagcaataatacattttctcttttcactacacattccactcaagtaagctatacctaaaaaatacaaacattaattattatatgtctgaatgaatatgcaaatatttatactagttattagcagcaggaatgaaaatggcagt

SEQ ID NO: 6223 - DNA, 538 bp, Homo sapiens
  MAP TO AC025761.3; EXPRESSED IN ADULT LIVER, SIGNAL =   2; EXPRESSED IN BRAIN, SIGNAL = 1.8; EXPRESSED IN BONE MARROW, SIGNAL =   2; NT HIT: gi14724561, EVALUE 0.00e+00; SWISSPROT HIT: Q11122, EVALUE 2.00e-25; EST_HUMAN HIT: BI913571.1, EVALUE 0.00e+00
cctttagcttgccatgattgctaaaagtcatctgttgtgtgtttttaaaatctgcactaacacttgtggaccattcatgccatactgaagctgattttctactttattttttcagttgttcatggtggacaatggagcagatgactggagaatagccatgacttatgagcgtattttcttcatctgcttggaaatactggtgtgtgctattcatcccatacctgggaattatacattcacatggacggcccggcttgccttctcctatgccccatccacaaccaccgctgatgtggatattattttatctataccaatgttcttaagactctatctgattgccagagtcatgcttttacatagcaaacttttcactgatgcctcctctagaagcattggagcacttaataagataaacttcaatacacgttttgttatgaagactttaatgactatatgcccaggaactgtactcttggtttttagtatctcattatggataattgccgcatggactgtccgagcttgtgaaaggtaa

SEQ ID NO: 6224 - DNA, 525 bp, Homo sapiens
  MAP TO AL121674.12; EXPRESSED IN FETAL LIVER, SIGNAL = 0.88; EXPRESSED IN BRAIN, SIGNAL = 0.57; EXPRESSED IN BONE MARROW, SIGNAL = 0.71; EXPRESSED IN PLACENTA, SIGNAL = 0.71; EXPRESSED IN ADULT LIVER, SIGNAL = 0.64; NT HIT: AB033689.1, EVALUE 5.00e-01; SWISSPROT HIT: P09732, EVALUE 1.30e+00; EST_HUMAN HIT: AW387304.1, EVALUE 7.40e-01
cagagcacagcacaggagagcaccacgagccaaagccttattcaaattcaagtccttctgttccaaaaggcaaaatcacacaaaccacccaaactgcaggaggcaaaaactgagacaggcttgtcaacagtctttacattgtaaaggcactgcagaattctaaaagtttgtgttccagacaccaaaatcagtttgacaaagaataagaaaataaagagtcacatttaggatggaaacttacttcctgcccctgaatcccatgcttgggattgtggtatggagtgcaaagcagagctgtgataacatgccagtcctgagctaaagcgaatcctgtgtaaagatgttttcgcaactcaccacttggtaaccaatcctgaggttgtgatctggggctgggacaagggccagcagtcacagaattgcgttgagcacactgagaagatactgcacagatctgcagagatggcagtggggccattctggtgctgactccatccccttctctgccctgagctaaagctagca

SEQ ID NO: 6225 - DNA, 543 bp, Homo sapiens
  MAP TO AC010271.5; EXPRESSED IN BONE MARROW, SIGNAL = 1.7; EXPRESSED IN HEART, SIGNAL = 1.4; EXPRESSED IN ADULT LIVER, SIGNAL = 2.1; SWISSPROT HIT: Q9QZR5, EVALUE 7.00e-36; NT HIT: AF208292.1, EVALUE 2.00e+00; EST_HUMAN HIT: BG772881.1, EVALUE 4.00e-27
atcacagacccagagatggccagagtcaaatagcagatgcaggaagatgccaggtgaaagatgccggggtggcccagctcggctgtccctgctgcttgacctgcccactcgccctcttccccacccccgacaggtgattgacttcggatccgccagcattttcagcgaggtgcgctacgtgaaggagccatacatccagtcgcgcttctaccgggcccctgagatcctgctggggctgcccttctgcgagaaggtggacgtgtggtccctgggctgcgtcatggctgagctgcacctgggctggcctctctaccccggcaacaacgagtacgaccaggtgcgctacatctgcgaaacccagggcctgcccaagccacacctgttgcacgccgcctgcaaggcccaccacttcttcaagcgcaacccccaccctgacgctgccaacccctggcagctcaagtcctcggctgactacctggccgagacgaaggtaagggaaaagttgggtgagggcagtcagtgtgggggctgttacatgaaaaa

SEQ ID NO: 6226 - DNA, 531 bp, Homo sapiens
  MAP TO AC026432.2; EXPRESSED IN ADULT LIVER, SIGNAL = 1.2; EXPRESSED IN BRAIN, SIGNAL = 1.2; EXPRESSED IN HELA, SIGNAL = 0.96; EXPRESSED IN BONE MARROW, SIGNAL = 1.5; EST_HUMAN HIT: T07886.1, EVALUE 5.00e-08; SWISSPROT HIT: Q60308, EVALUE 1.30e+00; NT HIT: AL163246.2, EVALUE 1.00e-10
gccaactgcctgttcttttctgggaggctcattcaatgtagaataaagtaaattggcagaaatgtaatagtacaccagggagggattgtggtttaacatgagtttgatatagttagtaaaaagtgaattagaatagtttgtagatacttttaaacctgtgctcaaaggtattatttgattaaatttaataaaaaaattaattacttagtatgtataatacgtaatggacttacaggtacgggtggatgcaaagatgggtgtaatgagtgaacgacgcctcttccttccaaagtcatgtccatagtctcatcaccagaatccatgactgtgacctgatttgcaaaaagattatttacagatgaaattaaataaaggatctcaaaatgagatcatcttggattatccaagtgggccctaaatccagtgatgtgtgtccttatgagacccacacagaggagaaacacatggaagagaaatctatgtgaagacagaggcagagatcagagtgatgcagccacaaatcaaggaaca

SEQ ID NO: 6227 - DNA, 508 bp, Homo sapiens
  MAP TO AL121825.19; EXPRESSED IN PLACENTA, SIGNAL = 0.97; EXPRESSED IN ADULT LIVER, SIGNAL = 0.91; EST_HUMAN HIT: BF832515.1, EVALUE 4.00e-18; SWISSPROT HIT: P08547, EVALUE 4.00e-08; NT HIT: AL163207.2, EVALUE 2.00e-12
tgatagccagttttcccaggaccatatatgttggaaactatcctttccccattgtgtatcagcttaaaatagactgctataactatgttttatgtgagcatcaaggtaaccacaaagcaaatacctatagcagatacacaaaagataaaggaaccaaagcatactatagaaaatcatcaaatcagcaaggaagacaaaaaaggaacgaaaggtttacacaacagtcagaaaacaattgacaaaatggcaatagtaagtccttacctatcaataattactttaagtgtaaatggagtaagttctccaatcaaaaaacagaatgattgaatggataaaaattcaggacacaataaaatttttaaattaaaaaaaaaaaacaggacccaaagagatgctgcttacaaaaactatatgctgcttacaaaagactcacttcagctttaaggatacacacagactgaaagtgaagggacagaaaagatattccacgcaaaatggaaaccaaaag

SEQ ID NO: 6228 - DNA, 549 bp, Homo sapiens
  MAP TO AC010485.4; EXPRESSED IN PLACENTA, SIGNAL = 0.72; EXPRESSED IN ADULT LIVER, SIGNAL = 0.81; EST_HUMAN HIT: T93736.1, EVALUE 1.00e-08; SWISSPROT HIT: P48634, EVALUE 3.10e-02; NT HIT: AJ304804.1, EVALUE 8.00e-03
gtcaggaagcaaaggtctcgttctaccccccaggaggattcctaggtgtgacctctcatcccagtctctgtcacctgttgccccccagtccctgtggcctctgccaagagcccagaggagcctgtgctctgcaaactccccaccccaccctgtcaccactgggacactttttggagagccagggactgccttacttttgcaccatctccccaggcaccgggctggtacctctccaatctctgatccaggccaggctggggctgactggggggtgctcacccggcccctcagctgggggctgggctgagacactgccccccaccccgggtgctggtgcgtcagtttccgcacctacgccttgggctgctggccgagtctctgacttggctgttgcaatgcgcagcgggtgagaaccctcgtggccatctctggcctgcttgttctcctccctcccttccttgtcccctgcagggggccatccacccatgtctctcccctcggggccttccacctcactgccaccagggctgtttcactgaggcaggagct

SEQ ID NO: 6229 - DNA, 560 bp, Homo sapiens
  MAP TO AC003972.1; EXPRESSED IN BONE MARROW, SIGNAL = 2.6; EXPRESSED IN PLACENTA, SIGNAL = 3.1; EXPRESSED IN HEART, SIGNAL = 1.6; EXPRESSED IN ADULT LIVER, SIGNAL = 3.8; EXPRESSED IN HELA, SIGNAL = 3.3; EST_HUMAN HIT: BG576572.1, EVALUE 1.00e-118; SWISSPROT HIT: P30771, EVALUE 1.00e-24; NT HIT: D86988.1, EVALUE 1.00e-118
gccctcctgtgtgaaaactcgtgtgtgtgattcttggtgtttgtcttttaaaacaccttgtattgacgtaggatgcccagcagagtgtgcgcacactgggggctccctgaggggtttatagagggtgggttctgccagctgcacgtccagtgtgcgtggtgagcaatgcccctgtggccaggtggtgtcctgtgcatcctggggcccctacttccttgctagtgtgtgttgaggctgattcacacctgagcttcttgacttgtgggggcccctgttcctacagctgatccttgtaggcgaccactgccagctgggcccagtggtgatgtgcaagaaggcggccaaggccgggctgtcacagtcgctcttcgagcgcctggtggtgctgggcatccggcccatccgcctgcaggtccagtaccggatgcaccctgcactcagcgccttcccatccaacatcttctacgagggctccctccagaatggtgtcactgcaggtaacggggctctgcccagggcaggggcttctacagagaagcggcatcaagggaatgtggact

SEQ ID NO: 6230 - DNA, 524 bp, Homo sapiens
  MAP TO AC010327.5; EXPRESSED IN BONE MARROW, SIGNAL = 2.2; EXPRESSED IN ADULT LIVER, SIGNAL = 2.3; EXPRESSED IN FETAL LIVER, SIGNAL = 2.4; EXPRESSED IN BRAIN, SIGNAL = 1.9; NT HIT: AF066062.1, EVALUE 1.30e-01; SWISSPROT HIT: P10388, EVALUE 4.90e-02; EST_HUMAN HIT: BG685106.1, EVALUE 0.00e+00
ccaggtgagagccttctgagctgtgcctggggctggggggacagggccctggaaccccagcagccggcgggtctgggagctgctgtccttgagttggttgggccctgggaagctgggttctggcagcctggtccctgaatgggtccagcctgtacagctggggtcccaggtgggggtgggacaggagccatgagatctgagtcccaagaatgggggctgggctgggtttcggctcagtagctccccactccccaaagcgcccagatgtctgcaggtggctgagccccttcatcctctcctgctgcgtgtacttctgcctctggattcccgaggaccagctgtcctggttcgctgccctggtcaagtgcctgcccgtcctctgcctggctgggttcctgtgggtcatgtccccaagcgggggctacacccagctcctccagggagcccttgtgtgctcggctgtgggggacgcttgcctcatctggccggcagccttcgtccctggtgagtggaaggtgctgtga

SEQ ID NO: 6231 - DNA, 519 bp, Homo sapiens
  MAP TO AC016552.5; EXPRESSED IN FETAL LIVER, SIGNAL = 2.1; EXPRESSED IN BRAIN, SIGNAL = 1.4; EXPRESSED IN PLACENTA, SIGNAL = 1.3; EXPRESSED IN HEART, SIGNAL = 3.3; EXPRESSED IN ADULT LIVER, SIGNAL = 3.1; NT HIT: AF178754.3, EVALUE 2.00e-06; SWISSPROT HIT: P10236, EVALUE 1.20e+00; EST_HUMAN HIT: AA431665.1, EVALUE 2.00e-29
tcaagggccattactccaaggtaggggagcctcacgtgaatttattgccaatctctgatctagttcaggagctgcctattcaaatgcctgcaggacctaggcagttaatgtaagtgagtaggaggcatactgtttccatgttctatgggtcggtgcacgacaactccagatgattgttgttgtctggtacacatatggaccctttgttcccacacgttacttttcaagatgtaggggccgttggaaaactctcctttgccctctgaaggtttgctgaaagtagctgacaaaaggcagattaataggagaaaagacacacaaatttatttgatcatagttttacctaacacagaagccttcagaatgaagactcaaagatacagagggagatgccccttttgatgcttagattcaacaaaggatggacactcatttggatacccatgtagaaatataattggacgaaaagggcatgatccaatgctaatgaactgggtggggaaacacatcaaggcctgt

SEQ ID NO: 6232 - DNA, 595 bp, Homo sapiens
  MAP TO AC012000.3; EXPRESSED IN PLACENTA, SIGNAL = 1.2; EXPRESSED IN HEART, SIGNAL = 1.3; EXPRESSED IN ADULT LIVER, SIGNAL = 1.6; EXPRESSED IN BRAIN, SIGNAL = 1.2; EST_HUMAN HIT: BF820161.1, EVALUE 1.00e-64; NT HIT: AF288742.1, EVALUE 5.00e-26; SWISSPROT HIT: Q03391, EVALUE 5.80e+00
gagagctgaggaagctgtggggcaggggggtgggggaaaccttcaaagctagcagaggttggttcctaaggtttaaaaaggagctatctcaatagcaaaaaggtgcaaagtgaagcagcaagtgctaatgtagaagcagaagcaagttatcaggaagatctagctaagatcattgatgaaggtggctacactggaaaaccaattcttaatgtagacgaaacagccttatattggaagaagatgccatctaggacttccatagctaaagaggagaagtcaatgcctggctctaaagctttaaaagataggctgactctttcattaggggccgatgcagctggtgactttaagttgaagtcagtgcccattcaccattccaaaaaatcctaggatccttaagaattatgctagctctatttttcttgtgctctataaatggaataacaaaccccaacatatctatttacagcatgatttcctaaatattttaagcccactgttgaggcctactgctcagaaaacaaaagagattcccttcagactattacttctcattgacaatgcacctgatgccccaaaagccctgatggagatg

SEQ ID NO: 6233 - DNA, 501 bp, Homo sapiens
  MAP TO AC004177.2; EXPRESSED IN ADULT LIVER, SIGNAL = 0.59; EXPRESSED IN HELA, SIGNAL = 0.87; SWISSPROT HIT: P35410, EVALUE 4.00e-08; NT HIT: AL161555.2, EVALUE 4.80e-01
gctgtgatgagcatcctgagctgggccctggccctttctttgcatgtggttagccaggtttgtgagtaatgggagaagggcctggcatgtgaccaatttcaggcaggctttataatatttcacatgcttatttgtcttgtggtgggcatttccagcctgactttgatcatcaggagcctgtactgcctgaagaactgttcacccatccggatctaccacattgtccgctttgtggccatcagcttcctcgtttggggcctgcccttagttgtccttgtgtacctgccaggaaaagaatacctgacctttgcctttgaccttctgttgctgctgtccatggtagtcagtatggctcaaccagccatctacttcttggctggctacctttgaaggaagaggcatagggagtccttaaagttgttctcccaagagctttgttgaatgagatggaaggtggaggaaacaaggggtttcaggcaagggaacagcaggttaccagga

SEQ ID NO: 6234 - DNA, 535 bp, Homo sapiens
  MAP TO AC016594.5; EXPRESSED IN PLACENTA, SIGNAL = 0.86; EXPRESSED IN ADULT LIVER, SIGNAL = 0.92; EST_HUMAN HIT: AA417946.1, EVALUE 0.00e+00; SWISSPROT HIT: P05429, EVALUE 3.80e+00; NT HIT: gi14781338, EVALUE 0.00e+00
ggcagttctaaggccaattacttagaatcccatagatagcactacaagagtaaggaagaatataatatgagaagaatggccaagaaataagaagagaaaaaaatgaaggcatttgtaaaaatcaaaacatcttaaaaaacaagaccaaccacaagaaatgtttaccaatatattcagataaaatttacctcaatcacataagaaatctcttgagggtatattgcaactattttatataaattatcagcgcactaattagttgacacactaagaccatttatacctggctgcttagacagtgatgggggttctatggtacagaagaaaacaggttctggaatctccactccagccaataaaagtctctctgcttcattgttttgtctgtgcttcttttctccctcccgttcggctctacgagctgcagctaatgcactggacttggatgagacaatggtgtctccagtggcagtctgcaagcaaacaagatgacttggaacgaaagtggcatttagcaagcgctcatcttacacca

SEQ ID NO: 6235 - DNA, 541 bp, Homo sapiens
  MAP TO AJ239328.2; EXPRESSED IN ADULT LIVER, SIGNAL = 1.1; EXPRESSED IN BRAIN, SIGNAL = 1.2; EXPRESSED IN LUNG, SIGNAL = 0.72; EXPRESSED IN PLACENTA, SIGNAL = 0.88; EST_HUMAN HIT: AA853953.1, EVALUE 1.00e-05; SWISSPROT HIT: O15499, EVALUE 1.50e-01; NT HIT: AL163303.2, EVALUE 0.00e+00
atgaattttcagtggcctgcatgcaaggctacacaggcaatagcttgtgaccatggtggacagaccccacagaggcccagggacccccacctcagcgttggaagaccccctccctggggctgtgggaggggtctatgagttgcttctgacctgtaggatgtggcaaggggccaggatgtcactccctggcactgcgtaaggctccagctcccctgctggcactggtgaagcaagcagccattttggggctgccctagaatggccgcggcgactctctgcctctggaggtggactgcaggcacctctccgagcgagcttgggagccccagctgacaaccagccaacacctgaagcgctcactcctgcagctgcaaggaaatgaattctgccaacaacctgggtgggcccagaagtgggttctgccccagtccagcctctgcacgggaatgtgaccaccggctccccgatggcagcctgggagaccctgaagaacagaagccagctgagctgagccgactcctgacccaggaaccgtgagtta

SEQ ID NO: 6236 - DNA, 581 bp, Homo sapiens
  MAP TO AL031843.2; EXPRESSED IN BONE MARROW, SIGNAL = 4.7; EXPRESSED IN PLACENTA, SIGNAL = 1.8; EXPRESSED IN ADULT LIVER, SIGNAL = 1.9; EXPRESSED IN BRAIN, SIGNAL =   3; EXPRESSED IN LUNG, SIGNAL =   2; NT HIT: gi15300390, EVALUE 1.40e-01; EST_HUMAN HIT: AU120089.1, EVALUE 2.10e-01; SWISSPROT HIT: P27918, EVALUE 7.40e+00
ctctggcagtgagtgggaactaagtctctactgtgctgagcccttacatcataagacctgtttgttatagcattataaaagtgttagagaacagtgtggtcaacgtaaaggtaaccttgggtaggggcagccatgctctcaggagggaacaccatgccacagatgcaactggctgggacatggccctggttggggtggccactgcaggcctccttgaggaggaaatggctgaggtgggtgccacgggaagtgcaggtggaaagagattaaaaacccagcgtgggaggtaacattatcctcctcaacaagcatggacgtgaaggtccgggaggccgagaaatgcctgaagtcacagaaccaacagagtggcgcccggattctacccaggctcctggcctgcaaacacatgctttcctagacgtgcagagagctgcagccacggtccaggtcatggtgataggtccccgccctcacttggggaggcaggggacggacacaggtgttgccacggagaagcagaagcagcccaactgcgtggcggcgtggggaaggtgctgggcacctatcagcctccattgcat

SEQ ID NO: 6237 - DNA, 521 bp, Homo sapiens
  MAP TO AC010615.5; EXPRESSED IN ADULT LIVER, SIGNAL = 0.68; EXPRESSED IN PLACENTA, SIGNAL = 0.39; EXPRESSED IN FETAL LIVER, SIGNAL = 0.36; NT HIT: AL163247.2, EVALUE 8.00e-03; EST_HUMAN HIT: BE076211.1, EVALUE 8.00e-04; SWISSPROT HIT: Q9Z0X2, EVALUE 1.30e+00
aggatctgtggtcttggacgctcacatttgaagcccagccatgacgctgtggggaagcagccacatggaaaggataccaggacatttcggacaagagtcccagctgaggtcccagccaaaagccagcatcaactgccagaacgtgcctgagtcctcagatcactgcccccacttagttaatgccagccctcacgtctccctgtctgaggccctggacagtgtggaataaaggcaaaccctcctgccatgcccattccgaattcctgaccacagaacccatgagcattataaaatggctgttgttttacccggcaatcatttatgagggaaacacagaggcaattctagaaaagtgtcctactattaataaaaggaacacaaattgaaatgacaagatacgcctttcacctattaaataactcattgaaataagcagcagcactagaaatgtgaaatattataaaatgccctaacccttctttaaagtaatttggaacccaagtctgcatgtcacgtggtct

SEQ ID NO: 6238 - DNA, 567 bp, Homo sapiens
  MAP TO AC006980.3; EXPRESSED IN PLACENTA, SIGNAL = 8.3; EXPRESSED IN ADULT LIVER, SIGNAL =  12; EXPRESSED IN BRAIN, SIGNAL = 6.1; SWISSPROT HIT: P35322, EVALUE 4.80e-01
tggcagtgaaccaaacaaacaaaatctccacatagataggtaaataacacctaatatagtagtaagtgctaaaaagaaagataaagccagggaagtggatcaagtgttctctttcatgtttcagttggaatagtccaggaaggtggactttcagataaggtgacatatgagaggagagccaccagggaagggaggaattcctatggagatgtggagaaggagctttctaggtaaggggctgcttggtacaagggccctgctgttttggatggtgtgcttgaggaactgcaaggaagcagatgtagagacaaggagggaagcagtgggagctgctgggtggctgatcatccaggggctttaaaccatgccatgatctctggatattaatctcagccaggtaggaagctattggatagttttgggtagagcatctatcacttataaagccctccattgtggttggaggatcgactgtgtaggagcaagggtggcagctggaagacccatgaggaggcaagagacaatggtgggctggactgggtaggttctgggaaaggtggtgagaaa

SEQ ID NO: 6239 - DNA, 600 bp, Homo sapiens
  MAP TO AC010205.5; EXPRESSED IN ADULT LIVER, SIGNAL =   1; EXPRESSED IN BRAIN, SIGNAL = 0.92; EXPRESSED IN BONE MARROW, SIGNAL = 0.8; EST_HUMAN HIT: BE695853.1, EVALUE 0.00e+00; SWISSPROT HIT: P50502, EVALUE 3.00e-20; NT HIT: gi14748655, EVALUE 1.00e-82
tccccaccctttttacagtggcagaaaatctttctcatacatataaatattaccttaacctcattaatcttcatctctttccgaattattgtatagttactatagacaaacctcttcttgctcttttatgcatatataattagaaaccaaccctaggcactaaaaagaatagttttagtgatataccttcttatcaaacaaagagccaacacaagttatgaaattaaactagacacaccccttcttcgaggttacgccaagccagtgcctgggcctgaaactggcctgcagcccctcagcttcgcccactgccttccgaccctggaccttcgcaaagtgaacgagcttcgggacttcgtgaaaatgtataagcaggatccgagcattctgcataccaaggaaatgtgctttctgagggagcaggtggagagcatggggggtgaagtaccatgtgctactcagaaagctattataaatcagaagaaaatatcaaggaattaaaaacaggtagtaagaaggtggaggaaaacataagcacagacgaactatcaagtgaggaaagtgatctagaaattgataacgaagctgtgattgaaccag

SEQ ID NO: 6240 - DNA, 581 bp, Homo sapiens
  MAP TO AC009024.6; EXPRESSED IN ADULT LIVER, SIGNAL = 0.87; EXPRESSED IN BRAIN, SIGNAL = 0.97; NT HIT: AF041429.1, EVALUE 2.20e+00; EST_HUMAN HIT: BI870443.1, EVALUE 5.20e-02; SWISSPROT HIT: P33515, EVALUE 1.90e+00
caaccgagcccttatctcagtctgctttttagcttaaaataagtttctaaaaaacttcttttgaaaatagcctccctcgctgcaataatatccaggttgaattttcaaccattgtctcttcagacaggggacttcgtctgactaaatcaggtgatatgtgtgttgccaacacctcccagcctatgtcagcatgcctttgatgaaaaatatcttatctataatcagtttactggattgtgcacccaaatttcctctacaaaatatgagactgagaggcttcaccagcgttttctcacagcagcagtgcagctgtgctttgataaaactcacagactcttccctagaactcatcagagtccactagagcctgggttccaacccaacatccaccgtctctgggcaaaactaaatttaagttgtattttaaaaatgtataaggtgactgttagtgttaagcaagaaaatagagatgatttcaacagataatgaattattgtcagcctactctcctccagctgtgcaagacgccatagactctgtcttcatgcacctcacagctaggtgggagtgctgggaaataa

SEQ ID NO: 6241 - DNA, 549 bp, Homo sapiens
  MAP TO AC008648.4; EXPRESSED IN ADULT LIVER, SIGNAL = 0.64; SWISSPROT HIT: P51007, EVALUE 5.20e+00
ggagagaatggggaaggaagatggcagctgccatgtggcaagagagagggaggctttggagatctctcagttgatggaacatgcttctgggtgtcctcatggagcctcaggaacaatctgcatgcctcactgatgcttttgccgtcagttttgggttttttagacctgggacgcttgacactgaccacaaggtgagggccaggctggatttgtatgtttgttgttttaagtaatccaaaccttataaacacatgtaaggagaaaacccaaggctctttccctgttccctatattccagtctccagaagtgacttatattagaagggaaatgtgaatcctctctgatcctttcctataaatatacaaacactcacctatgcatagtgtttacaaataaatagtggcttccttgtctttttaaaaaagagatgtgatatcataatttcccagggccaaataaaaaaaaataactacaagaatattctagtaccaatcctgcatcctcaaactgtagcagttctataaaaaagcctatctcttcctcccacc

SEQ ID NO: 6242 - DNA, 582 bp, Homo sapiens
  MAP TO AC008699.4; EXPRESSED IN PLACENTA, SIGNAL = 0.68; EXPRESSED IN ADULT LIVER, SIGNAL = 0.93; SWISSPROT HIT: P07566, EVALUE 3.30e+00; NT HIT: AE000748.1, EVALUE 1.40e-01
aaagaaactgcagggcaatgaggaagcagtaagggccagtatccctgcaaagaagcaaggctggatcttgactgtggaggaaattgtatctcccaccgggagagcacagagataacctcttcttcagaaatcagattccagttaatttcctttagctgcctcgcccaaaggcctacccacctgggccaaattccagccccgtagctctggggctggaaggcctgcatgatctgcccaggctgttaccgcctgcagagatttgcaaagactctttcctatggctgttaagtcatttgcacaaagtcctctgtgagtttcataagtcagtctagaagccaaataattgaggcagtttaattttagctcctcatgtctccttataaaagttagctgtttatgagaaatctaaaaatttccttttccccagaagaattctctttcaggcctgaaatagtctcatgtggtggcatactcgtggagtatgacacgtgaggtcgatcaaaggacttgtcccaagtttgatgtccctaaaattaggcctgaaactccagtgtgagcattaggctggctcctcttaggagt

SEQ ID NO: 6243 - DNA, 599 bp, Homo sapiens
  MAP TO AC000361.1; EXPRESSED IN ADULT LIVER, SIGNAL = 0.44; NT HIT: gi16081186, EVALUE 1.40e-01
cacctgcctttaaataagatggttctaaattggctaggatgctttctttctgccacttagagtgtcaacttcaacttaagtgtggccttcctgtgaaggaaagtcagttgacgagtagcaagaaccgcttcatacttcaggcacatccaacatgggaggggagaaaggaaagagaaggagagagagagagagagaaagagagagagaagaagaagaagaggaagaagaaggagaagaggaagaagaagaagaaagaagaagaagaagaagaagaagaagaagaagaagaagaagaagaagaagaagaagaagaagaagaaagaaagaaggagaagaaggagaagaaggagaaggagaaggaagaaggagaagaaggagaaggagaaggaagaaggaagaaggaagaaggagaaggagaaggagaaggagaagaagaagaagaagaagaagaagaagaagaagaagaagaagaagaagaagaagaagaagaagaagaagaagaagaagaagaaaagagagagagagagagagagagaatgaacatgaaccaaagaagaaagaggaagagtcattctgagcatccaatatatgtgtcctcc

SEQ ID NO: 6244 - DNA, 563 bp, Homo sapiens
  MAP TO AC010327.5; EXPRESSED IN ADULT LIVER, SIGNAL = 2.6; EXPRESSED IN FETAL LIVER, SIGNAL = 2.7; SWISSPROT HIT: P31795, EVALUE 3.00e-32; NT HIT: gi9635487, EVALUE 0.00e+00; EST_HUMAN HIT: BE150340.1, EVALUE 0.00e+00
tttcagtgggggagtaggtgggagtgaccgatgtgaaggagaaaaactggccgtgaggggcagaagttggaaagctagctgcttctttagctaccttatcagcataagcgttgtcctgagcaatgggatctgatgccttttgatggcccttgcagtgaatgactccagcttcctttggaagagaagtggccttgagaagagtttttattaaggaggcattaaagatggaggacacctgcgtagtgaggaaacctccttcagcctatataactgcatggtggggcagaatatgaaaggcatatttagagtcagtataaatattgacgcgtagtccttttgcaagagtgagggcctgagttaaggcaatgagttcagcttgctgagaggtagtggagggaggcaaagcagtatcctcaatgatagatgtggaagatactatagcatagcctgcctttgctggtgtgtggcgattaggcctggtggaactgccatcaataaaccaagtgtgatcaggctgaggaacaggaaagaaggaaatatggggaaatggggtgaatgtcagg

SEQ ID NO: 6245 - DNA, 518 bp, Homo sapiens
  MAP TO AC000367.1; EXPRESSED IN ADULT LIVER, SIGNAL = 0.35; EST_HUMAN HIT: BI766978.1, EVALUE 1.80e-01; NT HIT: gi15299680, EVALUE 4.90e-01
aaccttctggtgcccattcattgactttcaaaacatttttcaactgcctcttgaggcatataaagtgttatatgatctgtcccttgcctaggtctctatccttactctcttcctatccccctctcctagtctctacaactgccatcctttctcttgcccactggtctttgtgccaccctctggttaaaataataatactactgataatctctttttcttaattctgctcatattttagtctcaacttcaatgacaccaatcttctcccctaggctacatcagttctccctgctatatgctggctattcgcttaacacattgcattgcaggaactgggctaaattattcaccttcccaattagactgtaagccccatgaggacaataaccatttttgttttgctcacgaacatgtccttgacatctaatagctagtgcttgaaaaagagcagaaaataagctgaatttaattctttcatttaatccacaaatattttaaggaagcctatttgtgccaga

SEQ ID NO: 6246 - DNA, 515 bp, Homo sapiens
  MAP TO AL031709.10; EXPRESSED IN PLACENTA, SIGNAL = 1.9; EXPRESSED IN ADULT LIVER, SIGNAL = 1.7; EST_HUMAN HIT: BF915018.1, EVALUE 9.00e-59; SWISSPROT HIT: P14314, EVALUE 3.20e-01; NT HIT: gi14776618, EVALUE 6.00e-59
agtctccccaacccacctacccacgttccctccccaggtggagctggcgtgtggaaaaagcaaccggctggcccatgtgtccgagccgagcacctgcgtctacgcgctgacgttcgagacccccctcgtctgccacccccacgccttgctaggtaggggtgcgggacgcagttgagcccagtggggtcagccgcgcacgcagccctgctggaggccctgtagtgctgggggccagggttgggacatggggtgcagctgagcctggcttctcttgggtcctcagtgtacccaaccctgccagaggccctgcagcggcagtgggaccaggtagagcaggacctggccgatgagctgatcaccccccaggtaagcgtgcgctcggggtggcccctggtgggcctggctgggagctgggtgctgcccctgcatcctccaccttcagggccatgagaagttgctgaggacactttttgaggatgctggctacttaaagaccccagaagaaaatgaaccca

SEQ ID NO: 6247 - DNA, 548 bp, Homo sapiens
  MAP TO AC008859.4; EXPRESSED IN ADULT LIVER, SIGNAL = 0.66; EXPRESSED IN FETAL LIVER, SIGNAL = 0.65
tgatacatgggaagtgctggcccatagctgctggctgaacaaggctagtctctggaggtcagggctgccactgtgtctgcagtgggttcaaatgattcaactaataagttcttcaccttctattacaccttctttgcaggctatacctgcaaatccaaaagggatgacatcaatggctgccttagcaggacagagggcttggcgatctcagaagacaccatctgacttaagttgcttttcagaaacttggctttacaatttttaatttctccattctggtttctctggcttaaagaacagaacttcctgccctgagaccccttcaaagaccattgctctgccttgtcaagggcagccactgctcagcagggttttctttatatgtgaacatctgcttccaacaaccataggcaaatagttatctacataaatcacacagacctggcaactgcaaagaggcagcaggattgctctaactggattctttatctgtttgaaggaagcacagttttgatacaatacccttttgggttttgcctaaacagcaa

SEQ ID NO: 6248 - DNA, 512 bp, Homo sapiens
  MAP TO AC011248.8; EXPRESSED IN ADULT LIVER, SIGNAL = 0.48; NT HIT: AF364606.1, EVALUE 7.00e-28; EST_HUMAN HIT: AL043810.1, EVALUE 2.00e-10; SWISSPROT HIT: Q28005, EVALUE 1.40e-01
gccagtatcaaactgccctcagcacccccttggcttccctcctatgctcatcagcacccaaagtccggagggggccgaggcggcagggggctggcatgtcagcactgccccaagcatgtgcacatctggccgggctgcaacagcacccaggctcagccccagctttgctctaagatcagagtgggtgccaacagtagggagaagtcaggcagcgggagcaggcacttccaagcctacaagggcagggggtccttccaggtcccccaagagtacagggatgcctgagtctgcagccaccgcttgggcagctacagctgcaccagggggaaggggtcctgcctgctctgtggagccggaggcccgagcctgcagctgtggtttgggcggctacagctacacccaggagggcagggctctggcctgctccatggagcgggttcccaggtccacagctgtggcttgggcggctacagcaggaaccaggagctcctgccccaattcagaaggggtag

SEQ ID NO: 6249 - DNA, 580 bp, Homo sapiens
  MAP TO AC002325.1; EXPRESSED IN BRAIN, SIGNAL = 3.5; EXPRESSED IN PLACENTA, SIGNAL = 4.7; EXPRESSED IN ADULT LIVER, SIGNAL =   3; NT HIT: gi14740876, EVALUE 3.50e-02; EST_HUMAN HIT: BE259863.1, EVALUE 1.00e-52; SWISSPROT HIT: O43497, EVALUE 2.90e-01
ctgaagactccagcactccccagctgctcctgcacacccatctccccagctgaactgaacactcctagagggaagcccctgggcttctgcttccctttatcctcctcctgtgtgacatggaggaaaggggaccccacatcatggcactgctacaacgctgcggcaggttcatccacagatggagcactggcagctgtgtcctctgtctgctgttagtattatcgccatggccaccaaaagccgtcagtggcaccagcaccaggaaggctgccccaccagggaggcagagagctggagccacgcagtcccgaaacagtcacggagagctgcccacacacctgatgccaccggccccaggcccggggacacccaggggaagcccacgctggggaggaagaactttagcaagtccttgcatccagccctatgtttggggtgggaacagctaagccactggtgacggaaggtgtctgctgtggtcttggtattctctatgcatggataacaatcagttagcagacactgagccaggcccttctgtccccaggcctgggagaaaagtgccatcattatgcctgtg

SEQ ID NO: 6250 - DNA, 583 bp, Homo sapiens
  MAP TO AL008640.1; EXPRESSED IN PLACENTA, SIGNAL = 2.2; EXPRESSED IN ADULT LIVER, SIGNAL =   2; NT HIT: AL163246.2, EVALUE 7.00e-16; EST_HUMAN HIT: AA502215.1, EVALUE 1.00e-126; SWISSPROT HIT: P11369, EVALUE 1.90e-02
gtatccaggtatgcccgttgtttagcttccatctgtaagtgagaacatgtgatatttgattttctgcttctgagttagttcacttaggataatggcctccagctccatccatgttgctacacttacttcatcctatcaggcagtgtgtgggtggaaacagcacactctcctggggaatctaaggaagatttaataaaaggactatttaatctaagtatatgcagaattaggggcagtaacaagaaccgtgcagttacttgaggaggggaagagtacttggggccattaccaccccaaggccaaaagggcccaggccagcagatgctggaatccagagagaattgctgtttgagtaaggccacctggctgaggcagtgaccttcagcagagggacacagcctacctgtggcaacgcataagccagaacaggaaaaaacatctcaacctcacttccctcctgcccaccagtctcccgggagggcagccctccagtcaaccctaacggaaaccagagcgaaagcgagactagagatgctttatgcatcagcctcatggagcataaagtgagggttacggcaagaga

SEQ ID NO: 6251 - DNA, 549 bp, Homo sapiens
  MAP TO AC002450.1; EXPRESSED IN BRAIN, SIGNAL = 0.52; EXPRESSED IN ADULT LIVER, SIGNAL = 0.65; SWISSPROT HIT: Q9QXX4, EVALUE 1.00e-25; NT HIT: gi7657580, EVALUE 2.00e-86; EST_HUMAN HIT: AI989992.1, EVALUE 1.00e-101
cctgtgaggtagggcaagagtaaagggaactcttttcccatacctgcatgtgatcagggacttacaagtggcattttcctctatctacagatcaggccttccaaagacaggttactaatgaggttgggctgtagcaatgtgccttaatttaaaatatctatgacatccttttattaggggatacttgaatgaaaaccctcaattgtttattaaagatataagaaaggtagtactgttttaaaatctgtatttaaaattcaaaacacatttcttttctcagtcttgtccttgactttaactaccttcttctttcttctgacctatcttactttcttctgagataatgatattgtttaattttagctgttggagccactgctgtgtatcctatcgatcttgtaaaaactcgaatgcagaaccaacgatcaactggctcttttgtgggagaactcatgtataaaaacagctttgactgttttaagaaagtgctacgctatgaaggcttctttggactgtatagaggttagtgccacatgctcaatacctgtt

SEQ ID NO: 6252 - DNA, 529 bp, Homo sapiens
  MAP TO AC010524.5; EXPRESSED IN ADULT LIVER, SIGNAL = 0.85; EXPRESSED IN LUNG, SIGNAL = 0.62; EXPRESSED IN BRAIN, SIGNAL =   1; SWISSPROT HIT: O57521, EVALUE 3.30e-01; EST_HUMAN HIT: BG422493.1, EVALUE 2.90e+00; NT HIT: AY056173.1, EVALUE 5.00e-01
ctcagcaactcaggcaagtgttcacatggaagatatcctggaaggataccaagccagtgaaagctcagatgaaaatgccccatggctttggaaggccaatgaatgtgccaaggaaaaaggtgccatggaggatcctctggaagacctcgccaatgaaatttcagattaggacaccccactggatttgaaggccaaagaacgtgccaaggaaaaagttcccatggaggataccctggtggaagaccttggaaacgaaagctcagataaggatgcctcactggacttgaaggttgacaaacgcatgaaagaaaaagttcccacagaggataccctggtgaaagaccttgccaatgaaagctcagatgaggacgctctactggattgaaggctgatgaattcaccaaggaaaagttcccacggaggataccctggtggaagaccttgccaacaaaagctcagatggggatgttttgctaaatttaaaggctgacaaatgagccaaggaaaaagttcccatggaggataccct

SEQ ID NO: 6253 - DNA, 598 bp, Homo sapiens
  MAP TO AC010407.4; EXPRESSED IN FETAL LIVER, SIGNAL = 0.44; EXPRESSED IN ADULT LIVER, SIGNAL = 0.64; NT HIT: AF217490.1, EVALUE 5.00e-32; EST_HUMAN HIT: BF841049.1, EVALUE 2.00e-32; SWISSPROT HIT: P03211, EVALUE 3.40e+00
catgggtgtcaccacagttcccaaaaatctccatttgttcccaggaatcttcatgagtatttcaccacttgatcaaagaaacccacaaagacaaaccccaaacccagtgtgtgactctctcccgtatgcccgcattctcctttcttgattgtgtatatgtacttttccctttgcaataaatctctgtactttcactattttccaactcatccttgaatttcttcttgtgacagtgtcaacagcctggacaccagccggggtcaagatcccactgacagggacaggaagcagggaaattctgggcagaagagggcgggtccctggagagggccccaccctcaagcctggaaccatggcccaaagcaagaacttacatccctgtttccctgctccaatgttgccttttccaaaaccacccatggcctgccccacccccgatcttgtgcccataagaacccaggatcatccagcagggagcaggagaagcagctggacatcagagactacaattggacgtcagagaaaagcgttttgacttagagggacagcttgatggcatagctttggagaggagtccggccaggaacagctgaacttc

SEQ ID NO: 6254 - DNA, 585 bp, Homo sapiens
  MAP TO AB022537.1; EXPRESSED IN HEART, SIGNAL = 0.92; EXPRESSED IN ADULT LIVER, SIGNAL = 0.71; EXPRESSED IN BRAIN, SIGNAL = 0.62; NT HIT: gi14782799, EVALUE 6.00e-84; EST_HUMAN HIT: AW978464.1, EVALUE 0.00e+00; SWISSPROT HIT: Q9Y4Z0, EVALUE 8.50e-01
ctgcaggccctgtcttaatccccttagacttgggagtggccttctccaatcactccagcctgctgtgatgtgaaaagagctgggaaccattgacttaagggcatgcagaggggagagactggatgaggggaatgacagtcagaggcaggtgttgaggtggatgcaggagtagcaacagcaggtgggtgtaggccctttttgtacccctatgttcccccaccttttcagtgcccattcagcttgctcttagacagcccggacctagatagatgcgaagggtctgcctagctcttattactcaggtttactgattttccagccatatccatgggaagtcagtgttggggtccatcccttctgtttttcttctttactcctcctctcccagtatccatttgaggccctcttccgcagccagcactacgccctcctagacaattcctgccgcgaataccttttcatctgtgaattttttgttgtgtctggcccagctgcacacgacctgttccatgctgtcatgggccgtacactcagcatgaccctggtaagactcctgtttcctgtaccattcaacacctttgtccc

SEQ ID NO: 6255 - DNA, 542 bp, Homo sapiens
  MAP TO AC010511.6; EXPRESSED IN HEART, SIGNAL = 1.3; EXPRESSED IN FETAL LIVER, SIGNAL = 0.84; EXPRESSED IN ADULT LIVER, SIGNAL = 1.5; NT HIT: gi11038638, EVALUE 3.00e-30; EST_HUMAN HIT: BG913994.1, EVALUE 4.00e-30; SWISSPROT HIT: P11274, EVALUE 2.00e-05
gttacaaatgatgcccccactttagacaatgagcatgaagtgggtgttgttttagtggaagaagagcagcaagtgatcctttgattaactggtgtagtcacataagataaatgacaaagcatccaaagaaagctaatggcttcctctcaagaatgagtaaaacaaacaaacaaacaaacaaaaactatgcttgagttggagacaaagcaatgaagactagaaagccagagcatcatggggccaaaaccatggcgaggttgtgcagaggcatcttgtcaccatctccttttctgccgcccttctcaggcggtccagagggaagaggaaggtcaccaggttggcctccaggagaaacagcggcaggttgagtatgcagctgtcctttgcaaggtggtctgtctgaaagagcaatgccctcggttaaggtgaggtagaacttgtcagtgaagaggggcttgggctgctcacggaagtatctatattagacaaatctaaagagacataaagttagagattattacaggctgagaaaaggagggaat

SEQ ID NO: 6256 - DNA, 598 bp, Homo sapiens
  MAP TO AC000388.1; EXPRESSED IN BRAIN, SIGNAL = 1.2; EXPRESSED IN BONE MARROW, SIGNAL = 1.2; EXPRESSED IN ADULT LIVER, SIGNAL = 2.6; EXPRESSED IN PLACENTA, SIGNAL = 1.3; SWISSPROT HIT: P08121, EVALUE 1.20e-02; EST_HUMAN HIT: BI832055.1, EVALUE 0.00e+00; NT HIT: gi14745797, EVALUE 4.00e-76
ctggaacctaggcagcagacagcaatgtgtggagagcgaggccggagtcccatgtccctgtgggggatgagagcctcagctgggccctctgtccacaacgcccactcactgagggccactggggtggggtggctctgggggagaaagctgagttcacccaagggtggggcgaatggagagtcaggggcccgctcaatgctgagccacaaaggggactctggtgcaggggaccggggtccaggcttaccctgggtcctaggctagcccttccctgacgggccatccccaaagcagtgacccgtccccctgtctgcggcaggcgcttccatcactcgctcacggaccacccccgctggatccgagagcgaagccatgagtcctacgccaagaactactccgtcgtcttcccccacgatgagccgctggccgggcgcaacatgaggagagacccgctgcatgaggtaacgcccctacagctcctgctggggactggcagcgagggtctgggacgtcctcagggcagcggagtgacagaaatgcaaggtgtaccccaaccgcaggtcaggtgcggtgacaaggtgtctgtcattccccaggt

SEQ ID NO: 6257 - DNA, 597 bp, Homo sapiens
  MAP TO AL121896.10; EXPRESSED IN LUNG, SIGNAL =   1; EXPRESSED IN HELA, SIGNAL = 0.82; EXPRESSED IN PLACENTA, SIGNAL = 0.67; EXPRESSED IN ADULT LIVER, SIGNAL = 0.71; SWISSPROT HIT: O43246, EVALUE 1.10e+00; EST_HUMAN HIT: BF569163.1, EVALUE 2.10e-01
agggatgaagtggggtaaggagtgtaagagcagttcgggcacagagaatgccatgagcgggaaggaagttgggatacttcaggaggagaaaggagactggagtcatggggtagtaagagggtggcaggaggtgcagctgaaagacaagctgggcctgggcacaggaggcccgaatggcttgaggcaaggaagcaacatgatgtcacttaagttgctatattgcccttagaggaactgcaccactaaggagggtcctgagtgtcctctagtttggaagaggtcaaggctgactggcatctatacgttcaatcaatgggcttgtccaaatatttcaataccttacttattctttgcatttttcagaagtggatgacatacaacttttgggcatgtggaagaggtaagaatgctacttgcaggcttgaaatgaccagaacttctgagaatgaccttaagcataaccaggaaggactatggcatggcagagagagggccatgctgggtgacacacacaccctggcgtggagggaagaggaaatggagcagaagcaggctctccggtgaggcagagaatgaggcactacacacaaggaggca

SEQ ID NO: 6258 - DNA, 520 bp, Homo sapiens
  MAP TO AC008901.4; EXPRESSED IN BONE MARROW, SIGNAL = 0.61; EXPRESSED IN ADULT LIVER, SIGNAL = 0.85; EXPRESSED IN PLACENTA, SIGNAL = 0.63; SWISSPROT HIT: P34504, EVALUE 1.60e+00; NT HIT: AL163283.2, EVALUE 8.00e-03; EST_HUMAN HIT: BF921889.1, EVALUE 1.00e-05
taaacccatctggggtcttgaaggagggctcttgtaaagatgcagtcagttaggcatgagaaagtcagtaactagattataacatatagggcaacatctcagcctcatgtaacactcaggcagaaagagaggagacacagctagatttaattgaatacctaatacacgaatgtttgaaatcctttcatcaacttgctcatcaacatgtccttcatttccaactttctgagctacaaccatccttctgggctggagtttctcagcctcaacagtgctgccattttgagctggataattctttgtggctgctgtgcacatggttgagcagcatatctggccctcccaccagatgccagtagcagcccccaacttccccaaaactgtgacaacccaaaatgtctccatacattgccaaatgtccctgggggcaaaattgcccttgataagaagcactgctctccgatgagggaccaagtagaatagtgaagagcatgagctctggagccagcagaactaggtg

SEQ ID NO: 6259 - DNA, 530 bp, Homo sapiens
  MAP TO AC008010.10; EXPRESSED IN PLACENTA, SIGNAL = 0.69; EXPRESSED IN ADULT LIVER, SIGNAL = 1.8; EXPRESSED IN LUNG, SIGNAL = 3.4; SWISSPROT HIT: P01023, EVALUE 6.00e-13; NT HIT: gi14765709, EVALUE 8.00e-03; EST_HUMAN HIT: BI008648.1, EVALUE 1.20e-02
gacgctagctgaccacacagattttgaagtcagacggaaaacagcgctaggactgagagttcctcggttcaggttcacttttctttcaccagactactgcataaaaacagcttatgacatcttggtatgagtaacaattgctttcaaaaattatgggcagaaattacttaaatcttctcaccattagataagagaaagaaagccttagattgaacttcctctgtcagttgctcagtagatttcagatagtccagaacataagtatcagatgctagtagggcagcattctgctctccacctccatagggcatttggagaacaaccagattctgcatggcaagtcctagaatatcccctaaaaacaggaaaagcggaaagctgtattgtttatagttgccatctcagcattaataactatagacaaaagaggcatagtgaaataggtaacatttaaaattgagtctaaatggtggaaacaaagaaagttttatgaagcaatttgaaagaggagacagccatgaagggtgaag

SEQ ID NO: 6260 - DNA, 512 bp, Homo sapiens
  MAP TO AC011248.8; EXPRESSED IN ADULT LIVER, SIGNAL = 0.44; NT HIT: gi14764857, EVALUE 0.00e+00; EST_HUMAN HIT: AV764639.1, EVALUE 7.20e-01; SWISSPROT HIT: O14727, EVALUE 3.00e-41
tggaagctaacagcagagggatttctacacccaacaccccaccacctcagtcccctgggtcttatccttccaaggttctctgtaacaacatgctcagtactatatcaaagcttacatgcaataaatacccaatgatgaggatcattgatcccattacctttgtaggcaccttaacgtccttctgaaggatggaaagatctgtgtaataatctttgatgtcttctctgagcatttcaacacttatagacatggcttcatctagagcctcataatcataagacgaagatttccttattctcttaaactgcttattctgaagctgtttgaggtagtactcccagcgattgggaaaatcacgtaaaagtgcaccaattaaagatactacaaggggagagcctttaaaaaaaaaatgaagtcactatgctaataccatcctattttgtcactaataagaatcgacttacttacttacattactaagaaacaatttctgctgcatgttatcaaaagcc

SEQ ID NO: 6261 - DNA, 593 bp, Homo sapiens
  MAP TO AL078614.2; EXPRESSED IN ADULT LIVER, SIGNAL = 0.85; EXPRESSED IN BONE MARROW, SIGNAL = 0.56; NT HIT: AL163204.2, EVALUE 0.00e+00; EST_HUMAN HIT: BF695190.1, EVALUE 2.00e-20; SWISSPROT HIT: P52742, EVALUE 7.00e-22
ggagtccatttgaatcagcctgtagtgaagacatgtgccttagggcacacataactcatgttagggagaaaatgtataattttactcaatgtgaaaacatcttcagaaataagtcagtccatgctgtccagatgcagttctgttctgtagagatgaagaataagaatcaccaaagtggaaaaacctctgtcctgctccaaattctggtccacacaggagtagtactactggagagaaaagccatacatgtcccaaatgaaggaaagcctttacgttatcagtcatttcttatgagacatatgaaacttcacactggagagaaaccttatgaatgtaacaaaagtgagaaaggctttagatattccctacaccttaataaacatttaagaaagaacattctggagaagccctatggatgtaaggaatgtgggaaagccttcagcaaggctcaaaacatgcacatataaggagtcacactggaagaaaccctataaatgtgacaaatgtgaaaaagactttgcaaagtcaccagaattaaaagccatcttaagattcacaatagtgagaagccctgtgagtggcagggaaatcat

SEQ ID NO: 6262 - DNA, 563 bp, Homo sapiens
  MAP TO AC000371.1; EXPRESSED IN ADULT LIVER, SIGNAL = 0.55; EXPRESSED IN BONE MARROW, SIGNAL = 0.59; NT HIT: U66061.1, EVALUE 1.00e-17; EST_HUMAN HIT: AA630324.1, EVALUE 2.00e-29
gccagctgtctctcaattccttagcatgttgacattcaaaaggacaacttgttacagcagcagcaggaaagcatttcagagtttagctatcacttctgagaaaaagattatgacacaaatgctcaagaaaaaggtaagacagtacccagtttttcaacttgcaaaatagaggaaagtttgttgagaaactagttgattttttagcctaagtgaggggtagaaatgaacaatgattatagatacaaatataaatagaaaatgtaacctttataaatgcatgaattaatcctctctgataattaatacccaaaggtaactggtaaatgaatttgagaactgattgcctaaatagaattttgaaagtaattaatttatgctttctacagaaatgttttcttttttaaaaaatttcaactttaatttcagatacagaaagtacatgtgcagatttgttacatgggaatattgcatgatgctgaggtttggagtacagataccatcacccagttagtaagcatagtacctgataggtaatttttaaacccagcttccacctctacttt

SEQ ID NO: 6263 - DNA, 539 bp, Homo sapiens
  MAP TO AC010389.6; EXPRESSED IN ADULT LIVER, SIGNAL = 0.63; SWISSPROT HIT: Q58764, EVALUE 5.10e+00; NT HIT: gi13642475, EVALUE 1.00e-112; EST_HUMAN HIT: BG195876.1, EVALUE 1.00e-112
ctgatgcaatgaaaagccagttgtttttctaaaaatctctatgatttaacctatagccagaacaaccccattttactgattcagggtggctcacctggaaatgtccagatccttgaacagaaaataccaagtaaactatgctgctttcccaaaaggctcgatttagcttccgttcattactaggagttgtagaccagatacccttctgttgagaaatttcaaggtttctcaaattgctactcttcattatgaagtatcgaacaggcatgtttggtcttggcgaaggagattttgagccctataaaagaaaacataagttcttgaaaggtaacctgacctttcaaaaccaagaggctccattaaataacatcttcataaacatataagccaaaatattttatcatatattcaacaaatgcaaatagctctatcatgtctgaaacctacacaagactcaaccaaaataaagttagccaaaaacaagtactcattttcagagcattcaaaatcccttatcaacaaaggctcctggagtacca

SEQ ID NO: 6264 - DNA, 585 bp, Homo sapiens
  MAP TO AC002105.1; EXPRESSED IN LUNG, SIGNAL = 1.1; EXPRESSED IN PLACENTA, SIGNAL = 0.65; EXPRESSED IN ADULT LIVER, SIGNAL = 0.68; SWISSPROT HIT: P37653, EVALUE 2.50e+00; NT HIT: gi14250967, EVALUE 8.70e+00; EST_HUMAN HIT: AL523682.1, EVALUE 0.00e+00
tctcagaacagcagggttcccaggagtccagcgggacgggggaggggatgagtggccgtgtccccctggcagagaaggccttgtctgaaggctacgcccgcctccggtacagggacacctccttgctcatctggcagcagcaacagcagaagttggagtcggtgccacctgggacgtacctgagcaggagccgaagcatgtggtactcacagtatggaaatgaggccatcttggtccgagacaaaaacaagctcgaggtctctagggacacagggcagtccaagttttgcacaattatgtaattccgatgtgagcacctgaacccaggaccacactttgaggaaaacagacctgagtttcattcagttgtcttgttgatttccaatccttgctggaagattttgaataatgaacgtgaagatcaaactgtggtgtaagaacccaagaagcgcagaattggcccccgaacccctcagcacagccgcggtgtgactggtgcacaggacacttcccctctagagtcccctccgtggtcagctgttgtgacatttgaattctccaggtgctgctagggacagcataggc

SEQ ID NO: 6265 - DNA, 506 bp, Homo sapiens
  MAP TO AC010521.4; EXPRESSED IN FETAL LIVER, SIGNAL = 2.5; EXPRESSED IN BRAIN, SIGNAL = 4.1; EXPRESSED IN LUNG, SIGNAL = 2.8; EXPRESSED IN BONE MARROW, SIGNAL = 4.7; EXPRESSED IN ADULT LIVER, SIGNAL = 3.7; NT HIT: gi15296404, EVALUE 2.00e-15; EST_HUMAN HIT: BI825804.1, EVALUE 3.00e-06
actggcaggtgatggtggccccagcatctcagccacgctgccaacatgctgtcaggaggcttcgaggccatgcccggtatgctgcccacctccttgagaccccttcctgacactttccagccggtgctacagccgcagcacgtgccaccactgaatacctttcagcagccggtgcaggcttcagacggcaggcgtgcccgacagccgtggcctcagcagctctttcgtggcaaccaggacagtcagggcagtgatgaagtgatgatgcctaggacgacaagtgggatggcagctccgtgatggtggatgagcctagtggcggttcacacctggtcctcagtggctccctgagcccccgtggtggcaacagcttggccaccatgaggcgcagtctcaaccgcttccccacctgtcaagtcaggcagggaggccttgtgcttggcgaggcgttgggctctgtgaaggacggggacaagctgtgcgtggctctgtggctctatggcctc

SEQ ID NO: 6266 - DNA, 529 bp, Homo sapiens
  MAP TO AC008536.5; EXPRESSED IN ADULT LIVER, SIGNAL = 0.94; EXPRESSED IN FETAL LIVER, SIGNAL = 0.46; NT HIT: gi11466252, EVALUE 7.90e+00; EST_HUMAN HIT: AW952532.1, EVALUE 4.70e-02; SWISSPROT HIT: P52005, EVALUE 5.70e-01
tgtacggatgtgccaaaatgtaaacagtctactgccctttacatacacatgctctgtaaccttctagtttaataaattaaaattcattttaatataactcctttctctttaaatttcattttgtctatataaaatgtagaatttgaactagttcatctctgagatgtcttccaactccacacatggtgattcctaattctgctcgattaattttagagctgccagctgctgccacagttttgccaactatcctctgccttgtagtcgtgcctctgctgctcacccagccctggcttctcttgatatctgctttggggaagcaaaatgctgccccagaacatggtaggtggctcaggagagagaataaggaagccacagcactgagcctaggcggccaggctttagaacagtggtgagaatatgacagtaaggtgtgcagagagcagtaagactgtggtgtctgtccacagaagctgtatgtgggtgtgttagttctgagcccaggatcagtgtgactgccagaggatga

SEQ ID NO: 6267 - DNA, 509 bp, Homo sapiens
  MAP TO AC010186.6; EXPRESSED IN BONE MARROW, SIGNAL = 1.3; EXPRESSED IN PLACENTA, SIGNAL = 0.83; EXPRESSED IN ADULT LIVER, SIGNAL = 1.5; EXPRESSED IN LUNG, SIGNAL = 1.8; NT HIT: AF111170.3, EVALUE 3.10e-02; EST_HUMAN HIT: BE738988.1, EVALUE 0.00e+00
ctgccacattccttcctgagaactgtctagtcctggtttgggatttatcttaaaggtctagaaaggcaacattttacttcagcaaaacttgattctatattgttgttttttcttaatgtgtcaaaattgttttgttactaggatttcctatgttgttattaaatgtattcccctgatcaaggtcactggcctagaaaacaaagattctgtgttttaccaagataattcccagtgcttcatggtgtctttattaggctttgactgcttagggaaactgagccttaaaagggtaaaagtttttccatccatgtaactttctgaggtctttaggttgtcactctgattaaatgagtagtattcttagcagtgacttattatctgttgaaggaagtattttaagctttttgacatctttggcaggtttctctagaatccaaatcctaaattaagccttttggcctaaaaatgactgggatttttccaggtggaccccctagatatgctcctcc

SEQ ID NO: 6268 - DNA, 537 bp, Homo sapiens
  MAP TO AC010526.6; EXPRESSED IN LUNG, SIGNAL = 0.96; EXPRESSED IN BRAIN, SIGNAL = 1.6; EXPRESSED IN BONE MARROW, SIGNAL = 1.6; EXPRESSED IN HEART, SIGNAL = 1.7; EXPRESSED IN ADULT LIVER, SIGNAL = 1.9; EXPRESSED IN FETAL LIVER, SIGNAL = 1.9; NT HIT: gi16175467, EVALUE 0.00e+00; EST_HUMAN HIT: BF873688.1, EVALUE 1.00e-105; SWISSPROT HIT: P06213, EVALUE 3.00e-69
agttttaacaagcggcatcgtcacaaccaaccccacgttccttctcctctcggctgccccccagacccacatccagaactcacttgctggaattcatcgtgtacccggagggacactcagggatgcacttgttgttgtgaatgacgtactggtggcagccctgcctccgcgagttcttgcatttgtggtgcaggtcctggcagaagctgaagttcacacagcgccagtcctggaagtggtagtacgggggcgggcaggtctccacacacctgccgtccaggtagaagttgcggcaggccacgcacttggtggggtcgtcgggctgagaacagttgcccaggcactcgctgtggcaacagaggccttcggcggtgcagccgtgtgacttacagatggtcgggcaaactggagagagagagagagagagagggaaataaataaataaataaataaataaataaataaataaataaatggctttgtccaattcctgtctgcatatgcagcaattctggatcagacagtgaaagccaacca

SEQ ID NO: 6269 - DNA, 594 bp, Homo sapiens
  MAP TO AC008554.6; EXPRESSED IN FETAL LIVER, SIGNAL = 1.4; EXPRESSED IN ADULT LIVER, SIGNAL = 0.49; NT HIT: gi14755315, EVALUE 7.00e-93; EST_HUMAN HIT: AA587596.1, EVALUE 0.00e+00; SWISSPROT HIT: P35789, EVALUE 6.00e-89
aaaggctgtgccacatttatcacacttgtatggtttctctccagcatgaattttcttatgcctagtaaggtgtgaggaatgggtgaaagctttgccatattcttcacatttgtagggtttctctccagtatgaatcttctcatgtttactaagggttgaggatgaaataaaggctttgccacatttatcacacttgtatggtttctctccagtatgagttttgttatgtgaagaaagggttgcaggatgtttaaaagctttgccacattctttacatttgtagggttgctctccagtatgagttatcttatgaatagcaagctgtgagggccagttaaaggctttgccacactcttcacatttgtaggatttctctccagtatggattatcttatgttcagtaagcgtagaggaatacttaaagccattgccacattcttcacatttgtagggtttctctccagtatgagttatcttatctgtagtaaaggttgaggaccatctgaagtctttgccacattcttcacatttgtagggtttctctccagtatgaattttcttatgtgtagtaagggttgaggactggttaaaaga

SEQ ID NO: 6270 - DNA, 596 bp, Homo sapiens
  MAP TO AC000367.1; EXPRESSED IN BONE MARROW, SIGNAL = 0.48; EXPRESSED IN ADULT LIVER, SIGNAL = 0.46; SWISSPROT HIT: O88871, EVALUE 5.80e+00; EST_HUMAN HIT: R10039.1, EVALUE 0.00e+00
gcacaggaccgaagtaggacatgaagaagaaatatcctgacctctttctcttcctgccctccaatatcctgctagagccttccataggccccacccaagataaacacagagagcagagagtcccagtcatgcaaatgacaagggtcagcttcgcagagcacagggaagacatggaatagtgttgagtgcatgggggcatggcaaatggagaacaatttgcacagtctgagctactctgtagccttctggaggatggcaatttctgagatatcccacatttggagtaagagaacagccacagacctcactctatgtgtcactttgagcaactttgcttagttagaagctatttccttacctttaatataagagtaatactcagtttgtataatagtcctggacatccaatgaaaaactgtgtataaaatatcttgtcccataagtgctaaatgaattgtaactactgctgtgactgactaaataaaaattatatatgtataagtataaaacctcttacaaaacatgtaataataaaagaatgagtcataaaagacaagaatcaatgagtgttaatggtcacctttgttgctgacctc

SEQ ID NO: 6271 - DNA, 507 bp, Homo sapiens
  MAP TO AC004198.1; EXPRESSED IN ADULT LIVER, SIGNAL = 1.5; NT HIT: Y18000.1, EVALUE 1.20e-01; SWISSPROT HIT: P32215, EVALUE 3.60e+00
gtcttgccgactctgctctctcctccgccttgattcctgtagggtacatctctccaaacggccctgcagaaagcacagcgcagaaatgcccctccctggggagggaggacccaaagttctggcctcccctactcagtatcagctataaatgccacagacacgtttgcgaggaaaaaagaagaaaaataagaagccaaactgtggagcaatttgggggctccccccaaccatgccatctgcctacaaggcttaccctggcactggctggcctttgggtctttttgtgcaactttattttctatcaaggcccagggggtttgccccttgtctctctgcctctttgacctatccttcctttggaacccaggcatctaaatgacaacttctatgtgcatcatttagagatgagaagaggaaatatctctcctgctttctggttcctgtggctgcttctctttggacttctgggacccagtaagtgacttagcagttaaggagggagagggg

SEQ ID NO: 6272 - DNA, 569 bp, Homo sapiens
  MAP TO AC008537.4; EXPRESSED IN ADULT LIVER, SIGNAL = 1.2; EXPRESSED IN FETAL LIVER, SIGNAL = 0.91; NT HIT: gi14277708, EVALUE 0.00e+00; EST_HUMAN HIT: BG743095.1, EVALUE 5.00e-05; SWISSPROT HIT: P24903, EVALUE 2.00e-26
cagggaggggttctaggaaggggatttgtcacggtgaaggggtctagtccagtatgatatgagatggggtcctggcaaaggcctgagcttctggatttaagggtctgagatgtctgtagctagggcttgggatgccagttgctaaggcctggggtgttgattgctagtgcctgggatactgcttgcgagctgcaagagcctgggatgcctcctcttaggttgcctgatgtcgtttgccaggcctagcgcaccttgggtatcaggaagccgtgaaaggccgtgtccctagtgatgcggtgcggcaagttcatggggatgatgtctgcaaagcgctgcacctcgtggatcaccatgtctgtgtaaggcatggccgcgcggtccttcagcgctggcagccgcacgtgtcccaccacaaggttgatctcctcctgcacgtgggctggaggggaagggggaagtggggtggagggtatcaaaccaggctgggaagaggtgtgtccgtatgtggggaggggtctagtcaaagcctcccagcgctgggcgccactgctggggcgtatgtgagaatt

SEQ ID NO: 6273 - DNA, 507 bp, Homo sapiens
  MAP TO AL096870.3; EXPRESSED IN HEART, SIGNAL = 1.4; EXPRESSED IN ADULT LIVER, SIGNAL = 0.95; NT HIT: gi9506372, EVALUE 2.00e-22; EST_HUMAN HIT: AW832961.1, EVALUE 6.00e-94; SWISSPROT HIT: P26770, EVALUE 1.00e-23
catcgatccacgggtaaaagcccagcccagaccccatgggctggcctacacaaaccaccccacagccaacaggcctgatctcttctgtgccagagattgagttcctgggtcctagtggggggtggagggagaaggaggaagtgtctgtggtctttactgtcagcccttatgtgccccaggcagaggaggaggatgagaagggcactgcaggaggcttgctgtcctcgcttgagggcctcaagatgcgtccatcactgctgatgacccgttacctggagtcctggggcgcagccaagccttttgcccacctgagccacggagacagccctgtgtccacctccacccctctcccggtatgtgcaccttcatcctgagccccagagcttagttaaatccacccccagtatcctcaggccccactggcagccttccctgcccccaccaccagtgagccacttaatgatttgtgacatcccaaagtcccgaactgtcttgtcaccccagtca

SEQ ID NO: 6274 - DNA, 519 bp, Homo sapiens
  MAP TO AC006969.2; EXPRESSED IN ADULT LIVER, SIGNAL = 0.43; EXPRESSED IN BONE MARROW, SIGNAL = 0.72; NT HIT: U09510.1, EVALUE 3.00e-79; EST_HUMAN HIT: BE787184.1, EVALUE 5.00e-79; SWISSPROT HIT: P41250, EVALUE 3.00e-24
tgattgtagcagtggatggctagggttatatataatactttatatcttatgccttgttttctctgtcttttacactaatttctttatatgtcttttagcttgataactatggacagcaagaacttgcggatctttttgtgaactataatgtaaaatctcccattactggaaatgatctatcccctccagtgtcttttaacttaatgttcaagactttcattgggcctggaggaaacatgcctgggtatgtatcacttattgtttacctgtttatgtaatgaagtttttaaaattgcttatattaaaaggtaaatatcaatgttatgaaggaaaaatttttaaaaagtgatatacagaagtacagatgaatgtattatggagaaataatggcagaaataaatcttttaaaaaattctttctgaatataatttcttttttggcatatatgtatttttttggcataaaataaagtctctgatcactatatcttctagttatagctgcatagggtagaaggga

SEQ ID NO: 6275 - DNA, 511 bp, Homo sapiens
  MAP TO AC000109.1; EXPRESSED IN BONE MARROW, SIGNAL = 0.52; EXPRESSED IN ADULT LIVER, SIGNAL = 0.64; SWISSPROT HIT: P51053, EVALUE 9.40e-01; NT HIT: AF016052.1, EVALUE 6.00e-13; EST_HUMAN HIT: AW971754.1, EVALUE 2.00e-07
tattcaggggccataacacccatggagctgctgccatctcctaggataacaatgccttctcgaatccctcctgaagacctgcctgaggctgctttacagttcactttttttaaaagggcaaaaggagtaccctgtaagataacacttaaaaatatagtaaatacataaaccagtaacacagtcatttactataataataataaatgtattaatattatatactatacataattgtatgtgccatacttttatataactgtcaacacagtaggcttgtttacaccagcatcaccacaaacaggtgagtaatacattgcactatgaaattaagatgttactgagccatagtgtcactaagcctttcactgtatagaacattcctaagcaataggaaatttgcagctccattacaatcttacgggaccacttatgtcgtctgttgttgaccaaaatgttgggcagctcctgactatacatgtaacttcagttcagaagaaagaaaagagggccc

SEQ ID NO: 6276 - DNA, 533 bp, Homo sapiens
  MAP TO AC004212.1; EXPRESSED IN PLACENTA, SIGNAL = 0.64; EXPRESSED IN ADULT LIVER, SIGNAL = 0.76; EXPRESSED IN LUNG, SIGNAL = 0.45; SWISSPROT HIT: Q00961, EVALUE 1.70e+00; EST_HUMAN HIT: AL532400.1, EVALUE 0.00e+00; NT HIT: AF338230.1, EVALUE 0.00e+00
ggcaatgagggacttagcacccgggccagtggctgcagagggtgtactgggtcgcccagcagtgccagcccaccggcggtgcgctcgatttctcaccgagccttagctgccttcccgcggggcagggctcgggacctgcagcccgccatgcctgagcctcccacccactcaaagggctcctgtgcggcccgagcctccccgacgagcaccaccccctgctccacgacgcccagtcccatcgaccacccaagggctgaggagtgcaagcacacggcacaggactggcaggcagctccacctgcagccccagtgtggggtccactaggtgaagccagctgggctcctgagtctggtgaggatgtggagagtctttatgtctagctcagggattgtaaatacaccaatcagcaccctgtgtttagctcaaggcttgtgagtgcaccagtccacactctgtatctagttgctctggtggagccttggagaacctgtgtgtccaaactctgtatctaactaatctgatggggacgtgg

SEQ ID NO: 6277 - DNA, 587 bp, Homo sapiens
  MAP TO AC000357.1; EXPRESSED IN ADULT LIVER, SIGNAL = 0.49; EXPRESSED IN BRAIN, SIGNAL = 0.39; SWISSPROT HIT: Q61751, EVALUE 5.70e+00; NT HIT: Y15155.1, EVALUE 1.40e-01
gggcatgtggtactgtttcctctgctttgattctctgctcactctccagaacagcttaattcctactcatccctcaggtctcagattatacatgccttccctagggaaaccttccctgactcatttatgttccaaattgccttgttcacaagtgagagctcaaactggttcaggtaactgtaaagtccagagttagcttctggcttgatccaggcctcaagaagtgttaccaggactactcatctctccatctcttggccccatttcctccatgttggctccatcctcagagaagctcaccctccatagtggtaagatgacttccatgtctccagctttctccttcacattcaaatctaacatgaagaatggatttatttctccaaaagtgttccaaaaaaagcgccatagcttattcttactagcttgggtgacttgactctgggcatagtcctgttttagaaccaaccattggtgctgtggaaaagcaatgatctgattgaccaaacaggactgggtcttccctgacgctgacagatagattatgtgtggggtgaggttgccaaaccccaactggaattacagga

SEQ ID NO: 6278 - DNA, 520 bp, Homo sapiens
  MAP TO AC000083.1; EXPRESSED IN ADULT LIVER, SIGNAL = 0.49; EXPRESSED IN FETAL LIVER, SIGNAL = 0.45; EXPRESSED IN BRAIN, SIGNAL = 0.4; EXPRESSED IN PLACENTA, SIGNAL = 0.9; EST_HUMAN HIT: BF306996.1, EVALUE 0.00e+00; NT HIT: gi14777127, EVALUE 0.00e+00; SWISSPROT HIT: P35085, EVALUE 9.50e-01
gtccaggccatacttcttgggaacgggaagcatacgggtaggggaggcatcagtcgtgactttaggcttgtaagttctcagaccaaaacgtgcacatccacacacatggcaccgcagccaagcagaggccggtgaaaggcatcagagtttcagactctcgggttgtccttgtaatccatattgcaatttcactatccacagaaacacgaccctcctctgagtagcatcccttgtctgcattataagaaaatgaaggacaacgaggaacgggagcaaagcagtgacctcacccctagtggggatgtgtcccccgtcaagcccctgagccgatctgcagagctggagtttcccctggatgagcctgactctatgggtgctgacccggggcccccggacgagaaagacccactaggggctgaggcagcccctggggccctggggcaggtgaaggccaaagtcgaggtgtgcaaagatgaatccgttggtgagtttttgaaggactcttcccttcttgcctcct

SEQ ID NO: 6279 - DNA, 577 bp, Homo sapiens
  MAP TO AC053467.1; EXPRESSED IN LUNG, SIGNAL = 0.6; EXPRESSED IN ADULT LIVER, SIGNAL = 0.64; NT HIT: gi14764023, EVALUE 0.00e+00; SWISSPROT HIT: Q03022, EVALUE 5.50e+00; EST_HUMAN HIT: BG289630.1, EVALUE 0.00e+00
aaactacgtggtgtggaggctgttgatgtttctggtgtcaagttctcagaagttgctgccaccaactctttaagaaggcgacaggatcagtccttctctcgggttctggcccccaaggtcagagcaagcatcttcctgacagcattttgtcatctaaagtccagtgacatggttccccgtggtggcccgtggcagcccgtggcatggcgtggctcagctgtctgttgaagttgttgcaaggaaaagaggaaacatctcgggcctagttcaaacctttgcctcaaagccatcccccaccagactgcttagcgtctgagatccgcgtgaaaagtcctctgcccacgagagcagggagttggggccacgcagaaatggcctcaaggggactctgctccacgtggggccaggcgtgtgactgacgctgtccgacgaaggcggccacggacggacgccagcacacgaagtcacgtgcaagtgcctttgattcgttccttctttctaaagacgacagtctttgttgttagcactgaattattgaaaatgtcaaccagattctagaaactgcggtcatccagtt

SEQ ID NO: 6280 - DNA, 526 bp, Homo sapiens
  MAP TO AF119709.1; EXPRESSED IN ADULT LIVER, SIGNAL = 0.94; EXPRESSED IN LUNG, SIGNAL = 0.73; EST_HUMAN HIT: AI732855.1, EVALUE 7.40e-01; NT HIT: AF212844.1, EVALUE 7.80e+00; SWISSPROT HIT: P27284, EVALUE 9.90e-01
tcagtgcacaattctcccaggcccttgaattgatgcatcctgggagaaattacttacccagtcctaccacggccttgttcagttcctaattgtggaattccttcaatgtagtgatattgtctgaacatcatgctctcctggaatgctacacctttgacatccatatttctaatatgatcagtttctaagtacttcagtttttattaatgtaaaacaaagactgccaaatttaatatcacatttctcattaacaaaatataaagttctacataaacatatctcagcttgttagactcatacctcttactgcaccctacattatttcccactttgtatgtggcagaacacaatattcaaaacgccaaaaagtatcttctgttctgagaaattactggtgagattttagtgcactaagacattcctatctagcactgggactttaaagtcaagctttggaaattatgctcctgctgatggcttcaaccttcaggcatgagactggggaactttgatggggaaaagcaaa

SEQ ID NO: 6281 - DNA, 591 bp, Homo sapiens
  MAP TO AC067967.2; EXPRESSED IN ADULT LIVER, SIGNAL =  13; EST_HUMAN HIT: BE876834.1, EVALUE 0.00e+00; NT HIT: gi4885590, EVALUE 0.00e+00; SWISSPROT HIT: P49908, EVALUE 3.00e-43
tcagatgtcgacaatggcagcatcagctcctaggagccaactctgaatctgtgggcaatttacagagtaattgatttatacatctctttcgacagagcttcttttgtaaatcttgtaaatcttcacttgctggcatatctcggttctctgggtgaccctgcctatgctgacccttgtgcttatggtggtgatgaaggcctggaggagcaggatgagtaggagcatttggtgctcctggttgctgattctctgaaagctcactgctgccaaggtgctgatgtccatgattgtgatgatgctcatgatggtaatgaggcgatggagtttcaactgttttatccacagtagccaaagatacacgtttacaaaagtcttcatctttgagagtctggaacaaatttataaatcactttttaacaagcttatagagataggaataatgcgtgaaaaatgatttgtagagctaacatgtgaaattccaactagttaattagaatcgagctggctttgtattatattaatgagaaagagtctgatgttagtctcaacacctagacattttattaaaggcttaaaaagaaagccaaacca

SEQ ID NO: 6282 - DNA, 551 bp, Homo sapiens
  MAP TO AC008964.4; EXPRESSED IN ADULT LIVER, SIGNAL = 0.66; EXPRESSED IN FETAL LIVER, SIGNAL = 0.57; EST_HUMAN HIT: AL521707.1, EVALUE 3.00e-83; NT HIT: AJ225782.1, EVALUE 2.00e-43
tagtcctctcaaaccctgccactgctgcatcaactaagtttctgtaatattctgaattatttgttgtcatttcaacagtgttcatagcatcttcaccaggaatagatttcatgaaaccccgttttgctcttccataagagggaactccttatccattaaagcttttttcatgagattgcaacaattcagttgcatcttcaggctccccctctaattctagttctcttgctatttcttccacatctgcaatgactccctccactgacaccttgaacgcctcaaagtcatccatgagtattggaataaacttcttccaaattcctggtagtgttgagattttgatttcttcccatgaatcaggaatgttcttaatggcatctggaacgataaatcctttccagaaggttttcagtttgctttgcccagatccatcagaggaatcactgtctatggtggctgtagtgttgtaaaatgtatttcattaaaataaaacttgaaaatcaaaattattccccaattccccgattcatgggctgcagaatggatgttgt

SEQ ID NO: 6283 - DNA, 501 bp, Homo sapiens
  MAP TO AC035144.2; EXPRESSED IN HELA, SIGNAL = 1.2; EXPRESSED IN PLACENTA, SIGNAL = 1.1; EXPRESSED IN BONE MARROW, SIGNAL =   1; EXPRESSED IN ADULT LIVER, SIGNAL = 0.75; SWISSPROT HIT: P57074, EVALUE 7.00e-01; EST_HUMAN HIT: BI047443.1, EVALUE 1.00e-64; NT HIT: Y11649.1, EVALUE 4.80e-01
aggtcagggctgagttatggctatgggagtcattggcacatgggtggtatctgaagctgtggcagtggatgagatcacacaggggtgaggatagactgaaggagaaaaacttgatccaggactagctctgagatacaccagacttttaagggatctggtagagcatgtggaactgacaaatgagcctgcacaggaatggctaacagcagttaatttgcaagaaaaagaaacaaacttcatgagcacagaccacacatccctggccagcgactctcagccacaagccccagttggcttcaaaaaaactttctctaatgctggaaaataaatctactcatgcatgtcttcttggtggagggggagaaagagcttcagatggtggaggggaacaaggagcttcaacctcatttaaaaagacgacttcactggaataacccaaagaataaaaggaaagtgtgacacagctgctgtgtttctggagcggggtttgaagttcctcta

SEQ ID NO: 6284 - DNA, 534 bp, Homo sapiens
  MAP TO AC026745.3; EXPRESSED IN ADULT LIVER, SIGNAL = 0.53; EXPRESSED IN PLACENTA, SIGNAL = 0.75; EXPRESSED IN HEART, SIGNAL = 1.1; EXPRESSED IN FETAL LIVER, SIGNAL =   1; SWISSPROT HIT: P20659, EVALUE 2.90e+00; EST_HUMAN HIT: BI491629.1, EVALUE 7.50e-01
ttcacacaaacgcaggaaacctacatgcagccacccagcacagctccgcggctggacatggcaatgaacaccgagtctgcgtcaatcgtggtgttgcggtgggagtcggaggcaggatccacaaagctgcagaaacaccagcccgcccagttcccttttcagaccagggctgcagggagaaagatcagagggcaaggtcctaacttccttgacccagaaagagttaagggatgaagtgagatatgctgagtcattggaataatgggagattttggagaaaatgtgggggataaaatatttcttttgagagggttttgaatgtttgtcacggtcagcacaggaagggaaggagaaccccgcgatgctgggtcttggaaaaactgtactctctacccaacctcagcagccatcactcagcgcccccccgctctggagaaagctgatggtgggtagtgcctgacatacctctggtggcctttattgagaaagggtccgtatgagaatattacattacctgatggaagacaggggaaa

SEQ ID NO: 6285 - DNA, 524 bp, Homo sapiens
  MAP TO AL117337.25; EXPRESSED IN ADULT LIVER, SIGNAL = 0.98; EXPRESSED IN PLACENTA, SIGNAL = 1.1; SWISSPROT HIT: P03360, EVALUE 1.00e-30; NT HIT: Z70664.1, EVALUE 0.00e+00; EST_HUMAN HIT: AW237002.1, EVALUE 0.00e+00
tcaacttcccacctttctcggggagagcctccctggaggcggtggactgagctgggcttaggaccttgtttggtgtttacctgagcacaagccatacaccagagagctgcttggttagttaagtcctgaaggtgggggatgttgaaatggctccttagaagctgggccagttttattcctcccaaatgggtggcagaatgcagatgattgattaaagtttccccaggggcttggggcataaagattctggaatcaggaagaatccaccaaccttcctgatatttactggcccaaagatctgaagcttgtttttcttcctctggggagtattgtgggtggtctggtaggtcaggttgcggaaaggacacagtgggcagcagggtcaaaggcgtgactgggagccaagctgcctctcgagctgcagagcctgctttttggttaccacaggcaatagccatgccttctgtttgatgacatttgcagtgaattacagccacctgcggaggaagccaaacagcttcaag

SEQ ID NO: 6286 - DNA, 582 bp, Homo sapiens
  MAP TO AF245226.1; EXPRESSED IN LUNG, SIGNAL = 0.69; EXPRESSED IN ADULT LIVER, SIGNAL = 1.8; SWISSPROT HIT: Q9YBK6, EVALUE 4.90e-01; NT HIT: AL163278.2, EVALUE 3.00e-12; EST_HUMAN HIT: AA179127.1, EVALUE 3.00e-37
aatcctctttggggaaccagtgtgatcatttggaggacataagacaccctggccatttgagttgctggagttcttgtgttggttctttctcatgtctacgtgtgggtatttctttgactgctgggttgcctctaattaaagtggtcaggcagaggaagagtggttgtgttggagtcccaggctcagcagccctgctcagtgagaagtgaggaccaggacctatgtggagcacagtctggccacttttccatgaggtgggtgctttgtgctgggagtccagatcagcccctggtccccatggctctctggaacctgaagacagcaagggcaagggctgtgagacggaaaacatggtaacccatctatattagttcattcttgcactgctttaaaaaagtacctgaaactgtgtaatttataaagaaaacacatgtaattggctcacggttctgcaagctgtgcaggtaggatggctgggcaggcctcaggaaactttcaatcatggcagaaggtgaagcggaagcaggcatgtcttacatggctggagaagaaggaatagagagaaaggggaggtgctacaca

SEQ ID NO: 6287 - DNA, 558 bp, Homo sapiens
  MAP TO AL117382.28; EXPRESSED IN BRAIN, SIGNAL =  14; EXPRESSED IN LUNG, SIGNAL = 8.2; EXPRESSED IN BONE MARROW, SIGNAL =  13; EXPRESSED IN ADULT LIVER, SIGNAL =  14; EXPRESSED IN PLACENTA, SIGNAL =  17; SWISSPROT HIT: P09762, EVALUE 2.40e+00; EST_HUMAN HIT: AI224115.1, EVALUE 0.00e+00
ctcactccccagacttcagcaccacccaccaaaactgcctggtacactttccctctgaagtaggatcaataatttagccaaataactaagcaaaatatatatttgaaaaatagattagccattgtccttctgtcccccctctgttactcttttatttcttgtaactatcttgcttcaaattcaaactacagctctggggaggaagtcctggggaaaaggctttcggataccaaaacccgtatgtcccgtaccagctcagcaaaccaaacaaggtgccaaacaccttctgggacaagttgtggaaataaacagctgtgcacagaaacatcaacacccagatgaaagtcagaatgcccagggccacaaccagggtggtgatggcggtgtggaggcagtggcttcggtccgtcttcacctcatgcagcacagacatctcttctacaatcatgagggcgcagaaggtcagcaggaaggagtgacctgagatgtcaaagccatgccaaaagcccccttcctggtggcactgctgcttgctctggtgttcctttctgaccccct

SEQ ID NO: 6288 - DNA, 600 bp, Homo sapiens
  MAP TO AC010515.5; EXPRESSED IN FETAL LIVER, SIGNAL = 1.2; EXPRESSED IN BRAIN, SIGNAL = 1.5; EXPRESSED IN BONE MARROW, SIGNAL = 1.7; EXPRESSED IN HEART, SIGNAL = 1.7; EXPRESSED IN ADULT LIVER, SIGNAL = 1.5; NT HIT: M26510.1, EVALUE 2.00e-04; EST_HUMAN HIT: BF868591.1, EVALUE 1.00e-102; SWISSPROT HIT: Q27991, EVALUE 1.00e-15
gttggctgtgcctttctctccaatgcctccccagtacctgttcccagcacagtagatgctcaatacattaagtcatatgaatgcatgaattttcccaaccggaccctgagcctaggaatagaagcaatttgctcaaagccacacagctaatttgagggtcctcgaatcagatgtggctccagccaagtccagaggccaaaccttaacccacagccacagccaccccttcctccccaggctgagtcactcaccctcttctcgtggttggggacaatgcaccggacaaaactggggttggtgttgctgagtgtggccatgaggcggctcagggactccttgtagagctgtcccactgtccggaacataccccgacgggggcggccacctggtgggccgtcgcccaggctgctcacctgttccagccccacgatgccctccactgtcagatggagatgcagagagagagagaaggaggtcagggtcagttttagggacctgggccaaaggtcaagggtcttatcatttatcacaactggcactttacatatgaaggacctcacacagcctgtaaggtagatatcagcttcattggacagatgg

SEQ ID NO: 6289 - DNA, 598 bp, Homo sapiens
  MAP TO AL080242.11; EXPRESSED IN BONE MARROW, SIGNAL = 2.2; EXPRESSED IN PLACENTA, SIGNAL = 1.7; EXPRESSED IN ADULT LIVER, SIGNAL = 3.6; EXPRESSED IN BRAIN, SIGNAL = 2.2; EXPRESSED IN LUNG, SIGNAL = 1.3; EST_HUMAN HIT: BG913893.1, EVALUE 0.00e+00; SWISSPROT HIT: O31616, EVALUE 1.00e+01
aaatgttcaggggtgctgtcacctccctgacacctcctttacagcccccttttccccagcgcgtggtatgctctgacttagttgggctctaccaggacaccgtactgctgcaaagtgctcagtgggtgaggtgggagagggagaagctgtcgaatacccttcggtgagcccgaccccaacacctgatggttaagaaaaatgtctctgctttctgccttttggaaattttgctctttctctttttcacagtgagttatacaagagtcagctgaaaagggatcttccaaaaggctgtcactctaagagaatatttgtcctcttgggtatccctagtgtactagctgtggattccactcttagttactgaattatatttttgtctttgtcaaaaaacatttcacaagataataatccatattatataatcccttaagttccatacatactttgggagacgtaccgaccagatttcagttgttattaaatgaagcttgtaaagcttttgttgttttgttagggtgagtaatttctgcccgtgccccaccacagtgcaccaatcacagacgaaatgaaggaagcacttgctgcgtctgtccta

SEQ ID NO: 6290 - DNA, 578 bp, Homo sapiens
  MAP TO AC010348.4; EXPRESSED IN ADULT LIVER, SIGNAL = 0.9; EXPRESSED IN LUNG, SIGNAL = 1.3; EXPRESSED IN FETAL LIVER, SIGNAL = 0.54; SWISSPROT HIT: P36140, EVALUE 8.40e-01; NT HIT: AL163278.2, EVALUE 2.00e-07; EST_HUMAN HIT: BG541660.1, EVALUE 4.00e-09
atggggtgcctgaatatttggttaaacattaattctgggtgggcttgtgaaagtgttttgggaagagattagcatttcagcccatagatgtaaagcagattgccctccccaatgtgggtgagcatcatccaatgcattgagggtttaaatagaccaaaatgtgaaagaagggggaattatctctctctctctgcctaatgcttgagctggcacattaggcttcttctgccctcagactgagacttagaacgccagctgtcttgggtctccagctcacagacagcaggttgtggatcttttcagcttccataatcatgagagccaatgccttataagaaatctctctctatataaaatataaaacatagataaacatacacaaaattataaacatatgtatatatacatatgtcttattgcttctgtttctgtggagaatcctgactactacacatgcttatactgtactgacaaaatttcttttttttggatttagatattatctattgacttcttaccctagaaaattgatgtttacttttcttattcccccatgtgctggcatgtgaacacactcc

SEQ ID NO: 6291 - DNA, 596 bp, Homo sapiens
  MAP TO AC005176.1; EXPRESSED IN ADULT LIVER, SIGNAL = 0.41; EXPRESSED IN LUNG, SIGNAL = 0.6; SWISSPROT HIT: P97400, EVALUE 7.00e-15; NT HIT: U68396.1, EVALUE 2.00e-10; EST_HUMAN HIT: N40740.1, EVALUE 1.00e-115
ttccatcttgtgaggggaagagaatctccccacctgggggatatacgaggagctaaagcagccccacagggaccaggcctgcagtatcaccagagagatcagggaggcttctttatgccttggggaaaagaaggaagggatttgtgtgtgtgttgagtgtgtgtcctacaagggaggggcctgcccaacactccgtgtgctttgccctcagcaatgacccagagctgcgggtggaattctacactgggatgaatgagaactcagacatcgccttccatttctgagtgcactttggccattgtttggtcattgacagccatgtgtgtggggcctggaagtgtgaggggagatgccacaatgtgttcttcaaggacggcaaacaatttgatctgagcatcttggtgctagacaatgaataccaggtgagtgccctaggagctcccggtatccagcctccatgggttctcagagcaggaggcagctctccctggcctgacccaaatagattttcaggacccatttctcataactactcttaccccaggctttttatcacagagcaccctctggttgcaccgctatcctcagctcgtttc

SEQ ID NO: 6292 - DNA, 566 bp, Homo sapiens
  MAP TO AL096870.3; EXPRESSED IN ADULT LIVER, SIGNAL = 0.66; EXPRESSED IN LUNG, SIGNAL = 3.7; SWISSPROT HIT: P26770, EVALUE 4.00e-39; NT HIT: gi9506372, EVALUE 2.00e-47; EST_HUMAN HIT: BF893759.1, EVALUE 3.00e-40
ctggctttagggtgcagaagagttggtgttcatggtgacctcttccaggaacaccttctcttgtccatccttcctgcctacctggcccgagagatgaaggcagagatcatggcacggctgcaggcaggacaggggtcacggccagagagcactaacaatttccacagcctctatgtcaagaggcaccagggagtcaggtatgaggaagaatggctggaggggaggggcctgtgggctaagaccctggccctgctgacacagtctgccctatgcagcgtgctgtatgctgacatcgtgggcttcacgcggctggccagcgagtgttcccctaaggagctggtgctcatgctcaatgagctctttggcaagttcgaccagattgccaaggtcagagaagacttccctccccacccagggaccctcaaacatcccatcctgggtagccccttccaagggaaactcccaccttataagatcccaggcccacttcagtgcatgcaggcccccagatattccagtggaaggaggaaaccctctcaaacattcccagtcatgaagctgctcac

SEQ ID NO: 6293 - DNA, 530 bp, Homo sapiens
  MAP TO AC004207.1; EXPRESSED IN PLACENTA, SIGNAL = 2.1; EXPRESSED IN ADULT LIVER, SIGNAL = 1.5; EXPRESSED IN FETAL LIVER, SIGNAL = 3.2; SWISSPROT HIT: P20721, EVALUE 4.90e+00; NT HIT: AL163279.2, EVALUE 3.00e-30; EST_HUMAN HIT: AA504999.1, EVALUE 3.00e-34
tctcccccttccctttttacaagaggacgcttaatcctaagggttgcagaaggatgaaggtctgtcttctgcaacttcttcatgcagaataagggcgatgatattcctgcctaactattagggtctcttgtattcagggtagagaggagctgagtcagaaagcactggtccgttaaacatcgattgtacttctgagttccagcaaaaggtgacaccctggcactccagcagtttctcagcttcctgtgtggttttcttgatcagtccccatgttatgggggttgatgtcagcatgactctggtcagtcgtcgttccatcttcgcattcagattcaactggctcatggattgtactgggggaaccaggtccagggttgggatccatgggtccctccagtctcccattccaagatgcaccttggaaaaagagacaaaaatcactagcatctgtggcccacgctttttcctaaaagggttttgaggacttcagtacttacaggggaaagagcaggcagaaggggaaaaacagt

SEQ ID NO: 6294 - DNA, 584 bp, Homo sapiens
  MAP TO AC008747.4; EXPRESSED IN HEART, SIGNAL = 2.2; EXPRESSED IN ADULT LIVER, SIGNAL = 1.1; EXPRESSED IN BRAIN, SIGNAL = 0.95; NT HIT: gi14766740, EVALUE 0.00e+00; EST_HUMAN HIT: AW265702.1, EVALUE 1.00e-126
tgaatgctttcaaagggagcagaatcattttcaagtcactgctgtcaattttttccctttggaacaaaggacataacaatctggttctgcccagataaactaaatagtaagagggttctgtttagaggcatttctgttcaatctaatgctatgacatcatcaagctcttccttctgttctatacgtgacctctttgcactgagattctctttctcatctaatttcctcttgcggcttctctcttcttcactgacgtcggcattatttgaagaatcttcttcatctgaatcaactatgagaacgtcatcttgctcttgagcttatttcagaaaaaagggaaaaagaaaatgggtaaaagcgtgggagttacctgtgctcacctgtattttctataattgaaagctgactcttctaatacacaccagacttaagaatggctgcattttcactttacacattacgtatttccatactgttttaaatgttttatataagaacctatttattttctaatcaaaacaaaaaattgtgacaagcattatgtaactcaaagtactcattacacatccttgattctacctcca

SEQ ID NO: 6295 - DNA, 542 bp, Homo sapiens
  MAP TO AF072711.1; EXPRESSED IN ADULT LIVER, SIGNAL = 3.5; EXPRESSED IN LUNG, SIGNAL =   5; EXPRESSED IN HELA, SIGNAL =  11; EXPRESSED IN BONE MARROW, SIGNAL = 7.8; EXPRESSED IN PLACENTA, SIGNAL = 3.6; NT HIT: M12140.1, EVALUE 2.00e-13; EST_HUMAN HIT: AA017052.1, EVALUE 7.00e-66; SWISSPROT HIT: O35291, EVALUE 6.70e+00
attgctgctgggatgacttcttggtttgagtcctctttatgatatataaatttactttagctttttgactgctgctttgtaatgccatggagtaacctgtagtccatataggtagatccggctctaagatagtaagatttacaggattgcaagtgcttgtcttacagtccggttttgctggcgctttgatgagcaagattggctttagcctcagtgatgatcggtcagtgaactgtgttgtgcggttccagcaagctattgctagggccttggaggggcaaacagggtatgcacatacaattttgtactggcagtttgtacagtaccctgtaggaccagagattgtgagataggttgggttcacggatgttaactgacaaatatcaaagtatatggctatagccccccctggggggtagaggcttggctttgatttataagacttcctttctttgactcagtatgaacctcaaaccaagtcctaggtaaagacttagaaggtcatagcatatataaggctggccatttcctgggtcacaaat

SEQ ID NO: 6296 - DNA, 563 bp, Homo sapiens
  MAP TO AC040171.3; EXPRESSED IN HELA, SIGNAL = 4.3; EXPRESSED IN ADULT LIVER, SIGNAL = 2.5; EXPRESSED IN LUNG, SIGNAL =   4; NT HIT: gi9635487, EVALUE 0.00e+00; EST_HUMAN HIT: BE150340.1, EVALUE 0.00e+00; SWISSPROT HIT: P03356, EVALUE 6.00e-33
cggctccttcagctgtactcactctttgttaagtcccacaattaccattgttcctggcccggacttcaatccagcctcccacattattcctgataccacacctgacccccatgactgtatctctctgatccacctgacattcaccccatttccccatatttccttctttcctgttcctcaccctgaccacgcttgatttattgatggcagttccaccaggcctaatcgccactcaccagcaaaggcaggctatgctatagtatcttccacatctatccttgaggctaccgctctgccccactccactacctctcagcaagccgaactagttgccttaactcaagccctcactcttgcaaaaggactacgtgtcaatatctatactgattctaaatatgcctttcatattctgcaccaccctgcggtcatatgggctgaaagaggtttcctcactacacaagggtcctccatcattaatgcctctttaataaaaactctgctcaaggccgctttacttccaaaggaagctggggtcattcactgcaaggggcatcaaaagtcat

SEQ ID NO: 6297 - DNA, 576 bp, Homo sapiens
  MAP TO AC004189.1; EXPRESSED IN ADULT LIVER, SIGNAL = 0.66; EXPRESSED IN BRAIN, SIGNAL = 0.58; SWISSPROT HIT: P21169, EVALUE 4.90e-01; NT HIT: AF075031.1, EVALUE 0.00e+00; EST_HUMAN HIT: R73074.1, EVALUE 0.00e+00
gattttccaccatgagccaggccccgtgagaagctatgtcaggcgtgagcgagttggtggggtcaccactcgttcctgtaggaagaactagagattccaaaaatgctgataacaatcacacacatagaacttattttggccaaacaccataataaatatttgtatatattaactcatttaatcctcacaacaacctcaggaggtaggtgcccatcttgtacataagagaactgagacatgtggaggccgagcagctggtctcaaatcagctgatagtaagtcgcagagccagcatttgaagtcttgtggtttggctcccgagtctgtgctcatgaccattatgcagtggtatgttgtatgcccaggacctaccggtaagaagtgggctcgaagtccaaagaagcgtgaagactggatattcctgcggcctctcagcagcatgggtcatggacacctgttccaatacatcgtggctgcacatgcatctctgattctctctgtgtctgctcttcttgccaactaatgacacattcatcatggatcccttctgaatctccgagaggacctgatggtttc

SEQ ID NO: 6298 - DNA, 545 bp, Homo sapiens
  MAP TO AF107256.1; EXPRESSED IN ADULT LIVER, SIGNAL = 1.2; EXPRESSED IN LUNG, SIGNAL = 1.7; EXPRESSED IN HELA, SIGNAL = 1.9; SWISSPROT HIT: O15197, EVALUE 2.00e-17; NT HIT: gi14743786, EVALUE 3.00e-61; EST_HUMAN HIT: BF238114.1, EVALUE 4.00e-61
acctcacactggtgctcctcccgtcagccagcccctgccctgggccccacgtggagatgggcaggagggccaggctgtcgtcccccctccacagaccgactaaagagcagtctggagggtgacaagggggcagcaagggggtggaaatgggagcgtcatccccagtcaccgttttgttcctcaggaagcggcgtgggactggctacacggagcagctgcagcaatacagcagcccaggtggggatgaggagaggaaatgggtggggctggggaacacatgggtggggcacatggcaggcaaggctggatccccccaagattgggggagctccttggcacaaccttctggaggtaagtgggcatgtctggggtgcgcgggcagccctgcctttcacaacacgctcataacatactccacacccctccaggactcggggtgaagtattacatcgacccctccacctacgaggacccctgtcaggccatccgagaacttgcccgggaagtcgatcctgcttatatcaagattgaggaggtcattggga

SEQ ID NO: 6299 - DNA, 576 bp, Homo sapiens
  MAP TO AC011544.5; EXPRESSED IN PLACENTA, SIGNAL = 3.7; EXPRESSED IN ADULT LIVER, SIGNAL = 3.7; EXPRESSED IN HELA, SIGNAL = 5.2; EXPRESSED IN BRAIN, SIGNAL = 3.5; SWISSPROT HIT: P26583, EVALUE 1.00e-46; NT HIT: gi14731417, EVALUE 0.00e+00; EST_HUMAN HIT: AU133250.1, EVALUE 0.00e+00
tgcacaggcatcattaaaggatagccatttattcttcatcttcaccctcttcctcctcatcttcatcttctttctcctcctcctcctcctcatcttctggtttgttcttctttgagcccttctttcctgcttcacttttgcccttagcacgatatgcagcaatacccttttcatatctctcctgtagcttaactgctttctgctcatatggttgtttatctttggctgactgcccagaccacatttcacccagtttctttgcagtttccacgacaaataggcctgggtgtccacttttgatctttgggcgatgttcagagcaaaacaggaagaaggcagatggtggccttctaggagcattgcgatcctttttctttcctttcttaccctttcttacatttcggaggaatgtaatttttaatctccctgtcacagcgagctttgtcactttttgccttctcttcaaacttcacttctcctttgcagacgtggtcttccatctctccaaacacttcttggagaattccacgaaattgacagaagagtccgggtgtttcttcttgtgctcttcctggc

SEQ ID NO: 6300 - DNA, 598 bp, Homo sapiens
  MAP TO AC009533.9; EXPRESSED IN ADULT LIVER, SIGNAL = 0.68; EST_HUMAN HIT: AW237002.1, EVALUE 0.00e+00; SWISSPROT HIT: P21414, EVALUE 3.00e-32; NT HIT: M32788.1, EVALUE 0.00e+00
gctgagttgattgccctctctcaggccctccgatagggtaacgacgaacgtattaaaattcacactgacagcaggtatgcttttgctactgtgcatgtacatggagccatctaccaagagcatgggctactcatctcagcaggaaaggctatcaagaacaaagaagaaattttggccctgcttgaagctgtttggctccctcaacagctggctgtaattcactgcaaatgacatcaaaaagaagacatggccattgcctgtggtaaccaaagagcagactctgcagcctgggaggcagctcaactcccagtcacgcctctgactctgctgcctgcagtgtcctttccgcaacctgacttaccagatcacccagaatactccccagaggaggaaaaataggctttggatcttcaggccagtaaaaatcaggaagattggtggattcttcctgattccggaatcttcataccccaagctctcggggaaactttaatcagtcgtctgcattctaccacccatttagaaggaggaaacctggcccagcttctaaggagccgtttcaagatcccccaccttcaggacttagcgaaccaagcag

SEQ ID NO: 6301 - DNA, 514 bp, Homo sapiens
  MAP TO AC002097.1; EXPRESSED IN ADULT LIVER, SIGNAL = 0.68; EXPRESSED IN BRAIN, SIGNAL = 0.53; EST_HUMAN HIT: C06313.1, EVALUE 1.00e-111; SWISSPROT HIT: P19835, EVALUE 2.00e-33; NT HIT: M94579.1, EVALUE 0.00e+00
gaggaaggcattgagtggaggactgggagtgaggaagttagcaccggtcggggtgagtatgcacacaccttcctgttggcacaggctgagtgtcagtgcctacttgattcccccagggaggacttctacaagctggtcagtgagttcacaatcaccaaggggctcagaggcgccaagacgacctttgatgtctacaccgagtcctgggcccaggacccatcccaggagaataagaagaagactgtggtggactttgagaccgatgtcctcttcctggtgcccaccgagattgccctagcccagcacagagccaatgccaagtgaggatctgggcagcgggtggctcctgggggccttcctggggtgctgcaccttccagccgaggcctcgctgtgggtggctctcaggtgtctgggttgtctgggaaagtggtgcttgagtccccacctgtgcctgcctgatccactttgctgaggcctggcaagacttgagggcctctttttacctcccagcc

SEQ ID NO: 6302 - DNA, 580 bp, Homo sapiens
  MAP TO AC004202.1; EXPRESSED IN FETAL LIVER, SIGNAL = 0.37; EXPRESSED IN BONE MARROW, SIGNAL = 0.63; EXPRESSED IN ADULT LIVER, SIGNAL = 0.47; NT HIT: gi14761229, EVALUE 0.00e+00; EST_HUMAN HIT: BG328177.1, EVALUE 0.00e+00; SWISSPROT HIT: P19474, EVALUE 3.00e-27
tggcagaatctctgacctccactttctctgactcccttctcccttcctagaaacagtatccacagtggactccggggctcctacagacttggcacagcttcctacagtcttgaaacagccctgttgttctgtcatggccagtgggcagtttgtgaacaaactgcaagaggaagtgatctgccccatctgcctggacattctgcagaaacctgtcaccatcgactgtgggcacaatttctgcctcaaatgcatcactcagattggggaaacatcatgtggatttttcaaatgtcccctctgcaaaacttccgtaaggaagaacgcaatcaggttcaactcgctgttgcggaatctggtggagaaaatccaagctctacaagcctctgaggtgcagtccaaaaggaaagaggctacatgcccgaggcaccaggagatgttccactatttctgcgaggatgatgggaagttcctctgttttgtgtgtcgtgaatccaaggaccacaaatcccataatgtcagcttgatcgaagaagctgcccagaattatcaggtaggcatttgaggtttcttccctgttccc

SEQ ID NO: 6303 - DNA, 514 bp, Homo sapiens
  MAP TO AC008639.6; EXPRESSED IN PLACENTA, SIGNAL = 0.69; EXPRESSED IN ADULT LIVER, SIGNAL = 0.65; SWISSPROT HIT: Q23256, EVALUE 2.80e+00; NT HIT: gi13937343, EVALUE 6.00e-22; EST_HUMAN HIT: AI287878.1, EVALUE 3.00e-15
gagtggcgtgtatacccctgcggtattgggagtaatatcttcctctccaccgctggctattaggaacaatgtcacagaaggggtgtacaccccctggtgtattgggagtaatatcatcctctccgtccctggatattaggaacaatatcactaaggagtgtacacctcctgtgatactgagactagtatcatcctcttgccccctggatattaggaacaatatcacaggggtggtgtacacctcctgcgaatttggggcaaatgtcatcctctccacctttggatattagagacaatatcacaggaggggtctacgccccctgcaatattgggagtgatatcatcctctcccccccggatatcaggaacaatatcacagaagggatgtgcacccactgtgatattttgagtaatgtcatcctctacccgctggctattaagaacaatacaggtggtgtaagctttccgcgacattgggagttatagcatcgtctcccccagatatcaggaacaa

SEQ ID NO: 6304 - DNA, 568 bp, Homo sapiens
  MAP TO AC008964.4; EXPRESSED IN ADULT LIVER, SIGNAL = 0.53; EXPRESSED IN BONE MARROW, SIGNAL = 1.1; SWISSPROT HIT: O15117, EVALUE 5.00e-18; NT HIT: gi15294960, EVALUE 3.00e-86; EST_HUMAN HIT: BE539455.1, EVALUE 4.00e-86
tgaatgatgtttgtccctcaacattttctttaatattcctacattatatttcgaaaacactgaattatctctttagcaaataactttttaataaatccatccataaataagttgtttcaataatgcacataaaccaataatttaaatattgttcttttttttttagtatgatggtgaaattagagtcctatattcaactaaagttacaacttccataacttctaaaaagtggggaaccagagatctacaggtaaaacctggtgaatctctagaagttatacaaaccacagatgacacaaaagttctctgcagaaatgaagaagggaaatgtaagtcactgcttatactataatatgtgcatatatatgtcactccagaatttaacaaccaaacaagttttagtgactactctgtgtttactaactcttatctatctttttgccctatcctttgtaaattgtggcaaacgttcagaagttggtcattatgctgtgctgaaaccaatgtattttaatctctttttatttaccatatactatctatatactcggtgtcaaagataatgcca

SEQ ID NO: 6305 - DNA, 542 bp, Homo sapiens
  MAP TO AC011452.5; EXPRESSED IN ADULT LIVER, SIGNAL = 1.2; EXPRESSED IN FETAL LIVER, SIGNAL = 2.1; EXPRESSED IN BRAIN, SIGNAL = 1.7; SWISSPROT HIT: P20138, EVALUE 3.00e-18; NT HIT: AY029277.1, EVALUE 0.00e+00; EST_HUMAN HIT: AI880327.1, EVALUE 1.00e-125
tgtggacagaggatcagacgccattcccatccccctcccagggctgagccggcatcctgggaccccacagcttcctctccctggatgctcctgagctgggagccactcactgtcctgctgggctcctccacctccccacccaccggggctgtctgcacgccccaccctcccaggccacactcacaggccacacggagtcggacggtcctctgtgcgctcacaccctttctggagaagtccacatggcaggtgaggtcggtgtcgtggtcctgggggctgggcgtgaagctgagcactgagaagtgggaggtgcttggtctggttcttctaggggagagggcagcccccgtccaggagaaagaaggggctggacatttcttgaaagcccagttaaacacacagatgaccgtcaccggctgcccgggctccagggtctcggggatgtagacatcaggcttctgagtcagggctggggcagagaccggggtggggaattcttgtgctgcaggggtccctgaaagccctctctgctcagcccatag

SEQ ID NO: 6306 - DNA, 588 bp, Homo sapiens
  MAP TO AL096870.3; EXPRESSED IN ADULT LIVER, SIGNAL =   1; EST_HUMAN HIT: BG682131.1, EVALUE 1.00e-109; SWISSPROT HIT: Q9Z244, EVALUE 8.00e-19; NT HIT: gi14750812, EVALUE 1.00e-82
atgtagcaaaacggagtggcaggaaagtggaaagataaaaaggtaccgactgtaatagaaacataccatgatggtgtgctgggggaagcgcttccgtacatcttttacaaattcaacaaagtgttcagagtagccatttgccacatccaggcatatatacttcatctgggcgatagcttccaggatctgttttagctgctcaaagtcagaagagcctgtgcctgagctggcagccagatgctgtgggagaaacagagtcattggcatatcagagatgatctggtgggcagccagtgggtcattggtgagtgctggtccccagaaagccaaaatataattgctggaaaactgggataaggaagggagcagggtatgcccagtgttacctcaagacagtcaggattctggccagcaaactcttgccactgaacgaggctatagtgcttatggacagcagtgaagagagagaactggggagaagacaaagaagcatcaaaagggagaaaactttattaaggtctcttttctagaaacagacctattctatctgagggaggacatgattgaagttggggaggaaacaagtca

SEQ ID NO: 6307 - DNA, 521 bp, Homo sapiens
  MAP TO AC009990.8; EXPRESSED IN ADULT LIVER, SIGNAL = 0.44; EST_HUMAN HIT: AV763834.1, EVALUE 1.00e-11; SWISSPROT HIT: O32253, EVALUE 4.80e+00; NT HIT: gi16174379, EVALUE 5.00e-07
tggttccaatgtttgtgtccacttcaaaattcatgttgaaacctaatccccattttgatggtattaagaggtagagtctttacgggtgattaatcataagggctctgccctcatgaatgaattagtgcctttaaaaaggctagagggaactagctcaggccttttttgtccttctgtctcttctgctatgtgaggacacagtgttcaaggtaccatcttggaaccagagtctgaagtcttcaccagataccaacctgctggagctctgatcttgaacttaccagctccagaactgtgagtaaatacatttctttataaattacttagtctcaggtgttttgctacagcatcacaaagagactaaaacaaagttcaagcttgtgtttcgtaacaaaatgtgattacactttgggaatcttgaaagggagtatattttacaagtgaaatgaatgtgaatcattagggacaaaagggtgatctgtggtttaccatcatattggtgttccccaatgaaccacaac

SEQ ID NO: 6308 - DNA, 577 bp, Homo sapiens
  MAP TO AC009087.4; EXPRESSED IN HEART, SIGNAL = 0.97; EXPRESSED IN ADULT LIVER, SIGNAL = 1.2; NT HIT: gi14779295, EVALUE 1.00e-102; EST_HUMAN HIT: BE262793.1, EVALUE 1.00e-102; SWISSPROT HIT: Q92620, EVALUE 4.00e-30
gaggaaacacaagccaaagctgacaaatgggcctattcaattcttaccaatcatgaagactgaagcaatggagccactgcccagaaaaccccaagccaccctcagcagagcaagaacagcatgaactacaacccgagtctgaactgcaaccagaggcctcaggaacctctggcctaccagagaccccctcagcccacctggagcaacccactagctactggtggtgcactggtcaacaccccatgcgcagagagaccaaaccacacagccctcacctcccggagcagcccaaagagcacgtcagtgttgagggagcgctcgtgggcctcgtccatgatgatggcactgtagtgatccaggtcggcttcccggagggactctcggagcaggatcccgtcagtcatgtatttgatcaaggtgttctctgaagtgcagtcttcaaagcggatggcatagcccacctggaggtcagagagatggctcagatgccctggccaccggctcaccaccagcacaccccgtactggggtccgagtcttagcagatcacaccctttagcaaaaatgggtggaagcta

SEQ ID NO: 6309 - DNA, 592 bp, Homo sapiens
  MAP TO AC004791.1; EXPRESSED IN BRAIN, SIGNAL = 0.49; EXPRESSED IN ADULT LIVER, SIGNAL = 0.42; SWISSPROT HIT: Q9MUM8, EVALUE 2.90e-01; NT HIT: D90913.1, EVALUE 8.80e+00; EST_HUMAN HIT: AW609248.1, EVALUE 0.00e+00
cacaagattaggccgagagccgatcagacaaacaacctacaacccttaagctcctggcagcgcccagccaaggccatgcttccttgcaacactccttccaaatggccatcccagcatgcttccaagcaggcttcatccgttcctctggaccctcatctcttaagacctgccgcctataaaaaggattatatcttgagaccctatcctctaaaattttttccacacccaaaacaaaaaatctctgggtcaaaagtctaaaacgcttaggctggcaaccatcagatccttgcccatggtgtcctcaagcctactctcatgaaatggacaacagtacacgcatatggggccagttccacatatttggcaaccagaccagcatccaggacaacacaaagtatgttgtttgttgttagagggcttgggacatttcactctttgccagcctcagcttaatccaggagacaaagattattttccttattatctcttctgcataggatctgcaatcagaactattgaacttctccattcagaccgccactcacacctatgggaaaagggtaatgtatcatcggcttagcaacagggaata

SEQ ID NO: 6310 - DNA, 524 bp, Homo sapiens
  MAP TO AC010379.4; EXPRESSED IN ADULT LIVER, SIGNAL = 0.9; EXPRESSED IN PLACENTA, SIGNAL = 0.54; NT HIT: AJ238622.1, EVALUE 5.00e-01; EST_HUMAN HIT: BI031032.1, EVALUE 1.90e-01
actttgagtcccacagggagtctataaaatgtaaaatcttatataatagcagaagcagccacaaatattttaatatccagggctgcttctgaatcctaattttgcagatggcgtgaagttcattttatagcagctattgaaaactaataaatgccatccacatcactcagcattgtcaataatccaccagactgtgtgcccagggatgctggggaagcagaggtggctcctgacccttccctagccagcctccagttgcagaccccagagctgcctggccttatcagctgccacaattctattcaggtcagcaatgaggcgaggctttttgaacttctaatctgccagtggagagattttcgcaagagggtaattgctgcaaagagcatgcaagggagggaggtaagcttgtccctttcctgcttgttgtatttgccttctcaaatgcaaagatgagcagaggaggaaaagcaagaaattgacagtgagaccactcccaggcttggtcaaaaatgggctgagaa

SEQ ID NO: 6311 - DNA, 600 bp, Homo sapiens
  MAP TO AC002096.1; EXPRESSED IN HELA, SIGNAL = 1.1; EXPRESSED IN BONE MARROW, SIGNAL = 0.39; EXPRESSED IN BRAIN, SIGNAL = 1.1; EXPRESSED IN ADULT LIVER, SIGNAL = 0.44; NT HIT: gi16161012, EVALUE 0.00e+00; EST_HUMAN HIT: AU133424.1, EVALUE 0.00e+00; SWISSPROT HIT: Q92574, EVALUE 1.00e-107
gagtgccccagtcccttacttgttcagctccttgctgtgcgcgtctgctccctgctgtatcagtctgtccagcacttccattggggaggtagagggcacaccatcttcctctgtgtttccttttgctttctttaacagctcctcagtcttcctgatgacaaaatgatgggctgtctttggcaatgccacctcaaaaagatgatcatacgggggaggctgcccgcttccaaagcccactctcgtcggaggtggaattttacaaggactgggagtgaagatactggtctccaaagaagtctggcattccctgtctcccgcagggctttcatcagcactgccgcagggcaggtctatgggagtaaaggcttgctttggtgtgtcaggcccaagcttgtccagggaggagtgtaaaggctcagggttcacgctggcgccctgagaactggaggctgccgagtgggtcttccgctgagaacctgggagactgtctcggtaaaagggagagtcaaagcctcctcgaggaaccacaggctctgcctctgctgtggtgatctcagaaagttctctagatattgcagctgagaggaagagaggaaacaa

SEQ ID NO: 6312 - DNA, 525 bp, Homo sapiens
  MAP TO AC008727.5; EXPRESSED IN PLACENTA, SIGNAL = 0.76; EXPRESSED IN ADULT LIVER, SIGNAL = 0.8; NT HIT: AF121212.1, EVALUE 0.00e+00; EST_HUMAN HIT: BF346446.1, EVALUE 1.00e-101; SWISSPROT HIT: P37039, EVALUE 1.00e-06
tccgtctgagtttgttggtggtagttcctaatgaaagagattggttttacatattctttatatcacacacctaaactttttttttttccacttagagagaaactccaagaacaacacccagatggaaattttggagcaatgtggttgttttttggctgcaggcataaggatagggattatctattcaggtattgtacaattccagtattgtactcaaccactgagtgtacaattctaattctcagactttttcagcttgacaaccttttagtgatccattatatattatatttcagaaaagagctcagacatttccttaagcatgggatcttaactcatctaaaggtttccttctcaagagatgctcctgttggggaggaggaagccccagcaaagtatgtgcaagacaacatccagcttcatggccagcaggtggcgagaatcctcctccaggagaacggccatatttatgtgtgtgggtgagtcattatcgtgcctaagtcgggtaggagagggccatcagtg

SEQ ID NO: 6313 - DNA, 510 bp, Homo sapiens
  MAP TO AC008979.6; EXPRESSED IN ADULT LIVER, SIGNAL = 0.87; NT HIT: AL163202.2, EVALUE 4.00e-60; EST_HUMAN HIT: AW992958.1, EVALUE 3.00e-46; SWISSPROT HIT: P39999, EVALUE 1.20e+00
caaagcgttccaattaaccacttgcagattctacaaaaagtgtgtttccaaactgctcaatcagaagaaatttcaactctgtgagatgaatacacatatcacaaaggttcctcagaatgcttctgtcttgtttatatgtatagctatttctttttcaccatagccctcaaatggctcggaaatatccatctgcagattgtacaagcaggctgtttgcaaagtgctcaatcaaaggaaagtttcaattctgtgagatgaatgcaggcatcacatgtaagtttcttagaaagcttctgttcagtttttatgtgaagatgttttctttttcactataggcctcaaagcactccaaatatccatttgtggattctacaaaaagagtgcttccaaactgttcattcaaaagaagcgttcaactctgtgagatgaaaacatacatcacaaagaagattctcagaaagcttctgtttagtttttatgtgaagatatttcccttttcccaataggcct

SEQ ID NO: 6314 - DNA, 586 bp, Homo sapiens
  MAP TO AC003956.1; EXPRESSED IN BRAIN, SIGNAL = 0.55; EXPRESSED IN ADULT LIVER, SIGNAL = 0.51; EST_HUMAN HIT: BG197640.1, EVALUE 9.00e-10; NT HIT: U86216.1, EVALUE 4.00e-11; SWISSPROT HIT: Q9Y4A9, EVALUE 4.00e-26
gcgatgagaagatcatgctggtctcgatcaaggccaccgagaacccagagcagaaaaccagggctcccaggcagaggcaaacggtgggtctcatgaccatagagtagcgcagggggtggcagatggccacatagcggtcataacccatcagggtaaggaggaagcagtggctgcatcccagacccaggaagaaaaacatctgagcctgacagccagggatggagatggcctggtctccatcagcagatgagccagcatgctggggatggtgaccagcgtgtatagcaggtctccgagagggacagcaccaccaggaagtggtacatgggagtgtggcgggacctatccgcatgggtgatggtgatgatggtgacgttgccaccgagggtgaccaggtaggtaaggaagaacagggtgaagagtgtgttcctcaggtgtgggaggttggagaatcccatcatcaggaattctgtcaccagacaggtcccattttcctgctgcttgtaaagagacagagaggaggcaacagaataggtaaaatagagtgattaataagggtctgcgatgcatcaggtagcagtgtgga

SEQ ID NO: 6315 - DNA, 528 bp, Homo sapiens
  MAP TO AC007793.1; EXPRESSED IN ADULT LIVER, SIGNAL = 2.3; EXPRESSED IN FETAL LIVER, SIGNAL = 3.6; SWISSPROT HIT: O14599, EVALUE 4.90e+00; EST_HUMAN HIT: AW863647.1, EVALUE 2.00e-22; NT HIT: gi4508026, EVALUE 1.00e-38
tgcacttagacccaacctccaaatggtcttgcctctcatacctagaatgggaatatgtgaggaattattcatgttattcctgagcctttctgcatgtgtgattgtgacacacatctctgctcaaaacctgaggaatttgactctcctgcctgggcctggcacacagatgggattgggacatattgtttgaagcagtatttagatgatgtgaccctatactctttccttgttcctgtcacagagtacattgtgacatatcactggtccctgcacccaggtaatttgtttgtcttttttatgccctgcccacatgggctattgtaacatattgctgggtctaacacccaggtaatatgaatctcctacctatatcctgactacaggggccaattttgccatatttctgaacccgtcatctatttgatgttactctccactttttttttcttggttttaaggagtggagagtttaataggcaagaaggaagggagaagacagaaagaagaagctcccctatgcagagacag

SEQ ID NO: 6316 - DNA, 512 bp, Homo sapiens
  MAP TO AC008795.5; EXPRESSED IN ADULT LIVER, SIGNAL = 1.6; EXPRESSED IN FETAL LIVER, SIGNAL = 0.85; SWISSPROT HIT: P53863, EVALUE 4.00e-14; EST_HUMAN HIT: BF978217.1, EVALUE 5.00e-88; NT HIT: AF007560.1, EVALUE 1.90e+00
ggtaaaagatgtttcgcatcagtaatatttactgcttttctaaaaaaaaatcttaaagcgcagaagttaatctgttttctttgtcactaggtagtccatcctttctacgcttattggcagagtttctgcactcaaaagaattttgcatggaaggaagaatatgatacacgacaggcttcaaaccgctgggaaaaacgagccatggaaaaagaaaacaaaaagattcgggacaaagcaaggaaagagaagaatgagcttgtccgtcagctggtagctttcattcgtaaaagagataaaagagtgcaggcgcatcgaaaacttgtggaagaacagaatgcagagaaggcgaggaaagccgaagagatgaggcggcagcagaagctaaagcaggccaagtgcgtagcgtgcgtggggccctcttctcagtatcggtgggggtcagaggcagcaccagaggtaccttacatgttcatgttgggttcagtcatcagcctggctttatcctgcttttt

SEQ ID NO: 6317 - DNA, 585 bp, Homo sapiens
  MAP TO AC008821.4; EXPRESSED IN ADULT LIVER, SIGNAL = 0.79; EXPRESSED IN FETAL LIVER, SIGNAL = 0.51; EXPRESSED IN BONE MARROW, SIGNAL = 0.4; SWISSPROT HIT: P08248, EVALUE 7.40e+00; EST_HUMAN HIT: R94527.1, EVALUE 0.00e+00; NT HIT: AF369029.1, EVALUE 9.00e-03
ttagccagggagtcatgtggtcagatttgcattttaacatgcttctccaatggctgccttgacttagtcattccttatacatgggattccttacatatgggaggagaagaagaagaagagataaggatggctctgtatttattacttgagcgtttggttaggtggtgaggccattattcaaatctgaaatagacgaaaagagcaggttgagacaggagacatgggtgtgtttggtttagaacatgttatccatgaggtgttcaggttacactccaatcctcattctatcagaatggagctgcccagggggtattcccattggagaattggaacaaaaggattttcaaaaagcaactccaaaggacattttattgggtttaattatacctggaaccttagtcgtaagaagaaagaaaaggtagatttacagatgaaattctgatgtgaagccctatttaaagagtaattttttttctagctgttaaagaatactggtttacatatgaatactgaaagcatgactattgttacttttaattactaatatttaggtaatttgaagctccttttgttaaattttgccca

SEQ ID NO: 6318 - DNA, 519 bp, Homo sapiens
  MAP TO AC011358.5; EXPRESSED IN PLACENTA, SIGNAL = 0.76; EXPRESSED IN ADULT LIVER, SIGNAL = 0.59; NT HIT: AF291712.1, EVALUE 3.20e-02; SWISSPROT HIT: P23906, EVALUE 1.60e+00; EST_HUMAN HIT: BF359063.1, EVALUE 1.80e-01
ccttgtgtaaggagccttggagccaggattgggcctgcccctggcgcctgggtcattagtcccctgcccggcaaccctgcgactcagaactgcctcccggagtggactcagcgtgccttggcatgtttactgctttttaagggacatcaaaataacactcaagaaaaacaaacagccaagcaccatggctgaagagaaggtcagggacgtcacttgccctcctttcttcaggactgctgtggagactgccttgggcttggttcaggggatagaccagttccaggtgcagcggacaccattccccagggcatctgcaggttctctcgatgatcactcttttgtcagggaccagcgcatacctcacaaggtccagacgggcctcatgaccaccaggtaaaggcaggagacagccagggctttggacactggcaggcttaggtttgggatcccagctctgccacctactgcctcgggtgcatgacttcacccactagagactcagtttccctttctgcaagc

SEQ ID NO: 6319 - DNA, 599 bp, Homo sapiens
  MAP TO AC000370.1; EXPRESSED IN BRAIN, SIGNAL = 0.68; EXPRESSED IN ADULT LIVER, SIGNAL = 0.87; EST_HUMAN HIT: AI934713.1, EVALUE 2.00e-26; NT HIT: AF242865.1, EVALUE 3.00e-24; SWISSPROT HIT: Q57341, EVALUE 2.00e+00
ttcagcctgtctcagctttgaacgtgccttcctcactaagtttaattatttttagtttttgatttaaagtgtgagacatgcaattcttcctttcacttgaacacttagaggtaattgtagggttattaattggcctgatttcactattgttgtgcctcagggaacagggaggcctgaggaaagggagagaaatgggggaaccggaggttgatggagcagttggaatgcacattaatcagttaagttggtcatcctatgggtatggtttcatggctgcccaaaacaattacagtagtaacatcaaagatcattgatcacagatcaccataacagatgtaattacagtaataatataaagcttgaagtgttttgagaattactaaaatgtgacacagagacatgaagtgagcacatgctgttggaaaaatcatgctgctagacttgcttgagggagggtagccacaaaacttcaatttgtataaagcaaaatatctgtgaagtgcaatagaatgaggtatgcagcctgcataaataaataatcagctggattcagaaaaatatccctggatttggagctttgtgatggcaaaatgggactt

SEQ ID NO: 6320 - DNA, 586 bp, Homo sapiens
  MAP TO AC009007.4; EXPRESSED IN FETAL LIVER, SIGNAL = 1.8; EXPRESSED IN PLACENTA, SIGNAL = 1.8; EXPRESSED IN ADULT LIVER, SIGNAL = 1.9; NT HIT: gi14141151, EVALUE 4.00e-91; EST_HUMAN HIT: AW369796.1, EVALUE 6.00e-91; SWISSPROT HIT: P52272, EVALUE 4.00e-26
tttcaacacgaaaaggctccccggaagcctaatcgaagccttattaaccatactaagccagtaaaatcatctgtaggccaaaggaccatacaaaccatcctgtttgacacacaggggtatgaccacaaaacaaaacaaaacaaaaaaaaaacacaaaacaaaaaaaaaaaactgaggtggggtaagggggcttcactcttaagcctggaaagaacatgctctacccagagccgcttccactgaccaaaaataaccaaggaattagccacagaaaagatgacacaccaaccttctcaccctactcaatcaccagtaccattacctttttctttaaccaggtctttaagtgactgccatttcacatcaaaaggtatgtttgtaatgaaggctctgtatcttttagttggattggcatatggctcaaagcgattgcctcctctttttatgtttttctccttcctcttctcattctgagcaggtcgttctccttcactgaattcgagagagaggaaaaaaaggtaaagggtttatatgtcagcacaatgtgaaagataattatttgatttgccaggtttacaattccaca

SEQ ID NO: 6321 - DNA, 583 bp, Homo sapiens
  MAP TO AC002084.1; EXPRESSED IN BONE MARROW, SIGNAL = 0.78; EXPRESSED IN ADULT LIVER, SIGNAL = 0.74; EXPRESSED IN BRAIN, SIGNAL = 0.73; NT HIT: AF224669.1, EVALUE 1.00e-125; EST_HUMAN HIT: BG001353.1, EVALUE 1.00e-124; SWISSPROT HIT: P26809, EVALUE 4.30e+00
cagagagcctgttgagggacattgtgattgtgtgagttaatactctttaataaactgtcttttatatatatatctatcctattagttctgtccctccagagaaccttgactaatacagattttggtacctggagtggagtcagtagagacattccttctaaggtgaaggataagttgctgcatttggcccctcctacaaccaagaaagaggcacagcgcctaatgggcctatttgatttggaggcaatacattcctcagttggatgtgttactttggcccatttatcgagtgacccaaaaggctgccagttttgagtggtgtccagaacaggagaaggctctgcaacaggtacaggctgctgtgcaagctgctctgccacttgggccatatgacccaggagatccaatggtgcctgaggtatcaggagaagatacggattgtatttggagcctttggcaggctcccacaggtgaatcacagcagaggcctctaggattttggaacaaggctctgccatctcctgcagataactactctccttttgagagatagctcttgtcccgttactgggctttggtggaa

SEQ ID NO: 6322 - DNA, 518 bp, Homo sapiens
  MAP TO AC010238.4; EXPRESSED IN ADULT LIVER, SIGNAL =   1; EXPRESSED IN BRAIN, SIGNAL = 1.1; EXPRESSED IN PLACENTA, SIGNAL =   1; SWISSPROT HIT: P17907, EVALUE 2.10e+00
ttgtctgatccaaagagggggtgcccatcctctatctcagtggcttgggcaccttgtgctctgcttttcatctttctgaatggcttttcgggccagcctgtgaggagtcctgcctgccctgactgttgactcatcctgggtggaattatgtacagaaattagtcaacagaggccattcccgggaccacaggcagctggctgcaggcattgcgcaggcgccgtgcctgctgggagtgtcttttcggacacagagcatgggcttcgtgggtgcgcttccagggctgggatttctgctcattgcagagccacatagttggaggctgatggcctagcccattgccccatgcctagtctcatagaacctgggtgggacagtgagctctggtctcttccagcatgccagggagaagtggagacccttggactggaagtgctggcccctcctcactcagcccctttccaagtacctcattgccaagcacagtgtggggaactgaggattcggggaaaatagcaca

SEQ ID NO: 6323 - DNA, 516 bp, Homo sapiens
  MAP TO AC008705.4; EXPRESSED IN FETAL LIVER, SIGNAL = 0.5; EXPRESSED IN ADULT LIVER, SIGNAL = 0.88; SWISSPROT HIT: P12977, EVALUE 1.60e+00; NT HIT: gi7657414, EVALUE 3.00e-70; EST_HUMAN HIT: BG772372.1, EVALUE 7.20e-01
ctgaataaggctgccctgacttacctatgaaatacgccagcaaaatagccaagaggagggccgcggcaatggcggagagggcagcacatttccagctgcagtatttggagggcttcttcagcttgaaagccttcctggagaaagtattcctgggcagcaggcggggcgggggcgtgtaaaccgttcctgaggtcaaagggtatcccggggaagagctgctgaacaagggtgtgctccccgaggaggtcttgaagaggaagtgcctgccaggaaaagggaaagagtcagagtggtcatgggtagccaaggagcaacatttagctatttttcttccactctgctctatctagtcctagcataatcctagttaactaagcttaccctggagtggaagaaggggcgaacattacattcgatgatgacataaattaattccataaatgtgcataatttgctcctttcacatatgcatctagttgttatcttccacaacaacctgcaaagcattcaaagcaa

SEQ ID NO: 6324 - DNA, 593 bp, Homo sapiens
  MAP TO AC002097.1; EXPRESSED IN ADULT LIVER, SIGNAL = 0.68; EXPRESSED IN BRAIN, SIGNAL = 0.75; SWISSPROT HIT: P19835, EVALUE 2.00e-34; NT HIT: AF206618.1, EVALUE 0.00e+00; EST_HUMAN HIT: AW583840.1, EVALUE 1.00e-109
gtctgcctcccctctactccccaagggaccctcccatgcagccactgccccgggtctactcctggcttgagtctgggggctgcaaagctgaacttccatgaaatcccacagaggcggggaggggagcgcccactgccgttgcccagcctggggcagggcagcgccttggagcacctccctgtcttggccccaggcacctgctgcacagggacaggggaccggctggagacagggccaggcggggcgtctggggtcaccagccgctcccccatctcagtctcccgggacctgcccgttatgatctggatctatggaggcgccttcctcatggggtccggccatggggccaacttcctcaacaactacctgtatgacggcgaggagatcgccacacgcggaaacgtcatcgtggtcaccttcaactaccgtgtcggcccccttgggttcctcagcactggggacgccaatctgccaggtgcgtgggtgccttcggccctgaggtggggcgaccagcatgctgagcccagcagggagattttcctcagcacccctcaccccaaacaaccagtggcggttcacagaaagacccggaa

SEQ ID NO: 6325 - DNA, 508 bp, Homo sapiens
  MAP TO AC009087.4; EXPRESSED IN BRAIN, SIGNAL =   1; EXPRESSED IN PLACENTA, SIGNAL = 1.1; EXPRESSED IN ADULT LIVER, SIGNAL = 1.1; EXPRESSED IN FETAL LIVER, SIGNAL = 0.96; SWISSPROT HIT: P23960, EVALUE 1.00e-05; NT HIT: AB044947.1, EVALUE 1.00e-10; EST_HUMAN HIT: AL118931.1, EVALUE 9.00e-16
ttttgagagactgaagcgggaggattgcttgagaccaggagttcaagaccaacgtggccaacatagcaagaccccatctcaaaaaaaaaaaaaaaaaaaagagctaggacgtttccttaccttatcaatataaaggattttgaaagacatcaatggatggaccattataatgattaactgtctcttattctagatcatgctctggagaaatgttagcttggaaacccatcccaccagcctcaacatgagcacacatcagcttacaatcacagtgaacgtcacttccttggagaaatccttgatagtgagcatagatcctgacagtccccttttaatgacactctacctggggttccagtatcagcctaactgcactcacttccacctgaacatcacccttccaaaggataaggtgtggcaaaaaggtaaaacccaatcagctgtcagaaacttactttgatttctttttgcctaggatgtagtgcagtggcaccatcattgttgactg

SEQ ID NO: 6326 - DNA, 505 bp, Homo sapiens
  MAP TO AC012313.5; EXPRESSED IN ADULT LIVER, SIGNAL =   5; EXPRESSED IN FETAL LIVER, SIGNAL = 1.1; SWISSPROT HIT: O35488, EVALUE 1.00e-16; NT HIT: gi14755578, EVALUE 1.00e-109; EST_HUMAN HIT: BI833409.1, EVALUE 0.00e+00
ttttcctgtttctcatgggctccccataccgccttctctatacttctctctcattttctgtgtcgcttgtcgcagtctctcaaggtctctgaatgtctctctcatctctggatctccctgtctgtgtctttgggtctgtccttggcagggtgctgggtgatgaagagtccaccgttgttgaaaacctccagcagggggcttggctggtgggctccaggggttcttgttcctgctcctaccccaggggagccggggctgctgctgaccaaggtggtaagccagcaacccttcgtgggctaccgcggcccccgagagctgtcggaacggaagctggtgcgcaacgtgcggcaatcgggcgacgtttactacaacaccggggacgtactggccatggaccgcgaaggcttcctctacttccgcgaccgcctcggggacaccttccggtccgaggcagggtttctcggggcggggctggcgcggggccacggacgctttcagatcctag

SEQ ID NO: 6327 - DNA, 578 bp, Homo sapiens
  MAP TO AC008390.6; EXPRESSED IN ADULT LIVER, SIGNAL = 0.91; EXPRESSED IN FETAL LIVER, SIGNAL = 1.7; EST_HUMAN HIT: BI022326.1, EVALUE 3.00e-34; SWISSPROT HIT: P21416, EVALUE 2.00e-05
tggaaggccacatttaggaggtcccactgagatgtctggggaccctcctttaacttttacaactttttctggatatctagggcagattaggaaataaattggaggtgtagaaaagggtgaccgtctctagattctgggtctgaattggtatattttaacatagcttcggtgaggcattataagaaaagggcaggattttctagaactcttgtgtaatttctctgagtttttcataattaaatgccttataggtgtttttgtccatgcctttgaggacaggtactctgtggtctctttgcctgatgccattgtctccctgttggtaagtccaatctgggtctctatgggggactgcatcattggccactggattttgtataggggcttgattatggagttcatctgcgtgtgtttcagctgaatgtcagatgcactagttttcatcaggagtgagggtggagttagaattatgtaaatgtcatgccaagttaaattaaaggattgggttatgtgcaggaattccttgccatggcaagagggattttcagagaaagatcccaggcgttgtttgatttgtg

SEQ ID NO: 6328 - DNA, 592 bp, Homo sapiens
  MAP TO AC009990.8; EXPRESSED IN ADULT LIVER, SIGNAL = 0.36; EXPRESSED IN LUNG, SIGNAL = 0.5; NT HIT: gi11497503, EVALUE 8.80e+00; EST_HUMAN HIT: BE079501.1, EVALUE 2.10e-01
tggattccaagatttctggctcctagcttaaagctatttttattccaaaatacaggattctcaatttgcctagtttttgctgtgtgttctgacctcagtattgtacatatgagttattttcatttttaactcaaatttttatttgatccaggtatgttaaaaagtaaagaggaaaaaaaaaaggtcaaacagctagttaggtcaaccacgcctcacatctgttattttgaaagtctgttcctggttctcctaaagtgtttccactttccacagattcttcctctgttttacttctgaactcaaaacaaatgatcaggcttctgcttctctttggaattccagcagtgttctatgatgttagtaaatacataatgaaggaggccatttgtaaatttaagtcattcatggattgaatgttgattgggcactggtttagtcaccatatgcttaccataaacttttttttctatttaattaacataattatctcaaaaaatatattacaataataatgatagcaaaatgtatgtccacaaattaacttattcactttaagttagaatttatccatgttacctagcacaatatgccg

SEQ ID NO: 6329 - DNA, 584 bp, Homo sapiens
  MAP TO AC008974.6; EXPRESSED IN LUNG, SIGNAL = 1.5; EXPRESSED IN BRAIN, SIGNAL =   2; EXPRESSED IN BONE MARROW, SIGNAL = 0.85; EXPRESSED IN ADULT LIVER, SIGNAL = 0.74; NT HIT: gi15302254, EVALUE 3.00e-73; EST_HUMAN HIT: BF529174.1, EVALUE 3.00e-74; SWISSPROT HIT: P34244, EVALUE 9.00e-11
aatgggataaaggtttgggggccgaccacatggcttttgctcagccctccacatgcccccaagggcctgtctgctgggcagccctcagcccctcctccccctcaagctgcccactcaccagatggagtagctgtggcagaagtccagcgcagacacaatctggcggaagaactttcgggcctccttgggcgtcagtctccccttctttaccaggtagtcgaatagctcaccccccgagacgtgctccagaaccaggtacctaaaggatatagagggggcagagggctggaaggggcatgtggaggaccaaagggcctggtctcccacttccactggctcctggtggcagagaactccaattcccatgatccttgggagaaagagactccaattcccatgggtccctgggaggaagagactccagtttccattaattcctgggaggaagagattccagttcccatcactccctgggaggaagtgactccagtttccaccagcctctaggaaaccaaactcaagtcccattagccctgggcagtagagcctcccatgtcagcttcagaggggaaccaacactttga

SEQ ID NO: 6330 - DNA, 513 bp, Homo sapiens
  MAP TO AC008993.3; EXPRESSED IN PLACENTA, SIGNAL = 0.9; EXPRESSED IN ADULT LIVER, SIGNAL = 0.77; EXPRESSED IN HELA, SIGNAL = 0.66; EXPRESSED IN BRAIN, SIGNAL = 0.57; SWISSPROT HIT: P43362, EVALUE 2.10e+00; NT HIT: X95199.1, EVALUE 3.10e-02; EST_HUMAN HIT: W79842.1, EVALUE 0.00e+00
ttttccccaccaaattcttgtaagtattaaacattgtatatgtattttgaacacgattaagctctaaacacttgttaggaagcaggactggcatttgaaacaaacagctcttttcccacaggtcggatgccctcacagaattgagattatgtacgtaaaacaccaggtgcctaacccggcacagagcaggagggctaagcgtgacatccagcacgtggtcagtggaatccagtattcctacccacctctctagtctcccctccacccctctccctttcagaggcaccaagctgcttgtggtcttgtctattcccactccctgcctgactgaacattttctccacctcctgatcatcagcagcagaaactggctgctcttcctcctgggtagacagccagactgtatttcccagctgcccctgcagtgagatgtggccatcggagccagcattggccaatggactctgcatgggagtgacgcatgctgcctccaggcttgtccctaaaacctcc

SEQ ID NO: 6331 - DNA, 596 bp, Homo sapiens
  MAP TO AC010504.6; EXPRESSED IN ADULT LIVER, SIGNAL = 2.1; EXPRESSED IN BONE MARROW, SIGNAL = 1.8; SWISSPROT HIT: O15063, EVALUE 2.00e-30; NT HIT: gi7662075, EVALUE 1.00e-111; EST_HUMAN HIT: BE542269.1, EVALUE 1.00e-111
tgatgccatcgtttcagaagccaggtttaaaggcttggagctgccaaccacccttgtccccaaggaaccctccctgggatggggcgcactggtcctctgaggggctggtgtcagctaagtggccctggggtggggacactcatccccacagctctgggcgggcaggcaggcaggcaggcaggctggctggcctggggtcagtactggggcagataggctggcctgcgctcacccttcccagggaaggccttgaagcccttgggtgctgccttgtgtgctggtgggggtgggggctggggtggggtctgcacataggagaaggcagcggcactgcagtcgttggttgcggcccacactggggactgcagcatctgcatggtgtcgttccactggctgccagggctggtgactgcatagagtggtgcgctggggctgggcagcgtgctgggaagcggggaagggtgctgccagggtgctttgggtggccacgttttggttttgttatcctgagaaacaaaagagagttcttagtggcatttcgggcaatgtatcatcatttcccacctccccagatgcctggcccttattccctccta

SEQ ID NO: 6332 - DNA, 540 bp, Homo sapiens
  MAP TO AC002181.1; EXPRESSED IN BRAIN, SIGNAL = 0.91; EXPRESSED IN ADULT LIVER, SIGNAL = 0.79; SWISSPROT HIT: P25386, EVALUE 5.10e-02; NT HIT: AF111167.2, EVALUE 9.00e-06; EST_HUMAN HIT: AW440864.1, EVALUE 2.00e-10
gaggcaaaaacaaggacactgaatggttctgaaatctgtggcagctatagctacaacaaatattaaacccatattaacataaattttctcactaaaaacatattatctcagcccctagtatacaatacaatgtctagctttcaatacaatgctatgaggaataccaaaagacaagaaaaacagtccgaaaagacaaaccaatcatcagagtcagactcagatgtgacacagatgttggaattatcagatggggaatttaaaataactatgattagtatgttaagggctctaacagaaaaagatagacaacatataaaaatgcgtaatgtaagaagataggtggaaactctaagaaagactcaaaaggaggtgttagaaatcaaaaacatagtaatagaagtaaaggattcccttgatgaggtcatcagtaggctgaacatagccaaggaaaaaatcagtgagcttgatgataaggcaatagaaacttctcaaactgaactgcaaagagaaaaaaaagaaagagggaaatgaacccaacaa

SEQ ID NO: 6333 - DNA, 505 bp, Homo sapiens
  MAP TO AC004790.1; EXPRESSED IN FETAL LIVER, SIGNAL = 0.5; EXPRESSED IN ADULT LIVER, SIGNAL = 0.67; EXPRESSED IN HEART, SIGNAL = 1.2; SWISSPROT HIT: P14918, EVALUE 7.00e-07; EST_HUMAN HIT: AA082877.1, EVALUE 0.00e+00
tgtcccaaaaagaccctcaggggcctggcctgtgagtgcagatgtggggaggggagagtctgtgggctgagtgggggccacaggaacggactttgagcaccatggctgaggggcctggtcagtgggaacctggacattgtggcctggtcagccgaggcctggtctggtcagtggggacctggaccttgtggcttggtcaacaggggccttgtcagtgggacctggacattgtggcctggtcagtgggggccttgtcagtgggacctggacattgtggcctggtcagcgggggtctgatcagtgggaacctggacattgtggcctggtcagctgaggcctggtcagtgggtacctcgaccttatggcttgatcaacaggggccttgtcagtgggacctggacattgtggcctgctcagcggggcctgatcagtaggacctggacattgtggcctggtcagcgggggccttgtcagtgggacctgaacattgtggtctggtcagtgg

SEQ ID NO: 6334 - DNA, 582 bp, Homo sapiens
  MAP TO AC010641.5; EXPRESSED IN BONE MARROW, SIGNAL = 1.1; EXPRESSED IN ADULT LIVER, SIGNAL = 1.2; EXPRESSED IN BRAIN, SIGNAL = 1.2; SWISSPROT HIT: P14282, EVALUE 5.00e-03; NT HIT: gi15309002, EVALUE 3.00e-86; EST_HUMAN HIT: BE792048.1, EVALUE 6.00e-82
tgcatttgttccttagcgtggttctctggctcctgctctgcaccctgattttctcttctacacctttttttcctgctagaaaaccctctcagacaacaccctctgcttccggaccacacgtccctgtgatttctgcttctctttcatgggggagagcttccctctgcccgctctaggcagaggtataaggtgtcccttgggatctgaacaggacatcaggaaatgcctagcctgaggcacctacttactggccaagtgaaggaggcggttatggtctgacacatgtggcttgggttttggcacggggtcccactcttccaagagggtggctggggccttcggctttgacaactggaggatccgcgagctggggactgccatttgggctgccctggatacctgggacacctggaaagagaaatagagagaagggttacgtgaaacagtccatgatgcctcgtgggccctggagctgaaggaccccaggagcaacactaaaagacacaagacagactgggaagaagttggtttgtaatgtattcatgaaaggattagtaactatcacgcataaagagctcctcc

SEQ ID NO: 6335 - DNA, 548 bp, Homo sapiens
  MAP TO AC035150.1; EXPRESSED IN LUNG, SIGNAL = 3.5; EXPRESSED IN PLACENTA, SIGNAL = 3.2; EXPRESSED IN BONE MARROW, SIGNAL = 2.6; EXPRESSED IN ADULT LIVER, SIGNAL = 2.7; EXPRESSED IN HEART, SIGNAL = 3.3; NT HIT: AJ271735.1, EVALUE 6.00e-07; EST_HUMAN HIT: AI911465.1, EVALUE 0.00e+00; SWISSPROT HIT: P08547, EVALUE 5.00e-15
catgtggcccagaggaatagaaagaagtgagctgatcactctatgaaaggagaacagcatgtagaagcaggcattctcaccattctgagctcagcaacagctgattaattaaatatgtaacagggcatccatataatgaaatattaagcaaccatttaatgctaagtttaggaagctgtttaagggaataaaaacattcaagttacattgtcagtgaagaaaattaggttacaacttttaaaaaagcaattaaaaagggggcaaagaatttgaatagacatttctccaaagatgtacaaacggccaataaacaaaggaaaaaatgctcaacaccatgagtcatcagagaaattcaaatcaaaaccacaatacccacttcacactcatgaggatgacaataataaaaagaaaggtaataacaggtgttggtaagaatgtggagaaactggaaccctcttacgctggggggaatgtaaagggatactttcgataataatctggcagttcctcaaaagagttaccatatgacccagccattccacttctaa

SEQ ID NO: 6336 - DNA, 573 bp, Homo sapiens
  MAP TO AF222685.1; EXPRESSED IN ADULT LIVER, SIGNAL = 1.3; EXPRESSED IN HEART, SIGNAL = 1.3; EXPRESSED IN BONE MARROW, SIGNAL = 1.1; SWISSPROT HIT: P48794, EVALUE 1.40e+00; NT HIT: AL163208.2, EVALUE 0.00e+00; EST_HUMAN HIT: BI825288.1, EVALUE 3.20e+00
acttcccttttgcgtgtgaggattcattatccacccagttaatcaggctctcaactccagagtcatctttgatttcctcctctgctttgacccacctaacttgtctcccatcaataacccatcaattctattttcaccctttcctttatttattttgtacacagccttcatcttcttaaggcaaaactgttaattttctcatttctccgtcataccctaatacatcacaggctaagttccaaaatattggatgtaccgtttaaacttctataacctggcatcaacttacattttgtcagccttctgattgatgatatattgtttcatattgctttacagccaccccaaaagttatacacccttcctgaatatgctgcatatgattctgcctccttgtgtctgcatttgccgtccctgcagtcaatatcctacagttcttcacaaactagttcagacatccatgaatccctcactgatttatcttacagtcagtcttctgatgtgtagcttttaagtcctacttttcctaaggaactcaacattgactatcagtgtcatgggcatttatggctt

SEQ ID NO: 6337 - DNA, 565 bp, Homo sapiens
  MAP TO AC005262.1; EXPRESSED IN BONE MARROW, SIGNAL = 0.87; EXPRESSED IN ADULT LIVER, SIGNAL = 0.78; EXPRESSED IN LUNG, SIGNAL = 2.1; SWISSPROT HIT: P03181, EVALUE 4.10e+00; NT HIT: AF061785.1, EVALUE 2.10e+00; EST_HUMAN HIT: BG483817.1, EVALUE 2.00e-01
gctggcttttgtagtgggtcgtggactttgtttggatggaggggagttaggaattactggtgtcataaagatcttaccagatggccttgccctgtggctctgtgacctccagaacccccgccgccatccctgcatgcacccggtcttctgtgcctgcactttggacttgagattgacacggggttcaaggacgaaggtcaggggctcccgtgtctgccgccttggctgcttggagcaagtctggaagtgatgcggcccttcccgcatcctctgtccagtgcccgcctgtggcccgggggtgtctgctgcaggagcacctgtgtctgcagtcccaccccctcccactctgtgagcctgaaagttgacccctatcagcctgtaagacgggaggttgctgtcaggctcagggccaggcgtggcagataggacagtgaggaagatgtgagctcacgtgcgacccaaggaggactggtgtcagtgccacgcagagagccggggctgtcagggggttgggagggcttcacacccaaggtgttggagccagggacccctttgggaatctgat

SEQ ID NO: 6338 - DNA, 527 bp, Homo sapiens
  MAP TO AC004449.1; EXPRESSED IN BRAIN, SIGNAL = 0.48; EXPRESSED IN PLACENTA, SIGNAL = 0.78; EXPRESSED IN ADULT LIVER, SIGNAL = 0.63; SWISSPROT HIT: O00411, EVALUE 4.00e-15; NT HIT: gi14762748, EVALUE 7.00e-59; EST_HUMAN HIT: AA316859.1, EVALUE 1.00e-58
cgttgtgggtgtaggtgatgctctgaattccacctcctatttgctaaaaaggggaaggggccggtgagtcccacccgaggcccagcacggtggtggtacattgaggtggtggtacactggggtagtggcacgctaggatggtggcacactggcgcgggatggggtggcacactggggcggtggtacactggggtggtggtacgctggggcactggtacactgggacgctgttacactgggatggtggcacactggggagggatggggtggtacactgaccttgaccttggagtccaggcgatagggctggatgacggggacgcccaggggtgtgacccactccaccacagagcccatgtgggagatgaggcgggcactctcggtcagccagtgctgtgggacacaggccgtctcagggcagggggctcaggccggggatcccgtccacttgcttagggagtcctggccgagcggggacaggacaggacgtacctggatggcccgggtccccgagaacatctcctgta

SEQ ID NO: 6339 - DNA, 534 bp, Homo sapiens
  MAP TO AC000046.5; EXPRESSED IN FETAL LIVER, SIGNAL = 0.35; EXPRESSED IN ADULT LIVER, SIGNAL = 0.46; SWISSPROT HIT: P43471, EVALUE 2.60e-01; NT HIT: AF253417.1, EVALUE 7.90e+00; EST_HUMAN HIT: BF237787.1, EVALUE 1.90e-01
ttccattgtgcctgcagtagagaaattccagagcctggggacctgggctcaggcccttgctctcatgaccaggcagtggcagcggctcttcccactaagctgcccggaaggagctccagggactcttggaaaatgtcactgacttctcctaagactagtatcacttctccatgtacccctagtttccctccttccagcccatccttcatataattacccaatataattgtgcacacctggcaaactcctatttatactacaaaacccaacttcaacactctctcctcaggagtcttcttggactcaaaccatctgaaaggcaagcctggtggagtccacttgctggacagccggaagcagctccttttgcttttggtgggaagctcagacttcctgacaaggtccatgtgacccctcctggcctgattcctgcccctgctctccctgcccagcctcctccctcccaccctgtccccgtgtccctccagatggaactatttggtgcatctctaatcatctgtggtgatggaatgg

SEQ ID NO: 6340 - DNA, 579 bp, Homo sapiens
  MAP TO AC010202.6; EXPRESSED IN PLACENTA, SIGNAL = 0.55; EXPRESSED IN ADULT LIVER, SIGNAL = 0.75; EXPRESSED IN HELA, SIGNAL = 0.47; NT HIT: AB035972.1, EVALUE 9.00e-03; EST_HUMAN HIT: AV714324.1, EVALUE 8.10e-01; SWISSPROT HIT: Q9ULD4, EVALUE 5.60e+00
gaggaagaggatacctgcccaactagctatgttaaccaattcaacaccataataataattgtcaacatttatatagtttaccatataccagccattgtgcaaaacactttgcatacattctcacttaatcttcatgccagtcctgggaggtactcttatatatcctttttacatatgaggacctgaatcttagaaggttgagtcctttgccaaatgaaagcttaacagtaaagaaacagtagaatccagactgtctggttccaaaacttgtgcttttagccacttcacatattgcttctgtcattggtatgacagatgtcacaggcagatcatactcaaattctgtaatatgttctaaataatacaaacaatataactagaaaatggtagctaacttatatagcaggccccactgaaataattcaaacataaaaatgacctcttggcatttgattatctttcaccttagacgttgataaaccaaaccattcccttaggacaatatttttctgtccagcaaagcatttctcttgccaaagtataattttgttggctacatctatctcctccaagccctgg

SEQ ID NO: 6341 - DNA, 560 bp, Homo sapiens
  MAP TO AC004818.1; EXPRESSED IN BRAIN, SIGNAL = 0.6; EXPRESSED IN ADULT LIVER, SIGNAL = 0.51; SWISSPROT HIT: Q05907, EVALUE 1.60e-01
ggatggaaattttgctcctgttacattttgttaaatgaaaaagcttcggtgagttctattaaatcagcttcatacatcagcttctctgttccttaatcatttatcctgctctttcctggactctctcccacttatctctttgcggcatggagttatccatggctgaacacagtgtccttgatcagagcatgactgttccctcacgtcctctctcctaactctcctcagtcctttctctccatccctcctttccaaagtcctcctgttagtgaagcgcgttttagacatcgctttcttctcagctctgcccccagacaagactctgggccaaatcttatctaagcacttctcgtgggtgtctccgtatttgtctacaaacttggcaaacttcttcaggccagagtgacatatggtggtgcactcctgaaccaggaaactcccacagaaagcgtggtgaaattggggctctcagagcatctaggggctggaattcagtgctaatggtgagaaaactgttaggggggcctcaggctaaacttagacaaactgtgaagctggca

SEQ ID NO: 6342 - DNA, 600 bp, Homo sapiens
  MAP TO AL096853.12; EXPRESSED IN ADULT LIVER, SIGNAL = 0.42; EXPRESSED IN FETAL LIVER, SIGNAL = 0.43; SWISSPROT HIT: P32862, EVALUE 3.00e-01; NT HIT: AL603645.1, EVALUE 5.70e-01; EST_HUMAN HIT: AI393932.1, EVALUE 3.30e+00
ctctcctccttttgcctgtgtcctccttggaagcatttttcaaagccctgggtccatgcagcccttgtggttctgcagcttttttgccgtagtttgctcaccactgtggtttcatgatttacgcctggggccgtcagtgggttgggtttgtcctttctcctttgctccgcagcactgctgcctgcggactggccgcactggattcccctttccctgcggaagggcacttgcgttgtctccaggtttcgctgttccacttgtggaggggcctttctccacacgggcaggtgctgcttcggggcattttctgaagaatagaacttccagatttcgggtgggaacatcttgaattcgctttcattttccttaggatagttgaacaggaaatgattgtttttaaacaaaaacacacacacaaaaatgtgtttgcttccctgaggggcaggcggagccctcacttggggagagcatcccgctgtgtgctgcccgcctggcctccggaaggctgctgggagggccctcgtgtgtgcccatctgtttccgaggactgcgggtagcaggctcccgccccaggctgagtgctttcctcccagccttatt

SEQ ID NO: 6343 - DNA, 598 bp, Homo sapiens
  MAP TO AC016572.4; EXPRESSED IN ADULT LIVER, SIGNAL = 0.39; NT HIT: gi14729272, EVALUE 0.00e+00; EST_HUMAN HIT: AU098650.1, EVALUE 6.00e-05; SWISSPROT HIT: Q61885, EVALUE 3.00e-29
tgatgtgatggtggttacctgaatttaaacatgtgacaaaacacatagaactatacacacaagacagaaggaacgtagagtatagaatgctgccttctaactaaatgacctaaaattttaaaatttccttattgaaaaaaacacttataaagtccaggatggttctttgggacaactaagttatgaaatatgaaactgacctgacacctgtagctcccagatggccttctggtagtaagactgggaactaatcctgcacccatagaggccagcatccaacacagtaatgttttccagcctcagagagatgcgcccctccgcaatagaatccttcaccagttttgtcctgccttgatactgtggcatctgcataaatggctggtccttcccgtccctgtagaggtggaccacgctagagaactggcccctgaagaaccgcacttccatggcctctgcattggttttaggagacaggaaacaggagaatgctgcgtcctcccccaccaaggcctggacaggcttgtctggcccaaacacctgccactgccctgtgggaagacatacaaaagataaatcatcaaaaccctttgtagtgagg

SEQ ID NO: 6344 - DNA, 569 bp, Homo sapiens
  MAP TO AC009024.6; EXPRESSED IN ADULT LIVER, SIGNAL = 0.78; EXPRESSED IN PLACENTA, SIGNAL = 0.61; EST_HUMAN HIT: AA625565.1, EVALUE 5.10e-02; SWISSPROT HIT: Q12697, EVALUE 1.10e+00
caagggagctgaacttgaggtaatggagattgaaagccattttttgagctgggtgaacttaggctactggcttaacatctcttagcctatggatcatttatttaaatatagataatacttgggtgtaagcaccatgaataataatgtaacatgtattgcatagtgactggcatagaataaatcataataagtagcattttgtaagtactatgcgccactaggtcaaatgctttctttgcattgtataattctatctgtagaaaaacccatgaaataggtattgcaaacttcattttataggtaagaaaacaggttcagagaaacaaaatgacttgccagcatttacaaagctggtaagtggcaagagccaggacttaaaccagttccatcgtattcaaatgttcaagctcttaactgttatgctaaaagaaagggagaaaatgatggagctcaaatttgggaacatacccatggttaccaggattcttagggaaagacctaaagattttaaattcatcatccaatccctttcagctaccattgcaaacacaattaagggtgcctgttgg

SEQ ID NO: 6345 - DNA, 579 bp, Homo sapiens
  MAP TO AJ239328.2; EXPRESSED IN ADULT LIVER, SIGNAL = 0.58; EXPRESSED IN FETAL LIVER, SIGNAL = 0.72; NT HIT: AL163303.2, EVALUE 0.00e+00; EST_HUMAN HIT: AJ003477.1, EVALUE 4.00e-86; SWISSPROT HIT: P57722, EVALUE 4.00e-25
ggcttgggctgttctctaagaaatccccccgtccttgtttctagctaataggctgcataattggacgccaagggaccaaaatcaatgaaattcgacagatgtctggagctcagatcaaaatcgccaacgccacggaagggtcctcagagcgtcagatcaccatcacggggaccccggccaacatcagccttgcccagtatctcatcaacgccaggtgagcatctcccaagggtctctgagagacgcccggaaagggacgcgccagccggcgttacatcacctggacggtcggggggtgggaggaggcacagtctgggccacactctgcctccccttctgtcccctctgctccaggctggatggtggggacaggatgggatggtgacagcctccatgtagacacggggccacctcactctcccgacctcccacccgaagcgtctccagggacaatcccggaggctagagaggaaggcaggtgctcctgtggcctcagacaggtggccagaactatcctggaaggcctgactcttgtccgctcagaggtctccagaaagaccaatgtttggggactttgct

SEQ ID NO: 6346 - DNA, 599 bp, Homo sapiens
  MAP TO AC005222.1; EXPRESSED IN ADULT LIVER, SIGNAL = 0.41; NT HIT: gi13648926, EVALUE 4.00e-76; EST_HUMAN HIT: BG767631.1, EVALUE 5.00e-76; SWISSPROT HIT: P57737, EVALUE 3.00e-26
ggtcttgcctctcctcactgctggcccccctctcctcactgctggccccccttctcctcaatgctagcccggcccctcctcaccgctggccctgcccctcctcaccactggcccccctctcctcactgctggccccacccctcctcgctgctggtcctgcctctcctcactgctggccccgccactcctcactgctggccccacctctccacactgctggccccgcctctccacactgctggccccacctctgcagccgtcctacctggtcttggtggccctgcagcttcagccgatcagctccagcctgaaggtcccagatgcgaacagtgaggtcataggaggacgaggccagcacattggctgccagtgggtggaagcgcagggagcagatcttctccgtgtggcctggaggaaggcaggggtgatcaggagcccttgggagacactggccaccccagccccattcctgagcctgcctgacctgtgagcacagtctctggcgtggtgagcacctcttccaggccctctgcgggtacccgccacagtcggatcctggcgtcctcaccagctgcagaggacagacaggggctcatcat

SEQ ID NO: 6347 - DNA, 507 bp, Homo sapiens
  MAP TO AC009123.6; EXPRESSED IN ADULT LIVER, SIGNAL = 0.66; EXPRESSED IN HELA, SIGNAL = 2.1; EXPRESSED IN FETAL LIVER, SIGNAL =   1; SWISSPROT HIT: P78527, EVALUE 2.40e-01; NT HIT: gi14775525, EVALUE 0.00e+00; EST_HUMAN HIT: AL551837.1, EVALUE 0.00e+00
ctggggccagatgttatagggcaagctaaaaataaccgggcaggccagccaccatcgaggaaggggcatgtgctggacgcggacacatgatccgagggaccctgctgggtggaactaagaaagtccagcagactgtgcatgctcctgtccccactcacaggcccacgcagcgaggggggcccctcttctgtgtgcgtctggaaggtcgctgcccagggaggaaatgcctttaaccggcgtggggccgggcagctgcaggaggcagatcatccgggctctgtgcctcttgctacttctcctccacgccggctctgccaagaatatctggaaacgggcattgcctgcgaggctggccgagaaatcccgtgtaagtgcctgggatggggaggctggggcatcctctgtgggtgggagtcagccttgaggagaggcgatccctagacactgccttctcctgtaagtgctcccccagaacgtggcaaggcaggcgtcttcctatccgtgtgt

SEQ ID NO: 6348 - DNA, 531 bp, Homo sapiens
  MAP TO AC003956.1; EXPRESSED IN ADULT LIVER, SIGNAL = 0.59; EXPRESSED IN BRAIN, SIGNAL = 0.55; SWISSPROT HIT: Q02817, EVALUE 2.90e+00; NT HIT: gi14719415, EVALUE 0.00e+00; EST_HUMAN HIT: BE876589.1, EVALUE 0.00e+00
ggctgtcgcctctttctatgacctaccctgtctcccttcagatccccgcctgccccgacaatctccagatgtcgcgccttacttgcgacccaaacgacagccacctctgcacctgccgctggcagaccccgaagtggtgactcggccccgcggtcgaggaggccccgaaagccccccgagcaaccgctacgccggcgactggagcgtttgcgggcgggacttcctgccctgtgggcgggatttcctgtccgggccagactacgaccacgtgacgggcagtgacagcgaggacgaggacgaggaggtcggcgagccgagggtcaccggtgacttcgaagacgacttcgatgcgcccttcaacccgcacctgaatctcaaagacttcgacgccctcatcctggatctggagagagagctctccaagcaaatcaacgtgtgcctctgagccagatgacggggtgggaccccggttagtaaggaccgggcgcccagtggctaaggcggtgccctggtgaccaaggagagccagac

SEQ ID NO: 6349 - DNA, 521 bp, Homo sapiens
  MAP TO AC010504.6; EXPRESSED IN PLACENTA, SIGNAL = 0.88; EXPRESSED IN ADULT LIVER, SIGNAL = 3.6; EST_HUMAN HIT: BF033852.1, EVALUE 3.00e-77; SWISSPROT HIT: P06744, EVALUE 4.00e-22; NT HIT: X83458.1, EVALUE 0.00e+00
gagcaggcataaaggacaggtttgtaagaaagtggcgagcagtcccaggctgagcagagatgccgcaaggcgagcgggtgtggtcaggacacaaaggttcaaactgatgtgttcaggatttcatcagtcaaccttatttgctgctaggcatggaaacagtctagggcagctgtactgacctgatccacaaaccatggttcactcggaacccaccaaaagggaccaatggccagggggatggcaagacagctgtccctccccaccccaacacacacagggccaggggccgggcagttttcggcactcataccttggaggcaatgatgaacagggaggactcggggttcagctgggccagggttttggcaatgtgagttccatcaatgttggagacataccagacgcggggacctcctgaagagtatggcttaagggcttcagtcaccatgaggggtccctgcggggagacatagcatcagagaataagaattcagggcccacgaaaagtggagacagccagg

SEQ ID NO: 6350 - DNA, 543 bp, Homo sapiens
  MAP TO AF263284.2; EXPRESSED IN BONE MARROW, SIGNAL = 1.1; EXPRESSED IN ADULT LIVER, SIGNAL = 0.85; EXPRESSED IN HELA, SIGNAL = 3.7; SWISSPROT HIT: O14548, EVALUE 1.70e+00; NT HIT: U49836.1, EVALUE 5.20e-01
cacctcccacagcaaaagacctgctcttgaatctcccatctggtagggtgccagaaattccacctgctctgcgctgctgaagaactgtatgcctaaatggccgtaaaatctccctgcagtatgaagaatttgagaagttgcatcagactgctggcaaggcactcagacagaaacacatgtcaggggggaaagggaagatacaagccgagacaggccaggcggcgctgtggaaggaacagccacttgagcaccaggtggagtgtgtgccctcagggcccatgtcccaagccttgactctgtgaaatgactcactgaagcccatcccataaccctgcagtggaaagatatgcagatcacaaggtgatagtgagcacttccactgtattacattgggtactccaggtttttatattaatgcccaggatttatatagagagagaaccagttagttcattcaccttctgttgtagatagagaaagccaaattgaagataggaaacttcaggcatgaattaattcagtggctgaaatctccccatcaaa

SEQ ID NO: 6351 - DNA, 600 bp, Homo sapiens
  MAP TO AC010423.5; EXPRESSED IN ADULT LIVER, SIGNAL = 1.9; EXPRESSED IN BRAIN, SIGNAL = 1.7; SWISSPROT HIT: P35262, EVALUE 1.70e-01; NT HIT: AF224669.1, EVALUE 1.50e-01; EST_HUMAN HIT: BG740952.1, EVALUE 3.30e+00
tgattgctccaacacaaagcttgcctcccaggactgcagccttttcacagcagttgcacttcttcatttgtaagttgatcgcatatttattgagtccctcccagtgtctgagcactgtgccatgcactgaaaatatagcagtaaacaaagcaaagctccttttctcagagaccttacagtgcattggggttaaacaggcgaggacccaagcaaatacacatatagtttcaggccatgacaaatgtcacgatagcagctgtggcatggtttaataacaaccccagagaggtggtcggggaaagcttctctgaggaagtgtcacttcagctgagccctgccaagcctcggcaccaaaaatactccccaaagaacatgaaagaggagaaatgtccagagagttcgataaacctgtgctttgataaatgctcttgtgtcttatctccccaatatcttaaggtgaggtatttatgattgaggacacagctgtggaatggattcaacttgtttgggcaccaaaaccccggaaaggccacatggtataatgcaaagagagagagatccaaattcccagcaccccaatggctgtgtcacgttgagtgt

SEQ ID NO: 6352 - DNA, 599 bp, Homo sapiens
  MAP TO AC008772.5; EXPRESSED IN ADULT LIVER, SIGNAL = 0.47; SWISSPROT HIT: P28947, EVALUE 5.90e+00; NT HIT: gi15828471, EVALUE 8.90e+00; EST_HUMAN HIT: BF338071.1, EVALUE 2.10e-01
aacgtttcaacacaagttggcatttaccaatttattttatatattttacctatatatataaaatttattttagcaatatattttataataaatgctttataaataaaaacttttagcttattggtaggtttcctttaaaatgaaaagattatgtacaactgtataccttttctcagcacagtaacaagaaggttttcacaaatatttaggtaaaaaagctgctgttctataccctagcatatgtatacagttgcctggtatatcaataaatattaataatacttgaaaaacttaaccagttaaatccagttcatttaaaaaccataaataggataattaaagtagacatgttcttgcctttgttcctaaagataatgaacatgccattgacttgtgaagaaactgaggatagacagcagatggaatttttggcaaacattaggcaagcgtgactgctggcagcaggaactggcaaatgctctggcaaacagtgctgataatacctcagtccattaaagaagtgctgtccaggatttgcccgtcagaagatatcttaactactttttcctaaagccaagagcagcccctctataacctcc

SEQ ID NO: 6353 - DNA, 589 bp, Homo sapiens
  MAP TO AL118558.2; EXPRESSED IN BRAIN, SIGNAL = 9.4; EXPRESSED IN ADULT LIVER, SIGNAL = 7.1; EST_HUMAN HIT: AA147192.1, EVALUE 0.00e+00; SWISSPROT HIT: P38650, EVALUE 8.00e-42; NT HIT: gi15300984, EVALUE 0.00e+00
ggcttttagatggttggtgcaggggaaggggctgaacttttaagtgactaggatgttccacgtttgtggcaaacacttctgagagcataccttttgaaggattattgcaaactctggatgttttattcatttaaggggaatttcagctccgtttgcgtcagctggaaaaatctctactacaagctctgaacgaggtgaaagggcgcattttggatgacgacacgatcataaccactctggagaacctgaagagagaggctgcagaggtcaccaggaaagttgaggagacggacattgtcatgcaggaggtggagaccgtgtcccagcagtacctcccgctctccaccgcctgcagcagcatctacttcaccatggagtccctcaagcaggtgggtgccttggccatgcagagactggcgggccccgcacagtagctccttggccgcacagaggctggcgggccctgcacagtagctccttggccacgcagaagttcagcggggtgccgagggagctgcctcaccgctgcccactgcttcctttcagatacacttcttgtaccagtactccctccagtttttcctggaca

SEQ ID NO: 6354 - DNA, 553 bp, Homo sapiens
  MAP TO AC000069.2; EXPRESSED IN BRAIN, SIGNAL = 0.46; EXPRESSED IN ADULT LIVER, SIGNAL = 0.48; SWISSPROT HIT: O73556, EVALUE 2.30e+00; NT HIT: L36881.1, EVALUE 5.30e-01; EST_HUMAN HIT: AW833760.1, EVALUE 4.00e-92
aaaaagcataataagggatctggaatttaaaaaataggtccatataacaagctataatagagacatgtgcagctggcacaggacatccatccactggtgataatgatagaacacgtcatattgcacgatagtaggaaaaacaggacagatgggaagggtgcggatgaccagcgccgtagcaatctgaagcatcgagcctgccagtccacataactgaaacctgaagctctgcccctgcccagctctgtgacttccagcaagttgtttagcttctttaagcattgattttctcacctggaagatgagggttgcattcacactctcttcatagctgtgacctaaggatgatatgaaacgacgcccttggcagatctatcagaacccctaccacataataagtgctcagtaaaaggttttgctgaacaaaggaaattacattcatgttgtattaccacaattacccactttctttataaagcggtagtaagtctttcagccaaaagaataagtccatgatgggattaagtgaaagtccaagaggtactgcatgcac

SEQ ID NO: 6355 - DNA, 574 bp, Homo sapiens
  MAP TO AC000077.2; EXPRESSED IN ADULT LIVER, SIGNAL = 0.45; EXPRESSED IN BRAIN, SIGNAL = 0.45; SWISSPROT HIT: P39381, EVALUE 7.20e+00
tagatggtgcagatgcaagcctctgattatgggcttcttccttctgccacatgtgtgatgtaagataaggatgctatttttattggcttatattttaagaatagctgattgcacaagtatatttattgtgcaaacgtgccttctttccccactcagtgacattatatctaaaccaaattctcaattataacacgggaacgtttccctttagcctgcgaagatccagtgtctcggttatggtgtttctggttccccggccacttggaagacacctggagctctgtgatcttggtggggacctcaatgtcagccgggacctcaatgtcagcagaccctgtgtccccagtgtggctgggctttgctagacctgtggagcaatagctagtcaggcttgtggccccaatccagccagcatcacacactgtccagcctccctctgacatcagcataggtctaatgtcagcataggccctctgccgcagggctgtgcccaaggacactctcctgctctgggtcctaagggagggaggatctcaggagaggcctctcctcatccctggcagatctctcaaaa

SEQ ID NO: 6356 - DNA, 503 bp, Homo sapiens
  MAP TO AC002322.1; EXPRESSED IN ADULT LIVER, SIGNAL = 0.71; EST_HUMAN HIT: BI054899.1, EVALUE 1.10e-02; SWISSPROT HIT: O95180, EVALUE 1.60e+00; NT HIT: AF155233.1, EVALUE 3.10e-02
aaggaaacccaccctaatggtgagtgagcacacacgcgtgcctctcactcttcctgtgcccaggcagacatcactcaccaatcaaagctctcctatccctgaagcccagcgcagggttcttaacacagggctctactcctccatcagtcctgggactcagacagaacccacctgccctgccaggagagctgagcccggggcagcgaaggagaggaaaggctttggagttgggcaaacccaggtgtgaaccctaggcccacagcctgctccctgtgactttggacaacctacttaacctctctgagtgtcagccttctcctcctggaaaatggaagtaatagtgccttctcagaggtctgctgggaagagcagctgtaggatagcagaatgctctgtacttaggggggcccaacagtggcagctgcgatttagtatttctagtatcattctcactcagggcactttccactgcccaagaaaactgccttctgatgcctcgttag

SEQ ID NO: 6357 - DNA, 517 bp, Homo sapiens
  MAP TO AC004090.24; EXPRESSED IN ADULT LIVER, SIGNAL = 0.83; EXPRESSED IN FETAL LIVER, SIGNAL = 1.1; SWISSPROT HIT: P55268, EVALUE 1.20e+00
ttcctccaccctcctaaaccacaacttcaatgtctcctcctcctcctcttcataatagtcacagtaggatgttcaattatagctaaaagccctagatttaagtgacagattaagaggctcggcaggttgttcctctaatgttcatttcacctgttggtttattttttaacctgcaggcactgggttttaggtaagccttttgacaaggtgctgtttgctgatgcatcctgtggtggtccggccctctctgcagggcactggatgtggtctttgggcaaagtcagctgcaggaagggcactgcccaccaccatggcacctttgatccctggccccagtgccagaggctctggccacacaaagtgactggagggcaggaagaagccctctgacaccccctcctgtcccagcctggcacagagcctggcacacagtgggtgctccatacagtctgcagggtgaaagaatgaaacgctctgaagccaagaggcttaagtgtctgcatttgcttcagatgga

SEQ ID NO: 6358 - DNA, 555 bp, Homo sapiens
  MAP TO AC004144.1; EXPRESSED IN ADULT LIVER, SIGNAL = 0.69; EST_HUMAN HIT: AL041673.1, EVALUE 3.00e-25; SWISSPROT HIT: O94236, EVALUE 9.20e-02; NT HIT: AF300425.1, EVALUE 1.30e-01
ttgagggagcaggctatgtcctcatgacccagtgtggctatgggggctcctgctatcatatctgagttccaggctgcaggatggagaaaagacagcagaagaatacgtgcttgctttatatttaatagttcagaatttattcacatattcttatctagctgcaggggaggcaaggaaataattattctgattggtgaaactcccagctcaaaattagagttgtattactaacgaagaagagactggctatggagggacacgatttcagaggtgcttctgagctgctcgtgctgacctcagccctgtccttcctgcagaccctgctgaaggtcgtgtacgtggagaatgacatccagcacctgcaggacatgtcacacttcccagaccgggggagcgagaatgggacacccatggacgtgaaagccggggtgcgggtcatgcaggtcagtcctgacggccagcatttggcttcaggcgaccgaagtggaaatctgaggcaagtgggccctggcagtgtccagtgtacacctcccagctccagctcaggttctcagg

SEQ ID NO: 6359 - DNA, 597 bp, Homo sapiens
  MAP TO AC005581.1; EXPRESSED IN BONE MARROW, SIGNAL = 0.75; EXPRESSED IN ADULT LIVER, SIGNAL = 0.45; SWISSPROT HIT: P27448, EVALUE 5.00e-09; EST_HUMAN HIT: BI768176.1, EVALUE 2.00e-87; NT HIT: gi14763168, EVALUE 2.00e-87
gaaacttctctccatccccccctcccagaggtgatggtgggtatgggctacacacgggaagaaatcaaagagtccttgaccagccagaagtacaacgaagtgaccgccacctacctcctgctgggcaggaagactgaggtcagggggcgccaggggcccttggggacgcgtgatgcctgggtggagggacttggggtgcagaagagcctcatctgtcatcctctcgcaggagggtggggaccggggcgccccagggctggccctggcacgggtgcgggcgcccagcgacaccaccaacggaacaagttccagcaaaggcaccagccacagcaaagggcagcggagttcctcttccacctaccaccgccagcgcaggcatagcgatttctgtgagtatcaaccccacgccctcacgcaccctccttctccccaaggcccagacttacagttacgtcagggttctctgattggcaagcaacagaaacccactggagctaacctcagagagggaggaatgtcttataaagacacagggcattgcatggaacttggaggcaggaatgcacagccaggctcaggaagggattaaaaccggaa

SEQ ID NO: 6360 - DNA, 588 bp, Homo sapiens
  MAP TO AL079302.4; EXPRESSED IN FETAL LIVER, SIGNAL =   3; EXPRESSED IN ADULT LIVER, SIGNAL =   2; EXPRESSED IN HELA, SIGNAL =   5; NT HIT: gi14251213, EVALUE 0.00e+00; SWISSPROT HIT: P38112, EVALUE 5.00e-20; EST_HUMAN HIT: BG023813.1, EVALUE 0.00e+00
gaggttaagcctctggggacagtcctaacttactcttccagacgggcaaactgctccaggtttctgagcctctgcttctggtgcatacaggcatgcagggtcaagggcatgatatcaaggactttgaggagcccagagaggcgtttgatgcaggagatactgttggcaaacactaagctgcggcctggatactgcatcaggaagtagtacaagtagaagtctttctcatcagtctcacaatggatcttggtctctgttagcgtctccaccgtggcctcattccttgtgaggtcaatgaccttgggcttgcccctcatgccaattttctgcataaggaggtcaagtttggctgttttatccattttcttggtgtgcttcttatgaaggattcgagcaggagcctgatgcaccagggtgagtgtggcagaaaaaacaagcgtttgtctctttgggttgtattgggagtcattgagcatctctagcagctgtgagagctcagcaaaatggcctttctcaaccatccggtcagcctcatccactaccaggcacctgcagatccagagagacccatatcattggtcagcagcg

SEQ ID NO: 6361 - DNA, 524 bp, Homo sapiens
  MAP TO AC016626.4; EXPRESSED IN PLACENTA, SIGNAL = 1.3; EXPRESSED IN ADULT LIVER, SIGNAL = 0.36; SWISSPROT HIT: O95013, EVALUE 1.00e-68; NT HIT: gi13540538, EVALUE 8.00e-03; EST_HUMAN HIT: BI035310.1, EVALUE 1.20e-02
actgacaacaagggtccaggcaacagccagaaatgaaaggcacattcttgggctcataatggtcagatagtggaggggcttaatagggccacataactgtcaaaggccatggctatgagcagcaccatctccacaccaccaatgacgtggatgaagaagatttgagcgatgcagcctccaaaggagatgactttgcgctttctgaacaggtcataaatcatcttgggagaagtgacagagcaggctcctaagtcaatgaaggagagactgaccagtagaaagtacatgggggagtgtaagtgagggtcagtggtcacagaaaacacaatgaggatgtttccagtaatgcttgccacatagagcacagaggaaaacactaggaggaggagctggatctcccatgaatgagtgagtcccagaaacaaaaactcagataccactgagtgattctctccatccattggtccagccaactgggctgtggctaaaattatgagaactaagaaaatggggaggaaattgtg

SEQ ID NO: 6362 - DNA, 577 bp, Homo sapiens
  MAP TO AC018844.2; EXPRESSED IN ADULT LIVER, SIGNAL = 0.68; NT HIT: AB026898.1, EVALUE 8.60e+00; EST_HUMAN HIT: AW961833.1, EVALUE 2.00e-04
actccaaatgtgggtgaagcccaaggtccagtttcagcttcttcttttctccctcctcatacccctctggtgtccttagtcttgcccttcactgtgaggaacagagagcatgacttcacggcttcaatatcaacaaatgcggagacaggcaatttctgcctttgcttcaagagctgtgtctctgtgatgctcctggccatctcatcatgcccacaggatggctgccacagtaccatcaacaagtccacacaaaatcttgcacttttcatcacccagaaaaatttccttttatgtcgctgtggttcttctggctctttacttccctgaagtagtattaaaaaacacatcagtatcatagcctaatggtggctatgttgatgcttaaccttggatttggccacataacttgctttggccaatgagaggtgagaggaagtgatgtgagcagaagcttaaaatgcccttttgcaatcggcctcaccctcttgtccatctgtaattcaccaagagaagaaaatgtccaaagaagtctctggtctaaggaggatgaaagacaccagggcagatgtgaactcaa

SEQ ID NO: 6363 - DNA, 542 bp, Homo sapiens
  MAP TO AC010169.7; EXPRESSED IN BONE MARROW, SIGNAL = 0.51; EXPRESSED IN ADULT LIVER, SIGNAL = 0.47; SWISSPROT HIT: Q29040, EVALUE 1.30e+00; EST_HUMAN HIT: AA973095.1, EVALUE 1.20e-02
agctgggatttctgttggtgataaaatcacagctcctgctgataccactgtgctatgttgtctactttcatcatggaagagaatgctaaccttcagttaaaatggaataaagtagccattttttaccacccaagtatttggactccataaatttctattcatgcatttcttggatgtcactcgacccagggctaagattatctgttctatgggaagccttaactcagatctgttgccttctcaggcctcatggccccagctggacactctccctgcctggctggttttgattgagccaacaagggcaggggccctgccagcatatgtggcctatgcagatgttctgcatccagaccttgggaacaggagggtaactccagcctcaagtcatggccaccatggcttccaggtgaggctggggtagaagtggaaaggagggttgggactggaaggtattggccatctcctgaggagggactggggaacactctctcaactctgccctcaaaagagtcatttctacagatggatggagagggcta

SEQ ID NO: 6364 - DNA, 549 bp, Homo sapiens
  MAP TO AL118558.2; EXPRESSED IN ADULT LIVER, SIGNAL = 1.3; NT HIT: U53530.1, EVALUE 0.00e+00; SWISSPROT HIT: Q9JHU4, EVALUE 7.00e-42; EST_HUMAN HIT: BI061179.1, EVALUE 1.00e-100
tgtctggccagtcttacgtgttttataactataaagtgccttctctttcatggggctctaattaataatttctatcattgttatagaagaaaaaacttgatttattttttaactctcaaagctctaccgcaatggccagcgcttactggaaaagcaaaggttccagttcccaccttcctggctttatattgacaacatcgagggagagtggggagccttcaatgacatcatgcggcgaaaggactctgccattcagcagcaggtggcaaacctgcaaatgaagattgtccaggaggatcgggccgtggaaagccgcaccaccgacctgctgactgactgggagaagaccaagcctgtgacggtgagtcccgccaggtggggacgcaggagactcctcacccagcagtgtgatttggtgactttctttcaagcctaaaaggccttgctgtgactgagctttctagtattgaagactcttttcctttttgtagttaaaaaagcagatggagatagcaaatgtgaaaatatgaagcccagcttagacctctt

SEQ ID NO: 6365 - DNA, 516 bp, Homo sapiens
  MAP TO AC004177.2; EXPRESSED IN PLACENTA, SIGNAL = 0.66; EXPRESSED IN ADULT LIVER, SIGNAL = 0.53; NT HIT: gi16163226, EVALUE 3.10e-02; SWISSPROT HIT: P17139, EVALUE 1.60e+00
tggttgggaggacagaagactgactcactgtggaatctcaagctgactgatgaccttgtagatgtaaacatcttcatctcctgtgtccactggtgccctggatcagcaacctgcaaggcagagggagagagggtgagggaggccaaaataaaagttgttgggtatgggcgtgtgggcagctcatccttgccctgcatcccgaaggagtccaggaccatcagaccagggaacagagggagaggtgagacccgcctccctggagggagcagcctgacctgtgtctgcttatacttggcaatgatgtccctttactcctgggcgagcaggatatccatgtctttgtccatatccaccctataagacaaaatactcccaaaattacatggcacctgagagctttagagaacaccccatacatctgctcccagatgccagccgggtgaacttcatttcaccaacacccccaggacaatgggaccaagccaaatggccccacctctgccaggatttctggag

SEQ ID NO: 6366 - DNA, 518 bp, Homo sapiens
  MAP TO AC008985.5; EXPRESSED IN ADULT LIVER, SIGNAL = 0.57; EST_HUMAN HIT: BI831997.1, EVALUE 4.00e-18; SWISSPROT HIT: P32620, EVALUE 4.80e+00
ttgtttcccaaggaggtgtccatggaaggaggacaggggattaccatgagttttgctcatggccgtaactccagtgcctggcgttagaagccacaaggcagatggctacctcatcaaagggacatgtctctccctgtccctcactcccaattagacagccccccactcagggaatgcctctccctgcgcccatgcttaccttctcggatccatgcaagaagtcattgagggcctgtgggtcactggaagagaagaggaagagacgctgaggaggtaaggagctggggaggggagggaagggagggggttgagacagagggcagggggtggggagcccgttactcaccaaatcacgtctagtaagcatctcccatcctcatcatccatcgccactggatggggtggggtcaggaagagggcgagggagacaaggttagattttggcagcttgcctggccccctcccttcaggggagccccctggagggggtcagagtttctgttcccttgagtccatgg

SEQ ID NO: 6367 - DNA, 550 bp, Homo sapiens
  MAP TO AC004095.1; EXPRESSED IN ADULT LIVER, SIGNAL = 0.71; EXPRESSED IN PLACENTA, SIGNAL = 0.94; NT HIT: D16583.1, EVALUE 5.20e-01
aagttgccataggcgatctgcaaattcttactaatgtcaggctacagaaacacacacacacaacacacacgatagcaatggtaaagtgagccaattgccaaagctcttatctctctcctctaatcttaaagtagtggattgtagccatttccatgcccattcttagtgtggacataattgaaaacttctgtgatggaagcaggtcaaaacaaagcaaaataaaaaccatgctaaaaaaaataggaaggggaagaagaagaagaaggaggaggaggaggaggggaaggggaagaagaggaagaaggaggaggaggaggaggaggaggcgaatgcctctaggaccagggcctggctgttgtccaacaccaattttttggggggaatattaagggataaagccctgaatcacagctgtcttggaagaagctcaagtgtgcacattgactgccccacttcttcatattaggcacccttccccacccctgcccattagaacaaagatagaatttcactggttcctctccattacggccatcccatcaggagtaaa

SEQ ID NO: 6368 - DNA, 505 bp, Homo sapiens
  MAP TO AC007191.1; EXPRESSED IN ADULT LIVER, SIGNAL = 0.62; EXPRESSED IN LUNG, SIGNAL = 1.5; NT HIT: gi8923091, EVALUE 0.00e+00; SWISSPROT HIT: Q28120, EVALUE 7.00e-16; EST_HUMAN HIT: BG763451.1, EVALUE 0.00e+00
gtggggctttagtgtcaacccatctgctctgcatggctcaggtcacgtggcccttctccccacctcctccccagtccccgtccaccctcccacctctctcttgccgctagttcctggaggccacgctgcggtccctgacagcaggttggcacgtggagctggatcccttcacagcctcaacacccctggggccagtggactttggcaatgtggtggccacactggacccaagggctgcccgtcacctcacccttgcctgccattatgactcgaagctcttcccacccggatcgaccccctttgtaggggccacggattcggctgtgccctgtgccctgctgctggagctggcccaagcacttgacctggagctgagcagggccaaaaaacaggtgaggagcaggagtcggggagggtagtgggctacctccaccttttcccaagcccccaccctcccttgcctggacatttgtcatccctctcgtcttcccactctactccacgc

SEQ ID NO: 6369 - DNA, 591 bp, Homo sapiens
  MAP TO AC008727.5; EXPRESSED IN ADULT LIVER, SIGNAL = 0.45; NT HIT: AF121205.1, EVALUE 0.00e+00; SWISSPROT HIT: Q9UPW0, EVALUE 3.30e+00; EST_HUMAN HIT: AU132586.1, EVALUE 0.00e+00
ggcatttgttttgtttttcgtttgtttttactgtccagtttagaacttgtggttgagccgtggattgctggactctggccagccctcagaaagcattttaggtcaagcagaggacaagaggagataagtggcgcactcccggtggcatcacctgcatcctcgaggacagaccttgtgaagtcagagctgctacacattgaatctcaagtcgagcttctgagattcgatgattcaggaagaaaggattctgaggttttgaagcaaaatgcagtgaacagcaaccaatccaatgttgtaattgaagactttgagtcctcacttacccgttcggtacccccactctcacaagcctctctgaatattcctggtttacccccagaatatttacaggtacatctgcaggagtctcttggccaggtaaggaagtttttctttatgctatagatgctatttaatcatggatgtttgctttgggcttttaaattattattacattagaagagaggtcaacaaactatggcttactggcccaatgtggcccagagcctttcttttgtaaatagattttactggaacacagccatgcctatt

SEQ ID NO: 6370 - DNA, 577 bp, Homo sapiens
  MAP TO AC008985.5; EXPRESSED IN ADULT LIVER, SIGNAL = 0.85; SWISSPROT HIT: O08774, EVALUE 1.40e+00; EST_HUMAN HIT: BF953903.1, EVALUE 0.00e+00
cagggcaaatatgccaaaacggccccccactccccccgcgaactacggtctccatatctagacactcaagcccaacaggacaccccccatcgtggacaggatccccgtgcagtgtggtcaaggacatagcagggtcttcactaacgatgcggacatcttggtcacaggcaccatggaaaagcacatttctcaagtccacagagcaagggttaaagactaaaaccagcaacagaggcaggcgatcatggcttccaatcctcacccgggaaggaggattctacaagaacatgcaacgtgggccacacacacgtgccaaggagagagaggagcccacagatcatttttcctgttacctaacaggacctactgtctatggaatcccaactttatgcatagcggggcagaggtggaccgcaaaacacattctagaatgttcatagcacccctaaactgaaacaacccagatcctatcaacaggacaatggatgaatcatcaaaatgatagagaaatcagagccctcatgcattgctgggcgatatacaagggtgccgctgccgtggaagagtctggctggtc

SEQ ID NO: 6371 - DNA, 548 bp, Homo sapiens
  MAP TO AC004182.1; EXPRESSED IN ADULT LIVER, SIGNAL = 0.61; EST_HUMAN HIT: BI458721.1, EVALUE 1.00e-88; NT HIT: gi16160405, EVALUE 6.00e-90; SWISSPROT HIT: P00378, EVALUE 4.00e-20
tcgccaaaggtggagataacaccattcctcccccaccaacctcacgcttcttttgctttacaggaagattgacgcgggctggtgtccagtgaagaaatgcgtggtgcgtaggaaggagaggtggatctcagggctgtgcgtgatctgcaaaggaagcgcatcgaccaccaggtggcgctgctgcgctgcttctgctcccaggaggtggatgcccaggacgagctttgaggtggagagagggatgtcatggctcatcctccagtttccaagtaaaaaccttccggccaatgttggccgcgcgtcctggtgtagcgagcgggcttggaggagctcaccgctgctgtcatggttcgtttgctaaactgcatcgtcgctgtgtctcagaacatgggcatcggcaagaacggggacctgccctggccgccgctcaggaatgaatttaggtatttccagagaatgacacaatctcttcagtagaaggtaaacagaatctggtgattttgtgtaggaagacctggttctccattcctgggaagaatcgaccttca

SEQ ID NO: 6372 - DNA, 557 bp, Homo sapiens
  MAP TO AC011533.5; EXPRESSED IN ADULT LIVER, SIGNAL = 1.2; SWISSPROT HIT: P21414, EVALUE 2.00e-22; EST_HUMAN HIT: BE081333.1, EVALUE 0.00e+00; NT HIT: AF198490.1, EVALUE 0.00e+00
agttgtggaggaacggattgaggacaaaagagggtacgggttgggcaccacagggtggatggcaaaacaatttggttgataagacgcagatcctgaactaatctgtaagacttatccggttttcggacaggtaaaatgggggaattgtaaggagagtttataggttttagaagcccatgctatagcaggcgagtgataacaggctttaatccttttaaagcatgctgtgggatgggatattggcgttgagcggggtaagggtgattaggttttaatgggatggtaatgggcatgtgatcagttgccagggaaggagtagagatgtcccatacttgtggcttaaggtggggggatacgagaggaagacgtgaaggaagctttgggctggggagaagggcggcaatgagatgcggctgtagtccaggaatagtcagggaagcagataatttggttaaagtatctcggcctaataagggaactgggcaggtggggataactaaaaaagagtgcataaaagagtgttgtctaagttggcaccagagtgggggagttttcag

SEQ ID NO: 6373 - DNA, 598 bp, Homo sapiens
  MAP TO AL023495.1; EXPRESSED IN PLACENTA, SIGNAL = 0.91; EXPRESSED IN ADULT LIVER, SIGNAL = 0.92; NT HIT: gi16174379, EVALUE 5.70e-01; SWISSPROT HIT: P26876, EVALUE 4.40e+00; EST_HUMAN HIT: BI830990.1, EVALUE 2.10e-01
tggatcctttgtcccagaactagcgcttctgggagatgtgccagaagattcacatgtgcacatatgtgcacacacagtaacatgatgattcaggaaattcagtcatatgggaagatcaaaagcacagcaggatattcctgtgactctggcattggtcagcaatacttcaacctccacatccaaatatgaaggcagcttaaagagcctgcagatggaagacaaacagaaacttgaaaaaatgtactaagacggcttatttttctcctgttgtccttacacctaccgtgaatactctggtgccttgccagtcactcctgcaccactttgaagtttgagtctgtccctgaatcctacagagtggatgccagcctggcctgatctcacctctttaagccttctgcctccagcatgctcacaagtgtttggaacatgtattggggatagaggggaatatgatcccagacccaggtccagagggctactagaacatgtcatgtgtctggcattgaacaagatcacattgccaatttaaaaccatcgaagtgatctcagttttcttgggaaagaaaaaagaaagaccatgtgcctgatgaaagaa

SEQ ID NO: 6374 - DNA, 506 bp, Homo sapiens
  MAP TO AC011536.5; EXPRESSED IN PLACENTA, SIGNAL =   1; EXPRESSED IN ADULT LIVER, SIGNAL = 0.5; NT HIT: gi4503680, EVALUE 1.00e-108; SWISSPROT HIT: O88799, EVALUE 8.00e-22; EST_HUMAN HIT: BG001672.1, EVALUE 8.00e-87
agggtcccttgaaagattgcatctttgatctctgcctgggtggtgggaacctgagcattctctgcagcaacatccatgcctacgtgagtgcttgccaggcggctggaggccacgtggagccctggaggaatgaaactttctgtcgtgagtgagggagagccggaggggcagggaggggagagcttgaggcacagaaggggtagaccctgggctttgcagcccctccctccccagggctctgatcggcaccccctccttgcagccatggaatgccctcagaacagtcactacgagctctgtgcggacacctgctccctgggctgctcggctctcagtgcccctctgcagtgcccagatgggtgtgctgagggctgccagtgtgactccggcttcctctacaacggccaagcctgcgtgcccatccagcaatgtggctgctaccacaatggtgtctactatgaggtaggaacctagtcatctggggcagaatatggggtctcacccct

SEQ ID NO: 6375 - DNA, 513 bp, Homo sapiens
  MAP TO AC008989.6; EXPRESSED IN ADULT LIVER, SIGNAL = 0.54; SWISSPROT HIT: O02771, EVALUE 1.90e-01; EST_HUMAN HIT: BE560034.1, EVALUE 7.20e-01
ttagaacagggcattctggggtgccaggtacccagcaggtggtcacgaagggggcccaggctgtgcgggggggcggttgtcacattcccttgtggggaggggctggcctgaggaaggctgctggatggctgccctgtctacatgcatacccatagctccagggagcccgtgggggcatccagctccctcgtggtgtggcccagctttgatcagttcaaagagcttccaaacacagcacaagtgcatcccccgccagcagcctgccaggtaccagcgtaaatggcttcctccttcctgactgcccatggggtctttgcagtcccctgggccatctctaagtggtctcctgtctttactgatgcccctggctccttcagcacgtcccccaggcactgcatggcctccaccggtgcccaggacactttggaagggcaaggatgaacgctgcttattttaacagttccaagaggtgcgcacatgcactcagaaaagagtagcgcatcaggactgtga

SEQ ID NO: 6376 - DNA, 586 bp, Homo sapiens
  MAP TO AC016778.2; EXPRESSED IN ADULT LIVER, SIGNAL = 0.37; EXPRESSED IN LUNG, SIGNAL = 0.47; SWISSPROT HIT: P05422, EVALUE 5.00e-01
aatgcttatggcagattgggtagaggaggtggagaaaagagggattctaagggtcaaagaaggacaagagaaagcttacccccatcctggggagaggtctctggtcagtgaatggcacaaatagtgtgggatccagtcccaccctatggcagcccctggggaggtggccggactgtgagaacatggctctgtgggacccctggaggcttgtgtctgtgcaagactcaaaaacatacaaggtcctggatgggagctgggaagagggacgtctcaaacatagctgtgaacaaatttcctgccaacccaggagaatagggccttactatcagaaggcagatgattacaaaaattgcacactttattgtgccagcgtttctccctaaaacgctcagaatgaagaattcttgctacttcttttttgcttcctgaatcaaagccaaatttctcagagtgcttttcgggtcctttccctctcgcaaactgatctttacttctagtggaatccctgctgccatcagtactttggactccatattccagccactgggacttgttggcagatttctctgtgttctctcctgcctcc

SEQ ID NO: 6377 - DNA, 580 bp, Homo sapiens
  MAP TO AC004264.1; EXPRESSED IN ADULT LIVER, SIGNAL = 0.69; SWISSPROT HIT: Q9UMN6, EVALUE 6.00e-04; EST_HUMAN HIT: BI910565.1, EVALUE 2.00e-57
tcctcaggagatgttacgggggtgacaagtcctcatagacagtgtacttgagaccccctcccagagtcaagctcccccatctgtttcctgtggggtgggtgtgctctagttcaaagtcagcctcagactcctctcctgggcagtgagaggtaggggatggccaggggtcaggcagccatgctgggcttcccagcttttcctccacaggccaacctctgccctcctggagggcaaccccagcgtcagctgcggtgcctgctcctcttccgctccgggaaccagagtgtacctggcttttggtgtctgccacctcccacccacagcttcccagcagctgaggtggaggaaaccctcttcccccagctggggcagggagacacaagtgagggcccccactctgctgttggcggggcctggagccagggcaggccgagcgtgggggtggcacctgtctaggatgggctccctggtgcaggcctcggtgcctctgcttcccccagcaacacatttgcctctgtcttctccttggggctgggaggcggggccccacctgccctgctcttccttgagcgcctactgt

SEQ ID NO: 6378 - DNA, 550 bp, Homo sapiens
  MAP TO AC002359.1; EXPRESSED IN ADULT LIVER, SIGNAL = 1.3; SWISSPROT HIT: Q15149, EVALUE 1.20e-01; EST_HUMAN HIT: BG425118.1, EVALUE 1.00e-106; NT HIT: gi14764618, EVALUE 2.00e-13
atgaagctatcttgcccagggaaggttcagtgtttgcaggtaacctagcagagagatggcttttaaagtcacaatggcttttaacaggagataagtcaactcacagctggcgtacgagcggctgtcatcctcacacattttgtgcagctgctggtattcctcctgggccagctcgaaccgctgctgcttaatctggtagatttctttcttggcattgagagcctcctgagctacaattaaatattccttcaacatgcgctcttgctctcgcctccactgttctcttggatcctcaatctgggtaagttctgaaatttaaaaaggtaaaaacataagtgacttaaaagtaaaatccttaggttgaccaagagtcatgcagtgatgtcactcatcaatgtgaaaattaattagttaccaggatgcatattatggaagattttatatcacaaacctttccaaaatgtggaacagtttccatttttatatccacagtgcagatgagaaggaaactctacagatatgaaacagtccattggaggagggaagacaa

SEQ ID NO: 6379 - DNA, 503 bp, Homo sapiens
  MAP TO AC021689.3; EXPRESSED IN PLACENTA, SIGNAL = 1.4; EXPRESSED IN ADULT LIVER, SIGNAL = 1.8; EXPRESSED IN LUNG, SIGNAL = 1.8; SWISSPROT HIT: P32456, EVALUE 8.00e-40; EST_HUMAN HIT: AI989871.1, EVALUE 0.00e+00; NT HIT: gi16160879, EVALUE 0.00e+00
tgccttcttgaccttaatccccatgaactagaaacaaaaatatcacctccaattctttctggaaactttggtctacatccttgaaagagtttttcatgaagacttcaatggcctccctctcactggtcctgtgcaggtccagcagctcctggagggtttccatgggcagctgcactttctggcccatttgctggtcatagtgggcaatggccttttgcactgcagctgagttctctctctgagccaaggccaggactgcattctctatgcaaggcagatccccactgctgatggcattgacataggtcagcaccaggttctttagaccttcatggaagaaagaaacatttatattatttgcaaaggaagaagacatgattgatacagtaatttctgagaacgtacatttaatagttgcattgcctgaaattgtttagcattatggacagtagtcaagtggcccaaataagtttatttgggaaactgtgctatcaggaagccaa

SEQ ID NO: 6380 - DNA, 515 bp, Homo sapiens
  MAP TO AC010516.4; EXPRESSED IN ADULT LIVER, SIGNAL = 0.85; SWISSPROT HIT: Q64749, EVALUE 3.60e+00; EST_HUMAN HIT: AW992958.1, EVALUE 1.00e-51; NT HIT: X01979.1, EVALUE 1.00e-124
tgctccaaatatccacttgcagattctacaaatagacggtttccaaactgctcaatcaaaagaaaggttcaactctgtgagatgaatgcaaacatcaaaaagaaggttctcagaaagcttctgtctgcttttatgtgaagatatttcctatttcatcataggccataaagggctcacaaatatccctttacagatcctacgaaaagactgtttacaaaatgctcaatcaaaagaaagtttcaactctgtgagatgaatggacacatccaaaagaagtttctcagaatgcttctgtctagtttttatgtgaggatgtttctttttcaccataggcctaaaacagctcagaaatatccctttgcagattctacaagaagactgtttcgaatctgctccatcaaaagaagggctcaactctttgagatgaatgcaggcatcacaaagaagtttctcagaatgcttccatctggttttatgtgaagatatttcctttttcaccgtatacctcaaagggc

SEQ ID NO: 6381 - DNA, 584 bp, Homo sapiens
  MAP TO AC005574.1; EXPRESSED IN ADULT LIVER, SIGNAL = 0.37; EST_HUMAN HIT: BE907584.1, EVALUE 2.10e-01; SWISSPROT HIT: P31921, EVALUE 7.40e+00
tctgttgtttcatgctgaccttactgtcaattaaacttcccatactaattattcccaagaactggttttaagtcaaacttgaattcaccattaagagtaacatacttgtacaaaatataacaaaatttaatttaaaaattaaaaaaatcacctacgttattgttaaaatgacattgcggaattgtatgcttagaaggaattggctttttaaaataccatttaacagttatgctatccaatgtaaatattaaagaagaatacatggtctgaaccctaacattagaacttatggtcaaatatgtcaagcacagctgtagaacaagaatttaaaggaggcttaaaatgagaattctaagcttgaaactccaaattatttaattaggttctcaagtagaacaaaattgaggcagcgctattataaaggaagagttcttctgtatagtaaaaactgtatggaattctgagaagattccaaggcagaactacaactttttaaaaattggaattctacaaataattcattaaaaaaacctccagacttttacaaccaatacaaaatatgtcccactgaacgttgtcaccaa

SEQ ID NO: 6382 - DNA, 512 bp, Homo sapiens
  MAP TO AC000076.2; EXPRESSED IN ADULT LIVER, SIGNAL = 0.43; NT HIT: gi15317311, EVALUE 7.00e-65; EST_HUMAN HIT: BG330534.1, EVALUE 1.00e-64; SWISSPROT HIT: P39060, EVALUE 1.40e-01
agtggagatggtggagatgcagaggcagacctgcctgcctccctgtgacaaggggctggacctgcacaccctgcccttgctgcggaccctttgctggccccttctggttcccccaccccattctgcccctcagtgggggacaccagagcctccatcagagagttcctgactcccccgaaggccatacctggctcctgcaccttggagacccacctgaggagctggcgcccctggggcagcgtctgcagccaggtcacacactggccgccgtggccatccagggtggtaaccgctctccgcgtctgcaggctccagatgtgtaccaggccactctgagacctgtttcagacaagccgagcagggtgtcagggggcagaagggtgtgctgaatgctctggggccagcctggaggccacattgtgggatgcgggcatctaggctggttgagctgaaaagccaacagctctaaatatgaactaagggccaaactggcaaagcactccttgctcctc

SEQ ID NO: 6383 - DNA, 587 bp, Homo sapiens
  MAP TO AC002469.7; EXPRESSED IN ADULT LIVER, SIGNAL =  49; EXPRESSED IN HELA, SIGNAL = 2.7; NT HIT: M15657.1, EVALUE 0.00e+00; EST_HUMAN HIT: AL532528.1, EVALUE 1.00e-113; SWISSPROT HIT: P05062, EVALUE 2.00e-31
aatgttcagagtgttggccctgtccttgccagtgtgcttggagtttgcctaggacaaagcagaagtgaggtgtgaatggaggtgttcaccttgattcccaccacgatccccttttccttgaggatgtttctgaacagctttccctggctgtccttctggtagagggtctcgtggaaaaggatcacacccccgatgctctggttgatggaactgtccacagagaagaggatttctcggaactgccggcggttctcttcagtgttttccaccttgatcctctgcaggcgggttccccatggtacctatggtgggagggccaagggcagcataaggagcaagccagggctttcctgtcacccttctccacatcatctcagagaccctcaccacagtggaaagcaagactttcttttttcagatagtcaaagctcctgcttcaattttttgtgttccagggagaagaccctggttgctctcaggtggctagttagggagtatgtgggctgggcatatagaggtcagggtggaagccaccctcaggtccaggtggatatggaaggccctcaggcctctctagcctccctgat

SEQ ID NO: 6384 - DNA, 543 bp, Homo sapiens
  MAP TO AC016965.10; EXPRESSED IN PLACENTA, SIGNAL = 0.94; EXPRESSED IN ADULT LIVER, SIGNAL = 0.88; NT HIT: AJ006345.1, EVALUE 5.00e-04; SWISSPROT HIT: O21521, EVALUE 2.30e+00; EST_HUMAN HIT: AI820516.1, EVALUE 0.00e+00
tgaaaagcactgctgtggaccacaaaatttaatgtactgcttatcccactttgggtgtgtttctgtgatctttacaacttaataaaccacccccaaaagttagtgactttaaacaacaatttatttgtcctgcttcttcaatattggcagggctcagtgagacggctcatctctgctccatatggtgttgactggggtagttcaacacagactgcaagatgcaagctggcttcccttcattcacatgcccttggctgacctggctgggacagttgggggctggctgggcctctctccatgtctttgttgttcttcaggacctctttccaaatggagtggtctctctcctgcagcatgatcagacttctttaagtgatggcaccaggctccaagacagtgaagtcagccatcttaaagtctaaatctggaactggcactgtgcatttctgccattttctgttgatcgaattgagtcaaaaggcaaacaaatgtcaaggggagaaaaaagactttatttcttgacgggagaagaggtctgcacag

SEQ ID NO: 6385 - DNA, 532 bp, Homo sapiens
  MAP TO AC013646.3; EXPRESSED IN ADULT LIVER, SIGNAL = 0.53; EST_HUMAN HIT: AI571486.1, EVALUE 1.90e-01; NT HIT: AB031082.1, EVALUE 2.00e+00; SWISSPROT HIT: Q21313, EVALUE 2.90e+00
caggctccatctctcctgacatggaactgatttgcatttttcacctaaaaaagccctgctcttcacagggaatcaacacagcaccaataaaagaagagaagagaagagacaccaacagaaagagaactgaaacccaagtaccaaccaagaagccagcagacgtcttggtacccctggtccttgtttctgctccaaaattagaatgacaagaacagggaaaaatgaaggggagcattctctgagagtcatcctcaaacaccctcatggcatgccttcaagcagaggaaggaggagggatttgtattgcatgtgaatctgaaactttgaaataataataacaagttaaaacaagcaaacaaaaaaaaaacagaatgagactcttcaacaaacaaaacaactaacaattataaaaagaagctaagatattgttaatagatccccctctgaactatctaggaaggagaagtacacatagaggtagttatgggaaacataaaactgttcatgtttatgtctcccaaaggtcgagaga

SEQ ID NO: 6386 - DNA, 542 bp, Homo sapiens
  MAP TO AC004184.1; EXPRESSED IN ADULT LIVER, SIGNAL = 0.75; SWISSPROT HIT: P35442, EVALUE 6.70e+00; EST_HUMAN HIT: BG476149.1, EVALUE 3.00e-96; NT HIT: AB031007.1, EVALUE 0.00e+00
ttataagaggacccagggggcccaccttccaccagagcctcaggaacgtgctggcaacagggacctgcatcactaagaagtttcattgtattgttctctgaaggctgagggtgatggtaggaaaagatgtcccagagttgggctcattaatatccatggagagggtgtggccctgaagagatagagaacatagtggtggcagtgacctgcaaaagccagaggacacggttaccatggcaaccccagaggagcagccgagggggcttgacctgcctgcagttgtgggtaaggttaatagagggtggtgttccagggtcagaacagaagggcagccagcaagagcactgcttggtatctatgataagaaagcaagaattgaggagcaggaggctgagggtgtttgaaccaatacaaaatcatgatccattctcagtgcctagatctcagccaagcttcagattcagaacccagtgacggaggaggtgtccatattcctaggaggaaggaccctgcaaccctgtggcaagtgtatgctgggtcaa

SEQ ID NO: 6387 - DNA, 522 bp, Homo sapiens
  MAP TO AC004144.1; EXPRESSED IN ADULT LIVER, SIGNAL =   1; SWISSPROT HIT: Q00808, EVALUE 1.30e-02; EST_HUMAN HIT: AL041037.1, EVALUE 6.00e-57
tttcttcacgtgtcgaatgggagcgggagctcctgccctgccagagtcccatgtgctgtgcatgcagcacgggggagggaggggcccaggcctcatcataaggaagaagcaggcagctggagtgacatgtgggtccctttcctggcaggtccatgtggacccctcaggcaccttcctggccaccagctgctctgacaaaagcatctcagtgattgacttttactcgggcgagtgcattgccaagatgtttggccattcaggtgggtgtgcctctctgcttgggatgcctccccacccgcccacaccctctgactccgaaggcaagtgcagcctctctgctttgtttgcagaaattattaccagcatgaagttcacctatgactgtcatcacttgatcacagtatctggagacaggtgggacatggacctttgggagagttgtggctcagataccatgagcactgcactcagcctgcctgtgtagagagcatttctaaactgcccagtttggattgtgggagt

SEQ ID NO: 6388 - DNA, 536 bp, Homo sapiens
  MAP TO AB015355.1; EXPRESSED IN ADULT LIVER, SIGNAL = 1.1; EXPRESSED IN FETAL LIVER, SIGNAL = 6.1; SWISSPROT HIT: P49281, EVALUE 8.00e-24; EST_HUMAN HIT: BI598676.1, EVALUE 2.00e-78; NT HIT: AB015355.1, EVALUE 0.00e+00
gaattgagtgactgggggagggggagggagataacttttttagtgtaggctaaattttttacttcctgaatttttaaccatgtgaatgtattacttattctaaaatgtacattaaaaataaactattcaaaataaattgagctagagtcaggttggtctcttgtgcatttagatattaaactatttaatttcagtatactaaggatgaattgttagtgtattttgttcattttttactaatttattttcaaatctgttaattcagacagtgtttctggagatcatggggagtctgccagtcttggtaacatcaaccctgcctatagtaatccctctctttcacagtcccctggggactcagaggagtacttcgccacttactttaatgagaagatctccattcctgaggaggaggttagtatcaggtccttggaggagaacactattgtctggggaaaacctgtgagtgaaagatctgctggatggctcaagttcagcagcctcaggtttaattttggctggcaatctctgaagac

SEQ ID NO: 6389 - DNA, 549 bp, Homo sapiens
  MAP TO AC010643.5; EXPRESSED IN ADULT LIVER, SIGNAL = 0.44; NT HIT: gi14768302, EVALUE 1.30e-01; SWISSPROT HIT: O10341, EVALUE 3.30e-01; EST_HUMAN HIT: AW965100.1, EVALUE 1.90e-01
ctacctcggatcctaaccccaaacccactgccagacccaggcctgtgccagaccccagtctgatccagctttgactcacccctatctcgtctccctccatgaccatctcactccttaacttcatctcgaacctagaccttggtcctggcaccaaatcctcccctgttcctgcttctgcccactccccaaccccagccccacaccagcccttttctatctctcatcctattttcagccgcacacctaaacctatttctatctctgaccttgttttctaccttaatatggctctccctgacctcggaaacaacttctgtcccagaaacaggaagtggcaactgctgatctctccaaccctctgtgtggggtgtggcagtgggaggaagtcatccatgagaccagtgaggaaactgagtttccatctgaagccccagctgggggacaggtgagcacaggaaaagctctgaagtccaggagctggaaaggggccaggagctccaggtgccgccctggccagcccattcactcacacttttgcttgttccccat

SEQ ID NO: 6390 - DNA, 501 bp, Homo sapiens
  MAP TO AC004495.1; EXPRESSED IN PLACENTA, SIGNAL = 0.91; EXPRESSED IN ADULT LIVER, SIGNAL = 0.61; SWISSPROT HIT: P42381, EVALUE 1.20e+00; EST_HUMAN HIT: AL603048.1, EVALUE 7.00e-01; NT HIT: L44140.1, EVALUE 7.40e+00
gaaggcctgttctcgttctgcccgacttttcagcatgggaaagtagctgtccactcctgtccactccaactggtagctgagatccttgtttggaagttttgaagatagaaagggcactgttcctgctgcctcttccgatgccccctccagccattgctgaccctctttgtgccttgactttggtcacttgttcgtggttctttgaccacctccttcctggctctattcctaggggctgcgtggcatggtggtgctttggcgtgttcattcatttgggtccttccgctgcatccctggtatgttgcaggggatgcagagaatgttccaggaaggtgagaagttttatcctagttttgtgaccaaaacaggttcaggatagattattacaaacatttatgtgacagataatcctctagagccgtgtggtactttgtactttccgtggtacccatgtctgctggagtagatggacagtcacagtctgccttttccctcctcttt

SEQ ID NO: 6391 - DNA, 562 bp, Homo sapiens
  MAP TO AC024568.2; EXPRESSED IN ADULT LIVER, SIGNAL = 0.34; EST_HUMAN HIT: AI915831.1, EVALUE 4.00e-92; NT HIT: gi15295132, EVALUE 3.00e-92
tttagccctcagcaaaatcgctacaaaaggtaattaagtgtttcatacctattgcttgatcacttaactcagccttccaaggttataccaattttcaaaatgtaaccccaagatatgttcaagttcaaaatgaaagctaagcattacaagtaggaaaataatgtgaacaactagcactttaattttaaaaagatttaatatctggaaaaaaatacacactttttttctctcaccattttttgattaataagaaacatctctgcctggggcaaactttcacagaatattttttgaaggaaattctgacaaaataagttacctttttcctttggcttttgagttcctcttggctgttcttttgttttctaggcctgactcccgtccactctcactgtcctgctcactggaggagtcctcactgctgtcctcattgctgtctccttcctccccactttcgccttgttctccactttcacttccagattcactctctgaaaaacagaaccagatgttcttagatttatagtcatttaattagacacacggacacctgtaactgtca

SEQ ID NO: 6392 - DNA, 553 bp, Homo sapiens
  MAP TO AC002107.1; EXPRESSED IN PLACENTA, SIGNAL = 6.8; EXPRESSED IN ADULT LIVER, SIGNAL =  15; NT HIT: X61923.1, EVALUE 0.00e+00; SWISSPROT HIT: O57592, EVALUE 4.00e-23; EST_HUMAN HIT: BF792560.1, EVALUE 1.00e-115
gccccagacatgaacttgacatggaatttgagcctcactcggtgtcaccctttacttctcaggacaggacatccagcccaaaagagacctcacccgctttgtgaaatggccccgctatatcaggttgcagcggcagagagccatcctctataagcggctgaaagtgcctcctgcgattaaccagttcacccaggccctggaccgccaaacaggtgaggttctgtggcgtggaaaggagtttctcaggcaaggattccttatttcatccagaacatgagggggatggtcttaggcttcttgaactgcagttgtcattaaattatagtcatatagcaggaccgcagtccagcatttgttattaagtgttaagtgacaaggattagaaccttgactccaagcctaaactgaagagtgtttttccagctactcagctgcttaagctggcccacaagtacagaccagagacaaagcaagagaagaagcagagactgttggcccgggccgagaagaaggctgctggcaaaggggacgtcccaacgaagagaccacctgt

SEQ ID NO: 6393 - DNA, 596 bp, Homo sapiens
  MAP TO AF004877.1; EXPRESSED IN ADULT LIVER, SIGNAL = 0.56; EST_HUMAN HIT: AW875259.1, EVALUE 0.00e+00; NT HIT: AF004877.1, EVALUE 0.00e+00; SWISSPROT HIT: P08123, EVALUE 3.00e-36
tgggcttgttaagtccatcccatgcaagtgtgcctgggggctcgttatttatttatgtgaacttgattattttttactgatgagaacatgcttccgtgtgaagctcaactgaaaatctgctgccatggatgtctctcactgtaaaaaaatataaagcctctcctatctaactttcacctttgcagggcccccctggtccccctggccctcctggacctccaggtgtaagcggtggtggttatgactttggttacgatggagacttctacagggctgaccagcctcgctcagcaccttctctcagacccaaggactatgaagttgatgctactctgaagtctctcaacaaccagattgagacccttcttactcctgaaggctctagaaagaacccagctcgcacatgccgtgacttgagactcagccacccagagtggagcagtggtaggtcaagatgtccagaccagactgacccttctcacaagttgagcttttcaaaattagtttccattgacatttagagtgaaaatgcatttgggtaaagattacattatgtgaaatcacacccaattaatggagcgtcatcttctcccaac

SEQ ID NO: 6394 - DNA, 594 bp, Homo sapiens
  MAP TO AC007795.1; EXPRESSED IN ADULT LIVER, SIGNAL = 1.9; EST_HUMAN HIT: BI061449.1, EVALUE 2.10e-01; NT HIT: L14644.1, EVALUE 1.00e-05; SWISSPROT HIT: P73341, EVALUE 1.10e+00
tttttgtgacatgtgcctcccaggcccatgccacgcattcttcaactctctcatctctaacacaactgaaattccgctccccatgtggctgctcttgcagtaaaatgacaattgactgccaactttcctgagtcttcagcttttctcttacattcaacaagataaagaagcattggaccaggggcccagagtctctgagctgctttctcctcacctgtatgtctcctaagccctcataggagcagcttcagtcatggagggcaccatgctcaggttgtccacagctcccaggtcatcagcaaccgtctgtgactctgtgcaaagctgaagggtgacgatccttccaagacagtcaccagaacactgtgtgtgtggggagaaggtggacagaggaaggaagagccctcctggcattcaaggcttctgaccacaacctctccctctgtccagagggggcggggtctccaagccacagggactgcatgctcagataggcagttttgatgatgctgcctcccctactccacagctcctcatccttccttccctccaggcctttcacactggggaagagggtgttttgcttgatgcctt

SEQ ID NO: 6395 - DNA, 582 bp, Homo sapiens
  MAP TO AC010615.5; EXPRESSED IN ADULT LIVER, SIGNAL = 0.37; EST_HUMAN HIT: BG287377.1, EVALUE 8.20e-01; NT HIT: AJ277662.1, EVALUE 8.70e+00; SWISSPROT HIT: Q9W669, EVALUE 4.90e-01
aggagagcccttaaacctgggtgtgggccccgccacttcctctgctacccaagtatccaggattcccaaggggatcctggtggtatgtgatcctggaatgggaaagactgcatctggggtgacctcttccagaatgtactgtaacttgggggtttccaaatgagttatatgaaggaacaggcccgaggagaaagaaatacaaccgcttactggtacttacaggcttgagcaactccatcagcgagacaaaaagacaggaaaagaaaaccacaggtgtcacacagaggaggctagtgggacacctggcccctggcaatgagccaaggtccctgtgcccctctgcccacattgtgacagtcgttatcatagtcccaagtgaggtttggggatgcggcaatgcgggtctctgactggccatccttaaggaaagggtgcctctcctccaggctgccttggctatctcgccagaaatgacagcacagggttccccaggctttggacgcagtgcagccaatgctggacctctgcgcagtcaagggggagggtcccaggatcaccaggtcatccctgtgtccctaagga

SEQ ID NO: 6396 - DNA, 553 bp, Homo sapiens
  MAP TO AC000094.3; EXPRESSED IN ADULT LIVER, SIGNAL = 1.1; EXPRESSED IN PLACENTA, SIGNAL = 3.7; SWISSPROT HIT: P05783, EVALUE 9.00e-42; EST_HUMAN HIT: BE293285.1, EVALUE 5.00e-82; NT HIT: gi14757538, EVALUE 2.00e-80
actgggaaaactgggtccacaaaataataaaattggacccttaccttataccatatacaaaaagtaactcaaaatggattaaagacctaaacataaaaactaaaatcacaggcagaacctgagtcctgttctctcactttcctccccagacagcatgagtttcaccactcactccactaccttctctactaactaccagtccctgggatccgtccagccgcccagctacagtacccggttgatcagcagtccagccggcatctatgcagatgtaagggatttgggctcccagatctctgtgtcctgctccaccagtttccagggtggcttggggtccagggccctggccactgggatggccaggggtctggcaggaatagggggcatctagaatgagaaggagaccatgcaaagcctgaacgaccacctggcctcctacctggacagagtgaggagcctggagactgagaattagaggctggagagcaaaaaccgggagcacctggagaagaagagaccccaggtcagagactgggccattacttcaagacca

SEQ ID NO: 6397 - DNA, 592 bp, Homo sapiens
  MAP TO AC004184.1; EXPRESSED IN ADULT LIVER, SIGNAL = 0.47; NT HIT: AB031005.1, EVALUE 0.00e+00; SWISSPROT HIT: P57225, EVALUE 5.70e+00; EST_HUMAN HIT: AW008207.1, EVALUE 0.00e+00
tttgcctgtgaggttttgtggaacctgcaggtagaaaggacatctttatttagagctgcagcccaattgctcctgcatcttggggccccttgaaaggaccctctcccttcaacagtgcatagtgaggccatttctggggagaaacgtagactgtccttggactcctgaggtttttacacttacttgctgactctgtggactttgacttcatcattaaacatcttacaacgatgtaatttgctttgactgtaagtatagaacaggacactgttcctgaagcaggaaacaagggactggtgacctgaactgccacccccctccctggtgctcagatgtaatgaaatcgtgaggcaacaaatctatggctaggtaaagggtcaactccatttcagcaaatgtttcagatgttccttcccgcctagtaatgttccagctttaccccagccttaatcttttaaaatgtatattttccttggtgttattttaaagtaattcgtatgtatttattacactgggtttgttgcagtaagccacttcgaatgttgctgtagaattaaagtaagcaaataaatgtgtggttctccacggagtt

SEQ ID NO: 6398 - DNA, 502 bp, Homo sapiens
  MAP TO AC004523.1; EXPRESSED IN ADULT LIVER, SIGNAL = 1.7; SWISSPROT HIT: P78329, EVALUE 8.00e-36; EST_HUMAN HIT: AI761193.1, EVALUE 1.00e-124; NT HIT: gi14767694, EVALUE 0.00e+00
ctcagtttcctgatgggaggtagctcctggctgctggtgggaggtgttcctggggctttgcatacgttacattgttgcctccctttctgcccttgctctgcaggaggcccagtgaatatattgccaccatcttggagctcagtgcccttgtagagaaaagaagccagcatatcctccagcacatggactttctgtattacctctcccatgacgggcggcgcttccacagggcctgccgcctggtgcatgacttcacagacgctgtcatccgggagcggcgtcgcaccctccccactcagggtattgatgattttttcaaagacaaagccaagtccaagactttggatttcattgatgtgcttctgctgagcaaggtaggtttctctatgatctgaatttaggtgagagaatagagcttcatgtcaaatgtcaggtgaaataaattggttttgatccaaagggcactgggagccatggaagatgcttgagaaagggaaggtca

SEQ ID NO: 6399 - DNA, 506 bp, Homo sapiens
  MAP TO AL109753.9; EXPRESSED IN ADULT LIVER, SIGNAL = 0.59; EST_HUMAN HIT: BE301393.1, EVALUE 6.00e-94; NT HIT: U97090.1, EVALUE 0.00e+00; SWISSPROT HIT: P46100, EVALUE 2.00e-28
ggctttacacctggcaaatgaatcaactatgttttaaactcagcggaacttcttttttaaaagttgaatgcagcagaaattttttaagacaacgcaaggagatataactgtaaaactatctactgaaagagcgggaaagaaaacacaaaattattaaactttaagctcagaaaatatgttgggattgttatataaaaaagtaagaatattttattactatggaacatatttgtacctgaacacatccagctaacatctcatagagaatgtgagcacgttttttcatcactctgacatctaccatggtagaatctgcacactgaccattttgaattggatttataaatctattcctgaactccttaatggatccaagtaaattttccttgataaaattaaccatacaatgatctaagagagaagacattattcattaacaacattaacaatcgttaaaaagacttagaaaaattccccaatgaaatgctcatgtcaaaaacacatgc

SEQ ID NO: 6400 - DNA, 583 bp, Homo sapiens
  MAP TO AC008488.6; EXPRESSED IN ADULT LIVER, SIGNAL = 0.81; EST_HUMAN HIT: BF059375.1, EVALUE 3.20e+00
tcaggtgtgcaaggaaagtgactgaagcaaatttgtattttgagccttattctgccagatggtaagaccttaatctcagttaattaagggttttccctctcttttttccagggaacttacattgttccagggcatggggagagagtggggaactgattctgtgcaatctcctcctcctttcacatatccctgtatctctctcctcccagttcttgctaaatcagtcagcaaaggtgggagaggctgggtagggaggagcagcagaggttggggtattctttcttgtctctttctctcacagattgcattggggtatggtagaaaggaacattcagagaagttttccttgccctgattcctcttctctttccttgacagctcgtcctatgctataaatttcacaactcactggctgtggggtgaagtcaaaggtggagcatggaatgtggaatggtggaaacgagaaggttggggaggatctgggcaactgtgggaggagaggggaggatagaagaaaggacaattccagtagcaagtagaaagagggagtaggtctaggtcagcatagcctggctgctcttct

SEQ ID NO: 6401 - DNA, 503 bp, Homo sapiens
  MAP TO AC000372.1; EXPRESSED IN ADULT LIVER, SIGNAL = 0.42; EST_HUMAN HIT: AI150769.1, EVALUE 5.00e-14; NT HIT: gi15296371, EVALUE 9.00e-15
tgcagtgggaatacatgtgccataataaattatgtgtctattcagagaagtaaagggagacaaagatttaaaggaataattaggaggattacacaattgttttgagataattatccttggctgcaaggatcaataacaagggtggtaccagtttgaggttgggcagggagttctgggcagatgtgattacacagaagtattttttatgtaaggttgtgatgacctttatacaaggtaatgatttttgcagagtcttctgtgacgttttggttttcaagcatttgtgcatgaagaccctctcttcatggccttccctggctctgtttgtcagggtttgtaacacaagtaactccattttgatgctgataactttcacaatataaagctaactttttattttgtttggtacatagttcgagattcatgttacatagtttgtctactgaatgaaattcagttatagctgatatgctacttaaagatgtttatcggctcaggacagg

SEQ ID NO: 6402 - DNA, 557 bp, Homo sapiens
  MAP TO AC003050.1; EXPRESSED IN ADULT LIVER, SIGNAL = 0.6; NT HIT: AL163227.2, EVALUE 1.00e-88; SWISSPROT HIT: P39059, EVALUE 8.00e-01; EST_HUMAN HIT: BI488505.1, EVALUE 2.00e-90
agacaatgtgggaaaatgccttcattatgtcagaggtcttcatggcagcccctcccatcagaggcccagaggcccagggtcccatgctgtgtacagtctagggacttggggccctgtgtcccagctgctgcaaccatgactaaaaggggccaaggtacagcttgggccatggcttcaaaggatgcaagccccaagccagcttccacgtggtgttgagcctgtgggtgcacagaagtcaagaattgaggtttgggaacctccatctagatttcacaggatgtgtggcaatgcctggatgtccaggcagaagtttgctgcaggggtggggctctcgtggtgaacctctgctagggcagtgcagaagggaaatgtgggattggcgtccccacacagagtccctactggggcactgcctagtggagctgtgggatgaagaccaccatcctccggaccccagaagggtagatccactaacagcttgcaccatgtgcctggaaaagccacagacactaaacaccagcccatgaaaacaaccaggtgggaggctataacctgca

SEQ ID NO: 6403 - DNA, 503 bp, Homo sapiens
  MAP TO AC005621.1; EXPRESSED IN ADULT LIVER, SIGNAL = 0.59; NT HIT: AL163213.2, EVALUE 1.20e-01; EST_HUMAN HIT: BE612533.1, EVALUE 1.80e-01
tttccccacctttaaatccccagtggattcttggagtgagtgtgtatcaagggtttgtggccctggattctgcaggtgaggtcagggtcagatgacagtgatactcagtgaactataattagtgtcttccttccaaggagagaaacagaatgagagcgtggactgtgatgcctggcgagataacttccctgcctactacttttcaaagaaactgacctacctatacatccccaaaagaatatatgaatatgaaaactccactaaaaatatccaggcattcaagtcaacagccaaaaaaaaggcagggggaatagtgacagaatacaaagatagaacgtgtccacttaaaaacaatgtctaccatgtcagtgtcaggtgcagtgctctgatatttattggtagaccaaatataattttgctgttcagatcttcaatatgtatagaattatttctgtgtttctttcttctgttagaggttgagaggcgtttgactctcccactgt

SEQ ID NO: 6404 - DNA, 513 bp, Homo sapiens
  MAP TO AC020996.4; EXPRESSED IN LUNG, SIGNAL = 0.5; EXPRESSED IN ADULT LIVER, SIGNAL = 0.56; NT HIT: AF008210.1, EVALUE 4.90e-01; SWISSPROT HIT: P12565, EVALUE 3.60e+00
ttcttgtcatgggtcagcagaccgtatttagtaaatgccagtgtcaagtcagtaagacatcattggaattgttattataaaatggtcagtgctactcagtctttatcctattcattttgtacagcgtccactgaactctctgcattcactggaaaggagatatttttcacagcagagccttaatgaaatccaaaacaagatgagtctcaaccaaggcaaccaaggagacctgattacaggggacctgtgaacttcatgttagagaaagataaggaaatactgaaaatgatttgtaatttttctctttattttaaatatttattaagatgaattgaataccatactccataactgtttaaatcaatgttaatgttctttaacaattcactgacatgtactttccatacgtaatataccagaaaacaacacacaaaaaattgtttcttatttattccaagaaaattttaaacacttagcatttaaaataagaaagccaacaaccaagttgcaagg

SEQ ID NO: 6405 - DNA, 567 bp, Homo sapiens
  MAP TO AL139150.1; EXPRESSED IN PLACENTA, SIGNAL = 0.59; EXPRESSED IN ADULT LIVER, SIGNAL = 0.6; EXPRESSED IN LUNG, SIGNAL = 0.7; NT HIT: AF236117.1, EVALUE 0.00e+00; EST_HUMAN HIT: BG207736.1, EVALUE 0.00e+00; SWISSPROT HIT: Q92633, EVALUE 4.00e-58
gaatgaatgggaatgatggcttgcttgggtcctcttacctacctaagacagtcatcaccgtcttcattagcttcatgggtgtcctccggcggctgatggacccacttgtatgcggagacaagacgttggttttcctcttgacgtacacgtagatccgcaggtacaccacaaccatgatgaggaaggccatgaggttggacactgtccagaaaacaaggtaactcctgctgtaaatgggggccagggaagagcaggcagagatgttgcagaggcaattccagcccagtgtggggaccgcccccataaaaatggcgatggcccagacaagcaaaatgagcagtgtcaccctctttttggtcaggttgctatggacccgcatcctcatgattgacatgtgcctctccacggcgataaccagcaagttggtgagggaagcagtcaagctactgtccagaagcccctgacggagaaaccagcggttgacagtcaaagtttttgaaactgggcctgtgttaaacatcaggaatacataggcaattccagcgaagaaatcggcagcagctaaat

SEQ ID NO: 6406 - DNA, 558 bp, Homo sapiens
  MAP TO AC016709.4; EXPRESSED IN PLACENTA, SIGNAL = 0.35; EXPRESSED IN ADULT LIVER, SIGNAL = 0.33; EST_HUMAN HIT: AL521707.1, EVALUE 2.00e-13; SWISSPROT HIT: P40020, EVALUE 5.30e+00; NT HIT: AY007685.2, EVALUE 2.00e-22
catgcgatgcaatttgaaagcattttacccacagtataacttctttcaaaatttgagttagtcctcccaaatcctgttgttgttttatctactaagtttatataagacactaaaataacttttatcttttttaatgactttcaaagcatctttgccagggtagattccatctcagaaaactttcttttctcattcataagaagcaacttttcatccattgaagttttatcatgcaattgtagcaattcattcatagcttctggctctacttctaattctatttctcctcctacttccacatcttcatttacttctcccactaaattgtttttttcttaattttaaaactgtttatttattgtgaatacatagtagatgtaagaatgtatagggtacatagatattttgatacaggcatacaatttgtaataatcacattcagggtaggtatccatcacttcaagcgttaatcttttctttgtgttacaaataatccaattatactcttatttgttataaaaagtacaataaattattgttgattgtggtcaccctgtt

SEQ ID NO: 6407 - DNA, 540 bp, Homo sapiens
  MAP TO AC021619.3; EXPRESSED IN PLACENTA, SIGNAL = 0.31; EXPRESSED IN LUNG, SIGNAL = 0.48; EXPRESSED IN ADULT LIVER, SIGNAL = 0.31; NT HIT: AL163203.2, EVALUE 2.00e+00; SWISSPROT HIT: P56730, EVALUE 8.70e+00
atgtggcaaggtagtgcctcaaactttatactcagatatacaggggggaaataaaacttttattttaaagctgatctaactcttatgccaattaaagacatctccatatcttcctatttctttcaggttaatttttttttttagtaagttctcagtcctcttagaatacttccccttcacctttctcctctctaaaatattgtctgctgatatgagggaaatcatgattttaagtaagattgataaagtttctcacctgtaggcttctatgcatctcctcgtagctgggtctttgaagttgtgaagtcaggtttagcccctgggcatttgtgatgacatccattgacatgtggctggtcactcctggccctatgggagcatcatgcagacatccactgctgaagtcagtgggcccagccattggcttgtttttaggaagtccccacacattgctgcctcattgcgctgagcccatgtctctagttctcactgtcttcacatctcctgcactgtggaatcaggcacacctcaggttcattt

SEQ ID NO: 6408 - DNA, 502 bp, Homo sapiens
  MAP TO AC016714.2; EXPRESSED IN PLACENTA, SIGNAL = 0.54; EXPRESSED IN LUNG, SIGNAL = 0.52; EXPRESSED IN ADULT LIVER, SIGNAL = 0.57; NT HIT: U62293.1, EVALUE 1.00e-04; EST_HUMAN HIT: BG956768.1, EVALUE 1.00e-11; SWISSPROT HIT: O51363, EVALUE 5.30e-01
atgccttttgtgaaactgccataatacctgagactgttacaccagcagcaactatgaaagcctgtatttccaactgagacactcttcttcataaaaaaaatgcattgacttgttctataggtcttaatgatacggacagggagggcagagaaatactgggtagatgagggcagttcacgggagggctccaccctcgagtctggaactgtggcccaaagtgagaactttacatcctcgttttcccaatccaatgttgccttttccaaaaccaccctggcccaactggccccccatcctgaacccatggaaatcccaggctccactggcagaggagcagcagagaagaagagaagaaaagaagcagccagacatcagagagaagcagcttgacttcagtgggatggctggatggtaggactttggagaagagcctggctggggatggccagactacaggggaagatcaccttcccactccattccttttacagctccgcttcca

SEQ ID NO: 6409 - DNA, 544 bp, Homo sapiens
  MAP TO AL138889.2; EXPRESSED IN PLACENTA, SIGNAL = 0.51; EXPRESSED IN ADULT LIVER, SIGNAL = 0.37; NT HIT: X64467.1, EVALUE 2.00e-06; SWISSPROT HIT: P18090, EVALUE 1.00e+00; EST_HUMAN HIT: AA947353.1, EVALUE 3.00e-06
cggcctctggcacttaataggtactcaataaatatttgtagaatgcatgaatgccagggtcgatgtgagttctctccttttccgcacactcacctgtgtagccctcgttcattgggcagttggtttggatgacttggctgccctgtaccacgaggcgaggtggcccagggagagaagagggatgaggcgcagagggagtgggaggcccgtctgactgtcatgggcataaaggtgacgggggaggaaacccagagaaacttacagaacaacagtgaagggctggcagaggaagatggcccagtatcgggggagggggagtgagaggaggttcgagaagaagaccaaaggagtaacgtaacgagaaatgtctgtgccattgctgggggctgggggcagagttggaaggggcgggcagggctgttgctgcagatgccacgagggaaacgttattgggtgctggcccaggtgtgggcagaggcaccctcgagggctgaggtaaagtgcacacccagcataaagaaaagggaaccgagggttttaaagc

SEQ ID NO: 6410 - DNA, 526 bp, Homo sapiens
  MAP TO CHR22_96.0; EXPRESSED IN PLACENTA, SIGNAL = 0.49; EXPRESSED IN LUNG, SIGNAL = 0.46; EXPRESSED IN ADULT LIVER, SIGNAL = 0.52; NT HIT: gi14725818, EVALUE 5.00e-01; EST_HUMAN HIT: BI820807.1, EVALUE 7.40e-01; SWISSPROT HIT: Q07436, EVALUE 1.70e+00
tagaagggggctgactgatggaccatggtgaaggccagcctggcctccttcagccacagtgtgaagcgcagttcaccaaaactggaaactgccatgcatcccggtgtcatcaaacaccacagcaaaagagccaggtgaacgcacggaacatcaagccgcaaccctccacacctctctgtataaccttcgcggccactgcccccgtgcctgcagagcgggtttgcaggagacgtcatccgaatggataaatgtccgtcggagctggggatcatcctcccagagtttcagcagctcagagaaggccagcaactcaccgagccatgccacagcgtgcaagcacagcggcccggccctcctgcattctgtcatgcactgcgtgtcatcttattaaaggatccaacgcaggctcataaaatacttaatgaaaacatgccaccaggtgcacgtcctggaagagcctgaagacactttttgcgcccgaggtcctccccaccgtgccacacccccaggcgaggacacatacctt

SEQ ID NO: 6411 - DNA, 557 bp, Homo sapiens
  MAP TO CHR22_83.0; EXPRESSED IN ADULT LIVER, SIGNAL = 0.49; SWISSPROT HIT: Q00472, EVALUE 1.00e-11; EST_HUMAN HIT: BG683263.1, EVALUE 0.00e+00; NT HIT: gi14778744, EVALUE 0.00e+00
ctgcgtctccatctccctacaggcaccgggagcctggccgctgcagtggagacagcctcgggacgccaggccctggtggtgggcaagcccagcccctacatgttcgagtgcatcacggagaacttcagcatcgaccccgcacgcacgcttatggtgggtgaccgcctggagaccgacatcctctttggccaccgctgcggcatgaccactgtgctcacgctcacaggagtctcccgcctagaagaggcccaggcctacctagcggccggccagcacgacctcgtgccccattactatgtggagagcatcgcagacttgacagaggggttggaggactgagcccactgcacctgcagccacaggcccacccctccccactccctgatcccgtaggtggaggcgatgggtcacgagccatgttaagcacaaccggctccttggtccagttctgcaccggggtggggctgggacccggggaaggtttgagggcccttgcaaccccctcccagcagtggctgggcactctttgctgccccagaagctggtcccctatggat

SEQ ID NO: 6412 - DNA, 514 bp, Homo sapiens
  MAP TO AC013689.4; EXPRESSED IN PLACENTA, SIGNAL = 0.6; EXPRESSED IN LUNG, SIGNAL = 0.58; EXPRESSED IN ADULT LIVER, SIGNAL = 0.75; NT HIT: X72739.1, EVALUE 0.00e+00; SWISSPROT HIT: P15848, EVALUE 3.00e-45; EST_HUMAN HIT: AI791623.1, EVALUE 1.00e-123
cgcagcttcaaagactttccatggagggcgatgggctgaggacaatcttgttcttcacgtaaaacacaggcccacaatctcaaatttataatttaaaaatatatatacttacaatgtctctaaaggcacttatttttcttaaaaatcatgtatttgtaagctgaactatcattttaacacaaaagctatcattcttgctcaatggagtcaggctgctcttggagtttctgtcctgggaggaaaaagggcagggtgtaggtacctgatggttttccacacgtcgaagccatccagaggctttgtgccattggtgtgtcccctggccagcttcacgagtgttggcagccagtcagagatgtggatgagctcccggttcttcacgcccttctgcttcagcaaggggcttgccacaaagcccacccctcggacgcctccttcccacaggctccattttcttcctcgaaggggccagttattaccccctgccaaagtctgccctccgttatctgaaaca

SEQ ID NO: 6413 - DNA, 536 bp, Homo sapiens
  MAP TO AL136105.2; EXPRESSED IN ADULT LIVER, SIGNAL = 0.6; EXPRESSED IN PLACENTA, SIGNAL = 0.46; EXPRESSED IN LUNG, SIGNAL = 0.46; NT HIT: X15277.1, EVALUE 1.00e-105; EST_HUMAN HIT: BE392512.1, EVALUE 0.00e+00; SWISSPROT HIT: P22366, EVALUE 4.00e-03
aggcctcttgttgacctgtggactaaattgtttctccctgcagagatcagcaaggacaactcctgcaaagaaaactgtacttgttcctcctgcttgctccgggcccccaccataagtgacttgctcaatgatcaggacttactagacgtgatcaggataaagctggatccgtgtcacccaacggtgaaaaactggaggaattttgcaagcaaatgggggatgtcctatgacgaattgtgcttcctggagcagaggccacagagccccaccttggagttcttgctccggaacagtcagaggacggtgggccagctgatggagctctgcaggctctaccacagggccgacgtggagaaggttctgcgcaggtgggtggacgaggagtggcccaagcgggagcgtggagacccctccaggcacttctagagctcttcttcttccttcattggcctctccggatgttgaaacaaccacaggtcaagaaggaatgtgaatctgttgttttataagagtttaggacaaggacgtggaacagt

SEQ ID NO: 6414 - DNA, 600 bp, Homo sapiens
  MAP TO CHR21_48.0; EXPRESSED IN ADULT LIVER, SIGNAL = 0.3; SWISSPROT HIT: P40584, EVALUE 4.50e+00; NT HIT: AL163252.2, EVALUE 0.00e+00; EST_HUMAN HIT: BF589806.1, EVALUE 6.00e-05
agggctcccatatcacaaactgtgtggcttaaagcaacagaaatttatagtctcaccgggctggaggttagaattctgagatccaggtgtccgcagggttagttccttctgaaggttgtgagggaagaagctgttccaggcctctttctctagcctacagatgacgatcttctccctatgtgtctccacatcaccttttctctgtacctgtctatgtccaaatttcctcatgtttttataagaacaccagtcatatctaatatcgtaccttaataattttattttaacctaattacctctataaagaccctatctccaaacacagttgcattttcatttatgcagaggtgagatctttaacatataaatggggggaaggcacagttaagcccataacactacctacctctctgaagagtaatcacaatgattgttcagaacttacatcaagaaattacatttttttgtttgttttgatgtggtgttttatcactaacattaattagaaaggtaagcatgtgaagataataaagaacagaccaatatttagtaggttttattattgcttttctattatttacagagagagccccctcctat

SEQ ID NO: 6415 - DNA, 524 bp, Homo sapiens
  MAP TO AC020698.2; EXPRESSED IN LUNG, SIGNAL =  13; EXPRESSED IN ADULT LIVER, SIGNAL =   6; SWISSPROT HIT: P07900, EVALUE 1.00e-76; NT HIT: gi16189357, EVALUE 0.00e+00; EST_HUMAN HIT: BG421056.1, EVALUE 0.00e+00
tgagaacctctgcaaaatcgtgaaagacattttggagaagagttgaaaaggtggttgtgtcaaaccaattggtgacgtctccatgttgtattgtctcaagcacatatggctggacagcaaacatggagagaatcatgaaagctcaagccctaagagacaactcaacaacaggttacatggcagcaaagaaacacctggagataaaccccgaccattcctttattgacaccttaaggcaaaaggcagagactgataagaatgacaagtctgtgaaggatctggtcatcttgctttatgaaactgcgctcctgtcttctgacttcgggctggaaggtccccagacacatgctaacaggatctacaggatgaacaaacttggtctgggtactgatgaagatgaccctactgctgatgataccagtgcagctgtaactgaagaaatgccacccctcgaaggagatgacgacacatcacgcatggaaaagtagaccaacctccagctgagggatgtcttacctgttcgg

SEQ ID NO: 6416 - DNA, 537 bp, Homo sapiens
  MAP TO AC022247.2; EXPRESSED IN PLACENTA, SIGNAL = 0.45; EXPRESSED IN ADULT LIVER, SIGNAL = 0.46; EST_HUMAN HIT: BG539428.1, EVALUE 5.00e-05; SWISSPROT HIT: P14263, EVALUE 5.80e-01
aatgccaattcgttttccactgttttaccggttttgaaggacttaaatgacaggtaggttcaatcacttaaaaatgtttccaatgaatccaccagtaggtactaaccagaaaaatgagagaacacatgttattaaaattctcacctcagtccgggcttcaacgtcacacgcagttgcggtgacagcgagagcagctttgctctgcacgactgtgtttgcagaacgcagtgggctgatgatggcatgcatgatgtcgtgattctgtatgttcaggcgcaggggctcctgcatggccatgtttgttaatactgtagcagcgttggcaatggctccatctcgtttactagacaggaggtttattaatggatcaataccatcagcttcagcagcagcgctgagtaaatgaaagagaaatgaatgtgattcatctgaattcaaaaaattatctttggagcatgcaactaagctgctaaaacaaatgagtacagaaatacgattttagaaataaattaatttgccatgcaatgaacccagaat

SEQ ID NO: 6417 - DNA, 519 bp, Homo sapiens
  MAP TO AC025745.1; EXPRESSED IN PLACENTA, SIGNAL = 0.41; EXPRESSED IN ADULT LIVER, SIGNAL = 0.5; SWISSPROT HIT: Q57740, EVALUE 8.20e+00; NT HIT: gi15603881, EVALUE 7.70e+00; EST_HUMAN HIT: BE893529.1, EVALUE 7.30e-01
atgtctgaagcctcaaagcgcttacaccctaattgaggtaatgaaaaatgtcacttaataataaaattaacaactttgaatctcaagtaaatgctaagtgaaaggaatatgtgatagcaactacagtctaattatctagttaaaattacacttttcataatttctgctctttctttttttatccaagttagttgatttaaaaaaattattattgctctgctaaataacacgcatttacttgaaaatcactactgaaatattctgcctttctctcttcttcagcttgaggaactctagtttctgaaacttgtctgtcatgctcctattaatctcctcctccaggagtacaatgtggtgatcagctgtcatttgtgcaggcctggaaactaacaagagatgccttaccttcatccttctgtttctaagtgttagcattcctattataggcttcaaattatgaatttgggcttcatttgactaggtttttttcatcaaattgcagggtcttttcacccatgt

SEQ ID NO: 6418 - DNA, 559 bp, Homo sapiens
  MAP TO AL078585.18; EXPRESSED IN PLACENTA, SIGNAL = 0.55; EXPRESSED IN ADULT LIVER, SIGNAL = 0.59; NT HIT: Z79103.1, EVALUE 0.00e+00; EST_HUMAN HIT: BE512654.1, EVALUE 2.00e-01; SWISSPROT HIT: Q27409, EVALUE 8.00e-01
ggcagtgggttgatatctcgagtgctgagaaaaaacaaaagcaactacctagaattttacacacagttaagatatcacccaagagggaaggtaaaataaagacaatttccgacatacaaagatgaaaagagttcgccaactctacttaactctaagtaaaattacagccgaagtgagtacattagtaagaagaacaaacccacagctaagactgagataccagaaataatggcaagtcccaaaattgataaaatgtcagtaagacttatgaactataggatttttgtaatgtatgtgttttttttttttttaaagccaaactaacactccagacaacaatggcaggatgtcagaggagttttcagtcgtcagccaaagctttgttttatctggaagaaagttaaaaatatttaatcactatggaatttccatacctaaaaccatgctaaaagatttaaagaaaaaaaatgaaaaatccatattaagctaaagaaacataaggagtaatagtaagatcagattaaaaaaaagcattaatggagaaaagaggggcatcgta

SEQ ID NO: 6419 - DNA, 599 bp, Homo sapiens
  MAP TO CHR22_227.0; EXPRESSED IN ADULT LIVER, SIGNAL = 5.4; SWISSPROT HIT: Q9Y3A4, EVALUE 8.00e-19; NT HIT: gi14779305, EVALUE 1.00e-105; EST_HUMAN HIT: BI772059.1, EVALUE 1.00e-103
gttagctggaggctgacgagcgccagcactaagtgcacagggacccagaggtgggcactgatgacctagggtccccacccactgagcaaatgcatctgcccctagggggtgatggggaaccgccacacagggtgctgccaggctgggcctctttccacagagtctggtgcgagccccgtgcttagggacgccctccctcctcgaccaccaagtccagcgcccgccctcaggagcactggccacaggcctcatccgtggctggggccaaggccgaggggtctgaggatggactgggggtggcttacgctccatcttgctctctcgatgctgccaggcgtagttgagcagctcttttcggctgcgcttccgtctctccctctccagcacccgcaagctggctgcctcagtccgggggagcacaggccgccggccccggcgggtcaccttcacccagccctcctcgtcagggaccccctcctcctccttggccttagcttcttcctgcaaggaaggtgatcccatcgtccggtgggcgcctgggacctcccgcagcctccagcagcgcgccctccacgccctcctcccaaagtcagaactgc

SEQ ID NO: 6420 - DNA, 585 bp, Homo sapiens
  MAP TO AC018432.4; EXPRESSED IN PLACENTA, SIGNAL = 0.43; EXPRESSED IN LUNG, SIGNAL = 0.61; EXPRESSED IN ADULT LIVER, SIGNAL = 0.47; SWISSPROT HIT: P03365, EVALUE 5.00e-13; NT HIT: gi13487903, EVALUE 3.00e-24; EST_HUMAN HIT: BF733053.1, EVALUE 3.00e-90
ccaacaatccataggcatccctcacaacccccaaggacaggccacagtagaacgtgtccaatccacccttaaaaatatgctcagaaaacaacaaaaaagtgaatatgagtaaggaccctgcaacactactggcagaagccttatttacccttactttttaaaatctaaacgataaatttcaatcagctatagaagagcattttgctaaaacctctcaagacataaacctgcagttttatggaaagatataaacagtaatgtatggtgcggttcaactgaattgttaacactgggaagaagacatgcttgtgttcacaccccctcaggtcctctttggattccagcacgaggcatcaaaccataccatagcgtggctaggacccaacccggtaccagaaatgaagaaaatgaccctgtggaacccatagccctggatgatgcagcttcttcagacgacacaaaccccagacattacctgggagatgctgaagaaaactcagaaggctgaatgaatcctgctctggacatagacaccattcactccagataatttgttccttgctatgctttccgttgtacactgca

SEQ ID NO: 6421 - DNA, 554 bp, Homo sapiens
  MAP TO AL133543.2; EXPRESSED IN PLACENTA, SIGNAL = 0.68; EXPRESSED IN LUNG, SIGNAL = 0.77; EXPRESSED IN ADULT LIVER, SIGNAL = 2.2; NT HIT: gi14729949, EVALUE 0.00e+00; SWISSPROT HIT: O75874, EVALUE 1.00e-87; EST_HUMAN HIT: AL559837.1, EVALUE 0.00e+00
tcttcagaatagtgtttttggtgctcagctacaaaggccaatccttagagccatttggaaggaactgtgtgcaaaatcttcgattgacttatcttgattatacatccctatggcaacaccaccaccctcttccaagttatgtaccaggtatgtcaccttttgggttctgtcacttagtgtgtaggttatctctacttttccaggcccaggaacaacaaaatcagctgctctgtattgatccccataagcaatgcgacctacgatgatggattttacccatccactcacaagctgggggatatttttgcagataatggcttctctgaggaccgtgccaaccagaatattttggatggtgccatttggcgatttccacatttgtttcaacttgaactcctcaacccttttctcatcagcagtgatagtggcacacttgacaccaacgttatacttctttatagcttctgcagcatccttggtgacctggtcgttggtggcatcacagtactctatgcctaaatcatagctatgtacatccagttccacatagggaa

SEQ ID NO: 6422 - DNA, 569 bp, Homo sapiens
  MAP TO CHR22_127.0; EXPRESSED IN ADULT LIVER, SIGNAL = 0.49; NT HIT: AF320075.1, EVALUE 5.40e-01; SWISSPROT HIT: Q00416, EVALUE 3.20e+00; EST_HUMAN HIT: BG218581.1, EVALUE 5.10e-02
gcccttcctctctccatttcacagatgggaacacagaagatcagagaaatgaacctggcaggtaggaaagcagggggtttggttaaacaaggctgcatagaatctgacacgtttgtgctctgagggtgctttctgagaacatgctgccgagccccgtccttggccctgcccttccctcctcttggcagagactgtagtgaagacgtcaaggggatccgtttaaccagtgcctctcagctgggagggatagcgaatgtgatagatggcacaatcaagattcagaatgggttcagctgcctgcagtgccagccgggaaccaatcaaatgaatgagctaataggaacaaatggcaagtcctacgttcaggtgcatgagccgagcagtcagctcagcagaaggcagtgtggacagttggggttcactttgtcttccgtgggaagcgcgtgtagtcactttgcctggattacggcagttgcctcgtgaatgatacccctccatcctcatttggctcattccattgtttctacatcatctttccgtggtgcaaatctcttacctgcagtggcctc

SEQ ID NO: 6423 - DNA, 584 bp, Homo sapiens
  MAP TO AL035633.18; EXPRESSED IN PLACENTA, SIGNAL = 0.43; EXPRESSED IN ADULT LIVER, SIGNAL = 0.39; NT HIT: gi5834911, EVALUE 2.20e+00; SWISSPROT HIT: P23432, EVALUE 2.50e+00
tgctaaaattggatacccgtgaaataaacttttgaatcttcccagttcatcttaaattttaataataaaatatgatagtagacatttccctatactcttaaacttctttataaactaaagaacattgcccagaatttcacaatggtgtttttttgtgactgatattagagatggaaatttcaagctgtaatagaattccatctttatggaaataatgggaagaaaaaagggtacatgttaattaattcatactttcctttaaaggttagaaaatcatcagaagagaagttttcaataaccattgtggagagtgggctaaaataattgatgagagatgagaaaccactgctttctctgttgtaggcattcgattgagcatggacattgtaactatgaaattgaccaaatcctgacatttctgtagattctccagcagaattctgcaagtaaaatagtaaagaaaagcagatagagtagccttaaggatgggtggcgtattagataatgcattcaaatatgttggtgaagacacagaagaaattgaccataatacttatcaggaaagaaagtctcctggagttggg

SEQ ID NO: 6424 - DNA, 548 bp, Homo sapiens
  MAP TO CHR22_179.0; EXPRESSED IN LUNG, SIGNAL = 2.1; EXPRESSED IN ADULT LIVER, SIGNAL = 1.2; EST_HUMAN HIT: AL134889.1, EVALUE 0.00e+00; SWISSPROT HIT: P05214, EVALUE 3.00e-50; NT HIT: AB002059.1, EVALUE 0.00e+00
cagaggcaaagagaagtggccccggcttggtggaggttggtggtgtggctcccacgggcattggcttacgttgtctggtttctctcaggcagatctgtgcatgggactgcagggcttcctcatcttccacagctttgggggcggcactggctctgggttcgtgtctctgctcatgaagcggctctcggtggactacgggaagaagtccaagctggagtttgccatttgcccagccccccaggtctccatggccatgacggagccctacaactccatcctgaccacctacacgaccctggaacattctgactgtgccttcatagtcgacagcaaagccacctatgacatgtcagcacaacctggacatcgagtgtcccatgtacaccaacctcagtcgtctgggcagatcgtgtcctccatcacggcctccctgtgattcgatggggccctgaatgtgtacttgacagaattccaaaccaacttggtgccatacccccacatccacctccccctggccacctacgccctggtcatctcagccaagaagg

SEQ ID NO: 6425 - DNA, 594 bp, Homo sapiens
  MAP TO AC015896.4; EXPRESSED IN ADULT LIVER, SIGNAL = 0.28; NT HIT: gi9964314, EVALUE 2.20e+00; EST_HUMAN HIT: AA287444.1, EVALUE 3.00e-71; SWISSPROT HIT: Q06242, EVALUE 3.40e+00
aaaagaattcctggatttaaagataacttcaagaaaaattctaacataagtacgaaaaattatatagatctatatcaggtatgtataaagatacactgcctttttattataaaagtcttccttataatcagttacactgcaaacagaactgttttccagcagctcaaagagtaatgcctacatgaggctcttaaattagttagttattatgacaatcaatttctcaacagaacacaaatatttcacattaatcttcaggatacatacattatctatatatctttaaatctataaaatggctaaccaaataaaataaggtagactatgcattaactgtcggaaatttccagtaggtctataaggatacagacatagagaacagccatgaaaaagtgaggaatcaccccaatgtgggctctttttctttctttaggctctgttgctgtccaatagagagcatctaatatgtcttgtccaaaagatgaaaacagacgatcagctacctaaaaaaaaaaattatttgtaaagatgtttcttaatattccatttaaatatataactaaaattgaatatagctcaatcctggagactgtg

SEQ ID NO: 6426 - DNA, 581 bp, Homo sapiens
  MAP TO AL133492.1; EXPRESSED IN PLACENTA, SIGNAL = 0.64; EXPRESSED IN ADULT LIVER, SIGNAL = 0.79; EST_HUMAN HIT: AJ003529.1, EVALUE 3.00e-71; NT HIT: AL163303.2, EVALUE 0.00e+00; SWISSPROT HIT: P28284, EVALUE 2.20e-01
gctgtgagccctcatttttcaccgggatctcctttaaggttattcggaccctgagctggatgtgaaagtagcaggaggcagagccatcagcttcatgcaatgtgtgcacaccagttctgggtcccccccagccttgtggggtgctgaaagggggcttggtggcctctggtcccatgtggcaccctgtgtggctggggccagcctctgcagccatgtatccccagcatctccctcacccactgcctccatggcacactgcttttcaggaagggcaggagaggggcctctagaacccgctgcccatgccgtcacatgggagcttgcggagggccctgcatctgtgctttccagtggtttgttttcctgatttcttcaatcaattcagtggaaatttgggaaagatggagtgtaaacatgtgtgcctgaatcacctgtctcccttagccagtcctcatgtcctggccggaaggcctgctcttccttccccctggctcagccaggggtctgcattgctgtccattgatagaattgttggtgctttatgatccagctgctcttgttgccttgaaccaggatttgaa

SEQ ID NO: 6427 - DNA, 520 bp, Homo sapiens
  MAP TO AL139152.1; EXPRESSED IN LUNG, SIGNAL = 0.67; EXPRESSED IN ADULT LIVER, SIGNAL = 0.61; NT HIT: gi16159759, EVALUE 2.00e-46; SWISSPROT HIT: Q12872, EVALUE 1.20e+00; EST_HUMAN HIT: AU127230.1, EVALUE 1.00e-36
ttccagttagcaatggggagagagggttacgtttttccagcacttaataagttttaatggtcccaatctaaaaacaggagcatctttttgagataatgtatatataaaataacttatctccaaaaagaaaaaagtcatacctggcatttggactcagatattatacttggagaattatatgcttttaaatataaactattttgaaagaaaaaataatagggatttagaaattaagacttgactagaaaactcacctgactttctctttctttgttagccatgagttcaagttccactttggcattactcagttctttgtccagccctacaactgtgtccaagtctcctaaaatgaaaatatagcactagttttcattgttattaacataatgtgatatttgctgcctcctttgagtaatttatagaggacacattccaataataagaaaaaagaaaacatacacagattgttctttgtagcattatttatcatagcaaaatactgcaatcatcctagatg

SEQ ID NO: 6428 - DNA, 576 bp, Homo sapiens
  MAP TO CHR22_87.0; EXPRESSED IN PLACENTA, SIGNAL = 0.31; EXPRESSED IN ADULT LIVER, SIGNAL = 0.32; NT HIT: M55177.1, EVALUE 1.40e-01; SWISSPROT HIT: Q91193, EVALUE 5.50e+00; EST_HUMAN HIT: BI829099.1, EVALUE 4.00e-18
aatgcaatggacagaacgtgttactaacttagaggaaaagaaaaatctatatcaaagaagatgacagatggtgtctgttgggccaagtgtaaagattattatcagatccaaattccatccttggttattgctaatacactctaactttgtttattgctagtgtttctctcttttcccttcttgcattctgttgcttcactaaccaacactcgttgtgattggctaactcctactacttttcagctgactttgcctttctccaatcaagatgggtgccttggggatgaggctccctgctctcccttctccccttctcccagctacaagctgtctccctctggttccacactacccaacgtcagccttggagcaatcggcacagggctcaacccccaaaacttcgctgctagacaagtaaggaggcctctcaaatttataactgcttggctatggcctcgccttggtcctggtctgcagtttattgcatcatttgtctgtcttgggaaatttgttgattactgaatgcacagaatgatattaagtgtaggttctagatctttcagcccatagaaccca

SEQ ID NO: 6429 - DNA, 547 bp, Homo sapiens
  MAP TO CHR22_81.0; EXPRESSED IN PLACENTA, SIGNAL = 0.38; EXPRESSED IN ADULT LIVER, SIGNAL = 0.32; NT HIT: AB058738.1, EVALUE 1.00e-97; SWISSPROT HIT: P46060, EVALUE 2.00e-23; EST_HUMAN HIT: BG121052.1, EVALUE 2.00e-97
cagggcacatatgtcagacggatgtggatggaccaggggactctgcggggagggggctgccacacccaccttgccgccgccaatgcccatgccacagttgttgagcttgagttcctgcagggtgaagcaggctgagctcttgagcagggcctcgaagccttgcacaccgtcgggcccgaatgcgttgtcgcttaagtccagctccaccagctgagccccagctgtgatgagtccttcccctagtgagatctgggcacagaggaagctcgtgtcagtttcatagacacccagcttctgtgctgggtgctgcttctgtgccaggcccagctctgccttccaaggacaccccggctggtgcagaaccaacacagacacaaaccatttcagtattcttaagactggaaaccctgcaaagggctcctaacagctggagagtgggggatgcgtatgcctggagtggcccgggaaggctccttgtaagaggtggcatttggacttagtctggatgagaatcagctagtcaacatgaaaagactccaggcagctg

SEQ ID NO: 6430 - DNA, 523 bp, Homo sapiens
  MAP TO AC018735.5; EXPRESSED IN ADULT LIVER, SIGNAL = 0.32; SWISSPROT HIT: P51096, EVALUE 8.30e+00; NT HIT: gi15828471, EVALUE 2.00e+00
aatgttgcaagagcaaggaacaatttgttagagtacttatcatggtcctcaggaacattattctgtgccctcttggacccaaagacattacattttgttattactgagtctgcttgattcctcctcctcttatttttcctcctccttttccttatcttcttctccacctcctcctcttcatcttctttcttcttcccacccttcactacccccatcctcccttaaagaaaatacttgataattaaatttaaaaactttatatacaatgatgctgttgatttccaaagtatcttactaggaatagaatactacaataagaataataaaaatgtaacagattattgatgatatagtatttatgaaactattgtagtcaatataatttaatctaatagaattctatttttataactataaaaaccaaactttagatattcttctttcaattcatgttccactaacatatttttgtcactgatgaatggaaaaaataattgctacagttgtgttttcagaatggtgc

SEQ ID NO: 6431 - DNA, 586 bp, Homo sapiens
  MAP TO AC023115.3; EXPRESSED IN PLACENTA, SIGNAL = 0.45; EXPRESSED IN ADULT LIVER, SIGNAL = 0.46; EST_HUMAN HIT: BG701662.1, EVALUE 2.10e-01
gtggcatatggtaagcctggaagaatgttagccaaagctattacgatagattcatttgcattgtgtgccattgtatgttttaaatgtttcatttgtttaggtatttacctatgaatctttctaatgcaaagtatcatttttatgcatagatggctcaaattattctgtatatatactattgaaattcagaaaataaatataaaactgagtttatttagaataagagctttattttgctgccattgacttttctttttgatttaggaaaaaaaaatactatactttgtcttttgaaactaatcaaaactgcacttgttcaatttattcagctccgagtggttctcagtagcattatctcaactgggagatataaaatcattgtaactttacattcttccattttgtctgatatgcctaaacttagcaactcaggggagtcatgttcttgccaggtaggtagaatgctactgttttagctcatggcagatacagacatctctttcaggaagaatggaaattgggtaagataaatcacttactaataatggcatttacaaatatcattagcttttctggaatgtggtcc

SEQ ID NO: 6432 - DNA, 596 bp, Homo sapiens
  MAP TO AC022247.2; EXPRESSED IN ADULT LIVER, SIGNAL = 0.35; SWISSPROT HIT: Q62095, EVALUE 2.00e+00; EST_HUMAN HIT: AA070275.1, EVALUE 2.10e-01
attagcagggttgcaagtggttaggtttgccagggctagagctgctgcttcccgtacctcttcattgtcactttttagcaactgaattaactgtggaatccctacagaaagagaaaggtaaaaatgtgacttttaaaatgcccatgtgcactaaaatacggtaacctaaaaatgctcaaaagaattgtttccagttgacttaccctgattattgaaaaaatctttgctgcctgaattctcacacattgctgaaatagcttgggaagcagcaattttagttccatcattttcagaacccaaaagggctacaaggcacttttcaacctcttgttcatgaaaaagttttctattttcagctttcatacaccaaagggaaaaaaattcagaattttaatgcaaaaactgcgaagtattactactttcccatccaaagtctaataggaattcaaacaatttggtagttttagtaccagagtctaaactagacaaaatctacaactatttaactttagaatacagtaattatgcaaaatgaatcatggatgttttttcctattcccttgtatgagatcaatactacggccaaggaaagtctg

SEQ ID NO: 6433 - DNA, 556 bp, Homo sapiens
  MAP TO AC013697.3; EXPRESSED IN ADULT LIVER, SIGNAL = 0.41; EST_HUMAN HIT: BF239803.1, EVALUE 2.00e-01; NT HIT: gi13492972, EVALUE 5.30e-01
ccaacccatcttgaggaatgggtttatctgatctattgatttgattgattgatcaccagtcatttccacacagtaggggtttgaggggatgggaaatcaaagaggaaaatgttgatgggagaaagaaagtggaaaaaattgggaacgtgagttactgccaaagccctcaaaatcttatgtatggtgaaaaaggggttgaagatgatggtgatggtagtggtagctagggtgcagcaggatgtaataaggtgagggctgtaaaagtcttctgaaagaaggataagccaaagaaaactcctcatattttatggttttcccatgggatggccttatcaataaagtttgatgataataatggtggtaggcaggtgagtaaacggtaattgtaagctcaggtgggagttacaacaccttttgcccctcatgaaaaggttcttgtgctttttttccctctgtgaagtcagtaaaattgacctattcagggcttttctaactttaacaagtgtgatttagtcacactgttctgaattcttattcctttccatgcatcacacac

SEQ ID NO: 6434 - DNA, 577 bp, Homo sapiens
  MAP TO AC012544.3; EXPRESSED IN PLACENTA, SIGNAL = 0.42; EXPRESSED IN LUNG, SIGNAL = 0.45; EXPRESSED IN ADULT LIVER, SIGNAL = 0.32; EST_HUMAN HIT: AL043096.2, EVALUE 2.10e-01; NT HIT: gi15594346, EVALUE 8.60e+00
taatttctcagagcctcggggccttcaaattaaaaatgaagaaatattctctaaagtgtctaaaattctagagaaatattctctaaagtgtctaaaattctaattaatgtttttgaatttacttattccatgcaaaagtaatttcaatgacttttttataataatagcatctattgccatttcaatataatattactttatttcatatttatttaatcattttaaggtaaaagtacccatcgtaaacacagattcttgttaataagttctacacgctgatttcctccattttcctcttatctaccagttcatacatgattgttttcacagtcaccagcaacattaatttttgttgttgtggaaataaatttttgtcaactagcaaagttagaaaattttaaaggcttaatacttgaatacttcatttaacctcttcatgcctgtgtactaaatcatttggcctaagtgtttcatacaactaagctttgattagagcagttgagttgtttctcaaatagaggaatcagaagcttggggattttaacatcaaagagcatgaacgaatgctggtcctttc

SEQ ID NO: 6435 - DNA, 546 bp, Homo sapiens
  MAP TO AC015943.3; EXPRESSED IN LUNG, SIGNAL = 0.66; EXPRESSED IN ADULT LIVER, SIGNAL = 0.63; SWISSPROT HIT: O43184, EVALUE 2.00e-03
atgtgggcaggagaatgaagtgaacatctgactttgccatagacaccagcaccagacccaccccagtgaagcttaggaccaagccagcctccatagacccaggttccaggcctgccccagtgccaaatagtttcctagttccaatctccaggcccacttctgtgtcttcagaacccaggcctaccattgcaaactcaagctctaggccactccactgccaaaccagctcctgtgccccaggatccaggcccatccccaaggacacaggcctgaccccattgaattatggtccaggcctgccctaccaccagtctggctcctgaagaaccaggatcctggtctgtttccaaagtcagacccaggactaccccaacagccccagaaatccaggcccagacccatagacccaggcaccaggcttgcccacacagacccagactccactcctgctcctgtggacccaggcactaggctagctcctatgaactcaggttcttggcccccgcacctacttagccagttaccagacaagcccacccatagaac

SEQ ID NO: 6436 - DNA, 502 bp, Homo sapiens
  MAP TO AC013371.4; EXPRESSED IN PLACENTA, SIGNAL = 0.41; EXPRESSED IN ADULT LIVER, SIGNAL = 0.34; SWISSPROT HIT: P45930, EVALUE 1.20e+00; EST_HUMAN HIT: AW851034.1, EVALUE 7.00e-01
tccttagatggagagctgcccctgtaggtattgatgaccccccaattctggcttgcgcctgtgtgcttgcagggaaggttctctggggagaaagcaaaagacacctggggagatgctgtcaacagagaggaagtcaaagttcatgcagacctggcctcaataaacacagccaaaaccagagctgtagagcaggtgagacagccctagagtgtgctgcagaggaccttctgcacccctggcaagtgaccatctgacctggtaatgtccagtacggaaccatgccaaaggcaccgcctcaccgaaagggatgattaagcatctttccgaaagaaaaactaacctccacatgttttctgtttctcaggctggcgctaaaaggtttgattgagtaggtaggatggaaggaggtttccaaggttctgcaatagaaatgctgggaaaatagagactttaatttttttctcctgttgtttttagttgtcactgtgtgatttattgctgc

SEQ ID NO: 6437 - DNA, 520 bp, Homo sapiens
  MAP TO CHR22_108.0; EXPRESSED IN PLACENTA, SIGNAL = 0.44; EXPRESSED IN ADULT LIVER, SIGNAL = 0.56; EXPRESSED IN LUNG, SIGNAL = 0.46; SWISSPROT HIT: P53771, EVALUE 1.20e+00; EST_HUMAN HIT: AI024855.1, EVALUE 0.00e+00
caaaacccacaaagattccgttctgttctgtcctcagccaacgcggtggcccacccaccttgggcgaccagagccaagaggttgtttgtctgttttagacactctcgtcgctgtgtttcttctttatcttttaagggctcgagactcaggaaaaccaactcaacgtgcataatttggcaattatttcttgtgttcatcctcacggccgtggctgcatacagatattggaatttgcataaaacaatcttgctaccagtcccacggcttcctgggaagaagacgcccaggtgggggtggggaaggtttcaggtcgcgtccacctgttccccctctgtccccggccacaaagggaaataaaggtaacacatggtgtggagaagggtgctcagccctcggcacccctgcccaagggagagagaaggggtgggacccactggggcctctgtggcaggataaatgccccctggcagcctggaacccttccgattagtattcagcaagcatctcgctcagaaaggat

SEQ ID NO: 6438 - DNA, 552 bp, Homo sapiens
  MAP TO AL136231.3; EXPRESSED IN ADULT LIVER, SIGNAL = 0.58; SWISSPROT HIT: P43005, EVALUE 3.00e-31; EST_HUMAN HIT: BF801448.1, EVALUE 1.00e-122; NT HIT: AF074909.2, EVALUE 0.00e+00
tttactggcggtaatccctgtatcagtgatgacaatgaatgtgacaccatgccccacctgatggtgatgatctgcccaatgcccaagtccaggtcattcaactgtgcaataaacaccgctgccactgcttcatagagcgcagtcccatccatgttgattgttgcaccaacgggtaacacgaatcgagtgatcctcttgtccacctggttattttcttcagcacagcggaaggtgacaggcagtgttgctgaactgtgtgataaaaatagaaaggaacttatgtctagaaatgctggaccttagtccctgcctgaagacatgcctgtcttccaaaaagtaaacaaagggtccttttaggtaatcttgtcgagaaaagtaaagaaaataacaaaacaaaatgaaacaaaggatccaaatcatgctagccctttaggcaggtccaggaatcagaaggtgctgtgcccaccactgctcccagttattccataaccccttcctgagctgcaggtcatgccaagagagcaggaaatatgcaacagcatgaagcaatgt

SEQ ID NO: 6439 - DNA, 581 bp, Homo sapiens
  MAP TO AL136312.1; EXPRESSED IN LUNG, SIGNAL = 0.45; EXPRESSED IN ADULT LIVER, SIGNAL = 0.51; EST_HUMAN HIT: AI276672.1, EVALUE 3.20e+00; NT HIT: AJ229042.1, EVALUE 5.50e-01; SWISSPROT HIT: Q10261, EVALUE 1.90e+00
gtgattaatgatggtcccgcatcagagggttgttgtgggggactgtatgagataatcaatgtaagtccctgtcctagagtatattctcaataagtgttacctgttattattgccatttttattgttattttcattattattagcaaaggaggtcagaaaagccttccctgaagaagtgagcactaggctggatctaagacaagctgaaattaccatagtgagaaagaaagggaaaatatttctagatgaggacacagcaggtgtgtataccctgtggagggtagaaccatagcaaggaggatgaatccagagaaggctgacatacgaaggctgagacaacacaatgcgaggctgcacaggcagacagcatttgatgcctttgtggatgtaaatatttagctcatctctattatttattgtggatgtataaacacacacacaaaatacaatttccatttattgtagagaatctaattttacaacgctatgcaaagcaaatgtagcacaattctactcccgtaatttcagaatggatcatttattcattcatttattcaccatccattcagtcttctgtgggc

SEQ ID NO: 6440 - DNA, 505 bp, Homo sapiens
  MAP TO AJ239319.2; EXPRESSED IN ADULT LIVER, SIGNAL = 0.36; SWISSPROT HIT: P31621, EVALUE 1.80e-01; NT HIT: AB070956.1, EVALUE 1.20e-01; EST_HUMAN HIT: BG571860.1, EVALUE 3.00e-89
gggatcagcttaaggacacgtttattggagtcatgttctaaatccccctgtttttaatgttattacatggtgggatgctgacccgcctttgtcatctaatgatacttcttgggcaggaggccgatggatgcctctgtcttaccccgtaactgaaaatttgggatggattcaacttaattactcctcgattttattgtctagtaatccccctctttgtttttccacaatagcacatgataagtgtgttactctcatccctcaggagtatctttactatcagcctaaaagggatgctaagcttgcaaacttgacctttatttctactattaccactaatcttactgaggtctctaatgaagctacacaagtgcctgatcttcctatatgccgtccgagtagggactggcgataaaagtttgaggccgtccagtggtcgccgtgcagacagcctgctccacgtcaagggcctctgtttgataatggcaccttacttgattggggtccc

SEQ ID NO: 6441 - DNA, 576 bp, Homo sapiens
  MAP TO CHR21_25.0; EXPRESSED IN PLACENTA, SIGNAL =   2; EXPRESSED IN ADULT LIVER, SIGNAL = 6.9; EST_HUMAN HIT: BI014705.1, EVALUE 8.10e-01; SWISSPROT HIT: Q9ZH76, EVALUE 4.20e+00; NT HIT: AL163227.2, EVALUE 0.00e+00
ttctaatggatccagggcacaaaatatagaaatgaaataatttcctcattaaatatgtctccataaaatgtgaaatgcatagtaaagatgaaagttttctttttttcatcgtgactggtttcataaggttcaactttactgaaatgttctactttggctataggcacgttaatgtatgagtgtattaatttctatgcttcataacaaattatcatacacttagtgccttaaaacaacgcacattttgtatttcagtttctgtatgtcggaaacccaactatagcttaattggacctcaccaggctgcaatccaggcattggtcgtggctttagtctcatcagaggctctgctgggatcagagtcaccttcaagctctctctggttgttggcaggatcaatcttcctggatttgtaggactgtgattcccatttccttgacggccatagcctgcaggcctctcttgtctcctttaagtgcctgaagtttttattttttttatttgccacattagccactttatagatcctctcacaaatggaagcatactttcaaatccagcaaaggtgaattttca

SEQ ID NO: 6442 - DNA, 591 bp, Homo sapiens
  MAP TO AC011977.3; EXPRESSED IN PLACENTA, SIGNAL = 0.32; EXPRESSED IN ADULT LIVER, SIGNAL = 0.37; NT HIT: AL163247.2, EVALUE 9.00e-40; EST_HUMAN HIT: BE082575.1, EVALUE 6.00e-54; SWISSPROT HIT: P14873, EVALUE 8.70e-01
gcctccacaagagtaggtgccagtatccacgggtgagagacctgaagatggatcacatcacaggacgctgaagacgctccccagtaccagcccagagcctggtagctctgctgagtggctagatcgagaagagaaataacacacactacagtttggctgtcaggaagcccaatcctaggaaaagggggaaaatactacatcaagggagcacccctgagagacaaaataatctgaacagcagcccttgagtcccagatcttccttctgacacagtctacccaaatgagaaaaaaacagaaaaacaattctggtaacatgataaaacaaagttctttaacaccccttaaaggtcacactagctcaccagcaatggatccaaaccaagatgtaaactctgaattgccagaaaaagaattcagaaggtctattaaaccaaccatggaggcaccagagaaaggtgaagtccaacctaaagaaatgaaaaaaataaaaaaagatacaggatatgaatggaaaaatctccagtgaaatagatatcataaattaaaagaaaagaaaaatcacaactcctggaagtcgaggacgcactta

SEQ ID NO: 6443 - DNA, 529 bp, Homo sapiens
  MAP TO AL137844.2; EXPRESSED IN ADULT LIVER, SIGNAL = 0.33; SWISSPROT HIT: P33937, EVALUE 2.20e+00; NT HIT: AY045905.1, EVALUE 5.00e-04; EST_HUMAN HIT: BF211042.1, EVALUE 1.20e-02
cattcttctgctccccagaggtgatgaagatgatgatgatgacaaaaaacacttactgagctctggaggccaagtcttgtgctatgcaggctgcagatattattttactggcaacttccaacatcccattgaggctgatgttgttatccctttttctagaagagaaaacggaggtagccttgggaagtgatggagttggaatttgaaaccaggtcattccagtccaccagcctgtaccataaaagaggtagacacagggtgccatgttcaggggcaagagcaatgaattgtgcctgcaaaagcttcatgccagagatggcatttacatttggccttgaagggtgagatggggttatgattggtagagttgggagagagggcatcccagtcagaagggatattctgagcaaagaacccaaagagatgacttgtggagcattttgattgagaggctgtaggttcatccggcatgcaggccggggactctgggtgtagaggaacaatgtgaaggaaaccagagatacgcctg

SEQ ID NO: 6444 - DNA, 567 bp, Homo sapiens
  MAP TO AC018691.5; EXPRESSED IN ADULT LIVER, SIGNAL = 0.31; SWISSPROT HIT: P34472, EVALUE 1.40e+00; NT HIT: AE007321.1, EVALUE 1.40e-01; EST_HUMAN HIT: BE296867.1, EVALUE 3.10e+00
ccctgcgatatgtttcttggaatcactggggttaaactattatctcaatgtaattatttatctttcatctcataggtactttttcttcttttttggaagcagaaaataaatacttgtttgtgaattcttttttgggattcaagtgtgtccttggtgtctcttttttccgtagattggaagctccacaaacaccctgagtgccctgaaaactgcttttgctgataaagaaacacaggcaatctaccttctgaccgatgggagacctgatcaggtacttaccagagctgggaacaaagagggcctcactgatgctctgaaagcaaatgctggaaatgggtctgggggaccttttcagctgccaccaaaaatctgtggacatatacttccttggcttagggactcagatctgaggtgagaaaatacactgaaagattcttttgtctctggaaactctgaggagaatttatgagacagtgaatgttgcctggtgagtgtgacacacacccctagcctggagaccagccccacaaaaggagacgtctgctgtccactgaagactggtttgca

SEQ ID NO: 6445 - DNA, 540 bp, Homo sapiens
  MAP TO AC011981.3; EXPRESSED IN PLACENTA, SIGNAL = 0.57; EXPRESSED IN ADULT LIVER, SIGNAL = 0.43; EST_HUMAN HIT: BI255338.1, EVALUE 3.00e-06; NT HIT: AF418272.1, EVALUE 9.00e-06; SWISSPROT HIT: Q03564, EVALUE 3.90e+00
atgcttgaggtgatggcttcaccaattgccctgatttcatcattacacattatatcttgtgtcagaatatcacaagtaccccataaacatgtacatttattatatatctgtaaccaaaaatttaaaaaaataaaaaaatttatgtgcagaaaaaagagataaatggacaatttaattaaggacagagggaaaagaagattcaagcttctacgaatagtatcaagagggttaaatccaaagtgtaatgagaattgggataaaagctaaagaaaaaaaggcttttataaccaggtttgcagtcaagagaacaaagagggatgaggctcagtttatggcagatgatgtcatgatgaaaagaaaaagtaattgggtaaagttccaattcctttttattttttgtatatattatccattcatagtggtaattttcttcaacatactaatagtagaccaaaatggtttcaaggtactagagagatagtgagactgaatctcactactgtaacagagttgatatcttaggtccaaacacattttgtt

SEQ ID NO: 6446 - DNA, 534 bp, Homo sapiens
  MAP TO AL136099.2; EXPRESSED IN LUNG, SIGNAL = 0.48; EXPRESSED IN ADULT LIVER, SIGNAL = 0.38; NT HIT: X66401.1, EVALUE 1.30e-01; SWISSPROT HIT: P16471, EVALUE 2.90e+00; EST_HUMAN HIT: AA531178.1, EVALUE 3.00e+00
tggactggggtctccataaggggccaaggcatgagctgtgcagccgggatgtgcctcgtgccatttcggagtctcggggtcctcacccgcacaacgcggcatttcatctacctgcacaatgtcatggttttttcccggctccagaacctcggggtctgtcactgatcctggagaggcagcactggagtcggtgtctttagccacgagaagctgagtgtgttaaatctagaaattaaggtagtttttggcaaagccaacctctgtttccttaggggctcgtacagaggctgtgttcaatgtctgaggaattcagaagcgagtgtggtggttagttttgtgtcctcttgattgggctgtggtacccagcaactccaatctctacgttgctgtgaaggtattttttaaatgagatgggcacttatcagacgactttgagtaaaacagacctccctccactaagtgggtgcgcctcatccagtcaggtagaggcatggagagagaagactgagggcccctggggaagaagggatccta

SEQ ID NO: 6447 - DNA, 516 bp, Homo sapiens
  MAP TO AC000403.1; EXPRESSED IN ADULT LIVER, SIGNAL =  12; EXPRESSED IN PLACENTA, SIGNAL =  12; EXPRESSED IN BRAIN, SIGNAL =  12; EXPRESSED IN HELA, SIGNAL =  15; EXPRESSED IN HEART, SIGNAL =  13; EXPRESSED IN LUNG, SIGNAL = 7.7; EXPRESSED IN BONE MARROW, SIGNAL = 8.1; EXPRESSED IN FETAL LIVER, SIGNAL = 6.3; NT HIT: gi16163086, EVALUE 7.00e-62; EST_HUMAN HIT: AI174220.1, EVALUE 4.00e-73; SWISSPROT HIT: Q92597, EVALUE 1.70e+00
acgatgtcggggaagagcggtggctccgcggaggacgacgaggagccactgccgcccccgccgccgcccccgttgggtaatccacgtgtgctgtccgccagagccatgacagagaggtggccgggccgggacagtggcaggaagccgcgctgcactcaggagctgcaaccgccttccccggagccccggaacccggacgctcgctcagccctgcgccccgccgccgccgccgccgccaccgccgccaccgccaccgccgccacctcctagagccgcgcggagccgagcggtgcgagcgcgccgctgtgcgcccccttgagttccagtgcgctccgcccgccttgcccgcgcgctccaggcgagtgccgggtcgcggcccgcgcgctgcttaagtagagccgcctgctctggtgccgtggcgcgcaggaggcgtgggcggcggcggagcctcgcttaccgggcgaggggaggtggggagcggggactcgatttgcatcttaaacgcggacgccacgc

SEQ ID NO: 6448 - DNA, 543 bp, Homo sapiens
  MAP TO AL133448.4; EXPRESSED IN ADULT LIVER, SIGNAL = 1.5; EXPRESSED IN PLACENTA, SIGNAL = 1.6; EXPRESSED IN BRAIN, SIGNAL = 1.2; EXPRESSED IN HELA, SIGNAL = 0.89; EXPRESSED IN LUNG, SIGNAL = 2.3; EXPRESSED IN HEART, SIGNAL = 2.7; EXPRESSED IN BONE MARROW, SIGNAL = 2.1; NT HIT: gi14751368, EVALUE 2.00e-87; EST_HUMAN HIT: BI027678.1, EVALUE 0.00e+00; SWISSPROT HIT: O75144, EVALUE 4.50e-01
gcagccagactgtgcggacggcagtgatgagtgggactgctcctatgttctgccccgcaaggtcattacagctgcagtcattggcagcctagtgtgcggcctgctcctggtcatcgccctgggctgcacctgcaagctctatgccattcgcacccaggagtacaggtcagtgggagtggggctggcagtagaagagtagaccctgagggtgaggctgggctgtgcagctacaggagaccacgaaagtgcccaccttggggagaggctcccatgatcagcttgtcagttgtgtcctgtaagggacaggtccagatcctgaaagcagtttcaagggaggagggacctcagatgacctttgggaaagccatggcacagctccagctggcctggcccgggtgtggaagtgggaggactgtccaggctgaggtggtctactctggccgagaactaccagtgactgagcagtcctcattccttctagcatctttgcccccctctcccggatggaggctgagattgtgcagcagcaggcacccccttcct

SEQ ID NO: 6449 - DNA, 529 bp, Homo sapiens
  MAP TO AF168787.1; EXPRESSED IN ADULT LIVER, SIGNAL = 1.4; EXPRESSED IN BRAIN, SIGNAL = 1.2; EXPRESSED IN HELA, SIGNAL = 1.8; EXPRESSED IN BONE MARROW, SIGNAL = 1.3; EXPRESSED IN LUNG, SIGNAL = 1.3; EXPRESSED IN FETAL LIVER, SIGNAL = 1.4; NT HIT: gi13994373, EVALUE 0.00e+00; EST_HUMAN HIT: AL530642.1, EVALUE 0.00e+00; SWISSPROT HIT: P40603, EVALUE 1.00e-02
agcccggacctcagcgtgtgcggccagcccagggacggcgacgagctgggcatcagtgcctccctgttcagctctctggcctcgccctgccccgggtccccaacgccaagggacagtgtcatctcgatcggcacctccgcctgtctggttgcagcctcagccgtcccgagcgacctccacctcccagaagtctccctggaccgagcatctctcccctgctcccaggaggaagcgacaggaggagccaaggacaccaggatggtccaccaaacccgcgccagcctcaggtcagttctctttggccttatgaactcaggaacccctgaggattctgagtttcgggcagatgggaagaatatgagagagtcctgctgtaaaaggaaactggtggtgggaaatggaccagagggtccaggtctgtcaagcacaggcaagaggagggccacaggccaggactcttgtcaagagagagggcttcaagaggccgtccggagagagcatcaggaggccagtgttcccaagggccgca

SEQ ID NO: 6450 - DNA, 542 bp, Homo sapiens
  MAP TO AC002395.1; EXPRESSED IN ADULT LIVER, SIGNAL = 3.4; EXPRESSED IN PLACENTA, SIGNAL =   5; EXPRESSED IN BRAIN, SIGNAL = 2.7; EXPRESSED IN HELA, SIGNAL = 2.8; EXPRESSED IN LUNG, SIGNAL = 3.7; EXPRESSED IN HEART, SIGNAL = 3.3; EXPRESSED IN BONE MARROW, SIGNAL =   3; EST_HUMAN HIT: AI356529.1, EVALUE 0.00e+00; SWISSPROT HIT: Q9UQQ2, EVALUE 2.00e-50; NT HIT: gi14767620, EVALUE 0.00e+00
aggctgcggcgaaagtgctggaaggagcagggcccgggcggccgcggcggggccagctcctcagagctgcgggccttgggcaggccaggggcggcggggccggggcctggctccggggacgcctcggccttggctgggggcccacggcctgtgtcccggtagtcgcggcccggcgcccgtccgtcgcgcacctcgcggcagaagtagcgctggaagaggtcggtgaactgcagcgacaccagctcggcgcgcagcggcgcgtgctgcggatgctcccgggcgaacagccagtactggcgggccagctcccgggccgccgctacggcgtgcaactcacagaactcgctccagccccgcggggccgccgccggggaggctgagggcgcggaagagggcgaggagggctgcagggcaggcccgttcatggcggagacccaggtggtgcggccgggctgaaagacacgtgggtgggggggcgacaaggagtaagcaggtgggcaagcaggtgtaggccccattacacaccgggcaccacagcagaa

SEQ ID NO: 6451 - DNA, 512 bp, Homo sapiens
  MAP TO AL031658.11; EXPRESSED IN HELA, SIGNAL = 1.6; EXPRESSED IN ADULT LIVER, SIGNAL = 2.2; EXPRESSED IN PLACENTA, SIGNAL = 2.4; EXPRESSED IN BRAIN, SIGNAL = 2.5; EXPRESSED IN LUNG, SIGNAL = 2.2; EXPRESSED IN BONE MARROW, SIGNAL = 2.4; EXPRESSED IN FETAL LIVER, SIGNAL = 1.8; EST_HUMAN HIT: BI002251.1, EVALUE 6.00e-29; SWISSPROT HIT: O95104, EVALUE 9.40e-01
ccctgcccatcagtcctggctctcccatctgcctcccagccccaccctgttcactctgtagggatctgcagaccctggcccgcattgagactagggagctagccagcatgagggtggttcctggatggagaggcagcgggggagccactggaagctgctgtgtgtttggcccagaactgtgagggggagtggggaggggcgagaacacacactcggaaatgctgagaccgacagatggaggagctgaggatgtgagagacacagacagacagagagagacccagagtcagggagaggaggagcaggcaggggaggatggccagaaaactggcagtcacaccaagccacgagctgagcaacaaatcagcagatggaccaagcagtcgagggactaaaagacacagacagacagaccaccaagtggacctagcatccaagacacagacagaccaccgaacagatccagtatccaaagcacagacagacagaccaccaagcagacccagcatcca

SEQ ID NO: 6452 - DNA, 507 bp, Homo sapiens
  MAP TO U66059.1; EXPRESSED IN FETAL LIVER, SIGNAL = 1.6; EXPRESSED IN LUNG, SIGNAL = 1.4; EXPRESSED IN HEART, SIGNAL = 1.7; EXPRESSED IN HELA, SIGNAL = 0.64; EXPRESSED IN ADULT LIVER, SIGNAL = 1.6; EXPRESSED IN BRAIN, SIGNAL = 1.4; NT HIT: U66060.1, EVALUE 0.00e+00; EST_HUMAN HIT: BI912376.1, EVALUE 0.00e+00; SWISSPROT HIT: P04213, EVALUE 1.00e-18
gggcccaggcagggagaatgtctcagaatgacttccttgagagtcctgctcccctttcatcaatgcacagatacagaagacccctccgtcatgcagcatctgccatgagcatcggcctcctgtgctgtgcagccttgtctctcctgtgggcaggtgggtcctgggcagagccccttgtgtgaatttcaaggcccagcgccttcccattggggctgcagcatcagctttgttctccttctctgcaggtccagtgaatgctggtgtcactcagaccccaaaattccaggtcctgaagacaggacagagcatgacactgcagtgtgcccaggatatgaaccatgaatacatgtcctggtatcgacaagacccaggcatggggctgaggctgattcattactcagttggtgctggtatcactgaccaaggagaagtccccaatggctacaatgtctccagatcaaccacagaggatttcccgctcaggctgctgtcggctgctccctccca

SEQ ID NO: 6453 - DNA, 585 bp, Homo sapiens
  MAP TO AC004493.1; EXPRESSED IN LUNG, SIGNAL = 6.2; EXPRESSED IN FETAL LIVER, SIGNAL = 2.6; EXPRESSED IN ADULT LIVER, SIGNAL = 3.3; EXPRESSED IN PLACENTA, SIGNAL = 6.5; EXPRESSED IN HELA, SIGNAL = 6.8; NT HIT: gi14777924, EVALUE 0.00e+00; EST_HUMAN HIT: BI011647.1, EVALUE 0.00e+00; SWISSPROT HIT: P24712, EVALUE 2.90e-01
ggatccagagcgactgcgcctgggtggtgtctgtgacttttgcttagggcatggggaagaccctgaaaggctgcgcctcaaagacaagcgagattttgctttggaccgtggtgaagagagagacctgctccgccttgaagaaatgcgagatttcttcatttctgggcttgaattggacctgcttcttctttgagatgttctggatttgtttttccgctctgaagatgagccagatctgcctcttctttgaggtgttctagagtgagatcttccacgtctaactaagcttctactgcgggatcttcctcgtcttggtgtcctagaccgagacctccctctcctggctggtgttctggagcgtgagcgaccactgcgtctagctggggttctagagcgtgagcggccacgtctggctggggttctggagcgtgagcggccacgtctagctggggttctagagcgtgacctgccacttctcctggctggtgatctactacgagacctgcgtcgtactggtgatcgggtcctagatctgcgcctagcaggtgttctagaccgagacctgcccctccgggctggtgttct

SEQ ID NO: 6454 - DNA, 576 bp, Homo sapiens
  MAP TO AP000534.1; EXPRESSED IN LUNG, SIGNAL = 4.5; EXPRESSED IN HEART, SIGNAL =   4; EXPRESSED IN BONE MARROW, SIGNAL = 5.3; EXPRESSED IN FETAL LIVER, SIGNAL = 3.2; EXPRESSED IN PLACENTA, SIGNAL = 3.4; EXPRESSED IN ADULT LIVER, SIGNAL = 5.4; EXPRESSED IN BRAIN, SIGNAL = 5.1; EXPRESSED IN HELA, SIGNAL = 4.5; NT HIT: gi15893298, EVALUE 5.50e-01; SWISSPROT HIT: O95006, EVALUE 4.00e-05
cgccggtcacaccacaggacaaaagcaatggctccattccctgttatagtcagtgcatatgttgtagtaaagagtgagaagaggaagatctgaattgtccactcacaagagaaaccttggagtataaattcatttacaaaagcaaagctggaatttggctcagagacattcattaggccagtgacctgcaaggtcaagggacacattatcagtcaggactcttttataaaatgtgttccttttttaagaatgaagagaagataatgaacatgaagtcatttttcaaaagaataattaggaagagaatgtagtttactttttctcggctatacagtatatgagttttgggcttcgtaggtagctgattgaacaaaaacaaacttctgccatcttctaaatctctccttaatatgcaatcgtgatagaactaggtaaagttaaattccttttgtaaggtcattattttgagacagaaatgattgaatatagtttctggatagcatacaactcaaagttagtactttgagaaggcacaaatgtgttagtttcttactgcaaacccaacttatggtgcaa

SEQ ID NO: 6455 - DNA, 551 bp, Homo sapiens
  MAP TO AL121889.3; EXPRESSED IN PLACENTA, SIGNAL = 2.8; EXPRESSED IN ADULT LIVER, SIGNAL = 3.2; EXPRESSED IN HELA, SIGNAL = 7.4; EXPRESSED IN LUNG, SIGNAL = 2.9; SWISSPROT HIT: P23960, EVALUE 3.00e-03; NT HIT: gi14770824, EVALUE 1.00e-121; EST_HUMAN HIT: AA280050.1, EVALUE 1.00e-121
tgggaggactgcctgagccgaggagttcaagaccagcctgagcaacatagcaagaccccgtctcaaaacaaacaaacaaacaaaaaaaccctctgaggctgagcatttagtgtgtttgttaaacagttggcctttttacttttatggtaacacacataaatgttatatatgtgttaaggctagttaaatacatgcaaatggtaggtatgatatcaccaaatttgtgacccttatgtggtaagatacctgtactatattattcagatggacagtgagtaaaacaaaattgctcatccttaccagctgctgtttgtttctttttaatctttaagttttacatggacggatggcaaattaaacagcagtaacttggtaattctgtctggccaagtggttgaacactttgatctggagttccgaatcctgtatgcccagtccaagcccatcagccccaaactcctgtctcacttccagagcagcaacaagtttgatcacctcaccaaccgaaaaccacagtccaaggagctcaccctgggcaacctgctgcggat

SEQ ID NO: 6456 - DNA, 502 bp, Homo sapiens
  MAP TO AC025745.1; EXPRESSED IN ADULT LIVER, SIGNAL = 1.9; EXPRESSED IN BONE MARROW, SIGNAL = 1.6; EXPRESSED IN FETAL LIVER, SIGNAL = 1.7; EXPRESSED IN LUNG, SIGNAL = 1.4; EXPRESSED IN HELA, SIGNAL = 3.3; EXPRESSED IN BRAIN, SIGNAL = 1.5; EST_HUMAN HIT: AU140589.1, EVALUE 1.00e-60; SWISSPROT HIT: P21414, EVALUE 4.00e-11; NT HIT: D13171.1, EVALUE 4.80e-01
tccctcgcactcccacagctcctcgacctggccactgaagactgacatggcccaggacaccaaacccctcctccatcatggcatcagagcccagggtaattctactagtagcaggtaagcctatctcttttttaatcaatactggggccacctatttagctttacctgaatttgcaggaccaactcatccctctcaggtctcagttgtgggagctgatggacttgtctccaatccgtgtgccactggacccctgtctttttccctgtttaataccattttctcacactctttccttatcacacttatcatgcctcgctgccttacccccattctaggccaagatcttttagccaaatttaaggcttctatcaccttttcctgcctccctcaaccagagtccctcctgctcctttccatcagtccaaacccgacccctctccccagtacccacttcccacctcactcattaacccagtggtgtgggacaccacacccccatcc

SEQ ID NO: 6457 - DNA, 500 bp, Homo sapiens
  MAP TO AC004841.2; EXPRESSED IN PLACENTA, SIGNAL =   6; EXPRESSED IN ADULT LIVER, SIGNAL = 4.9; EXPRESSED IN HELA, SIGNAL =  22; EXPRESSED IN LUNG, SIGNAL = 8.5; EXPRESSED IN HEART, SIGNAL = 6.4; NT HIT: gi16177082, EVALUE 0.00e+00; EST_HUMAN HIT: BG396144.1, EVALUE 0.00e+00; SWISSPROT HIT: P97351, EVALUE 2.00e-80
ttccggatttggcggacctgttggtgctgagcataagaggtcttccgtatctgattgttgcgttttttagtaaaaccaacacagaacagacgaagcaagtaaccatcggtagtcttgacatcaacgtgagcttcaatcattgtctgccattttttgaccatggaacacattttgtcacgggtaagatccatgccatggaagttaggcagtttttaccctgaacatcttcagtaatcagcctgaattttctaaatgcaacttcatcattctgcaaatcagcaagactcacttcaaacacacgacccttgagaccatcagatgcaattttggttccttgggtcctggtgacgagcgtctttccaatatttcttatactgaacatagcaggtgctttcacatcataccaatctttcttagaaaatggatcaaccactttcttcttggctccctttttgccgcctttcgtaaggcgcttgttcttgccaaccgccatggtgctg

SEQ ID NO: 6458 - DNA, 526 bp, Homo sapiens
  MAP TO AC007981.31; EXPRESSED IN LUNG, SIGNAL = 1.1; EXPRESSED IN FETAL LIVER, SIGNAL = 1.5; EXPRESSED IN ADULT LIVER, SIGNAL = 1.2; EXPRESSED IN HELA, SIGNAL = 1.2; EST_HUMAN HIT: BI829297.1, EVALUE 0.00e+00; SWISSPROT HIT: Q91684, EVALUE 1.30e+00
cgctgtatatggcatcgctaatgaggatgctgtatacgaattcgctaataagcacgctgtatatgacattgctaatgaggacactgtacaagacatctgtaaaaaagaagatgctgccaatgtaagacacttttctttgtcttgaacagaaatgttactttcctggcttctttccaatcagatgtagacatgaacatctgccagtgtgcattatcgatgtcatctgcagtttaatcaaatgtagacatgaacatctgccaaggtggactatttatgacatctgcaattcccttggcgtggtgctattgattggcagcctctcaccaacccatgccaggcacactggggtgtggtagatggcagcatccacgatccactgcaatgcagaggtgtttccctccacagcagttttcccccatggattaagagttgtgaaactgccaatctagatacactttaaagataaattctgtgggaaaaggtcttgtcttttccacaggtgtcttccgtgccagttttgggggac

SEQ ID NO: 6459 - DNA, 502 bp, Homo sapiens
  MAP TO AP001731.1; EXPRESSED IN ADULT LIVER, SIGNAL = 1.5; EXPRESSED IN BONE MARROW, SIGNAL = 1.1; EXPRESSED IN HEART, SIGNAL =   2; EXPRESSED IN HELA, SIGNAL =   1; EST_HUMAN HIT: BF446115.1, EVALUE 1.00e-103; SWISSPROT HIT: P46804, EVALUE 1.60e+00; NT HIT: gi14773269, EVALUE 1.00e-101
ccctttgggacacagcagggcccagtgagtgtgttcagctataaatatgggcatcctaaagatccatcgcaatggtatgtccttctgttaattgcaaagacaaagggaacacacaagctaaaaacaacaacaagaacaacagtaacaataacgatagaaagcaaaacagcctaattctgtcctctaggctggagactgtaattttttccccaccgtaggatactgttaagtttattctagggtgagtgggtgcccaagggaggcagtgagtatggctgaagtcacctggtggcagggtgctcagggatggccacaagttctacacggccctgcaggacctgagtctttagtcagttgggaagctctaccttctgccccagcccaagagggttggggcagtcacggatgtagcagttttcgtaattcacagggatccatgatgagcattgagcaggcttgattctcacacacatacgcagtggcctggtcttcctgccttcgg

SEQ ID NO: 6460 - DNA, 547 bp, Homo sapiens
  MAP TO AC018554.4; EXPRESSED IN HELA, SIGNAL = 1.6; EXPRESSED IN ADULT LIVER, SIGNAL =   2; EXPRESSED IN PLACENTA, SIGNAL = 1.8; EXPRESSED IN BRAIN, SIGNAL =   2; EXPRESSED IN LUNG, SIGNAL = 2.2; EXPRESSED IN HEART, SIGNAL =   2; EXPRESSED IN BONE MARROW, SIGNAL = 2.5; NT HIT: AE002066.1, EVALUE 1.30e-01; EST_HUMAN HIT: BF873770.1, EVALUE 2.00e-60; SWISSPROT HIT: P21978, EVALUE 1.20e-01
ggggcaccatcccacctgtctggaaaagaaggcccaagatgtcgctgacggttgaagagtgggaaatggccccagattccccgggcaggcacaggtgcaggagccgcggggtgagcccggccagctgggaaggcctcacggacaagacgagcaggtggccgatggcatggccaggacctgcggcggaaccaggaacaaaatacgcttagtgagttgcccattttgagcgagttgtgcacagacgaaagtaagggtgagaagcggagaggatactcctaagtcacccacttctctgtggccgggtgcacactgggcatctgggagtttatgacatcacaatggggctggtgacagagctagggtgtggaggagtgcttaggagcccagcgagggtgcctacaagaggagtcaaagggcaaagggtgagacccttccaccggttcccctggactctagcctcagggacgtcctgctcctgggggcaggtgtgtggccctggatgggccccctgtggggctgttgggggtgcggggctgatctgccagag

SEQ ID NO: 6461 - DNA, 569 bp, Homo sapiens
  MAP TO AC022374.1; EXPRESSED IN HELA, SIGNAL = 1.4; EXPRESSED IN ADULT LIVER, SIGNAL = 1.7; EXPRESSED IN PLACENTA, SIGNAL =   2; EXPRESSED IN LUNG, SIGNAL = 1.7; EXPRESSED IN FETAL LIVER, SIGNAL = 1.7; SWISSPROT HIT: P29579, EVALUE 1.90e+00; NT HIT: AL163303.2, EVALUE 3.00e-30; EST_HUMAN HIT: AA608733.1, EVALUE 3.00e-71
tggatggggagttgctttttacggatgagcaaagagagtggtttcttgaaatggaatctactggtgaaaaagctgtgaacattgttgaaattatcacaaaggatttagaatattacataaacttacttgataaagcagggtttgagaagatagtttccaattttgaaagaagttctactgtgggtaaaatgctatcaaacagcatcacgtgctacagagaaatcttttgtgaaagaagagtcaattgatgtgccaaacgtcattgttgccttatttctagtaattgccacagccacctcaaccttcaggaaccaccaccctgattagtcagcagccatcaacatggagacaagaccctccaccccaaaaagattacaacttgctgaaagctcagataatcattaacatttttagcaacattttaaaattaaagtatatacattttttagacataattctattgcaccttaatagactacagtataatgtaaacataacttttatatacactgggaaccaaaatattcatgtgactcgctttatttcagtggtctggaacagaacccaca

SEQ ID NO: 6462 - DNA, 522 bp, Homo sapiens
  MAP TO AL161668.1; EXPRESSED IN ADULT LIVER, SIGNAL = 2.5; EXPRESSED IN HELA, SIGNAL =   5; EXPRESSED IN BONE MARROW, SIGNAL = 2.7; EXPRESSED IN HEART, SIGNAL = 3.8; EXPRESSED IN FETAL LIVER, SIGNAL = 2.7; EST_HUMAN HIT: AI829676.1, EVALUE 4.00e-67; SWISSPROT HIT: Q9P2Y4, EVALUE 1.00e-10; NT HIT: gi14751677, EVALUE 3.00e-67
gacaatccttgccggtggcgccccggcccccttcaggccgggtccctccaaccaacagcccattctcttctgcaacacatacgttaagaggaagtcaggggggcccacaccctgtccaggtgccgcgcacccaccccacacccatcccatagggctgcttcccctcggggtccaggaggaaacaaagtctgaggggttagatttgttgtgactaaagagttaagtgttctcaaatgatggcaaagcctccaggaaaacaaaacaaaacaaaacaaaaaaactcaggagaaattaaacgtaagttcttttaacaaggaagctacgagggagtggcggcgtaagagtcagaggaggacgcggcgtacccggagagcggagggtacctacataccctgcgtggcggtcgatcttgcctgggccccagcagcagaggcagagtgccccggtccctcacccgggcgcgggtgcagggaagccagagagcccagcgacctgccccgggcccaggtttcctcctcggcc

SEQ ID NO: 6463 - DNA, 572 bp, Homo sapiens
  MAP TO AC008283.3; EXPRESSED IN PLACENTA, SIGNAL = 1.8; EXPRESSED IN HELA, SIGNAL = 4.3; EXPRESSED IN BONE MARROW, SIGNAL = 1.8; EXPRESSED IN LUNG, SIGNAL = 1.7; EXPRESSED IN HEART, SIGNAL = 1.6; EXPRESSED IN FETAL LIVER, SIGNAL = 1.2; EXPRESSED IN ADULT LIVER, SIGNAL = 1.8; EST_HUMAN HIT: AI860902.1, EVALUE 2.00e-01; SWISSPROT HIT: P24819, EVALUE 5.50e+00; NT HIT: gi14753438, EVALUE 8.50e+00
gggcatccaggacattgggcttgcagctgctagatggagggaggaagtgtggagaaagcagtctcaagtcctaaaagtctcaggctggaagtgacacatattactttcactcattctctattggtatgaacttgtcatatggtcctacagagacaaaaaggtgggagaaatgtagtccctggctagggagtcttatttaaaagaaaatttcccaatggaatgggaagacagaactttggtggacagctagcaaccttggtcacaggtacaaatggacaatttaaaaatgagtaatatccagtacctatttgaacatcaaattttctgtactcagcaatgtcttcaagtaatccaccacagagatgacggagatgaggataagctaaatttagaatctaacaaataaataaaacataccagtattaagaattatttctagactaaattttaggactgaagtggcttgcacaagaaatttactgatgaaaagaacaacaactagaagtcatctgggcattgttgttgatgttgtgttactaacgaaaccacaaacctgatctgcggcaatgctg

SEQ ID NO: 6464 - DNA, 514 bp, Homo sapiens
  MAP TO AC004821.2; EXPRESSED IN PLACENTA, SIGNAL =   2; EXPRESSED IN HELA, SIGNAL = 4.5; EXPRESSED IN ADULT LIVER, SIGNAL = 1.3; EXPRESSED IN BRAIN, SIGNAL = 1.5; EXPRESSED IN HEART, SIGNAL = 3.9; EXPRESSED IN BONE MARROW, SIGNAL = 1.4; EXPRESSED IN LUNG, SIGNAL = 7.3; EST_HUMAN HIT: BF935654.1, EVALUE 1.00e-122; SWISSPROT HIT: P18146, EVALUE 3.00e-19; NT HIT: AJ243425.1, EVALUE 0.00e+00
tgccactgttgggtgcaggctccagggaaaagcggccagtataggtgatggggggcagtcgagtggtttggctggggtaactggtctccaccagcaccttctcgttgttcagagagatgtcaggaaaagactctggcaggagagagagaagcgggaggcctggttactggaaagcaatcactggaggacgaggacgacccgagctgccaggcaagagaccgggccggctaccattgactcccgaggtagttaataattgatagcagcacattgcaatgttcctggacccgcaccagtggcagagcccatttcaacaacagctgacgcaaatacggagaatccccctccactgcagctcgcagcgctccgcagcggcggctgtgcgggcgagggattcccgccagcacccccatggccgcggctagtgcgcgcccccaaacccgggctgccgggacatccacggccaaggatcacggtccttccttggggacaggcggcaagcaaggcaaggcaa

SEQ ID NO: 6465 - DNA, 503 bp, Homo sapiens
  MAP TO AC000357.1; EXPRESSED IN ADULT LIVER, SIGNAL = 1.5; EXPRESSED IN PLACENTA, SIGNAL = 1.9; EXPRESSED IN HELA, SIGNAL = 1.5; EXPRESSED IN BRAIN, SIGNAL = 1.6; EXPRESSED IN HEART, SIGNAL = 1.8; EXPRESSED IN BONE MARROW, SIGNAL = 1.4; EXPRESSED IN LUNG, SIGNAL = 1.6; NT HIT: gi16177842, EVALUE 0.00e+00; EST_HUMAN HIT: BE276093.1, EVALUE 0.00e+00; SWISSPROT HIT: Q00417, EVALUE 4.10e-01
gcccacatctgcctcgtgggataccgacagcaccttgatgctggcctctaatgcctctttctccttcagcaggcttttataggcacggaccacatccttgagccgtgcctggtactggagaagctgcttcttctgggtctctatagtctccagcaagtccttcttgctcgggccgcccccgaaattcatcccaaacttctccatggagggtctgaacggattgccccacgtcagctttccagcagaacgggagagggccgtgaagacgcaggcgggggcttaaagaaacagcgagcgggctgtccggcggcgggccgcacacctactccacctagttatcccggacctaatgcggaacggccggacggactggcgaaagcggccgcccggtcccaggcccggagggctggggcggattctaccccggaggcggggcgacactggcaccagaggtgcgcactgccagggctcgttagcgctggcccagaagccgctccgcactc

SEQ ID NO: 6466 - DNA, 508 bp, Homo sapiens
  MAP TO Z97183.1; EXPRESSED IN BRAIN, SIGNAL =   1; EXPRESSED IN HELA, SIGNAL = 1.2; EXPRESSED IN ADULT LIVER, SIGNAL = 1.2; EXPRESSED IN BONE MARROW, SIGNAL = 0.93; NT HIT: gi11417515, EVALUE 1.00e-124; EST_HUMAN HIT: BG820461.1, EVALUE 0.00e+00; SWISSPROT HIT: Q60821, EVALUE 6.00e-05
tttgctggcgctgccacttgctgtgtgaccttggataatctcttaatctttctgagctttagtttcctcatctgtcaaatggggttgagaggaatacctacctcactgttgtggggagttacacagataatgagcgtgaacatatttttgagttgtaacgggctgtgtcgttatgagatgttatcattattcttttctctttttcttcccagagacccccccggccgccctcctcctttctttgttcctgtggctgggggggtatcccctccctccacaacatggagccatctcctctgtctcccagtggggcagcacttcccctgccgctgtcgctggctccgcccccactacccctgccagcagctgcagtggtacatgtgtccttccctgaggtgaccagtgccctcttggagtccctcaatcagcagcgtctgcagggccagctctgcgatgtatctatcagagtgcagggccgggagttccgggctcatcgggctgtcctggc

SEQ ID NO: 6467 - DNA, 505 bp, Homo sapiens
  MAP TO AF260011.1; EXPRESSED IN PLACENTA, SIGNAL = 2.3; EXPRESSED IN HELA, SIGNAL = 1.4; EXPRESSED IN ADULT LIVER, SIGNAL = 2.2; EXPRESSED IN BRAIN, SIGNAL = 2.2; EXPRESSED IN LUNG, SIGNAL = 2.4; EXPRESSED IN HEART, SIGNAL = 2.7; EXPRESSED IN BONE MARROW, SIGNAL = 2.6; NT HIT: AL163248.2, EVALUE 0.00e+00; EST_HUMAN HIT: BG819101.1, EVALUE 6.00e-57; SWISSPROT HIT: O94822, EVALUE 3.00e-15
tccgtgtctgctttggcttcccaggaacttagagtttctgctaaatggttaaatagctgcccatgttgcaatcctgggtctttgagaactgcatcaataaaagggatcaactgaaagaaaaggtagaatatcataaaatatatatttggtcttcaacccccatctcctggcacacaactctaaaatccttggaatctccaaagtgatatcatttcataagctaatgggttgattgatggctggcagcacctgtatagcaggatgggggctgatcaccagaaagaccaaggcaggattaaagggctagaactttcaatacctccccaacctccagggatagaaaggtagctaaaggttaagctgatcaccagtggcaattacttaatcattcatgcctagtaatgaagcctccataaaaacgcaagaaagacagcattcagggagctttcagatagctgaacatgtggaggttcctggagagtagcgcacccagggagggagtgga

SEQ ID NO: 6468 - DNA, 501 bp, Homo sapiens
  MAP TO AC003665.1; EXPRESSED IN LUNG, SIGNAL =   5; EXPRESSED IN HEART, SIGNAL = 6.6; EXPRESSED IN BONE MARROW, SIGNAL =   7; EXPRESSED IN FETAL LIVER, SIGNAL = 7.2; EXPRESSED IN PLACENTA, SIGNAL = 8.5; EXPRESSED IN ADULT LIVER, SIGNAL = 5.3; EXPRESSED IN BRAIN, SIGNAL = 6.2; EXPRESSED IN HELA, SIGNAL = 7.3; EST_HUMAN HIT: BF209212.1, EVALUE 7.00e-01; SWISSPROT HIT: P24184, EVALUE 4.60e+00
gggggaaaatgccactgccccttgtgttggcctgggcagctggggtggggatggttctagcactgtgctgtaggtgtatctgacctaccatcctgggagtggcccaactctagggatgagctgggtcatacggcagggatcacccagaggaaggtagacctccatcatcctctgtgcttggatgagaacctcacatcttggacccttcctcgcactcccgaattctctaaactcatctctagtcctcgttcagaggtgcatccttcttttacacctggggccagagaggaggacctgggttaggagggaaagtgagctggttatttcccttacttttctgcttcttcgcctcctttaggtcccgtctgaggtgcccctgaccgtccctgccctcaccccaccccggatcccggcaatgctaaccgctgtctgcggctctctgggcagccagcacacggaagcgccgcacgcctccccgccgcgcctcgacctgcagcctct

SEQ ID NO: 6469 - DNA, 538 bp, Homo sapiens
  MAP TO AJ132410.1; EXPRESSED IN LUNG, SIGNAL = 1.6; EXPRESSED IN BONE MARROW, SIGNAL = 1.3; EXPRESSED IN ADULT LIVER, SIGNAL = 1.4; EXPRESSED IN HELA, SIGNAL =   2; EXPRESSED IN BRAIN, SIGNAL = 1.3; EST_HUMAN HIT: BF125511.1, EVALUE 2.00e-84; SWISSPROT HIT: Q99558, EVALUE 9.90e-01; NT HIT: gi7657306, EVALUE 1.00e-84
tgctcctggacagccccagctcccctagggtaaggctgccctgccagcccctcgtcccaggtcctgagctgagaccctctgctgctgagttgaaattagaagccctcacccaacgtctggagcgagagatggatgctcacccgaaggctgattactttggtgagtgagaggctggtggagttgcctatggtggggcgatggggttcttgagattggggaacatgccccctaccagggatgctgtgggctgtagttacctctctttgagtggcctgtttttttatttttttgttttgggcttcctctttcagctgctttttctgattcagaaacttgaaagcatcctggggcagaaagcggaccttgcagctggggttacccatgtgtgaagggtgcagcagggtgggattgctcatgactgctctcagaaaagagaaatgctgtgactttggatttcaagggttttgggtgtgactttagagcctcttgcagtgacaggctcatataggacttcagtgggaccagctttctcaggggc

SEQ ID NO: 6470 - DNA, 514 bp, Homo sapiens
  MAP TO AL121917.12; EXPRESSED IN LUNG, SIGNAL = 1.1; EXPRESSED IN HEART, SIGNAL = 1.2; EXPRESSED IN BONE MARROW, SIGNAL = 1.3; EXPRESSED IN FETAL LIVER, SIGNAL = 1.3; EXPRESSED IN ADULT LIVER, SIGNAL = 1.3; EXPRESSED IN HELA, SIGNAL = 0.97; EST_HUMAN HIT: AA035219.1, EVALUE 1.00e-42; SWISSPROT HIT: P38406, EVALUE 1.10e-01; NT HIT: AJ224868.1, EVALUE 0.00e+00
ttccccaatgaccccagcccaccgtggaccccaccagcctagccaggggagtcccggggccccggggcccctccccggcagttcctggctcacctgaagcccctgcctgtccagcttacggttgctggcgctggcctgtccagccggaaacgaccctcagtgtcgctcggcaccacttttctccctggagggcatatacttcggccacccgaatccaccaaagatcccctcccgctcccagggcagttagggtccctccctggaactttctagcaagttcttcccgcctttggctggaccccctcctcccactgcggagcccctagccccaccaggcagccctgccaccccctccccggttccccggcggccctgctgcccgcaggcagagtccgccgcattacctagaagcagcaggcggtgcgtacacatgtagcccatcttttcgtcctggagttgtttgtcgatgagcttactgcgtttcttctctgcgcgcttctgggcccgcttctcc

SEQ ID NO: 6471 - DNA, 508 bp, Homo sapiens
  MAP TO AL162390.2; EXPRESSED IN FETAL LIVER, SIGNAL = 3.3; EXPRESSED IN HEART, SIGNAL = 5.3; EXPRESSED IN LUNG, SIGNAL = 5.4; EXPRESSED IN ADULT LIVER, SIGNAL = 2.4; EXPRESSED IN PLACENTA, SIGNAL = 2.1; EXPRESSED IN HELA, SIGNAL = 2.4; EST_HUMAN HIT: BE221769.1, EVALUE 2.00e-96; NT HIT: gi13641684, EVALUE 2.00e-96
ccagacactgggcagccacgaagtccatgtaggcggccgcggacatggtgcgggcgacggcagcccaggcggcgcggacaaacttggcggtggctgcggaggttcggctcgccctgccctggcctcggacgacgagcgcggcgcggcgcggcacggcgcggcggccaagggggcgggggcgcggggcgcttccgactcgcaggagcgccgaggcgacctcagcccctcatctttacgtaaccggcagcgcctccgcacgcagcatccacggccccgggctccgccgcgccgccgcctctagccgccgcccctgccccgcgccggccgcgatcccccgacgggcgcgccggcccctctgagccggctcccttggaaagatgccacacgtggcggtcgcaagtttattcgactgaaaacgcccccgaggcgctgggagaggaaactgcaagagaggtgcacgccctcggccgcctcgccgtcgagccaaagccccaggacattcacccga

SEQ ID NO: 6472 - DNA, 529 bp, Homo sapiens
  MAP TO AL121917.12; EXPRESSED IN HELA, SIGNAL = 1.7; EXPRESSED IN ADULT LIVER, SIGNAL = 1.8; EXPRESSED IN PLACENTA, SIGNAL = 1.8; EXPRESSED IN BRAIN, SIGNAL = 1.4; EXPRESSED IN HEART, SIGNAL = 1.4; EXPRESSED IN BONE MARROW, SIGNAL = 1.6; EXPRESSED IN LUNG, SIGNAL = 1.7; NT HIT: gi14786491, EVALUE 0.00e+00; EST_HUMAN HIT: BI599049.1, EVALUE 0.00e+00; SWISSPROT HIT: Q14112, EVALUE 1.30e+00
aggaagctccggcgctgttgggcagccgcgcgctgctgggcacgggcgttggaggtggcaagggcgcggaggagcgcgatggagcaggagagccagaggagcgcggtggctgcccggcggcctatgggcgggcacaggtcgttgtaattatggcgagctcggcgccactgctgagcccgggacctccgatccatcctcttaggcacacaccgagaagccggcctgccctctggctctgcagagagtggctccgaagcacattggctgctggagccgggaaaggtacaccctatgaggtgagaagctggcccggaggtcccagcctcacctccttgtgaggagaaaaagggaagcacctaccttcctgaccacttaagaactttctaaagctccgcgccttgcttgcctctctgagcaagaagaagggatgggaaaaaaggggaaagttctgtctcctcccgggctcctctcgctgagtcttagattccgcagcctaagactcgagagaggtgcctccgccggtcctctt

SEQ ID NO: 6473 - DNA, 515 bp, Homo sapiens
  MAP TO AH005332.1; EXPRESSED IN ADULT LIVER, SIGNAL = 3.5; EXPRESSED IN BRAIN, SIGNAL = 3.9; EXPRESSED IN PLACENTA, SIGNAL = 5.8; EXPRESSED IN LUNG, SIGNAL = 5.2; EXPRESSED IN HEART, SIGNAL = 4.2; EXPRESSED IN BONE MARROW, SIGNAL = 3.5; EXPRESSED IN FETAL LIVER, SIGNAL = 3.3; NT HIT: U07563.1, EVALUE 0.00e+00; EST_HUMAN HIT: BG324751.1, EVALUE 0.00e+00; SWISSPROT HIT: P00519, EVALUE 7.00e-12
agcttcagatctgcccggcgacagcaggcagtggtccggcggccactcaggacttcagcaagctcctcagttcggtgaaggaaatcagtgacatagtgcagaggtagcagcagtcaggggtcaggtgtcaggcccgtcggagctgcctgcagcacatgcgggctcgcccatacccgtgacagtggctgacaagggactagtgagtcagcaccttggcccaggagctctgcgccaggcagagctgagggccctgtggagtccagctctactacctacgtttgcaccgcctgccctcccgcaccttcctcctccccgctccgtctctgtcctcgaattttatctgtggagttcctgctccgtggactgcagtcggcatgccaggacccgccagccccgctcccacctagtgccccagactgagctctccaggccaggtgggaacggctgatgtggactgtctttttcatttttttctctctggagcccctcctcccccggctgggcctccttcttcc

SEQ ID NO: 6474 - DNA, 514 bp, Homo sapiens
  MAP TO AL050328.24; EXPRESSED IN BRAIN, SIGNAL = 6.6; EXPRESSED IN ADULT LIVER, SIGNAL =  17; EXPRESSED IN PLACENTA, SIGNAL =  10; EXPRESSED IN FETAL LIVER, SIGNAL = 5.5; EXPRESSED IN LUNG, SIGNAL =  14; EXPRESSED IN HEART, SIGNAL =  13; NT HIT: Z48051.1, EVALUE 0.00e+00; EST_HUMAN HIT: AW440310.1, EVALUE 0.00e+00; SWISSPROT HIT: Q14929, EVALUE 1.00e-12
cactggcccaggatcacccggcatttatggtggctgctctggcacaggtccttgcctttatagcccctccagtgatccataaggccctctttctccccaaaggagaggtcacagatagggcaaaggtagctcttctgcttccagtgggtctgctggtgtctgaccagcctggaaaatgagctgaaagacttgctgcaatggaagcagtagttgggcggctctgtgaggtgggccttctggtgtctggagagataggatttcttgctaaaagtcaaagaacaatgggggcaacagaagacattgagtcttgagggcttcactggatgagagttggatctggcaacctgacagagggttccagtgatgggtgcctgggtcctggtcacaggtgcttggttcttaagtacagatgcctggttctgggccataggaccctcagttctaaatatgggttcctgggacctggccactggtgcatggttcacatccaaaagcccctggatggacctctggc

SEQ ID NO: 6475 - DNA, 533 bp, Homo sapiens
  MAP TO AC004232.1; EXPRESSED IN ADULT LIVER, SIGNAL = 2.4; EXPRESSED IN BRAIN, SIGNAL = 2.6; EXPRESSED IN HELA, SIGNAL = 4.4; EXPRESSED IN BONE MARROW, SIGNAL = 2.9; EXPRESSED IN LUNG, SIGNAL = 2.5; EXPRESSED IN FETAL LIVER, SIGNAL = 2.6; SWISSPROT HIT: P04130, EVALUE 7.50e-01; NT HIT: gi14777888, EVALUE 0.00e+00; EST_HUMAN HIT: W60912.1, EVALUE 1.00e-104
ccggctgagcgtttctgttggtaccacatgtagaccgcatcatctacatcaccatatttggctcccgttgtcctctttctcttctcagcccctactaatggcatgtcctgcttcagtacaaagtccagaattaacttcttattttttttaatgtcataaaatgttgacttactgattccaaattcatccattacacttttaagtgatcgtccagcttcaattctacttagaaccttcattttctcctccaaattcagtgttgtatatttccctctcttattcatactgaatttaactctgaaccaccaacaggagaaaacaaagggaaaagccttaatgaattggcaaaaaaaaaacccacattttttaaacaaaacttagctgaaagccccagaaggcatgggcattgtattggaggataatggactgaaggggctaaccatgactgaagagctagtctagaggtggaggtcttatgcactcagaaagctgccagttgcaaagtcctgtctggctcttgctcctgcaagcca

SEQ ID NO: 6476 - DNA, 532 bp, Homo sapiens
  MAP TO AC009962.1; EXPRESSED IN ADULT LIVER, SIGNAL = 3.3; EXPRESSED IN PLACENTA, SIGNAL =  16; EXPRESSED IN BRAIN, SIGNAL = 0.81; EXPRESSED IN LUNG, SIGNAL = 2.6; EST_HUMAN HIT: BG335159.1, EVALUE 0.00e+00; SWISSPROT HIT: P05783, EVALUE 8.00e-67; NT HIT: gi4557887, EVALUE 0.00e+00
tgcagggtgtagcgggcctccacctccctcaggctgttctccaagctggccttcagatttctcatggagtccaggtccatctttaaggactggactgtacgtctcagctccgtgagcgtcatctcagcatctccaaccttggtggactgcgtagtgaccactgtggtgctcttctcaatctgctgagaccagcacttgtccagctcctctcagttctttcgagtcagctcatcatattgggcccggatatctgctatgatcttggcaaggtcctgagatttgggggcatctacctccacggtcaactcagagctggcaatctgggcttgtaggccttttacttcctcttcgtggttcttcttcatgaagagcagctcctccttgagagcctccatctctgtctccagtggcagccaagtgacattggtcatcagtgaccttgtggagcccatggatgtcactccccacagacgggtgcatggccagctctgtctcatacttgactctaaagtcatcggctgcaagacaggca

SEQ ID NO: 6477 - DNA, 564 bp, Homo sapiens
  MAP TO AC000064.1; EXPRESSED IN LUNG, SIGNAL = 2.6; EXPRESSED IN BONE MARROW, SIGNAL = 3.1; EXPRESSED IN HELA, SIGNAL = 3.3; EXPRESSED IN ADULT LIVER, SIGNAL = 2.9; EXPRESSED IN PLACENTA, SIGNAL = 3.7; EXPRESSED IN BRAIN, SIGNAL = 3.8; EXPRESSED IN HEART, SIGNAL = 2.3; EST_HUMAN HIT: AI076830.1, EVALUE 0.00e+00; SWISSPROT HIT: P10272, EVALUE 4.00e-19; NT HIT: gi9635487, EVALUE 0.00e+00
tgcaagggccaccaaaaggcgtcagatcccattactctaggaaatgcttatgctgataaggtagctaaagaagcacctagcgttccaacttctgtccctcatggccagtttttctccttcccatcagtcattcccacctactcccccattgaaacttccgcctatcaatctcttctcacacaaggcaaatggttcttagaccaaggaaaatatctccttccagcctcacaggcccattctattctgtcatcatttcataacctcttccatgtaggttacaagccactagtccacctcttagaacctctcatttccttccatcgtggaaacatatcctcaaggaaatcacttctcagtgttccatctgctattctactacccctcagggattgttcaggccccctcccctccctacacatcaagctcggggatttgcccctgcccaggactggcaaattgactttactcacatgccctgagtcaggaaactaaaatacctcttggtctgggtagacactgtcactggatgggtagaggcctttcccacagggtctgagaaggcca

SEQ ID NO: 6478 - DNA, 511 bp, Homo sapiens
  MAP TO AC007262.4; EXPRESSED IN HELA, SIGNAL = 2.5; EXPRESSED IN BRAIN, SIGNAL = 1.2; EXPRESSED IN ADULT LIVER, SIGNAL = 1.3; EXPRESSED IN FETAL LIVER, SIGNAL = 1.2; EXPRESSED IN HEART, SIGNAL = 1.3; EXPRESSED IN LUNG, SIGNAL = 1.3; EXPRESSED IN BONE MARROW, SIGNAL = 1.2; SWISSPROT HIT: P44437, EVALUE 4.70e+00; NT HIT: AB051488.1, EVALUE 1.00e-125
tgcctgtggcaacagcctgcccttgtaggaacactaactcatgctcacagcccatccctgagtgtccttttggttccgacccttgcatccagaccatagatgagattagacaccaaatcaggattagggaggtaaatgggattaagccatttgcttactcttgcaaaatggaatgctatgtggactctgaggaatttgaacaacttgttaacttacttaagtcaactactgatcctcttgttcataaaagagcacagattgcaatgggtatccataacgttcacccatttgcccaagagtttattaatgaaatggtataatgatgcttattgaaagcttgctcagttttccttccccagaaatgagaaaattactaattttcttatgagtaattactctgaatcctccttctggggatgaaagacaatgcaaaattgaattacatgttaagcatatgtgtaaagacaccatgtcatttcctttgaactcacctggacagcaatctggatca

SEQ ID NO: 6479 - DNA, 561 bp, Homo sapiens
  MAP TO AC008727.5; EXPRESSED IN PLACENTA, SIGNAL = 1.5; EXPRESSED IN BRAIN, SIGNAL =   2; EXPRESSED IN ADULT LIVER, SIGNAL = 2.1; EXPRESSED IN BONE MARROW, SIGNAL = 2.2; EXPRESSED IN LUNG, SIGNAL =   2; EXPRESSED IN HEART, SIGNAL = 1.5; EXPRESSED IN FETAL LIVER, SIGNAL = 1.9; NT HIT: AF121202.1, EVALUE 0.00e+00; EST_HUMAN HIT: AA316122.1, EVALUE 0.00e+00; SWISSPROT HIT: Q91660, EVALUE 3.10e+00
caggcagggtttccatcgtgcttataaaacttagcacttcttctgatgaagtcaagttgctcagtctcctgtaaaacatctgactctcctcatttttaacattttgttcaagcctgtcgcagtcagatacttgagagaacactggtccaccgagtggatgaaggtcatttccatttttcgaatgaaactttttacaatgggcatgatggaatttgaccccgaaaggctcaggttgtcgtgaacacaaccaagggcacagacgctccttgactaccttgtgaacatgatttagaggtttattttttaaagcagccagagctctatgcatctgaaaatcagataaacgataaaggttcttcctcaaggtgattaatgccataccatcagattctcaatttgataactaaattaaaaaatttaaaaacacatggttaaatacattgagaacatgattgacccaacatcaatgtttatgaaactacaaacgagtatctggaaaaaaaaaaaaaaaaaaaaaaaggatggttaacatataaacaccagaggggcaaagtctctgca

SEQ ID NO: 6480 - DNA, 509 bp, Homo sapiens
  MAP TO AC004263.1; EXPRESSED IN HEART, SIGNAL = 4.2; EXPRESSED IN LUNG, SIGNAL = 3.9; EXPRESSED IN FETAL LIVER, SIGNAL = 3.1; EXPRESSED IN ADULT LIVER, SIGNAL = 4.8; EXPRESSED IN PLACENTA, SIGNAL = 4.5; EXPRESSED IN HELA, SIGNAL = 5.6; EXPRESSED IN BRAIN, SIGNAL = 3.5; NT HIT: U85976.1, EVALUE 0.00e+00; EST_HUMAN HIT: BG573489.1, EVALUE 1.00e-118; SWISSPROT HIT: Q01768, EVALUE 3.00e-35
tagggaagccaggcgggaggatcacttgagttcaggaaaacagcccatctctacaaaacattaaaaaattatccagttgtagaggtgccaacctgtagtcctaggtactggggatgttgaggaaggaagattgcttgagcccaggagttggaggctgcagtgagccatgatcacaccattacactccagcctgggtgacagagcaagtccttgttccaaaaaagaaagagaggagcgcagcactgccgcctggcccctccagcttcccggaccacggccaacctcgagcgcaccttcatcaccatcaggccggacagcatgcagtgcggcctggtgggcaagatcatcaagcgcttcgagcagaaggggttccgcctcgtggccatgaagttcctcccggcctctgaagaacacctgaagcagcactacattgacctgaaggaccgcccattcttccctgggctggtgaagtacatgaactcagggccggtcgtggccatggtctggga

SEQ ID NO: 6481 - DNA, 508 bp, Homo sapiens
  MAP TO AP001068.1; EXPRESSED IN LUNG, SIGNAL = 1.5; EXPRESSED IN HEART, SIGNAL =   2; EXPRESSED IN FETAL LIVER, SIGNAL = 1.7; EXPRESSED IN ADULT LIVER, SIGNAL = 1.7; EXPRESSED IN PLACENTA, SIGNAL = 4.1; EXPRESSED IN BRAIN, SIGNAL = 1.5; EXPRESSED IN HELA, SIGNAL = 0.62; EXPRESSED IN BONE MARROW, SIGNAL = 1.5; NT HIT: AL163300.2, EVALUE 0.00e+00; EST_HUMAN HIT: BF058205.1, EVALUE 3.00e-68; SWISSPROT HIT: P26372, EVALUE 1.10e-01
tgtggggctgcttcttcgtgctgccggcagtctagctgccagccagcttgctgtgcctcttcctcctgccagccggcctgctgtgtgcccgtctgctgcaagcctgtgtgctgtgtgtccacctgctctgaggattcctcttcatgctgccagcagtctagctgccagccagcttgctgcacctcctcctcctaccagcaggcctgctgcgtgcctgtctgctgcaagactgtctactgcaagcccatctgctgtgtgcctgtctgctctagggcttcctcttcacgctgccagcagcctagctgccagccagcttgctgcaccacctcctgctgcagaccctcctcctctgtgtccctcctctgccaccccgtgtgcaggtccacctgctgtgtgcccgtctcctcctgctgtgcccccacctcctcctgccagtccagctgctgctgcccggcctcctgcgtgtccctcctctgccgccccgcaagctcccgcctggcctgctaca

SEQ ID NO: 6482 - DNA, 577 bp, Homo sapiens
  MAP TO AC008283.3; EXPRESSED IN HELA, SIGNAL = 3.9; EXPRESSED IN ADULT LIVER, SIGNAL =   2; EXPRESSED IN HEART, SIGNAL = 1.9; EXPRESSED IN FETAL LIVER, SIGNAL = 1.9; NT HIT: gi16164825, EVALUE 8.60e+00; EST_HUMAN HIT: BG288769.1, EVALUE 5.20e-02; SWISSPROT HIT: Q9UBV7, EVALUE 5.50e+00
tgccttggctggatgcagagctggaaaacagggtggcatctgtagggtagactgggggtcaagaaaagtctattttaaagctaggggtcactcaagcataagaagactggtgttaaagagagaaggaagaaaaagatgcaggaaatagaagagaggtaaaaaataaagctcgtcgaaaggtagggacagatggatccaggtgacacacagaggaatggccctttaggaaaatgcacatcaacttcattattctaggaaagaagagtggaagctgaccgagccaggtggtatgtggatttggatgatgatagttactgtctgtggcatttgtctcctttaacaatgaggcaagatgatcaggataatgagaggagaaggaaggcttagagaaaagaaaaaacaagaggtaaaatgtcctgcacagatagtaagtcctttttcatgtttattttgaacaagactttcatgaatatcaccagtgtgagaataaagttccagtatatttatttactgttttctataaattcaaatattgaaaactgagtatcttcaggtccaaatgaccagtcccactgcc

SEQ ID NO: 6483 - DNA, 557 bp, Homo sapiens
  MAP TO AC005050.2; EXPRESSED IN BONE MARROW, SIGNAL = 1.7; EXPRESSED IN LUNG, SIGNAL = 1.7; EXPRESSED IN FETAL LIVER, SIGNAL = 1.7; EXPRESSED IN BRAIN, SIGNAL = 2.8; EXPRESSED IN HELA, SIGNAL = 1.6; EXPRESSED IN ADULT LIVER, SIGNAL = 1.9; SWISSPROT HIT: P10272, EVALUE 6.00e-18; NT HIT: D10083.1, EVALUE 0.00e+00; EST_HUMAN HIT: AI076830.1, EVALUE 0.00e+00
tcagaccccgtgggaaaggcctctacccatccagtgaaagtgtctacccagaccaagaggtattttagtttcccgacttgaggcatgtgagtgaagtcaatttgccagtcctgggtggggacaaatccccaagcttgatgtttagggaagggagggggcctgaacaatccctgaggagtagcagaatagcagatggaacactgagaagtgatttccttaaggatagatttccacgatggaaaggaaatgagaagttctgagaggcgggctagtggcttgtaacctacatggaagaggttacaaaatgatgacaaaatagaatgggcctgtgaggctggaaggagatattttccttggtccaggaaccatttgccttgtgtgggaagagactgataggtagaagtttcagtgggggagtaggtgggagtgaccagatgagaaggagaaaaactgctgtgagggatagaagttggaacgctagctgcttttttagctaccttatcagcataagtgttgtcctgagcgatgggatctgatgccttttgagggcccttgca

SEQ ID NO: 6484 - DNA, 510 bp, Homo sapiens
  MAP TO AC011447.2; EXPRESSED IN ADULT LIVER, SIGNAL = 2.4; EXPRESSED IN PLACENTA, SIGNAL = 2.6; EXPRESSED IN HELA, SIGNAL = 2.2; EXPRESSED IN LUNG, SIGNAL = 2.2; EST_HUMAN HIT: BE934091.1, EVALUE 0.00e+00; SWISSPROT HIT: Q03938, EVALUE 9.00e-35; NT HIT: M61870.1, EVALUE 3.00e-98
tgctctgggtagctgtcaaacattggttaagtccattataacctcttttgtgtactttaccctcatccacactttcacaacctttttttaactctaaattgccatattcacgtttttcatatcttgtcactatcactttttggaaggaatcttttaggctctgctctggacaaaggtcttgggcaaaatgaaaacacataactgaaagaaacaataagaacacattacttcaattgctagattctgataaatacaggttacatttacaaacaaaattaacctcatcttgggcaaaatgaaaacacataactgaaagaaacaataagaacacattacttcaattgctagattctgataaatacaggttacatttacaaacaaaattaaccaggcatggtggtgggcaaatcccagctacttgggaagctgaggcagagaattgcttgagcctgggaggcggagattgcggtgacccaagatcacaccactgcactccaccctgggcagcag

SEQ ID NO: 6485 - DNA, 572 bp, Homo sapiens
  MAP TO AC035150.1; EXPRESSED IN BRAIN, SIGNAL = 1.9; EXPRESSED IN HELA, SIGNAL = 0.83; EXPRESSED IN ADULT LIVER, SIGNAL = 2.2; EXPRESSED IN LUNG, SIGNAL = 1.9; EXPRESSED IN HEART, SIGNAL = 2.3; EXPRESSED IN BONE MARROW, SIGNAL = 2.1; NT HIT: gi4508028, EVALUE 1.00e-94; EST_HUMAN HIT: T89522.1, EVALUE 2.00e-16; SWISSPROT HIT: Q02386, EVALUE 5.00e-28
tcatctcgtttttccaactggcagcctgttctttgaatatttaccacagaatcttgatacttgattaactctcttgtaatctgttgccagatctgggagcagaaaagctcttcatgaggcaggtaccttaatcctacttcttgaagagtctccatctcttttagattcttggctcctaaaaggataaagaaaatgtggagatggggcatgtgaataatgttttgttccaagatgtcaagtttataaactcgggcccatagcctaaggcttcattgaaccaggagaaggttccattgcctactgcatagacatctgaacaaagtggccctgttcaaaatgtctagtaaaactcctacacataaattttcaaaaacctttgcctgggattatttcattggaagtttattccaaggttgggagatgttgaggcactgtgctagttagaaagacacatttttcagaaaataccttatcacctaaatcagggcccccaacccctgggccgtggatcagtaccagtccgtggcctgttaggatctgggccacacagcaggaggtgagcgggaggccag

SEQ ID NO: 6486 - DNA, 598 bp, Homo sapiens
  MAP TO AL024509.1; EXPRESSED IN FETAL LIVER, SIGNAL = 1.4; EXPRESSED IN BRAIN, SIGNAL = 1.3; EXPRESSED IN ADULT LIVER, SIGNAL = 1.6; EXPRESSED IN PLACENTA, SIGNAL = 1.5; EXPRESSED IN LUNG, SIGNAL = 1.6; NT HIT: gi5834911, EVALUE 8.90e+00; EST_HUMAN HIT: BE246096.1, EVALUE 5.40e-02
cagggcctggggatgtgctcgatcccctgggaagacctccttcagttgagagctaccttatctgtttatgctgatgtgctgaacaaatataatcattttctatgtgtgcatgtgatagactctggtctcactgcagatcacgtctacattcaagtaatatacttcgatttgtcttgacttttcacactagttctcattctagctcttcctattttgtttaaattatttatgcttttctcacagccagtgctgctttttcaaatgtgggatgtccaaggactggagcatctgttagtgagcagcaaggttcctggcaatgtctgtatgtgcttggaggcatcattaaaatgtccccggaactgtgacttagagctggataagacaagagggatatgtggaatctaaccaggtctcagttaggagacatgaaaagaatttcagaaaaaaaaaattaatcttaaattattttaatataatcaaataataaaacaatctagaatgagttgccgaattaatccagccttgacacttacgtaacatgttacttggttacatggagggcgtgggcttggaaacttccacatgcccgtcatggctg

SEQ ID NO: 6487 - DNA, 504 bp, Homo sapiens
  MAP TO AC002106.1; EXPRESSED IN FETAL LIVER, SIGNAL = 5.4; EXPRESSED IN ADULT LIVER, SIGNAL = 4.8; EXPRESSED IN PLACENTA, SIGNAL = 5.2; EXPRESSED IN BRAIN, SIGNAL = 4.8; EXPRESSED IN HELA, SIGNAL = 8.9; EXPRESSED IN LUNG, SIGNAL = 5.2; EXPRESSED IN HEART, SIGNAL = 4.5; EXPRESSED IN BONE MARROW, SIGNAL = 5.9; EST_HUMAN HIT: AL568188.1, EVALUE 7.00e-01; SWISSPROT HIT: Q05338, EVALUE 3.50e+00; NT HIT: gi13236541, EVALUE 4.80e-01
cttgcagcatccggttcgcctcttcccccaactgccttttcgcatcctctgcctgctcttccctgcagttgtctgtgtctacatcattggcaggagttcctcgtgcactctgcatgctgaaaccgtgcagatggacacatggcagggctttccctcccgtctggcttgcctcctgcctctgttaaagacatgacgtgactcttcagcagcttttgaacttgcctctaggtcacaaagggattgtctcatcgtttctactacatatttttaaagttttgcttttcatatgaatccttttaatctgtccggaatcaactgtgtgccgtgtgaggtaggaaaataaatggatatgtccttttcgtacggataaaagcttcatttattcaatattttcccctccaatgtttttgctatgccccttattttccgattccatttccggtctgtttctggactctctcctgttctggtgatccatccatgcagcctcgtgacaacaccgca

SEQ ID NO: 6488 - DNA, 513 bp, Homo sapiens
  MAP TO AC005363.1; EXPRESSED IN ADULT LIVER, SIGNAL = 1.3; EXPRESSED IN PLACENTA, SIGNAL = 1.6; EXPRESSED IN HELA, SIGNAL = 1.7; EXPRESSED IN HEART, SIGNAL = 1.7; EXPRESSED IN LUNG, SIGNAL = 1.2; NT HIT: gi13385711, EVALUE 6.00e-19; EST_HUMAN HIT: BE552345.1, EVALUE 6.00e-94; SWISSPROT HIT: Q12446, EVALUE 4.20e-01
caagtgcccagtgtgcctgccactactctctagtcccctagttttacagatgggtaaaccgaggttaaaaaggaaagcctggcatccataccactcaccagaccaacccaactgtgtaccttccagttccccaagactcaggcctcaccctctcccctggaacttctagcttcttcccacgtctaggcatttgccccagtgttctctccaccaactcaccagagtcagaaaagcgtgggaggctcccggttccctggttcctggcgaatggaaagccaggggtgggggattccgtgggtgtcctgcccggtttcttcacacgttctccttcaccctcagtgcaagaacgccgacgctggctgcatagtgacatgccccctggcccatcgcaaggggcaccaggactcatgcccctttgagctaacggcctgccccaacgagggctgcacctcgcaggtgccgcgtgggaccctggcagagcaccggcagcattgccagcaagggtcccagcag

SEQ ID NO: 6489 - DNA, 502 bp, Homo sapiens
  MAP TO AC004687.1; EXPRESSED IN ADULT LIVER, SIGNAL =   2; EXPRESSED IN BRAIN, SIGNAL = 1.7; EXPRESSED IN HELA, SIGNAL = 2.6; EXPRESSED IN BONE MARROW, SIGNAL = 1.8; EXPRESSED IN LUNG, SIGNAL =   2; EXPRESSED IN HEART, SIGNAL = 1.8; EXPRESSED IN FETAL LIVER, SIGNAL = 1.9; NT HIT: gi14769798, EVALUE 0.00e+00; EST_HUMAN HIT: BG387031.1, EVALUE 0.00e+00; SWISSPROT HIT: Q63537, EVALUE 2.10e+00
cagggggtccatggcagcagttctactttctgcagctccctaagcagtgactttgaccccctagtgtactgcagccctaaaggggatccccagcgagtggacatgcagcctagtgtgacctctcggcctcgttccttggactcggtggtgcccacaggggaaacccaggtttccagccatgtccactaccaccgccaccggcaccaccactacaaaaagcggttccagtggcatggcaggaagcctggcccagaaaccggagtcccccagtccaggcctcctattcctcggacacagccccagccagagccaccttctcctgatcagcaagtcaccagatccaactcagcagccccttcggggcggctctctaacccacagtgccccagggccctccctgagccagcccctggcccagttgacgcctccagcatctgccccagtaccagcagtctgttcaacttgcaaaaatccagcctctctgcccgacacccacagagga

SEQ ID NO: 6490 - DNA, 500 bp, Homo sapiens
  MAP TO AC005263.1; EXPRESSED IN ADULT LIVER, SIGNAL = 2.5; EXPRESSED IN BRAIN, SIGNAL = 2.5; EXPRESSED IN HELA, SIGNAL = 3.8; EXPRESSED IN HEART, SIGNAL = 2.5; EXPRESSED IN BONE MARROW, SIGNAL = 3.3; EXPRESSED IN LUNG, SIGNAL = 3.1; EXPRESSED IN FETAL LIVER, SIGNAL =   2; SWISSPROT HIT: Q62203, EVALUE 2.00e-10; NT HIT: gi14765795, EVALUE 6.00e-53; EST_HUMAN HIT: BE260066.1, EVALUE 8.00e-53
aacggtgactgcccagggagggggccaacagcgtgctagcattgaggccaggtctgtttcactccagaactgaaccctgtgccccacgaaagtcttaccagccttctcctgggctcccagggtagagtccgggctggggaggctagtgcctcgggctccctgcctgatggtcgccctgaggtcacagggaccaggagccctctctgtcccccgccctcccaggtgccgagcagagagatcgacaaggcggagggcaagttctggacacactggaaccgggagaccaagcaggtgagtggctcgccccgagcctggctccttcccacccagccctggcggccctagccctgccctagccccacccgtgcctgctgaacctttctccgtctctctagttcttcctccagttccactttaagatggagaagcccccggctccacccagcctccctgctggcccccctggggtgaagcggcctccacccccgctgatgaacggt

SEQ ID NO: 6491 - DNA, 508 bp, Homo sapiens
  MAP TO AL132777.2; EXPRESSED IN PLACENTA, SIGNAL = 4.6; EXPRESSED IN BRAIN, SIGNAL = 2.2; EXPRESSED IN HELA, SIGNAL = 1.9; EXPRESSED IN BONE MARROW, SIGNAL = 2.5; EXPRESSED IN LUNG, SIGNAL = 2.4; EXPRESSED IN HEART, SIGNAL = 2.6; EXPRESSED IN FETAL LIVER, SIGNAL = 2.6; EXPRESSED IN ADULT LIVER, SIGNAL = 2.7; EST_HUMAN HIT: AA730958.1, EVALUE 1.80e-01; SWISSPROT HIT: Q9UIU6, EVALUE 6.00e-36; NT HIT: AB024686.1, EVALUE 0.00e+00
cccagattctctggctggtcggaatctgctgaaaggcctcttagtttaaataggactagcagatatcctgctgtgctttccttaaatactgcctttaatggatttagaagctggttttccaaacaagtggcactgtgtagaatgtcatccccctgaccttctgaacattttgatttccccctccatacagtgagttagatggcaaccccagcactgaagatgaatccagcaagggacatgaggatttatctcctcacccactctccagttcatctgatggcatcaccaacctcagcctttccagtcatatggagccagtatatatgcaacaaattggaaatgctaagatatcattaagctcttctggagttctgttgaatggaagcttggtacctgcaagtacttcacctgtcttccttaatggaaattcttttattcagggacccagtggagttatccttaatggattaaatgtgggaaatacacaggcagtggcattgaacccacc

SEQ ID NO: 6492 - DNA, 516 bp, Homo sapiens
  MAP TO AL139099.2; EXPRESSED IN ADULT LIVER, SIGNAL = 1.5; EXPRESSED IN BONE MARROW, SIGNAL = 1.3; EXPRESSED IN FETAL LIVER, SIGNAL = 1.7; EXPRESSED IN LUNG, SIGNAL = 1.3; EXPRESSED IN HELA, SIGNAL = 2.4; NT HIT: U15128.1, EVALUE 0.00e+00; EST_HUMAN HIT: BI559940.1, EVALUE 0.00e+00; SWISSPROT HIT: Q10469, EVALUE 3.00e-18
ttggagaccctgcggatgcccacagccacagaggggtggtccccaccgcggccgccggcaccccgcgcgggttcggcgtccagcaacggtggggcgagggcctcgttcttcctttgtcgcccattgctgctccagaggacgaagccgcaggcggccaccacgagcgtcaggattagcaccttccgtttgtagatgcggaacctcatggtctccagggccgggagcgcaggcgggcgggcgcggaaaggagcagctgcttctgcacggaaggggcgggcgggcggcggccgtcgccttggcctgtcacggtcggaactggcccccgcggctgccctcgctaactcatcccgggccccgggggtcctggggcccgagacctctcatttaccccgcgccgcctgcgctccacacatcctcgcctggcagctacagctcgagcatcggcgccgcgctaggagccgcggctcggcttcgtctccgtcctctccattcagcaccacgggtcccggaaaaagc

SEQ ID NO: 6493 - DNA, 505 bp, Homo sapiens
  MAP TO AL137784.2; EXPRESSED IN PLACENTA, SIGNAL = 1.7; EXPRESSED IN HELA, SIGNAL = 0.92; EXPRESSED IN BRAIN, SIGNAL = 1.7; EXPRESSED IN HEART, SIGNAL = 1.9; EXPRESSED IN BONE MARROW, SIGNAL = 1.8; EXPRESSED IN LUNG, SIGNAL = 1.5; EXPRESSED IN ADULT LIVER, SIGNAL = 1.7; SWISSPROT HIT: P53094, EVALUE 8.10e-02; NT HIT: gi12732346, EVALUE 0.00e+00; EST_HUMAN HIT: AA214451.1, EVALUE 2.00e-04
agtctgctcgccaaagcgggcgacggcccgggtgccgagcccggctatcccccggagcctggggatcccaagagcgacgacagtgacgtggacgtctgcttcacagacgaccagagcgaccccgaggttgggggcggcggggagcgcgacttgtaacgagtcttcccgggaaggggcggggtgaggacagagaggagtcgagggtttattctcgcagtagaggaactcctggtggtgggaagagggacccaatggacaaaaccgtttttgtttttgagagggcgccagatttgaaacagtgagaggtcccacatctggtgctgaaactcagagcaacagttcagaggtggcgtaaatctggccacctggagagctcgagtgccaccagtacctccgcaccccgggcctctggacttcttggatgagctcaccctgaaccgcccaggcggtctgctcttggtgttcagaatcacatcaatgcgaacgtcacagcgccttcgagggc

SEQ ID NO: 6494 - DNA, 538 bp, Homo sapiens
  MAP TO U82670.2; EXPRESSED IN ADULT LIVER, SIGNAL = 1.4; EXPRESSED IN BRAIN, SIGNAL = 0.84; EXPRESSED IN LUNG, SIGNAL = 0.99; EXPRESSED IN HELA, SIGNAL = 0.54; SWISSPROT HIT: P04706, EVALUE 1.10e-01; NT HIT: M89985.1, EVALUE 0.00e+00
cgcacggcctcctggaactcatgttcctcgcagtcgtcagggatatccaggatgagcagagagcgctctgcgttcacacccatcctcctgcaccagtcctgaagcatcgccagagctatcgcagaggacttgagggagggagcctgatcagacaggaatgtgtgctgactgttgcagtctctgacgcagcctgtgagtgcaaaggggagagagggacgacgttgctgccaatcaacccacccccactacaggcctttgccctcccctcccaagcactgcagcagccagggatccattccctcccactgctgcagcccatgcacccccaaagccctcccccagttggtgacacttaatcccttggcacacacccaccacctctattgggagatccccttttgcctgagctgatgtccccttatcacaccacaacaagtgcacctccccctcccaccatcatctgtaacattgcagccaggagtcctcccctatccaagcccctgcaacaggtagctcttcccccacccagaatccctgc

SEQ ID NO: 6495 - DNA, 519 bp, Homo sapiens
  MAP TO AC005218.1; EXPRESSED IN LUNG, SIGNAL = 7.4; EXPRESSED IN ADULT LIVER, SIGNAL = 4.3; EXPRESSED IN BRAIN, SIGNAL = 7.4; EXPRESSED IN HELA, SIGNAL = 9.5; EXPRESSED IN HEART, SIGNAL = 9.4; EXPRESSED IN BONE MARROW, SIGNAL =  27; SWISSPROT HIT: P15475, EVALUE 2.00e-09; NT HIT: V00478.1, EVALUE 5.00e-72; EST_HUMAN HIT: AA669154.1, EVALUE 3.00e-74
tggcattgcgaacagggtgcagaagatcgtcactctggtgtggatgggcagctccatcctggccttgctgtccaccttccagcagatgtgggtcagcaagccaggagtatgatgagtctggcctctccatcgtccatcgcaaatgcttctaggcggactgttacttagtcgcgtttcaccctttcttgacaaaacctaacttgtgcagaaaacaagatgagattagcatggctttatttgtttttttgtttttggtggtgatttttttttttttttttttttttttttttggctagacccaggatttaaaaactgggacagtgaaggtgacagcagtcagctggagcaagcatcccccaaagttctgcaatgtggccgaggactttgattgtacattgttcttttttctaatagtcattccaaatatcgtgaaatgcattgctacaggaagtcccttgcccccctgaaagccaccccatttctctctaaggagaatggcccagtcctctcccaagtcca

SEQ ID NO: 6496 - DNA, 517 bp, Homo sapiens
  MAP TO Z82211.1; EXPRESSED IN ADULT LIVER, SIGNAL = 1.2; EXPRESSED IN HELA, SIGNAL = 1.2; EXPRESSED IN BRAIN, SIGNAL = 1.1; EXPRESSED IN HEART, SIGNAL = 1.5; EXPRESSED IN BONE MARROW, SIGNAL = 1.2; EXPRESSED IN LUNG, SIGNAL = 1.4; EST_HUMAN HIT: BG983570.1, EVALUE 0.00e+00; SWISSPROT HIT: Q99865, EVALUE 1.00e-03; NT HIT: gi15309599, EVALUE 0.00e+00
ggggctgggatgaaggtcggcctctctgcttcttttgggagacttttttctttgtcatgtttgcagacccagtggcccgtcctgcagctgccctggtttgttgcccttcggcttcctgtgcgttgggggtcttcatgcctgctgggggaggagagaggatagagagacacacccagtgtgccacaaggcaaacttttccctatagccatgtctggatgtagtctgcgctagtgcctaagtttcccctaggagcctggaagcaatgctggaaatcctggctgcatgccgcagtgctctccctcttaagttcctttgggctgtggggaagggctggggtggtgcagtagagctgtctggggttaggaactctgcagaagtggctgggccacctcctcctagctcagagcccactgccctcccggaaccccttgctaccactggcgtccacttccaatccccttgcaaagaggccttgaccggcacccactgccctccttccctgagcgtcccagctgct

SEQ ID NO: 6497 - DNA, 510 bp, Homo sapiens
  MAP TO AL121928.13; EXPRESSED IN HELA, SIGNAL = 0.62; EXPRESSED IN PLACENTA, SIGNAL = 1.6; EXPRESSED IN ADULT LIVER, SIGNAL = 1.3; EXPRESSED IN FETAL LIVER, SIGNAL =   1; EXPRESSED IN LUNG, SIGNAL = 1.3; EXPRESSED IN HEART, SIGNAL = 1.6; EST_HUMAN HIT: BI963990.1, EVALUE 1.00e-91; SWISSPROT HIT: P30416, EVALUE 1.10e-01; NT HIT: gi13646184, EVALUE 4.00e-94
cggaagctgtgggcctggactgggggtagcagcagaggggcggccaggtaggtgcaggtgagcagctgcggcggcggcggccagacgccctgtttgggcggcggccagctgtacacatacatggtcggccccccaggcggctgctgttcttactgggggctcctgcggatccagacctgcggcggaggaagggatatgtagacagactttctacttaaccgcctcctgtccctgtgggccggttccccgggacgccggttcatggctttgggggaattcatcccaaatcgaacattcagctccccgcctagcctcttgtcccaaggtcgggcagagcctcaggctcccagcagacaataaggagccttttcaagccctccgccgggatgctcttcccagtgactccccactcacttgtctccttcagccttggggagccggcgggatccagagcggggctcctctccgcactttgtagctgcgttgctccgctccatgccctgcctcagc

SEQ ID NO: 6498 - DNA, 570 bp, Homo sapiens
  MAP TO AC007000.2; EXPRESSED IN BRAIN, SIGNAL = 3.7; EXPRESSED IN HELA, SIGNAL = 5.7; EXPRESSED IN FETAL LIVER, SIGNAL = 4.4; EXPRESSED IN PLACENTA, SIGNAL = 4.6; EXPRESSED IN ADULT LIVER, SIGNAL = 3.6; EXPRESSED IN BONE MARROW, SIGNAL = 4.5; EXPRESSED IN HEART, SIGNAL = 3.6; EXPRESSED IN LUNG, SIGNAL = 3.9; NT HIT: AF104014.2, EVALUE 0.00e+00; EST_HUMAN HIT: BF902394.1, EVALUE 1.00e-92; SWISSPROT HIT: Q14314, EVALUE 6.00e-29
tgctcccatcgagacgtgcctgcagcactgtccagcctccccccatggtctccatgtcacagtaaacttcaaagctactatttttgggatcaggtgtaactctgtaggtctcactgcttcttttgcctattgcgtagtagtcagagcaatctttatatattagatgttgaactgaaggggaaataaaaggaaggcattggatcttgttaatagaaaccatgcatctgaagaattctttatatgtacaaaagcagtttgataattgaatcaatggcagtaatgaaactttactaaacttacttgaacctgtttagcaaatgcttaaggcctcacaagaagaacctaatgttataaagcagaaaggacctctaatatactcttggttggtagtaataatgacagcatcaacagcaaacgacaataagaaaataataaaagtacagttttaataatttagtattatgtagtgaggcctacctatacgttctaggcatgctgccagactgggtaacattttcacactgaatctgaacattgaccttatgatgtaggcgttactgccagtctgca

SEQ ID NO: 6499 - DNA, 579 bp, Homo sapiens
  MAP TO AL132641.1; EXPRESSED IN FETAL LIVER, SIGNAL = 2.8; EXPRESSED IN ADULT LIVER, SIGNAL = 2.5; EXPRESSED IN PLACENTA, SIGNAL = 2.7; EXPRESSED IN BRAIN, SIGNAL = 2.7; EXPRESSED IN HELA, SIGNAL =   3; EXPRESSED IN LUNG, SIGNAL =   3; EXPRESSED IN HEART, SIGNAL = 2.9; NT HIT: gi13648109, EVALUE 0.00e+00; EST_HUMAN HIT: AU118229.1, EVALUE 0.00e+00; SWISSPROT HIT: P21809, EVALUE 4.00e-19
tggcacatgaaaccccgcacgttgagagatgaagggatatatttgagccattctgtgacccatttaatactgcagtcacaaaaccaagggttattccgagcagtgagctgcttcaggttggagagattatcaaaaaccccttgagtcagcatccgcagttggttgttggatatatccagccgttccagcttacgcagatttgagaaggctgtcaaaggaatgtggtttatctggttgtcctgcaaatagagcctgatcagatgcgtacctgggagatcgggaggagggtgggacagcgaattacgtacaattgaaaattccttgagcttggtgagatggctgaaggtgccctcggcgatacccttgttggtcaggaggttcccgtccacaataagacgctccaagctcgtgagattctggaaggccatgtcggatatgacagcaattcgattttcatccactctcagctcttgcaagtccacaggaagcccaacaggcacactgctcaggtgattcttagacaaaaacaacaatttgaggctaatagcctcccggaaggccccgtcttccacccccact

SEQ ID NO: 6500 - DNA, 538 bp, Homo sapiens
  MAP TO AL080312.4; EXPRESSED IN BRAIN, SIGNAL = 0.99; EXPRESSED IN HELA, SIGNAL = 1.6; EXPRESSED IN ADULT LIVER, SIGNAL = 1.4; EXPRESSED IN BONE MARROW, SIGNAL =   1; EXPRESSED IN LUNG, SIGNAL = 1.2; EXPRESSED IN HEART, SIGNAL = 1.2; SWISSPROT HIT: P38935, EVALUE 4.40e-01; NT HIT: AF294352.1, EVALUE 1.00e-04; EST_HUMAN HIT: AA339531.1, EVALUE 2.00e-04
agcactcgtggcctttgcggcattgtgtggtccccaggacgcactggccaggaatggtggtccacagaggactggggcctgctctcatcctcatactgtgtggggaagctccaccttgggagccaagcagctcagtgggggcaggacaagagctccaggccaggccgatgtgagggtccaatctccaccctgccacttcgtggctgtgtccttgggcaactaacttggccccctcagtcagtttccttgtctgtaaaatggaaatgggcttagtgcatattccacaggggtgcggtgagacctaaaggaacaaaggcagctagagctcagtacaagaccagtaaaatcccctgcatggtgctatcgggccgagccttgcctgccctactcacctgcacgccctggtggtgcttcctgcaaacgcctgtaaatgggatttttggcctgagagcccacaagctcacgtggcagctaggagtgccagagagtgaatgcctggccctcaggtgcacatccctcatccctcaggtggacgccc

SEQ ID NO: 6501 - DNA, 541 bp, Homo sapiens
  MAP TO AC007318.2; EXPRESSED IN HELA, SIGNAL = 6.8; EXPRESSED IN LUNG, SIGNAL = 4.9; EXPRESSED IN HEART, SIGNAL =  14; EXPRESSED IN BONE MARROW, SIGNAL = 3.4; EXPRESSED IN PLACENTA, SIGNAL = 4.9; EXPRESSED IN ADULT LIVER, SIGNAL = 3.4; EXPRESSED IN BRAIN, SIGNAL = 4.7; NT HIT: gi14736135, EVALUE 0.00e+00; EST_HUMAN HIT: BE796405.1, EVALUE 0.00e+00; SWISSPROT HIT: Q9TT14, EVALUE 1.00e-105
acttgcgcgcgtccaatgtgtattcctccatcatatgctgaccttggcaaagctgccagagatattttcaacaaaggatttggttttgggttggtgaaactggatgtgaaaacaaagtcttgcagtggcgtggaattttcaacgtccggttcatctaatacagacactggtaaagttactgggaccctggagaccaaatacaagtggtgtgagtatggtctgactttcacagaaaagtggaacactgataacactctgggaacagaaatcgcaattgaagaccagatttgtcaaggtttgaaactgacatttgatactaccttctcaccaaacacaggaaagaaaagtggtaaaatcaagtcttacaagagggagtgtataaaccttggttgtgatgttgactttgattttgctggacctgcaatccatggttcagctgtctttggttatgagggctggcttgctggctaccagatgacctttgacagtgccaaatcaaagctgacaaggaataactttgcagtgggctacaggactgggg

SEQ ID NO: 6502 - DNA, 504 bp, Homo sapiens
  MAP TO AL121889.3; EXPRESSED IN HELA, SIGNAL = 1.4; EXPRESSED IN ADULT LIVER, SIGNAL = 1.2; EXPRESSED IN BRAIN, SIGNAL = 1.1; EXPRESSED IN LUNG, SIGNAL = 1.2; EXPRESSED IN BONE MARROW, SIGNAL = 1.3; NT HIT: gi14770824, EVALUE 5.00e-72; EST_HUMAN HIT: AW247508.1, EVALUE 2.00e-69; SWISSPROT HIT: P08923, EVALUE 1.80e-01
tcggcacctgcctctcctcgttgtctaggcctgactgtccctggccttgcacggccgcgcagcggggcgaccggcagggggcgcgctgggatggccaggagctcggctctccccgctctgtccctgctctgcggcccgcctcgcccctgcaagtttaaattcctcttagcaagcccagcatcgcagccaataacgcatcagggggcggagccgtagaggcttgcgccccgcctcgctccgctattggaaggaaagcagccaatgggagagccgaggcggggaggtgcggccaatggcgcgggcctgtttgattcaaaggttgcctataaagcgggactgcacgccggtttttgtccgagggctgtcgagtccgagcgccgccatggctctgctgtccgagggcctggacgaggtgcccgccgcctgcctgtcgccgtgcgggccgcccaacccgaccgagctgttcagcgagtcacggcgcctggctctggaggagctggtggc

SEQ ID NO: 6503 - DNA, 512 bp, Homo sapiens
  MAP TO M63796.1; EXPRESSED IN ADULT LIVER, SIGNAL = 1.7; EXPRESSED IN BRAIN, SIGNAL =   2; EXPRESSED IN HELA, SIGNAL = 1.3; EXPRESSED IN BONE MARROW, SIGNAL = 2.1; EXPRESSED IN LUNG, SIGNAL = 1.8; EXPRESSED IN HEART, SIGNAL = 2.3; SWISSPROT HIT: P36594, EVALUE 1.10e-01; NT HIT: AF017633.1, EVALUE 2.00e-71; EST_HUMAN HIT: BE782403.1, EVALUE 0.00e+00
gtgagggtgcgggttgacggggtgcggagggtgcgttggtggaaggagaaaggggcgtccgagagggttcgggcggaaaaggaggcgtacctgcaagcaggacttgcgaagagcgtgcattcccagtgggcgaacgggaattcgaacggagagagggttatcttgtggggggctacccgtggagagcaaggcgcccccaggggttggatcggtgaaattgaggtcgcccctggggaacaggtgggcagaaaggagaaaccaggttgaggggactggagtgctcacgaggttaagaccaatggaccgataggcgcgccctgcaagattggaccggcaaggaggtgtcagtcgaccccatttccccttctgctgcagatgctgctcggttctcttgtccccccaactttaccgcgaagcccccagcctcagagtcccctcgtttctccttggaggcgctgacgggtccagatacggagctgtggcttattcaggcccctgcagactttgcccca

SEQ ID NO: 6504 - DNA, 504 bp, Homo sapiens
  MAP TO AC004584.1; EXPRESSED IN LUNG, SIGNAL = 1.8; EXPRESSED IN BONE MARROW, SIGNAL = 1.6; EXPRESSED IN FETAL LIVER, SIGNAL = 1.4; EXPRESSED IN ADULT LIVER, SIGNAL = 1.8; EXPRESSED IN BRAIN, SIGNAL = 1.3; EXPRESSED IN HELA, SIGNAL = 0.34; EST_HUMAN HIT: AA370632.1, EVALUE 9.00e-96; SWISSPROT HIT: Q14258, EVALUE 4.00e-18; NT HIT: gi16178751, EVALUE 2.00e-93
ctgggctctgaatccgggggtccggggttctgcacccaggcgtcagcttcctcatccgcagagtggcccccagaagcctccgggtggtcgcgaggatgctctaaatcccgggggctaaggccgagcccggcgtcccgcgcccagcccgcgggagctcttggggatcggagcgcggccgaccttcgccagctcatgggcgactgggactgcggtgcccgcaggctcccgggagtacctcgcgaggcccgcccagtcctcgccgcccgcccccccgcaccccacgtgacttcctgacggcttcagggactgctcctctcgagctaggtttcgtttcctcggcggcctcggagcgcgggtgcagcagttgtgtcccgacccctgggagcgccatggcagagctgtgccccctggccgaggagctgtcgtgctccatctgcctggagcccttcaaggagccggtcaccactccgtgcggccacaacttctgcgggtcgtgcctgaatg

SEQ ID NO: 6505 - DNA, 534 bp, Homo sapiens
  MAP TO AL109808.2; EXPRESSED IN HEART, SIGNAL = 7.2; EXPRESSED IN BONE MARROW, SIGNAL = 2.3; EXPRESSED IN ADULT LIVER, SIGNAL = 2.3; EXPRESSED IN BRAIN, SIGNAL =  15; EXPRESSED IN HELA, SIGNAL = 3.5; EST_HUMAN HIT: BF978807.1, EVALUE 0.00e+00; SWISSPROT HIT: P04156, EVALUE 7.00e-35; NT HIT: M13667.1, EVALUE 0.00e+00
tgcaccgttaccccaaccaagtgtactacaggcccatggatgagtacagcaaccagaacaactttgtgcacgactgcgtcaatatcacaatcaagcagcacacggtcaccacaaccaccaagggggagaacttcaccgagaccgacgttaagatgatggagcgcgtggttgagcagatgtgtatcacccagtacgagagggaatctcaggcctattaccagagaggatcgagcatggtcctcttctcctctccacctgtgatcctcctgatctctttcctcatcttcctgatagtgggatgaggaaggtcttcctgttttcaccatctttctaatctttttccagcttgagggaggcggtatccacctgcagcccttttagtggtggtgtctcactctttcttctctctttgtcccggataggctaatcaatacccttggcactgatgggcactggaaaacatagagtagacctgagatgctggtcaagccccctttgattgagttcatcatgagccgttgctaatgccaggcc

SEQ ID NO: 6506 - DNA, 515 bp, Homo sapiens
  MAP TO AC003972.1; EXPRESSED IN LUNG, SIGNAL = 1.7; EXPRESSED IN FETAL LIVER, SIGNAL = 1.7; EXPRESSED IN HELA, SIGNAL = 0.69; EXPRESSED IN ADULT LIVER, SIGNAL = 1.7; EXPRESSED IN HEART, SIGNAL = 1.6; EXPRESSED IN BONE MARROW, SIGNAL =   2; EST_HUMAN HIT: BI822768.1, EVALUE 2.00e-44; SWISSPROT HIT: P27539, EVALUE 1.00e-12; NT HIT: gi14766956, EVALUE 5.00e-47
gctcagcgggttccacagccgacaggtcgaagacgactgtccactcagggcaatgccccgcggccgaggcaggctccgaggcccgggtgggcgcacctggggaggtaggaacaggaactcggctcgcgctgcgtccccggcctgcccatggggtctcggttagggacagggaggaaggtgaacgctggggctcggggcgcaccgtctgtgggaagggtgtgaagcggcggggtgggctgatggagtgggggcagggcatgagttccaaggaaggcgccctgcggggtgcggcggggggggtgggctgccctcggcggggggcataggaggaggggtggccgaagtgggagacatgagccagaacctgggcccctggggaagccatgctagggtgtggggatggcatctgcaggaaggcattagtgtcaagaggtgggggtgggcatggggtggggacagggcttcagcatcaagcagaaggactggtcttgggaaccccctgacatgtgtccccg

SEQ ID NO: 6507 - DNA, 510 bp, Homo sapiens
  MAP TO Z68873.1; EXPRESSED IN PLACENTA, SIGNAL = 3.5; EXPRESSED IN BRAIN, SIGNAL = 2.2; EXPRESSED IN BONE MARROW, SIGNAL = 2.4; EXPRESSED IN FETAL LIVER, SIGNAL =   2; EXPRESSED IN LUNG, SIGNAL = 2.2; EXPRESSED IN HEART, SIGNAL = 2.1; EXPRESSED IN ADULT LIVER, SIGNAL = 2.5; EXPRESSED IN HELA, SIGNAL = 2.7; NT HIT: gi13652542, EVALUE 5.00e-04; EST_HUMAN HIT: BI918288.1, EVALUE 2.00e-90
tggtatgagggtggggccctgtagacaggtgaccagagtaggtccagtagaaatcaaagtctgggacttcttggttgctcccatttatcgtcagacctcctaccatcctttccactgttcatttggtgtatagaaatgtgtatagaagtatcttggaagaaaattattgggcattggggaaggtggagagaagatgaaataagaggaatggagaggctgctaatcatcctctcttccaccaagcacatggttctaccattttctgttcctctgtgtatctatctgtatgatgcaacaaaatcagaagagaaattttagtccatttccttcctccacttctaggtccacctccagaggcagctgtagtggcctttgagtggctgaagaccagcaccctcacaggcctacacccacaactaccactctctttaccccagcccgagtgcgctctaccataccttgttcgtgcttttagcaggggtgattacatgggccgcattcaggaagtgg

SEQ ID NO: 6508 - DNA, 505 bp, Homo sapiens
  MAP TO AL139347.2; EXPRESSED IN ADULT LIVER, SIGNAL =  15; EXPRESSED IN BRAIN, SIGNAL = 6.6; EXPRESSED IN HELA, SIGNAL =  15; NT HIT: gi16157477, EVALUE 0.00e+00; SWISSPROT HIT: P18124, EVALUE 1.00e-84; EST_HUMAN HIT: BG621596.1, EVALUE 0.00e+00
tggcgaggatggcaagaaaagctggcaacttctatgtacctgcagaacccaaattggcgtttgtcatcagaatcagaggtatcaatggagtgagcccaaaggttcgaaaggtgttgcagcttcttcgccttcgtcaaatcttcaatggaacctttgtgaagctcaacaaggcttcgattaacatgctgaggattgtagagccatatattgcatggaggtaccccaatctgaagtcagtaaatgaactaatctacaagcgtggttatggcaaaatcaataagaagcgaattgctttgacagataacgctttgattgctcgatctcttggtaaatacggcatcatctgcatggaggatttgattcatgagatctatactgttggaaaacgcttcaaagaggcaaataacttcctgtggcccttcaaattgtcttctccacgaggtggaatgaagaaaaagaccacccattttgtagaaggtggagatgctggcaacagggaggacca

SEQ ID NO: 6509 - DNA, 511 bp, Homo sapiens
  MAP TO AC005788.1; EXPRESSED IN BRAIN, SIGNAL = 2.4; EXPRESSED IN HELA, SIGNAL = 2.2; EXPRESSED IN PLACENTA, SIGNAL = 1.8; EXPRESSED IN ADULT LIVER, SIGNAL = 1.9; EXPRESSED IN HEART, SIGNAL = 1.4; EXPRESSED IN LUNG, SIGNAL = 1.4; EXPRESSED IN BONE MARROW, SIGNAL = 1.5; NT HIT: gi4506326, EVALUE 2.00e-43; SWISSPROT HIT: P23468, EVALUE 2.00e-08; EST_HUMAN HIT: BG910649.1, EVALUE 1.00e-36
gtgaagcggggtggggtggggcggcccaggcgctccctgtcgtccgctgtgcccatgcccacggccttcctgcctggccctggcccggccctgccctgtcctgtcccaagtccctgcttcgggagacggcacgggtgcagaggctgcagaaagaaggtggaggaggaggaagaggggggaggggagcaaggggagggggcagtggtggggggcggtggtgccaccgaggcacgtcccacctttgccaacgccggagcctcggggtccggacttgccttgagtgaccacgaggaagcagaaaagtgagcacttacctgggcaggggagagggagggggctggggtgggggtgggcgcaaggcccggtccggctctggtgcaggggtcgccgcgcgcctaccttggtcccgcaggaacgtccggtagcggacgggggggctgaaggggccagggccccggcgcgtgtgggctcgcacttggaggtcataggccgtgtcgggcttcaggccctg

SEQ ID NO: 6510 - DNA, 510 bp, Homo sapiens
  MAP TO AL096810.1; EXPRESSED IN BRAIN, SIGNAL = 1.6; EXPRESSED IN ADULT LIVER, SIGNAL = 1.3; EXPRESSED IN PLACENTA, SIGNAL = 1.7; EXPRESSED IN LUNG, SIGNAL = 1.2; EXPRESSED IN BONE MARROW, SIGNAL = 1.2; EXPRESSED IN FETAL LIVER, SIGNAL = 1.4; NT HIT: AL096810.1, EVALUE 0.00e+00; SWISSPROT HIT: P13983, EVALUE 1.00e-27
cgggcacctccctcctaatcccaccagaccacctgcccgccacgggcacctccctcctaatccctccagaccacctgcccgccacgggcacctccctcctaatccctccagaccacctgcccaccacagacacctccctcctaatcccaccagacaacctgcccaccacgggcacctccctcctaatcccaccagacaacctgcccaccacgggcacctccctcctaatcccaccagacaacctgcccaccacaggcacctccctcctaatcccaccagacaacctgcccaccacgggcacctccctcctaatcccaccagaccacctgcccaccacgggcacctccctcctaatcccaccagaccacctgcccaccacgggcacctccctcctaatccctccagaccacctgcccgccacgggcacctccctcctaatcccaccagaccacctgcccaccacgggcacctccctcctaatccctccagacaacctgcccaccacaggca

SEQ ID NO: 6511 - DNA, 573 bp, Homo sapiens
  MAP TO AC007009.1; EXPRESSED IN ADULT LIVER, SIGNAL = 2.6; EXPRESSED IN PLACENTA, SIGNAL = 8.3; EXPRESSED IN BRAIN, SIGNAL = 4.5; EXPRESSED IN LUNG, SIGNAL = 2.9; EXPRESSED IN HEART, SIGNAL = 3.1; EXPRESSED IN BONE MARROW, SIGNAL = 4.4; EXPRESSED IN HELA, SIGNAL = 4.3; NT HIT: S53251.1, EVALUE 5.50e-01; EST_HUMAN HIT: AI217877.1, EVALUE 8.10e-01
tggtggtggtggtgatggtggaggaggtgatggtggtagtggtgggggtagtggtgattaaggagataatggtggtggtggttgtggttgttgtggaggagatggtggttgttgtggaagaggtgatggtggtagtgctgggggtagtggtggtgaaggagatggtggtggtggtggtggtggtggaggtggtgatggtaatagcagtagtgaaagaggtgagtggtagtggtggtggtaagggtgacggtaatggttgtggtggttgttgcgatggtggtggcagtggtgaggataacagccacggtaaaggctccagtaatgacatagtgctggtaatggggatgtacttactatgaattctatagtagatccagaagacaaccatgcgaagcatcaatacaggagagtttgttggggtttctaggttatgttactttctcactctccatttcaccctagattgtcagttttatgtgagtttcacaggtgaggctatgaattgcagtgggacaggaggtctggccagatctcaccccagggtaacccaacccaccccctgcctggctttca

SEQ ID NO: 6512 - DNA, 558 bp, Homo sapiens
  MAP TO D16583.1; EXPRESSED IN HEART, SIGNAL = 2.1; EXPRESSED IN BONE MARROW, SIGNAL = 2.4; EXPRESSED IN LUNG, SIGNAL =   2; EXPRESSED IN ADULT LIVER, SIGNAL = 2.1; EXPRESSED IN BRAIN, SIGNAL = 2.1; EXPRESSED IN HELA, SIGNAL = 2.3; EXPRESSED IN PLACENTA, SIGNAL = 3.6; NT HIT: D16583.1, EVALUE 0.00e+00; EST_HUMAN HIT: BF133586.1, EVALUE 5.00e-02; SWISSPROT HIT: P19113, EVALUE 1.00e-51
tgacgggaagatggccctggtttaaaaccatttagcagtctgaaagtttatgcatagtctcttgtctgatgattaatctcagttctctttatacttgcaattccagggtactgaaatggctaaatattttgaatctctggtcagaaacgacccttcctttgaaattcctgccaagaggcaccttggcctggtggtttttcgtctaaaggtaataccatcttccaagcccctctgtgaatgatgtcttgtggtgctccagagcctctcggaaacacaaactgggctctggggatgctgacagggggtgcgatggagacttcacttcctttatttttcaaacagggtcctaattgtctcacagaaaatgtgttaaaggaaatagctaaagctggccgtctcttcctcatcccggccactatccaggacaagttaatcatccgtttcactgtgacatcccagtttaccactagggatgacatcctgagagactggaatctcattcgagatgctgccactctcatcctgagtcagcactgtacttcccaacccagccctcgg

SEQ ID NO: 6513 - DNA, 518 bp, Homo sapiens
  MAP TO AC008468.4; EXPRESSED IN BONE MARROW, SIGNAL = 1.3; EXPRESSED IN FETAL LIVER, SIGNAL = 1.2; EXPRESSED IN LUNG, SIGNAL = 1.3; EXPRESSED IN HEART, SIGNAL = 1.3; EXPRESSED IN ADULT LIVER, SIGNAL = 1.2; EXPRESSED IN BRAIN, SIGNAL = 2.6; NT HIT: gi14165384, EVALUE 0.00e+00; EST_HUMAN HIT: BG719192.1, EVALUE 5.00e-82; SWISSPROT HIT: Q9UN73, EVALUE 7.00e-94
acagtgccctggaccgcgagagcgtgtcggcctatgagttggtggtaaccgcgcgggacgggggctcgccttcgctgtgggccaccgccagcttgtctgtggaggtggccgacatgaatgacaatgctccggcgttcgcgcagcccgagtacacagtgttcgtgaaggagaacaacccgccgggctgccacatcttcacggtgtctgcgcgagacgcggacgcgcaggagaacgcgctggtgtcctactcgctggtggagcggcgggtgggcgagcgcgcgttgtcgagctacatttcggtgcacgcggagagcggcaaggtgtacgcgctgcagccgctggaccacgaggagctagagctgctgcagtttcaggtgagcgcgcgcgacgcgggcgtgccgcctctgggcagcaacgtgacgctgcaggtgttcgtgctggacgagaacgacaacgcgccggcgctgctggcgcctcgggtgggtggtactggtggtgcagtgagcgagctggtgccg

SEQ ID NO: 6514 - DNA, 505 bp, Homo sapiens
  MAP TO AC010328.4; EXPRESSED IN BRAIN, SIGNAL = 1.7; EXPRESSED IN HELA, SIGNAL = 1.8; EXPRESSED IN ADULT LIVER, SIGNAL = 1.8; EXPRESSED IN BONE MARROW, SIGNAL = 1.5; EXPRESSED IN FETAL LIVER, SIGNAL = 1.7; EXPRESSED IN LUNG, SIGNAL = 1.5; NT HIT: gi14211906, EVALUE 1.00e-125; EST_HUMAN HIT: BG774402.1, EVALUE 1.00e-125; SWISSPROT HIT: P20701, EVALUE 9.20e-01
tgactgaacgattgctttgctggctacagtattgtaggttgggaactaggcttccatactattaatttgaattacatggaatcaactttattaaacaatcctctttcctttgtgttcctaaaaattgaatattattgttctgaagtttcataaatctgtttaatataagaattgcttttggtttaatattgtttttcggtgtaatattgtttttcggtgtaaaatacttgtttacgtactacaattaattggaaacctatggatctttatatcttgtagctctctcttccgaatttgtaatgaaagatttactacacaaagggaagagtaatacaggagaagtattccaaacagtgatgttggaaagacaggaaagccaagacattgaaggatgttccttcagggaagtccagaaaaatacacatggccttgagtatcaatgcagagatgctgaaggaaattacaaaggagtgcttttgacccaagaaggcaatctcactcatgg

SEQ ID NO: 6515 - DNA, 501 bp, Homo sapiens
  MAP TO AC005618.1; EXPRESSED IN PLACENTA, SIGNAL = 1.5; EXPRESSED IN HELA, SIGNAL = 2.6; EXPRESSED IN ADULT LIVER, SIGNAL = 1.5; EXPRESSED IN BRAIN, SIGNAL = 1.7; EXPRESSED IN HEART, SIGNAL = 1.8; EXPRESSED IN FETAL LIVER, SIGNAL = 1.6; EXPRESSED IN LUNG, SIGNAL = 1.6; EXPRESSED IN BONE MARROW, SIGNAL = 1.6; NT HIT: gi14724288, EVALUE 0.00e+00; EST_HUMAN HIT: AA296447.1, EVALUE 9.00e-93; SWISSPROT HIT: Q9Y5I4, EVALUE 2.00e-42
cccacccactttccctcatgcttcctactctgcttacattcctgaaaacaaccccagaggagcctccatcttatctatgactgctcaagaccctgacagtggtgacaatgcccgaatcacttactccctggccgaagacaccttccagggtgcacctctgtcctcctatgtctccatcaactccaatacagggatcctatatgctctttgctccttcgactatgagcagtttagagacctgcagctgctgatgacagccagtgacagtggagaccctccactcagcagcaatgtgtcactgagcctctttgtgctggaccagaacgacaatgtccctgagatcctgtaccccaccttccctactgatggctccactggtgtggagctggcaccccgctccgcagattccggctacctggtgaccaaagtggtggcagtggacagagactcaggtcagaatgcctggctgtcctacagcctactcaagtccagcgagccggg

SEQ ID NO: 6516 - DNA, 517 bp, Homo sapiens
  MAP TO AL008723.8; EXPRESSED IN ADULT LIVER, SIGNAL = 2.9; EXPRESSED IN PLACENTA, SIGNAL = 4.4; EXPRESSED IN HELA, SIGNAL = 0.86; EXPRESSED IN BONE MARROW, SIGNAL =  83; EXPRESSED IN HEART, SIGNAL = 2.7; NT HIT: X51755.1, EVALUE 1.00e-47; EST_HUMAN HIT: AW574942.1, EVALUE 2.00e-41; SWISSPROT HIT: P15814, EVALUE 2.00e-22
acccgggagctgtgacggtggcctggaaggcaaacagcacccctgtcacccagggtatggaagtcaccaaggcctccaaacagagcaacaagtacacagccagaagcgacctgagcctgacaccccatcaatggaggtcccgcagcagctacagctgccgggtcacacacaaagagagcgctgtggagaagacagtggcccctgaagaatgttcttaggcccctgaccctcgccccacccatgggggcctggagctgcaggatcccagaacagggatcccctcccaccccaaatcatccagcccttctccctgcacccaggaaacccttaataaatatcctcactgtcaaccagaaatcctgctccctctcttcatttcttagctaacatataatttgacactcaccctgggttctcagtgtgtgtaaggggggattcctggcacccagtgggatagtagcccagggggagaggctcccagactcccaggggtgtctcctggggaaacaggccaggc

SEQ ID NO: 6517 - DNA, 529 bp, Homo sapiens
  MAP TO AP001674.1; EXPRESSED IN FETAL LIVER, SIGNAL = 5.7; EXPRESSED IN ADULT LIVER, SIGNAL =  11; EXPRESSED IN HELA, SIGNAL =  34; EXPRESSED IN PLACENTA, SIGNAL = 7.3; SWISSPROT HIT: P05092, EVALUE 7.00e-86; NT HIT: gi14780058, EVALUE 0.00e+00; EST_HUMAN HIT: BI823372.1, EVALUE 0.00e+00
tgggccgcgtctcctttgagctgtttgcagacaaggtcccaaagacagcagaaaattttcgtgctctgagcactggagagaaaggatttggttataagggttcctgctttcacagaattattccagggtttatgtgtcagggtggtgacttcacacgccataatggcactggtggcaagtccatctatggggagaaatttgaagatgagaacttcatcctaaagcatacaggtcctggcatcttgtccatggcaaatgctggacccaacacaaatggatcccagtttttcatctgcactgccaagactgagtggttggatggcaagcatgtggtgtttggcaaagtgaaagaaggcatgaatattgtggaggccatggagcgctttgggtccaggaatggcaagaccagcaagaagatcaccattgctgactgtggacaactcgaataagtttgacttgtgttttatcttaaccaccaggtcattccttctgtagctcaggagagcacccctccaccccatttgctcgc

SEQ ID NO: 6518 - DNA, 502 bp, Homo sapiens
  MAP TO AC008101.15; EXPRESSED IN LUNG, SIGNAL = 3.4; EXPRESSED IN PLACENTA, SIGNAL = 4.2; EXPRESSED IN HELA, SIGNAL = 8.9; EXPRESSED IN ADULT LIVER, SIGNAL =   2; NT HIT: gi16166973, EVALUE 0.00e+00; SWISSPROT HIT: Q9NY65, EVALUE 5.00e-94; EST_HUMAN HIT: F01302.1, EVALUE 0.00e+00
ggcactggctccggcttcacttctctgctgatggaacgcctctccctggattatggcaagaaatccaagctggagtttgccatctacccagccccccaggtctctactgcagtggtggagccctacaactccatcctgaccacccacaccacactggaacattcagattgtgctttcatggtggacaacgaagccatctatgacatctgccgcaggaaccttgacattgagcgccctacctataccaacctcaaccgcctcatcagtcagattgtgtcctcaatcactgcttctctccgctttgacggggccctcaatgtggacctcactgagttccagaccaacctggtgccctacccccgcatccacttcccgctggtcacctacgcgcccatcatctctgccgagaaagcctatcacgaacagctctctgtggccgagataaccagctcctgctttgagcccaatagccagatggtgaagtgcgacccgagacatggca

SEQ ID NO: 6519 - DNA, 528 bp, Homo sapiens
  MAP TO Z97653.12; EXPRESSED IN HEART, SIGNAL =   2; EXPRESSED IN LUNG, SIGNAL = 2.2; EXPRESSED IN BONE MARROW, SIGNAL = 0.95; EXPRESSED IN ADULT LIVER, SIGNAL = 2.2; EXPRESSED IN HELA, SIGNAL = 0.46; EXPRESSED IN PLACENTA, SIGNAL = 1.5; NT HIT: M20781.1, EVALUE 3.20e-02; EST_HUMAN HIT: BI547647.1, EVALUE 5.00e-82; SWISSPROT HIT: P56695, EVALUE 3.80e-02
ccaggtgccaaggctgaggctggtccacctgccggggtgcacgggcccccagccagggcagcccgggacagtggagcagccaggctgggtggtgggagggtgggtgggggtggtggctggcaggggcggttcttggtggctggcgtgcccttggtgatgctggccgcacccaggccgttgggctggcccggcagcttcaccagaccgtttcgaggcaagcatggaggcttggggtcgccgtcgatgcccgggctcgacatcttcctggcacgctctgtggatgagggccgggagggggagtgagtctgttgctgagtctggaaggccggggttgggggcgggtgcagtggggctccttccctccttgggcgtccctatggtgctcccagaaccaccagacagagaggatgggagtgcctgcttctccctcccagactgtgagcagcaacaggaagccaaccatggccactggcagcactcactgggcacctacggtatgcactgagcccaaccttcattgcccatgga

SEQ ID NO: 6520 - DNA, 504 bp, Homo sapiens
  MAP TO AC005368.1; EXPRESSED IN ADULT LIVER, SIGNAL = 1.8; EXPRESSED IN PLACENTA, SIGNAL = 1.8; EXPRESSED IN BRAIN, SIGNAL = 1.2; EXPRESSED IN HELA, SIGNAL = 1.9; EXPRESSED IN BONE MARROW, SIGNAL = 2.2; EXPRESSED IN LUNG, SIGNAL = 2.7; EXPRESSED IN HEART, SIGNAL = 1.6; NT HIT: gi14724241, EVALUE 2.00e-96; EST_HUMAN HIT: BE878682.1, EVALUE 2.00e-96; SWISSPROT HIT: O60610, EVALUE 3.00e-18
gcaaaggagggggtggagggatggtagcatccccagacaaaggagggggtggagagatagcagtacctccaggtaaagaagggggtgaggagatgcaaacacccccaggcaaaggaggtggaggaggaggaggaggaggaggaggaggaggagtggtactatccccaggagcaggtggtggtggaataatagtgccagagtcaccaggtaaaggaggggcagggggaacaggagcacgactaggaacagaaggaggtacagtaatagctgccgcagagagggaagccatttctttcttggcatcttccagttcctttgtcagcttggcaacctacagaaataacatcaatgtgagtacttctcaccccacttcagggactactgggactggaaggaacctaataaactacttaatccaaacttctcatgttacaaatggaggaactgagaggagtcagagagatgacatgatcacctaaagtcacacggcttggcagcagagcc

SEQ ID NO: 6521 - DNA, 513 bp, Homo sapiens
  MAP TO AL138849.5; EXPRESSED IN BONE MARROW, SIGNAL = 2.6; EXPRESSED IN FETAL LIVER, SIGNAL = 2.1; EXPRESSED IN LUNG, SIGNAL = 2.5; EXPRESSED IN HEART, SIGNAL = 2.8; EXPRESSED IN PLACENTA, SIGNAL = 3.8; EXPRESSED IN ADULT LIVER, SIGNAL = 2.3; NT HIT: gi14728782, EVALUE 0.00e+00; EST_HUMAN HIT: BF968354.1, EVALUE 0.00e+00; SWISSPROT HIT: Q04952, EVALUE 8.20e+00
tttttctgtggtttccccaagcagaatacaaccattggttgccatattgttcgacttgactggtttcttattgcttattttccccttctctcttttcttgaaatccactgtagacttatttccacccttcgtctgaggacaggcaaaataccgataagctgccctaaatctctccacaacatattcgtaaaccagctggctgtttaagctccgtgcaacattcctcttgactgaaaatggatctagcaaaagagaaaatggtaaatagctaagtctctactaacaaactacatttccaagctcatacaagtagatcttaactgataaactgtcaggagaatacattttcccaaggggtttttctaagctagactcccagtgaaagttcctgaaaatgggaggaaatacaattgcaacatttttttctttctctcataaaataaaaagctaaaaggaaaaataaacaagactaataataaggtcactaataatgggatggctgagaaggccaac

SEQ ID NO: 6522 - DNA, 545 bp, Homo sapiens
  MAP TO AL139248.2; EXPRESSED IN PLACENTA, SIGNAL = 2.6; EXPRESSED IN ADULT LIVER, SIGNAL = 1.9; EXPRESSED IN BRAIN, SIGNAL = 1.7; EXPRESSED IN HELA, SIGNAL = 1.2; EXPRESSED IN BONE MARROW, SIGNAL =   2; EXPRESSED IN LUNG, SIGNAL = 1.9; EXPRESSED IN HEART, SIGNAL = 2.3; EXPRESSED IN FETAL LIVER, SIGNAL = 1.7; NT HIT: gi13638241, EVALUE 2.00e-96; SWISSPROT HIT: Q9UPN9, EVALUE 4.00e-09; EST_HUMAN HIT: BE171141.1, EVALUE 3.00e-96
tgttcccgatgctcccccaccacacaatcctggcacacgggccggtcacagaactcacagaacagcctcagttcctctgcagggtgaacaggacacaggatgggcttcccaatccggctgtagcctttcaagtcttttaggtccaccatggtgtggtaagtcgttttcttctgccgcctaggggcaaacagaatcagtaacaggaaataaggggataattctgttgggaatagttgggcagagagattttaggagcacaggatctgaagttaaacaaacctgatttcaattccttgctctaatctctaattgcatgaacctctctgattccagtttctcatctgtacagtggggacaatacctacctgaaagagctgttgtatagaataacgtgtgaacagactagggctctggctggctacatgcctatgcagaaggttgcaagactatgactgcatgctagaactttcccaaagagtttagacaagagtcacagtcggcttcctaaggtaagctagcagtgagggcatggcagaaaaccagca

SEQ ID NO: 6523 - DNA, 513 bp, Homo sapiens
  MAP TO AL157858.2; EXPRESSED IN ADULT LIVER, SIGNAL = 1.4; EXPRESSED IN HELA, SIGNAL = 1.4; EXPRESSED IN BRAIN, SIGNAL = 2.6; EXPRESSED IN HEART, SIGNAL = 1.8; EXPRESSED IN BONE MARROW, SIGNAL = 1.4; EXPRESSED IN LUNG, SIGNAL = 1.5; EXPRESSED IN FETAL LIVER, SIGNAL =   1; NT HIT: Y17045.1, EVALUE 1.90e+00
tggggttaggggccctctggaatgagcttcaaatggctcagtttaaagtgttcaggaaccactgatgtgtactaacttagtgtagatattcaccaccatcattgctaccaccgctgccattaccatcactatcatcgccaccccatcttcattaccactgtcaccatcatcaccgccatcatcacctccatcaccaccactgttaacccaaccatcacaaccattacgctaaccaccactatcatcatcattaccatcatcaccccatcatcattaccgctatcaccatcgccaccaccactgccatcaccaccaccaataccacctccaccaccatataaccaccatcactatcaccaccagcattttaaccttcaacaccaccatcacctccatcacgagtatcaccatcaccaccattgtcaaccgaaccatcaccaccaccattaccctaaccatcactatcatcaccaccatcattagcatcatcactgctgccaccatcaccattgc

SEQ ID NO: 6524 - DNA, 501 bp, Homo sapiens
  MAP TO AC024196.2; EXPRESSED IN HELA, SIGNAL =   3; EXPRESSED IN PLACENTA, SIGNAL = 1.6; EXPRESSED IN ADULT LIVER, SIGNAL = 1.6; EXPRESSED IN BRAIN, SIGNAL = 1.8; EXPRESSED IN FETAL LIVER, SIGNAL = 1.7; EXPRESSED IN HEART, SIGNAL = 1.8; SWISSPROT HIT: Q88894, EVALUE 2.40e-01; EST_HUMAN HIT: BG682569.1, EVALUE 2.00e-75
gcgtgtggagctgctggtggtcctgcgctggtagttgatgatcccagcagagccagagctgaagccccctccacttcggtacccagacctggaactaaactgtcgactcatgttgacttagagaaaagtaggagcaaggtagagtaagggaaggagctaaacactcctctaccccaagcatagagacttccccttatatacagggaagaaattgggcttggtcttctagagtcagcggagatgcagtgcctgtcaagggtttggcttgcctgcagccatacaagatttttacgagcctcaacaatacgataaacactacacacctagctcccaggatgggctctcaaaattgctgtgcatgcaagattggttcatgtggtaattattttatcacacaagatcttccttcaagcatttgtggctttgggaaaacaggaccccacatctgatacctggtgtttcttggtaggatttcataacccccatcaaaaaggcatgaaa

SEQ ID NO: 6525 - DNA, 523 bp, Homo sapiens
  MAP TO AL022238.1; EXPRESSED IN HELA, SIGNAL = 0.33; EXPRESSED IN BRAIN, SIGNAL = 1.4; EXPRESSED IN ADULT LIVER, SIGNAL = 1.4; EXPRESSED IN BONE MARROW, SIGNAL = 1.1; EXPRESSED IN LUNG, SIGNAL = 1.2; EXPRESSED IN HEART, SIGNAL = 1.4; NT HIT: gi14779091, EVALUE 0.00e+00; SWISSPROT HIT: P10162, EVALUE 8.40e-02; EST_HUMAN HIT: BI913549.1, EVALUE 7.00e-72
ccggcaccctcaccaacctctctcaggtggcccaggatggggggccgcaccttgacccacagcacacggggaggaggggtcaccttgaagttcagagcgcgggggctgcggaaaacaaaccagcccttcctgctctgccccccagcctggcccagtcagaccacagctgtggggtgatccaggcctcctcaggctttgtgcacctcaggttctgatcctggcacggtttgggaggaaggcagacccagctctgattatctgttttcaattcttggagccagcgtcagaggctatttcagatgagacagtataagccaagggctggtgggttctcttcctcccggggccaggaccaccctgacccactcctcttggtgcaggttgttcgccgcaggacccagcggaggaagtccaccatcactgctctgctcttcggtgagagctctgcgagtgccaggcagtgtgggcatgcgggagtctgtcctcacgctcatgtggacgtggagcttcctcctcgggggcc

SEQ ID NO: 6526 - DNA, 588 bp, Homo sapiens
  MAP TO AC007567.1; EXPRESSED IN ADULT LIVER, SIGNAL = 8.2; EXPRESSED IN BRAIN, SIGNAL = 8.2; EXPRESSED IN HELA, SIGNAL =  14; EXPRESSED IN LUNG, SIGNAL = 8.8; EXPRESSED IN HEART, SIGNAL = 7.6; EXPRESSED IN BONE MARROW, SIGNAL =   9; EXPRESSED IN FETAL LIVER, SIGNAL = 8.7; NT HIT: gi14741205, EVALUE 5.00e-23; SWISSPROT HIT: P14180, EVALUE 1.10e+00; EST_HUMAN HIT: H37903.1, EVALUE 2.00e-38
tgagccactgcatccagcccaaccctctacttcttaagtgtgaactgctcatagtgacttccttccaaagagtacagtatggaaggattgggtagtctctttacagtgcagaaacctgataaatactacctcagccaggtgatcaaggccaacatcaacagtgatgtcatgttgatagtatatatttttgatatgatatgatgtgatgaaaatagcactctacctctgtggccttagccctagtcttatcatgagaaagacctctggcaaatcacaatagagggatatcttacaaaaaatatctgatcaattcacctcaaaactgtcaaggtcatcaaaaacaaggaaagtctgagaaactgtcacagccaagaggatcctagggagacataacaaataaaatgtaatatggtatcctagataggatcctgggacagaagaaaaaaacaagattagtaaaaatctaaggaaatatgaataagtatacagttaataataatgtattcatattgattcattaattataacaaatataccagccaaatgcaagacgttaataataggggaaactgggtgtggtatttacgg

SEQ ID NO: 6527 - DNA, 530 bp, Homo sapiens
  MAP TO AC008481.4; EXPRESSED IN LUNG, SIGNAL = 2.1; EXPRESSED IN ADULT LIVER, SIGNAL = 2.4; EXPRESSED IN BRAIN, SIGNAL = 2.1; EXPRESSED IN HELA, SIGNAL = 0.92; EXPRESSED IN HEART, SIGNAL = 2.2; EXPRESSED IN BONE MARROW, SIGNAL = 2.1; NT HIT: gi16176275, EVALUE 2.00e-93; EST_HUMAN HIT: BI764621.1, EVALUE 2.00e-93; SWISSPROT HIT: P53278, EVALUE 3.80e+00
tggactgggcgaggaggtgccctgtgccatgatggagggtgtggcagcctacacccagacagagcccgagggtagccagcctagcaccatggacgccaccgcagtagcaggcatcgagaccaagaaaggtctgggggacctgtcgtggcctctggccaggggtggttgggcctgggaggggccgggcgaggaatggccctcgaagtgggcacctcggcagccttcgtcccctgcggacaccaccctgtgtccaccctgtagagaaggaggacctgtgcttgctaaagaaggaggagaaggaggagccagtagccccggagctggcaacaacggtgcctgagagcgcagagcctgaggcagaggcggacggggaggagctggacggcagcgacatgtcagccatcatctatgaaatccccaaggagcctgagaagtgggtgccggggcgggcaagggtgagggcgagggctagaagcggcccgcaggcccccagcctgcctggtgcgggagccccgatgtcatggcccctt

SEQ ID NO: 6528 - DNA, 509 bp, Homo sapiens
  MAP TO AL159140.2; EXPRESSED IN ADULT LIVER, SIGNAL = 2.4; EXPRESSED IN HELA, SIGNAL = 1.9; EXPRESSED IN HEART, SIGNAL = 2.7; EXPRESSED IN FETAL LIVER, SIGNAL = 2.4; NT HIT: gi14753049, EVALUE 1.00e-124; SWISSPROT HIT: P52418, EVALUE 1.20e+00; EST_HUMAN HIT: BG772522.1, EVALUE 0.00e+00
ttgcgtcgctcaggttccccagcgccgcggtcgccacggtgctgaaggagagcacggccgccgtggccgcggaggaagtcccgccaggtgggccggccgcggagggggcgccggagtgctggctgcccagtaaggccatgctcgctggtgggcggggcggctgcggctcctccatggggcccagtggcggccgcggatctcctcatcccgcaccgggggcggcggccgctaggtcggagtggtggctcggggccgggggctagcggccgccgcggggagctgggctcggccggaggggtggcggtcgctggggacctggcggagcctttgacgtgggttccagcgttgccgagggaaccgcgtgtttacgcaggagcgcggggcgggacggcagcccagtacccgctgcaaagccgacccgcgacaccgccactccggaggttaccggcccgggtgttcgggtttccgagagtgccaggtcgacctcctgagggaccaatgtccggcca

SEQ ID NO: 6529 - DNA, 525 bp, Homo sapiens
  MAP TO AC007920.18; EXPRESSED IN ADULT LIVER, SIGNAL = 2.6; EXPRESSED IN BRAIN, SIGNAL = 1.2; EXPRESSED IN BONE MARROW, SIGNAL = 1.1; EXPRESSED IN LUNG, SIGNAL = 1.1; EXPRESSED IN HEART, SIGNAL = 1.6; EXPRESSED IN HELA, SIGNAL = 1.1; NT HIT: AF284421.1, EVALUE 0.00e+00; SWISSPROT HIT: O00187, EVALUE 5.00e-14; EST_HUMAN HIT: AW855182.1, EVALUE 0.00e+00
acgagggcggcaaagacacgtgccttggagatagcggtggggcctttgtcatctttgatgacttgagccagcgctgggtggtgcaaggcctggtgtcctgggggggacctgaagaatgcggcagcaagcaggtctatggagtctacacaaaggtctccaattacgtggactgggtgtgggagcagatgggcttaccacaaagtgttgtggagccccaggtggaacggtgagctgacttacttcctcggggcctgcctcccctgagcgaagctacaccgcacttccgacagcacactccacattacttatcagaccatatggaatggaacacactgacctagcggtggcttctcctaccgagacagcccccaggaccctgagaggcagagtgtggtatagggaaaaggctccaggcaggagacctgtgttcctgagcttgtccaagtctctttccctgtctgggcctcactctaccgagtaatacaatgcaggagctcaaccaaggcctctgtgccaatcccagca

SEQ ID NO: 6530 - DNA, 507 bp, Homo sapiens
  MAP TO AP001697.1; EXPRESSED IN ADULT LIVER, SIGNAL = 1.5; EXPRESSED IN PLACENTA, SIGNAL = 3.3; EXPRESSED IN BRAIN, SIGNAL = 1.4; EXPRESSED IN HEART, SIGNAL = 1.3; EXPRESSED IN LUNG, SIGNAL = 1.4; EXPRESSED IN BONE MARROW, SIGNAL = 1.4; EXPRESSED IN HELA, SIGNAL = 0.91; SWISSPROT HIT: P31792, EVALUE 2.00e-22; EST_HUMAN HIT: AU134310.1, EVALUE 0.00e+00; NT HIT: AF009668.1, EVALUE 0.00e+00
gaaggccctgacccaagccccagtgttaagcttgccaatggggcaagacttttctttatatgtcacagaaaaaacaggaatagctccaggagtccttacgcagatccaagggacgagcctgcaacccatggcatacctgagtaaggaaattagtggcaaagggttggcctcattgtttatgggtagtggcagcagtcacagtcttagtaactgaagcagttaaaatgatacaaggaagagatcttactgtgtggacatctcatgatgtgaatggcatactcactgctaaaggagacttgtgactgtcagacaactgtttacttaaatatcaggctctattacttgaagggccagtgttgcgactgtgcacttgtgcaactcttaacccagccacattgcttccagacaatgaagaaaagatagaacataactgtcaacaaataattgctcaaacctacactgctcgaggggaccttttagaagttcccttgactgatcccgatctca

SEQ ID NO: 6531 - DNA, 510 bp, Homo sapiens
  MAP TO AC006063.1; EXPRESSED IN HEART, SIGNAL = 1.7; EXPRESSED IN ADULT LIVER, SIGNAL = 1.3; EXPRESSED IN HELA, SIGNAL = 2.2; SWISSPROT HIT: Q09470, EVALUE 3.00e-47; EST_HUMAN HIT: H41110.1, EVALUE 1.00e-109; NT HIT: gi11525741, EVALUE 0.00e+00
gccggttgcggtcgaagaagtactcgttcctcagggggtcgaagtagcgcatgcgtttcttagggttgcccagcagcgtgttggggaactgcgccagggtcttgagctgcgtctcgaagcgcagcccggagatgttgatcaccacgcgctcgcagcactcgtggtcgtcgtggtcggcctgccgggggtagctgccatcctgggggtggcccggggcggccgaagcctcgtccacgttctccccagacatcaccgtcatggtggaagccgggcgcgggggtgggaggccaggagagagcccggggtgggaagcagccagggaccaggggtgggggggacccaagcggcccccccaccggagcgcgcgtctccctcacgcccagggggaggtgcttcaacacgagcaggtcgggagatctgcgactttgcctctcgctgccttcccctccaccctgcctttcactcagtttggaatccccctcgcctgcgggccgggtgcagctttttgca

SEQ ID NO: 6532 - DNA, 516 bp, Homo sapiens
  MAP TO Z94055.1; EXPRESSED IN PLACENTA, SIGNAL = 1.8; EXPRESSED IN BRAIN, SIGNAL = 1.9; EXPRESSED IN HELA, SIGNAL =   4; EXPRESSED IN ADULT LIVER, SIGNAL = 1.7; EXPRESSED IN FETAL LIVER, SIGNAL =   2; EXPRESSED IN LUNG, SIGNAL = 1.7; EXPRESSED IN BONE MARROW, SIGNAL = 1.8; NT HIT: gi14723980, EVALUE 3.00e-64; EST_HUMAN HIT: BE788654.1, EVALUE 1.80e-01; SWISSPROT HIT: P10039, EVALUE 3.00e-13
tgcacctgggcttgagcacgttcccttcccaactttccactcttccctaccagttttttctgggaacaccttccaataaatcacttttacatgaatctttagcaaagacctacttctaaggaatccatcctaagacaccttaaaggtcagcttctggaggacaagggcccagatctcattcatctttgcccccagccctgtgctaggcacagacagcccatgctaggtgaaaatatttattaaattgaatatgtaccaaactacgttgagcttcactctcagcaacagaaatctggtcagagaatgagtagagaggcctttgcccatccttccccagcaccattgacaggagaggccactgctgctctttgaccttctccttgaccattccaggacaactggactatatccctcactgcagtggccacggcaactttagctttgagtcctgtggctgcatctgcaacgaaggctggtttggcaagaattgctcggagccctactgcccgctgggtt

SEQ ID NO: 6533 - DNA, 526 bp, Homo sapiens
  MAP TO AF051976.2; EXPRESSED IN PLACENTA, SIGNAL = 3.8; EXPRESSED IN ADULT LIVER, SIGNAL =   3; EXPRESSED IN BRAIN, SIGNAL = 5.2; EXPRESSED IN HELA, SIGNAL = 2.9; EXPRESSED IN LUNG, SIGNAL = 3.3; EXPRESSED IN HEART, SIGNAL =   8; EXPRESSED IN BONE MARROW, SIGNAL = 3.5; EST_HUMAN HIT: AI363416.1, EVALUE 0.00e+00; NT HIT: gi14775691, EVALUE 2.00e-40
cgtgacgtcgtgcggagagctttaaagtgcgggccgggccgggcgtccgagggtctggtcgggagtcgggccgcgtctccgcagcagccctccgcggcatgaggcgctgccggcgcccctgccccgcgggacgtggagaaggtggaggaggaagaagccccgttgtcgccaccgttgcatgacccgccgctcctgaggccctaccccacgcccggaccctcgacgccccccgccgggtcccccactcacgcatgggggttcggcgctaaggacccccctccctccgggggccccggggcgcgtccccttagagccatgcccggctgccccgcccgccccggaggaccctagagcagcgtcgtgggggccatggcggccgccagcggctacacggacctgcgtgagaagctcaagtccatgacgtcccgggacaactataaggcgggcagccgggaggccgccgccgctgccgcagccgccgtagccgccgcagccgcagccgccgctgccgccgaaccttaccctg

SEQ ID NO: 6534 - DNA, 548 bp, Homo sapiens
  MAP TO AC005481.2; EXPRESSED IN PLACENTA, SIGNAL = 1.6; EXPRESSED IN HELA, SIGNAL = 1.5; EXPRESSED IN ADULT LIVER, SIGNAL = 1.5; EXPRESSED IN BRAIN, SIGNAL = 1.4; EXPRESSED IN HEART, SIGNAL = 1.6; EXPRESSED IN BONE MARROW, SIGNAL = 1.4; EXPRESSED IN LUNG, SIGNAL = 1.2; SWISSPROT HIT: P04929, EVALUE 4.00e-03; EST_HUMAN HIT: AA077394.1, EVALUE 1.00e-128; NT HIT: U32169.1, EVALUE 5.20e-01
tgagggctctgccaagacccagtatgcatgggtagatggtgagggctctgccaagatccagtatgcatgggtagatggtgagggctctactaagatccagtatgcatgggtagatggtgagggctctactaagacccagtatgcatgggtagatggtgagggctctactaagatccagtatgcatgagtagatggtgagggctctactaagacccagtatgcatgggtagatggtgagggctctactaagatccagtatgcatgggtagatggtgagggctctactaagatccagtatgcatgggtagatggtgagggctctgccaagacccagtgtgcatgggtagatggtgagggctccccaagacccagtatgcatgggtagatggtgagggctctgcaagacccagtatgcatgggtagatggtgagggctctgcaagacccagtatgcatgggtagatggtgagggctctgcaagaaccagtatgcatgggtagatggtgagggctctgcgagacccagtatgcatgggtagacggtgagggc

SEQ ID NO: 6535 - DNA, 507 bp, Homo sapiens
  MAP TO AL133543.2; EXPRESSED IN FETAL LIVER, SIGNAL = 1.3; EXPRESSED IN LUNG, SIGNAL = 1.3; EXPRESSED IN ADULT LIVER, SIGNAL = 1.4; EXPRESSED IN PLACENTA, SIGNAL = 2.2; EXPRESSED IN BRAIN, SIGNAL =   1; EXPRESSED IN HELA, SIGNAL = 2.2; EXPRESSED IN BONE MARROW, SIGNAL =   1; NT HIT: gi4758199, EVALUE 0.00e+00; SWISSPROT HIT: P15924, EVALUE 3.00e-81; EST_HUMAN HIT: BI060445.1, EVALUE 0.00e+00
gcaggaagaaggcacccggaagagagaatatgaaaatgagctggcaaaggtaagaaaccactataatgaggagatgagtaatttaaggaacaagtatgaaacagagattaacattacgaagaccaccatcaaggagatatccatgcaaaaagaggatgattccaaaaatcttagaaaccagcttgatagactttcaagggaaaatcgagatctgaaggatgaaattgtcaggctcaatgacagcatcttgcaggccactgagcagcgaaggcgagctgaagaaaacgcccttcagcaaaaggcctgtggctctgagataatgcagaagaagcagcatctggagatagaactgaagcaggtcatgcagcagcgctctgaggacaatgcccggcacaagcagtccctggaggaggctgccaagaccattcaggacaaaaataaggagatcgagagactcaaagctgagtttcaggaggaggccaagcgccgctgggaatatgaaaatga

SEQ ID NO: 6536 - DNA, 505 bp, Homo sapiens
  MAP TO AL160191.1; EXPRESSED IN LUNG, SIGNAL = 1.7; EXPRESSED IN FETAL LIVER, SIGNAL = 1.7; EXPRESSED IN ADULT LIVER, SIGNAL = 1.6; NT HIT: gi15147253, EVALUE 0.00e+00; SWISSPROT HIT: P57103, EVALUE 9.00e-84; EST_HUMAN HIT: BI522813.1, EVALUE 0.00e+00
cccaccaacagaagagccgtgccttctaccgtatccaagccactcgtatgatgactggtgcaggcaatatcctgaagaaacatgcagcagaacaagccaagaaggcctccagcatgagcgaggtgcacaccgatgagcctgaggactttatttccaaggtcttctttgacccatgttcttaccagtgcctggagaactgtggggctgtactcctgacagtggtgaggaaagggggagacatgtcaaagaccatgtatgtggactacaaaacagaggatggttctgccaatgcaggggctgactatgagttcacagagggcacggtggttctgaagccaggagagacccagaaggagttctccgtgggcataattgatgacgacatttttgaggaggatgaacacttctttgtaaggttgagcaatgtccgcatagaggaggagcagccagaggaggggatgcctccagcaatattcaacagtcttcccttgcctcgggctgtcct

SEQ ID NO: 6537 - DNA, 513 bp, Homo sapiens
  MAP TO AL358913.1; EXPRESSED IN HELA, SIGNAL =   4; EXPRESSED IN ADULT LIVER, SIGNAL =   3; EXPRESSED IN PLACENTA, SIGNAL =  19; EXPRESSED IN HEART, SIGNAL = 2.2; EXPRESSED IN BONE MARROW, SIGNAL = 1.8; EXPRESSED IN LUNG, SIGNAL = 3.4; NT HIT: gi4504918, EVALUE 1.00e-130; SWISSPROT HIT: P05787, EVALUE 1.00e-16; EST_HUMAN HIT: BF570245.1, EVALUE 1.00e-130
catcacagttgccgagcagcgcagggagctagctgttaaagatgccaaggccaagctgtccgagctggtggctgccctacagcgggccaagcaggacttggagcagcagctgcgggcgagtaccaggagctgatgaacatcaagctggccctggacatcgagatcgccacctacaggaagctgctggagggcgaggagagcctgctggagtctggattgcagaacaggagtatccatgggaagaccactagcggctatgcagatgccctgatctcagcctatggggacctcacaactcccggcctcagctacgcccgggctccagctttggctctggctgggctccagctccttcagctgcaccagctccaccagggccttggttgtgaagatggagacccgcgatgggaagctagtgtccgagtcctctgacgtcctgctccaagtgaacaaccatagcagaccctctcagcatacccctcctgcggctgccccagagcccctgagggaggc

SEQ ID NO: 6538 - DNA, 512 bp, Homo sapiens
  MAP TO AC007957.34; EXPRESSED IN PLACENTA, SIGNAL = 3.8; EXPRESSED IN HELA, SIGNAL = 1.6; EXPRESSED IN FETAL LIVER, SIGNAL = 1.5; EXPRESSED IN ADULT LIVER, SIGNAL = 1.3; EXPRESSED IN BRAIN, SIGNAL = 1.3; EXPRESSED IN BONE MARROW, SIGNAL = 1.3; EXPRESSED IN HEART, SIGNAL = 1.5; EXPRESSED IN LUNG, SIGNAL = 1.2; NT HIT: AB051453.1, EVALUE 0.00e+00; SWISSPROT HIT: O32848, EVALUE 4.20e-01; EST_HUMAN HIT: BG774372.1, EVALUE 4.60e-02
gggatcaccggacccccaagctgtgcattccttggaagaaccgctgccccagacctccagcggctcttgccacgcccccaaacccgcctgccaactcggatctctagacagcctgagtgctgaagtcggtgtgcgctcccgctcgctaggcctggtgtcctctgcgtgctccagctccccagacggcctgctctccacgcacgccagctcccttgattgcttcgcacctgcgtgttcccgctcgcttgacagcacccggagcctccccaaggcctccaaatccgaggagcggccctcctcaccagacacctccacccctggctcccggaggctctcgccgccaccatcgccactcccgccgccaccaccaccgtcagcccacaggaaactcagcaacccgcggggaggagaaggctctgagagccagccctgcgaagtcctgactccctcacccccgggcctgggccaccacgagctgataaagctgaactggctgctggccaaggcgttgt

SEQ ID NO: 6539 - DNA, 504 bp, Homo sapiens
  MAP TO AC005317.1; EXPRESSED IN BRAIN, SIGNAL = 2.4; EXPRESSED IN HELA, SIGNAL = 3.3; EXPRESSED IN PLACENTA, SIGNAL = 5.2; EXPRESSED IN LUNG, SIGNAL = 2.3; EXPRESSED IN HEART, SIGNAL =   3; EXPRESSED IN BONE MARROW, SIGNAL = 2.6; EXPRESSED IN FETAL LIVER, SIGNAL = 3.2; EXPRESSED IN ADULT LIVER, SIGNAL = 2.7; EST_HUMAN HIT: AL596663.1, EVALUE 0.00e+00; NT HIT: U74651.1, EVALUE 0.00e+00
ctgcccgtcgctggggtcggacgcggggacggagctggagacccagcgccccggagctggaaccggccctggcccgacggtggcgccggccaccttcctccagagcaggcggctcatggttggtgcagggacccccacgctgggagtcagaacacctggctttgggctccagcttggcttcttttactggctggaagacgtggagagagacacgtcctgtctctgctctcctgtcagtgaaatgggtttgaccatgcctgccttccaccccaaatcctaaaggagacagatgatataaagcgttattttaccatatatgtaataggtgtatccataatcatcattccttgagcatttactgcgtccccaacactgtgccaggcgcttcagttgcattttccgttaagcctcaaaacttgggaaacgtcaatacccctcctgggggaaccggggtccacgcaacttcgtcagtgaacccacgtggggaagccgagggcagcgagt

SEQ ID NO: 6540 - DNA, 536 bp, Homo sapiens
  MAP TO AL121883.13; EXPRESSED IN ADULT LIVER, SIGNAL = 1.6; EXPRESSED IN BRAIN, SIGNAL = 2.5; EXPRESSED IN HEART, SIGNAL = 2.6; EXPRESSED IN BONE MARROW, SIGNAL = 1.6; EXPRESSED IN FETAL LIVER, SIGNAL = 1.5; EXPRESSED IN PLACENTA, SIGNAL = 3.2; SWISSPROT HIT: P11161, EVALUE 2.20e+00; EST_HUMAN HIT: AL542197.1, EVALUE 0.00e+00; NT HIT: gi16163742, EVALUE 0.00e+00
tggggccactgcctcagctccaactgtgtccagagcagaggcttcatcctgggccctgtcctctgcttcagcacggactggggttgggggactgaatcctgacccaaggtcgattgtgaatccggctcttagcccagctctagccctggctccagtcccagccacagcccggtttttgggcttggccattctcttcttggtctggtctctccccctggtgtatttgtagacacagtaccaggcaccagcccctatcactatccccgccgctacacagccagcatcccgaacgcggctcatggtgcagctggggttattcactgatccagggcgtggaactggattgcttaaggttaagggatgcctgctcgtccgggtgaggctcttcagtttaggcttacaagttctgctgaggcttaggcagggcctaggggtaaaggataaaaatgaggcttagggctctggctcacttcgtgtctaaccagttctacttagagaagagtttagggacacaatgcttcgttggcgggctagca

SEQ ID NO: 6541 - DNA, 526 bp, Homo sapiens
  MAP TO AL136122.1; EXPRESSED IN ADULT LIVER, SIGNAL = 1.5; EXPRESSED IN BRAIN, SIGNAL = 1.7; EXPRESSED IN FETAL LIVER, SIGNAL = 1.7; EXPRESSED IN BONE MARROW, SIGNAL = 1.4; EXPRESSED IN LUNG, SIGNAL = 1.4; NT HIT: AF153836.1, EVALUE 0.00e+00; SWISSPROT HIT: P31629, EVALUE 1.00e-34; EST_HUMAN HIT: BF725742.1, EVALUE 0.00e+00
cccaatggaaaacaccctgactgctttatcaccttgctgtttaaaaacaaaagcaacttttcacaggccgacacctttattcaaggattataaaagacaacagagaaatctcttttgtcttgaaataggaaaacttgatcaaagaattaggtattgaagcctctctaggtagtgaatgtgtgaatgggtgagtgaatgaatccaacagcttgacctaagaatgaagcgtagcaggctctgaattttgtgctctctttgtttctctgcgcagaatttaagaagaggattacctcaggttccttacttcagtctctatggagaccaagaaggtgcttatgaacatccaggctccagccttttccctgagggtcctaatgactatgtcttcagtcatcttccactccactctcagcaacaagtgcgagcccctatccccatggtgcccgttggtgggatccagatggttcactccatgccgccagccctttccagtttacatccttcacccacattgcccctgccaatg

SEQ ID NO: 6542 - DNA, 504 bp, Homo sapiens
  MAP TO AC004597.1; EXPRESSED IN ADULT LIVER, SIGNAL = 1.2; EXPRESSED IN BRAIN, SIGNAL = 0.97; EXPRESSED IN HELA, SIGNAL = 2.8; EXPRESSED IN LUNG, SIGNAL = 0.98; EXPRESSED IN HEART, SIGNAL = 1.6; NT HIT: gi11427064, EVALUE 6.00e-56; SWISSPROT HIT: O60403, EVALUE 8.00e-13; EST_HUMAN HIT: D45734.1, EVALUE 5.00e-05
cgcagtcctcacgcccttcctcagccccatcatcttcagcctcaggaacaaagaactgaaggttgccatgaagaggaccttcctcagcacactctattcctcaggcacctgagtagctggtgtggaagtgctgatagaatatgataggaggatgaccatcaccttgtctgcacagtgtggctagtaatgcttaccttgtaaggcaggtgtaaagatttctgtatatgacaacactcatcacatagtaggtgctcagtaaatgttaaaagcatgtttacttccacaactcttgatctgtatgtctttatctgagttttaatttttgagttatagtagctttattaagatgtaattcacctaccatacaatgtacccattagagcgcacatttctgtggtttttgcgtattcagagttatgcaaccatcatgacaatctggcttagagtattttagtcatccaaaaaagaaacccaaatcctagtgctttggaaggctgagtggga

SEQ ID NO: 6543 - DNA, 507 bp, Homo sapiens
  MAP TO AL160314.1; EXPRESSED IN ADULT LIVER, SIGNAL = 2.2; EXPRESSED IN BRAIN, SIGNAL = 2.1; EXPRESSED IN HELA, SIGNAL = 3.3; EXPRESSED IN BONE MARROW, SIGNAL = 2.1; EXPRESSED IN FETAL LIVER, SIGNAL = 2.3; EXPRESSED IN HEART, SIGNAL = 2.1; EXPRESSED IN LUNG, SIGNAL =   2; NT HIT: AF321235.1, EVALUE 4.80e-01; SWISSPROT HIT: P23267, EVALUE 1.00e-37; EST_HUMAN HIT: BG193339.1, EVALUE 5.00e-05
gggccagcaagggtccactgtcacagaagaagtggttaatgatattggagccacagaagggcagctgggagatgaggatggttggaaagagcacagacaggaagcctcccacccaagagaatacaacggtcccaatgcagacagaaggtctcatgatggtggtgtaccgcagggggcagcagatggtggcataacggtcataggacatgaccgtcagcaggaggaactcaactgtgcccaagaaaaagtagaaatagcactgggtgatacatccggcaaaggagatggttttatccctagatcctaagttggccaacacttttggagagatgactgaggtgaagaggatgtccaggatagagaggttgcacaagaagaagtacatgggggtgtggaggcgggagcaggacagcacagtggagatgatgagcaggttccccagaagagtcagcaggaacgtgggcagcaggagcaccaggagcagcagctccacctccctgctcaggg

SEQ ID NO: 6544 - DNA, 553 bp, Homo sapiens
  MAP TO AP001712.1; EXPRESSED IN ADULT LIVER, SIGNAL = 1.9; EXPRESSED IN HELA, SIGNAL = 1.6; EXPRESSED IN PLACENTA, SIGNAL = 1.9; EXPRESSED IN BRAIN, SIGNAL = 1.7; EXPRESSED IN HEART, SIGNAL =   2; EXPRESSED IN BONE MARROW, SIGNAL = 1.9; EST_HUMAN HIT: AI418520.1, EVALUE 9.00e-16; NT HIT: AJ229043.1, EVALUE 1.00e-17; SWISSPROT HIT: P49741, EVALUE 2.30e+00
ccgggtccactccatctgggtccgctccatctaggtccactgtatccaggtccactccatccaggtgaactccatccagagccacttcatccagatccactccatttgggtccactccatctgggtccactccatccgggtccactccatccaggtccactctatctgggtccactctatccaggtccactctatctaagtcccagcataggcatactcaaactgagggatgtttgcttaaaagaaaaaacctattgacaaagatgtggactggtttagagaaaccacaaaagacagtgcagaagcctggggaccagcaagagcatagtgctgttactaccctgatacagtttggatgtttgtttcctccaaatctcatgttgaaatgtgatccccaatgttggaggtggagtctactgggagttatttgggtcatgggggtgatccctcacgagtagcttggcactgtctttacagtggtaaagtgagttctcactctatgagttcacaagagatctagttgtttaaaacagtgtggcacctcctccccctc

SEQ ID NO: 6545 - DNA, 535 bp, Homo sapiens
  MAP TO AL050330.9; EXPRESSED IN ADULT LIVER, SIGNAL = 3.6; EXPRESSED IN PLACENTA, SIGNAL = 5.5; EXPRESSED IN BRAIN, SIGNAL = 2.3; EXPRESSED IN HELA, SIGNAL = 0.94; EXPRESSED IN LUNG, SIGNAL = 4.8; EXPRESSED IN HEART, SIGNAL = 3.6; EXPRESSED IN BONE MARROW, SIGNAL = 3.2; EXPRESSED IN FETAL LIVER, SIGNAL = 2.5; SWISSPROT HIT: P35709, EVALUE 2.20e+00; EST_HUMAN HIT: AW389730.1, EVALUE 0.00e+00; NT HIT: gi6325463, EVALUE 0.00e+00
tggagcccactgccctgaccatttgcccaataccaaaagaagtagagagttcccccgatcctgacctagtgcctgatcattccctggagacaccactgaccccgggcttagctaatgaaagtggggagcctcaggctgaagtaacatctctgcttctccctgcccaccctggagctgaggtctccccttctgcaacaaccaatcagaaccataagctacaggcacgcactgaagcactttactgatattcattccattattccatatgacagttgttttgagtttcgtaccaccttattgtccccttatacagataaggaaactggggtgcagaaaggtgaattaactttacaaagtagacatgacaagtgaacagcagagctgggatctaaacagcaataactaacattaacagagaatttaaaatgttcttagtgctgtgttataagctttggtggatgtcactcctttaatcctcacaacaccctgtcgggtagtcatattttgcaagtatggaagctgaggcagggcaaca

SEQ ID NO: 6546 - DNA, 544 bp, Homo sapiens
  MAP TO Z82200.1; EXPRESSED IN ADULT LIVER, SIGNAL = 2.8; EXPRESSED IN HELA, SIGNAL = 3.5; EXPRESSED IN BRAIN, SIGNAL =   3; EXPRESSED IN HEART, SIGNAL = 2.9; EXPRESSED IN FETAL LIVER, SIGNAL =   3; EXPRESSED IN LUNG, SIGNAL = 2.8; NT HIT: gi11422044, EVALUE 0.00e+00; SWISSPROT HIT: P32250, EVALUE 1.00e-12; EST_HUMAN HIT: BI905912.1, EVALUE 0.00e+00
tggaaaggccagtggtggctgatgtaatagtaaatccggaggggtaaagataatacatgagcaaggtcagccacagagaggttgatcatgaaaatgatggctttatttttcttgctgatgaagcggcacagaacccacaaggctgcactgttagccagaagaccaggaatgaatatgaggatataggtggttgcatagagggagtattgaaatttcacattagtgacattacagtaaatctcagcagtgctggtactgttgctacccatcttgaatgtttcagtgtatttgtcaaggttagccatggatttatggttcctgcccaaagtaaaacaaaataaagagtaaaatggttaattagttctttagttaacacctagatctctcttttatacttacagaggcacagactattagaattagaagagacatgtttacatataaagaattagaggctcaaggaaaatatagtactgatccaaagtcacccaatgtaacagttaaggaaccataaaattgtcccacaactgcaccctccacccca

SEQ ID NO: 6547 - DNA, 547 bp, Homo sapiens
  MAP TO AL030996.1; EXPRESSED IN LUNG, SIGNAL = 1.8; EXPRESSED IN BONE MARROW, SIGNAL = 1.8; EXPRESSED IN ADULT LIVER, SIGNAL = 1.4; EXPRESSED IN BRAIN, SIGNAL =  31; EXPRESSED IN HELA, SIGNAL = 2.4; EXPRESSED IN PLACENTA, SIGNAL =   2; NT HIT: gi16175554, EVALUE 0.00e+00; SWISSPROT HIT: P11833, EVALUE 7.00e-70; EST_HUMAN HIT: BG753663.1, EVALUE 0.00e+00
gccagtccagagccggcaacaactgggtgaaggggcactacacggagggcacagagctggtaggcactgtcctggacgtggtccagaaggaggcctagaactgcgactgccttcaaggcttccagctgacgcacttgctggggggtggcacggggtccgggatgggcacactgctcatcagtaagatccgtgaggagttcccagaccgcatcatgaacaccttcagcatggtgccctcgcccaaagtgtcagatacggtgtggagccctacaatgccacactgtctgtgcaccagctggtggagaatacgaatgagacctactgcatcaacaatggggcactctatgacatctgcttccgcaccctcaagctgaccacctccacctacggggacctcaaccacctggtgtcagccaccatgagcagagtcaccacctgcctgtgcttcctgggccagctgaacaccaacctgcacaagctggccgtcaacatggtcccctttccttgcccgcacttcttcatgcctggcttcgcacccctgaccagc

SEQ ID NO: 6548 - DNA, 502 bp, Homo sapiens
  MAP TO Z97055.1; EXPRESSED IN LUNG, SIGNAL = 1.6; EXPRESSED IN HEART, SIGNAL = 1.3; EXPRESSED IN BONE MARROW, SIGNAL = 1.4; EXPRESSED IN FETAL LIVER, SIGNAL = 1.5; EXPRESSED IN PLACENTA, SIGNAL = 1.8; EXPRESSED IN ADULT LIVER, SIGNAL = 1.6; EXPRESSED IN HELA, SIGNAL = 0.81; NT HIT: gi6678120, EVALUE 1.90e+00; SWISSPROT HIT: P09774, EVALUE 3.50e+00; EST_HUMAN HIT: BI827307.1, EVALUE 4.50e-02
tggggactcgcggagtcaagaaatgtgctaatatttatgaaacttatagttatcatttaactcttcccacccccagttattcttcttcccacatcataggtgaggaaattaatgttcagagcaggccagtgacttgccctgggctacatgactgcggtgccccaaggctggagactaagcctctctcttccagaaccagaagacatgctcttccccgatatcaagttcacatggttgtcaatgaccaaagctttcctgtctctttttacaaaatcaataacacgttccttaagagcagccgaaagtcactggctgcccagggttgtgtgacggggacactcagtctcacgcattacccggctctctaagcacgtggggaacatccactgttactgcattccttgttgcagtgattgctgatgcacagaaccgttctctttattttatccataaattcacttcctaataacaataaggcatgccagggctttggcctcatgcc

SEQ ID NO: 6549 - DNA, 510 bp, Homo sapiens
  MAP TO AC008009.4; EXPRESSED IN LUNG, SIGNAL = 0.93; EXPRESSED IN HEART, SIGNAL = 1.3; EXPRESSED IN BRAIN, SIGNAL = 1.1; EXPRESSED IN ADULT LIVER, SIGNAL = 1.4; NT HIT: gi13385831, EVALUE 2.00e-25; EST_HUMAN HIT: BE439792.1, EVALUE 0.00e+00
tgccagggccacatggtcagatcggatcactttagaatcatatacctctgtgtgtgcgatgcagagcagatgaaggaaaacaagaatatgtacagatgatgctgaaggtgatggtatgtgaaaaagtgaaacttgggtctagtggggtactagaattgtcaaaaccccatccaactctgtcacatataacatctgatgtttcagggtagcaccatcacaaagttcagaacttctatactctccttgcaggaagcaggagaatgggtccaaagcaatcacttagaacttcatggatatttggaaatttacccttccctaagtgtggctctaggtttcaaatagaagcagcaaagaattaacaaagtcttacagattttggtaggctttgaaaaacttgttttacttgaggctccatatgcttcatggcttgcaaaacgtaacggcctaaaaccaaaagcaacagaataagtaaactaaatctccaatctccccgacttcacttccatcccc

SEQ ID NO: 6550 - DNA, 504 bp, Homo sapiens
  MAP TO AL135785.2; EXPRESSED IN BONE MARROW, SIGNAL = 2.2; EXPRESSED IN FETAL LIVER, SIGNAL = 2.4; EXPRESSED IN LUNG, SIGNAL =   2; EXPRESSED IN BRAIN, SIGNAL = 1.8; EXPRESSED IN ADULT LIVER, SIGNAL = 7.6; EXPRESSED IN PLACENTA, SIGNAL = 2.2; EST_HUMAN HIT: BE891973.1, EVALUE 0.00e+00; NT HIT: gi14736775, EVALUE 0.00e+00; SWISSPROT HIT: P30837, EVALUE 6.00e-26
gccgggaccgtgtgggtaaacacctacaacatcgtcacctgccacacgccatttggagggtttaaggaatctggaaacgggagggagctgggtgaggatgggcttaaggcctacacagaggtaaagacggtcaccatcaaggttcctcagaagaactcgtaagagcagctgtcagggaggcccagtcacagtccagcaattccacaaccaccttgacgaatgcttgccaagctgttttaaagccaagaacaccctttctttgttccaaattaactcttagaagaaaccccacaaataaagcaattcaatcaaggctgttctatttaaatcagagatggggaccaggctcagagttctacctatctaacccccaaccacagcccccttggtggcccatgagttgcttccatgaaatcttaggagtctctggaggacagattaaaaaccagtgatctgtaatttgtagctcttcctgctgatccaaggactttcccatgggtgcgc

SEQ ID NO: 6551 - DNA, 500 bp, Homo sapiens
  MAP TO AC005175.1; EXPRESSED IN BRAIN, SIGNAL = 1.2; EXPRESSED IN HELA, SIGNAL = 2.4; EXPRESSED IN ADULT LIVER, SIGNAL = 1.5; EXPRESSED IN BONE MARROW, SIGNAL = 1.6; EXPRESSED IN LUNG, SIGNAL = 1.7; EXPRESSED IN HEART, SIGNAL =   2; EST_HUMAN HIT: BF351714.1, EVALUE 8.00e-13; NT HIT: gi4505876, EVALUE 4.70e-01; SWISSPROT HIT: Q12967, EVALUE 5.00e-04
tccaagaagacagcgagcgcccaggagtttgcacgctgtttagactccgtcttgggcgagttcgccttccccgacgagtttgtggtggaagtgtgggccgccatcggcgaggccagagaggcctgtggctagtttgccctgggggggcccagcacagccccagcccggagcccagccccctgccccggccctgctccagaacccagcccagatcggaggacaagttcctctctagaacccaatccaatttggagccccagcccaactccagaacccaacccttctctagaatccagcccagatctgaggccaagctatgtgctagagcccaggccagctctgagaccaagcccagcattgagaataagctctgttctaaaactcaggccagccctgagaccaagcccagctctagaactcagatgagctttgagaccatgcccagcactgagaccaagccctgttctagaactcaggcctgctctgaggccaagcccagc

SEQ ID NO: 6552 - DNA, 523 bp, Homo sapiens
  MAP TO AL121675.8; EXPRESSED IN HELA, SIGNAL = 2.3; EXPRESSED IN ADULT LIVER, SIGNAL = 1.6; EXPRESSED IN PLACENTA, SIGNAL =   2; EXPRESSED IN LUNG, SIGNAL =   2; EXPRESSED IN FETAL LIVER, SIGNAL = 1.8; EXPRESSED IN HEART, SIGNAL =   2; EXPRESSED IN BONE MARROW, SIGNAL = 2.3; SWISSPROT HIT: P25100, EVALUE 9.00e-23; EST_HUMAN HIT: AW577200.1, EVALUE 0.00e+00; NT HIT: gi14771725, EVALUE 0.00e+00
tcagggcatggaggatggggcagtgtttctcaaatagggattgggagcaaaaggccccacggagcccgcagcctctcccttctaagaaaagagttctgggcacctgagtccagcagggggccccactacttttcacctttcaagggctccagcctcaagctctgcccagttcctcagggatgtcacagagcagctgccctgatcagtttccgggtctccgatttgcacgggggctcttagaacaccagcccgcctctctggtcccccttacccccaagcccagcacactccgcggcctagctctggggtccttaaatatcggtctcccgtaggttgctgtagtcggccaattcgtaggcctggcaggtggcgccctcggccacctcgtgtgggacgcctagggacacagcctccacctctgagcgctgggcgcacgctgcctctgcgcgctgcgcgcccccggcgcggatcttgtgcgacaggctggagactttggcgcgcagctgggtcgtgggtctccgga

SEQ ID NO: 6553 - DNA, 557 bp, Homo sapiens
  MAP TO AC011536.5; EXPRESSED IN LUNG, SIGNAL = 1.7; EXPRESSED IN PLACENTA, SIGNAL = 1.7; EXPRESSED IN BRAIN, SIGNAL = 1.1; EXPRESSED IN HELA, SIGNAL = 2.3; EXPRESSED IN ADULT LIVER, SIGNAL = 1.2; EXPRESSED IN BONE MARROW, SIGNAL = 1.2; EXPRESSED IN FETAL LIVER, SIGNAL = 1.4; NT HIT: gi16163229, EVALUE 2.00e-87; SWISSPROT HIT: P39195, EVALUE 7.00e-02; EST_HUMAN HIT: AV730046.1, EVALUE 2.00e-97
agtgcaccctgccacggaccacccttgggggctgagaacttcactgtcactgtagccaatgagcaccggggcagccaggctgtcagctacacccgcagtgtcaccctgcaaatctacaaccacagcctgacactgagtgcccgctggccccggaagctacaggtgaggagggctgtgggccagacaggagcaagtgccagctctggggttgcctgagatggtaagggcttcaccattcccctgggcccctttcacagcttagctggggcatgatggaagggtcagagtgtacgcctaggagcctgatggcttggcacagcagcttcttcctctgtgagcctagtgtattcctctgtaaactggtctaggaaaagtacctgttttcgagaaggataaggagtcagtgacatgagccagtagaggctctttgtttttcttttctttttttctttcttgcttttctttctttctttctttcttttcttagcctgactctgttgcccaggctggagcgcagtgacaggattagggctcactgcagcctggaactcgtgggc

SEQ ID NO: 6554 - DNA, 565 bp, Homo sapiens
  MAP TO AC004178.1; EXPRESSED IN ADULT LIVER, SIGNAL = 1.5; EXPRESSED IN HELA, SIGNAL =   2; EXPRESSED IN FETAL LIVER, SIGNAL = 1.8; EXPRESSED IN LUNG, SIGNAL = 1.6; EXPRESSED IN BONE MARROW, SIGNAL = 1.8; EXPRESSED IN BRAIN, SIGNAL = 1.4; EST_HUMAN HIT: BI562613.1, EVALUE 0.00e+00; SWISSPROT HIT: Q9GZK4, EVALUE 8.00e-67; NT HIT: AJ302613.1, EVALUE 0.00e+00
acaggcgggggtggatgatggtggcatagtggaggggctggcagacagccacgtatcggtcaaaggccatcactgtcaggaggatgcactcagtggtccccagggacaggaagatgaagagctggacagagcatcccaggaagctgatggtcttctttgggccccagaggttgaccagcatctgggggacacaacttgtggtaaagcagaggtccaagaaggagaggtcagagaggaaaaagtacattggagagtggagcctggggtacagtacagacagcaggatgatgagtgtgttgcccaccagggtcaagaggtaggaagtgaagacaaccacaaagagagtcctttccagtgctgggtgttcagagaagcccagaaggaggaagcccatgggggagctttggttaaccatggcctgttcttgtttgtacctggagggatgaggctgtcaccccagtgtgattcaacctgtcttatcaaaactcagcctgggtgtttgtgaggtcacagcaggtaggtgtttcttttctgtctctgctcacccagcctccctttcccaggc

SEQ ID NO: 6555 - DNA, 545 bp, Homo sapiens
  MAP TO AC007066.4; EXPRESSED IN ADULT LIVER, SIGNAL = 2.2; EXPRESSED IN BONE MARROW, SIGNAL = 2.7; EXPRESSED IN FETAL LIVER, SIGNAL = 2.8; EXPRESSED IN LUNG, SIGNAL = 2.3; EXPRESSED IN HEART, SIGNAL = 2.1; EXPRESSED IN PLACENTA, SIGNAL = 2.1; EXPRESSED IN BRAIN, SIGNAL = 2.1; EXPRESSED IN HELA, SIGNAL = 3.4; EST_HUMAN HIT: BE894779.1, EVALUE 0.00e+00; SWISSPROT HIT: P18715, EVALUE 4.00e-14; NT HIT: gi14744450, EVALUE 0.00e+00
acacatgcgtgtgcatgccggaattaaacctttccagtgtaaaatctgtgggaaaaccttttctcagaagtgttccttacaggatcatcttaaccttcacagtggagataagccccataaatgtaactattgtgatatggtttttgcacataaaccagttttgaggaaacaccttaaacagctgcatggcaaaaacagctttgataatgccaatgagagaaatgtacaagacctcacagtggattttgattcttttgcatgtacaacagtcacagactctaaagggtgtcagccacaacccgatgcaacacaggtcctggatgcaggtaaactggcccaagctgtcctgaacttaagaaatgatagtacttgtgtgaattgagtaggggcttcatgctcacaactcgaactgactgacaatgtggcaatagtcttagtctttttaggagtgattttgctagtttgacttctccaaagcctctgtgtaggtggtagggagtgagtcaaagcactaatagaccaggcaacttaccacttggagtgga

SEQ ID NO: 6556 - DNA, 510 bp, Homo sapiens
  MAP TO AC006124.1; EXPRESSED IN HELA, SIGNAL = 0.43; EXPRESSED IN ADULT LIVER, SIGNAL = 1.4; EXPRESSED IN BONE MARROW, SIGNAL = 1.5; EXPRESSED IN LUNG, SIGNAL = 1.1; NT HIT: AF181254.1, EVALUE 7.60e+00; SWISSPROT HIT: O53416, EVALUE 9.00e-03
gtgtccaggcgcccgacttccccgtgtgtttgaaaaggttcatttatcataagacccaaggtaaataaacaaaggccgcttccttggccgccctggaagtccctgctgcctcccatctggaatcctggggtctgtccgggcgccagcccctttccaaacaccccttcccgcacccccaccgcaggccagcgtctcgggccccgtctgtcattcgtgaacagctgtccggggggctccggtggcagagacgccccggccgctcgccgctctcggcctcgcccgcccagtccgagtggggggcggtgcacctgcgcatgcgcgcccctcccccgccgccctctccccgcccctccccacgtgacgccgtgggaacccggaccccagcgcctccgggtgggggcagccgccggccgccggccggggatgggggtccggggtggcgggagagcaggaaggatggggaggggacacctggctcgcggggtccgggggtcccggaggagagggtgg

SEQ ID NO: 6557 - DNA, 506 bp, Homo sapiens
  MAP TO AF134726.1; EXPRESSED IN ADULT LIVER, SIGNAL = 5.5; EXPRESSED IN BRAIN, SIGNAL = 4.8; EXPRESSED IN HELA, SIGNAL = 3.1; EXPRESSED IN BONE MARROW, SIGNAL =  11; EXPRESSED IN HEART, SIGNAL = 7.9; SWISSPROT HIT: P08107, EVALUE 2.00e-17; NT HIT: M59830.1, EVALUE 0.00e+00; EST_HUMAN HIT: BG773197.1, EVALUE 0.00e+00
acgtagctgggggtggtgcggttgccctggtcgttggcgatgatctccaccttgccgtgttggaacacccccacgcaggagtaggtggtgcccaggtcgatgccgatcgccgcggctttggccatgccggtgccctgctctgtgggctccgctctgagactgggggctggaaacggcggacgggatccgcgacaagagctcagtccttcggaacgccggaaactcaacacgccggtgcctgcagccgcacaggttcgctctggaaagccttgggaccgcgggagtcactctcgaaagacgaagcggaccctcgcagcagctcctcaggctggccgttttccggaccgcgcgcccctcggcttttataagtcgtcgtggagacccgcctttccccttctgagccaatcaccaagctcgatgaggctgccaggtcgggaatattccaggggtttcgcctcccgtcctgccccccagccttccttggaccaatcagagggcagggtgcc

SEQ ID NO: 6558 - DNA, 503 bp, Homo sapiens
  MAP TO AC008857.4; EXPRESSED IN PLACENTA, SIGNAL = 1.4; EXPRESSED IN HELA, SIGNAL = 2.4; EXPRESSED IN ADULT LIVER, SIGNAL = 1.4; EST_HUMAN HIT: BG215042.1, EVALUE 0.00e+00; SWISSPROT HIT: P40189, EVALUE 6.00e-78; NT HIT: gi16156969, EVALUE 0.00e+00
gggggtcttcatgcatgtcatcttctaggccaagcatttctagcagtgatgaaaatgaatcttcacaaaacacttcgagcactgtccagtattctaccgtggtacacagtggctacagacaccaagttccgtcagtccaagtcttctcaagatccgagtctacccagcccttgttagattcagaggagcggccagaagatctacaattagtagatcatgtagatggcggtgatggtattttgcccaggcaacagtacttcaaacagaactgcagtcagcatgaatccagtccagatatttcacattttgaaaggtcaaagcaagtttcatcagtcaatgaggaagattttgttagacttaaacagcagatttcagatcatatttcacaatcctgtggatctgggcaaatgaaaatgtttcaggaagtttctgcagcagatgcttttggtccaggtactgagggacaagtagaaagatttgaaacagttggcatggaggctgcg

SEQ ID NO: 6559 - DNA, 519 bp, Homo sapiens
  MAP TO AL031658.10; EXPRESSED IN HEART, SIGNAL =   2; EXPRESSED IN BONE MARROW, SIGNAL = 1.7; EXPRESSED IN LUNG, SIGNAL = 1.7; EXPRESSED IN ADULT LIVER, SIGNAL =   2; EXPRESSED IN BRAIN, SIGNAL = 2.2; EXPRESSED IN HELA, SIGNAL = 1.5; EXPRESSED IN PLACENTA, SIGNAL =   2; EST_HUMAN HIT: BG744171.1, EVALUE 1.80e-01; SWISSPROT HIT: Q9Y618, EVALUE 3.70e-02
gtcctgctggagaacgccgcgctcaccggcttctggtactccagccgcaacttctcaaccgacttctactcgctcatcatggtctgcgtagtggcctccagctttgcgctgggcatattcttcatgtgtgtctactactgtctcctgcaccccaatgggcccatgctgggtccccaggcacctggttgcatcttccgtaaggcctcagagccctgtggcccacccgctgacgccatcacgagtccccccaggtccctgccaaggactacaggtgctgagcgggatggggcctcggcgggagagcgtgcagggacccccaccccacctgtcttccaggtgcggcctggcttgcctcccacaccagtggcccgcaccttgcggacagaggggcctgtcatccggattgacttgcctcgcaagaagtacccggcctgggatgctcattttattgaccgccggctccggaagaccatcctggcactggagtactcctcacctgccacgccccggttgcagtac

SEQ ID NO: 6560 - DNA, 515 bp, Homo sapiens
  MAP TO AC005392.1; EXPRESSED IN ADULT LIVER, SIGNAL = 1.7; EXPRESSED IN HELA, SIGNAL = 3.7; EXPRESSED IN PLACENTA, SIGNAL =  16; EXPRESSED IN BONE MARROW, SIGNAL = 1.8; EXPRESSED IN HEART, SIGNAL = 1.3; NT HIT: gi14767509, EVALUE 0.00e+00; SWISSPROT HIT: O14511, EVALUE 8.20e+00; EST_HUMAN HIT: N41574.1, EVALUE 0.00e+00
cgggggaggcttggcttcaactggcagctcaatttagccaaattcaggacaggccaccagggccctttctacacacacgctagtcccaccccaggttgagtgaggcagggccagtcaccagaggagcccggagcagagcaggaagcagagtctgagctgctcctccctcacccaaggggcttcctcctctcatctgggggaaaagtgtgagcttgtttcaaagcctcagctgtcccttgtagctcatggaataggtacaagaaaaaaaagacgtggcagaaggggatgtgtcggtgacagcgagaagcaacttgatcttgaggactctccttcttgtccctctctgaagcctcttctaccacatagggctcagggctgataaagccccctccctacctttttcaggccagacacaaggtcagccataagaaaacagaaaaacaaggagaagagagtctgtagagacaaattgggagggttcaggaggagaatttgggatttgcttgtgcccatgg

SEQ ID NO: 6561 - DNA, 507 bp, Homo sapiens
  MAP TO AC016630.5; EXPRESSED IN ADULT LIVER, SIGNAL = 1.4; EXPRESSED IN HELA, SIGNAL = 0.65; EXPRESSED IN BRAIN, SIGNAL = 1.6; EXPRESSED IN BONE MARROW, SIGNAL = 1.6; NT HIT: AF161886.1, EVALUE 0.00e+00; SWISSPROT HIT: P28698, EVALUE 2.00e-31; EST_HUMAN HIT: AI700175.1, EVALUE 0.00e+00
cacgggtgaacggccctacgcatgccctgagtgtggcaaggccttccgccagcggcccacgctcacgcagcatctgcgcacccaccgacgagagaagcccttcgcctgccaggactgtggccgccgcttccaccagagcaccaagctcattcagcaccagcgcgtccacagcgccgagtagctccagccgggacgcactgtgtccgccatggtcagaacacctacctcccctggttattgtgaggctggcgattacataagtataagcaggtccgcccagggcttggctactgtaggtgtccaataaacagtagatggaaactgggtctccacccactcagtgcctccctacctgtgcgtccttcactccccaccctccagccccccgagtgctgggctggtgtgctccctctgtaaccacgtggttcctgtgagggttcacctccacaacacccctcttcaccctgagagaggtggctcctagcatcacctaccccgcgtgtggga

SEQ ID NO: 6562 - DNA, 511 bp, Homo sapiens
  MAP TO AL035665.25; EXPRESSED IN ADULT LIVER, SIGNAL = 3.8; EXPRESSED IN LUNG, SIGNAL = 2.4; EXPRESSED IN HEART, SIGNAL = 1.6; EXPRESSED IN BONE MARROW, SIGNAL = 1.4; EXPRESSED IN PLACENTA, SIGNAL = 1.7; NT HIT: gi14770835, EVALUE 0.00e+00; SWISSPROT HIT: P54842, EVALUE 4.00e-14; EST_HUMAN HIT: BG676395.1, EVALUE 1.00e-117
gcccgcgagagagacgcctacaaggtcaagtgcgagaaactcgccaactccggcttcagggaggcgggctccaccagcgacagcccctcctctcccgagttctttctgtgagtcgtggccggtcctggcccccgcccttgccccggcccggactccctgtcccacgtccctagtcccagactaccccggaccctgtccctgccgcggccccagccttgacctgtttgacttgagcgagagggaggaagggcgcgcgggccgcgggcgacgggcgggtgcgcgggcgggcaggggaccttggctaaggcgagagtagcgcacgccagcgccgcctcctagactcgagcagagccggagagagagacgagagggtgggaggtcccggagtaacttctctccaggctgaagggcggcgaggcatagtcccgagaagtcaccaaggccatctggagactcctggctttctgaactttgcgcgttaagccgggacagctgctttgctgcccggaga

SEQ ID NO: 6563 - DNA, 589 bp, Homo sapiens
  MAP TO AC022336.12; EXPRESSED IN FETAL LIVER, SIGNAL = 4.9; EXPRESSED IN ADULT LIVER, SIGNAL = 3.5; EXPRESSED IN PLACENTA, SIGNAL =   3; EXPRESSED IN BRAIN, SIGNAL = 3.5; EXPRESSED IN HELA, SIGNAL =   8; EXPRESSED IN BONE MARROW, SIGNAL = 4.7; EXPRESSED IN LUNG, SIGNAL = 3.8; EXPRESSED IN HEART, SIGNAL = 3.5; EST_HUMAN HIT: AL524921.1, EVALUE 1.00e-103; NT HIT: AB041356.1, EVALUE 0.00e+00; SWISSPROT HIT: P11172, EVALUE 8.00e-29
tgaggcgggaggatcacttgagctcaggagttcaagaccagcctagacaacatagtgagacctcatctctatgataaaacagatttttttaaagtaaaaaaaaaacctctctatttgaaaatttgatcataaaacacattaagcagtgtttataatgtgaaataatttacttgatttactataaatatactgtatgtgtaactggcaagtttggtatacagagttggctttatacataaatatactgtatgtgcaactagcaagtttggtatacagaattggtatacacatatactgtatgtgtaactggcaagttttgtatacagagtgtgtgtacgtatatacgcacatatacatacatatttaaatttggaatcagcaaaattttttcttttctaggaactaagcgtcttgtagaaggaactattaatccaggagaaacctgtttaatcattgaagatgttgtcaccagtggatctagtgttttggaaactgttgaggttcttcagaaggagggcttgaaggtcactgatgccatagtgctgttggacagagagcagggaggcaaggacaagttgcaggcgcacgg

SEQ ID NO: 6564 - DNA, 541 bp, Homo sapiens
  MAP TO AC005015.2; EXPRESSED IN ADULT LIVER, SIGNAL = 1.3; EXPRESSED IN PLACENTA, SIGNAL = 1.9; EXPRESSED IN BRAIN, SIGNAL = 2.9; EXPRESSED IN BONE MARROW, SIGNAL = 1.4; EXPRESSED IN LUNG, SIGNAL = 1.4; SWISSPROT HIT: O42184, EVALUE 5.00e-04; EST_HUMAN HIT: BG748918.1, EVALUE 9.00e-84; NT HIT: gi14702161, EVALUE 2.00e-86
aggtctgtgccagccccagggcacagggtctgaggtcccgggtcctaggagccctgcaccctaagacatgtatgggtaaatcaaagcccgtcctctgcacggaggtcccatctctccaggtctgctctgtgcggggggatgcagccaggtcagctcagaccagcttcggttctccctggtcaccagggcgcactgcccctctaacagagggccaaggagctcctcctcctctaagccaggtgaccccttccttgactgccccaggcatgctctcggggacaagggaaatgcttcctgggctgcagaacagaggtcagcaaaaggccaagccctccccagcccgaccctcccgccccagcaggaggggcaggcgcctacgtgggtgtgctgggaggagcacagggcctcgaccgcctggagtctgttctcagccaccaggagcttctcccgcaaactctcgacctcctgtttgccctgggcttctgcccgctgcagccgctcgtagtccaacatcttcttctcggccagcgagatctgctcc

SEQ ID NO: 6565 - DNA, 595 bp, Homo sapiens
  MAP TO AC005409.1; EXPRESSED IN ADULT LIVER, SIGNAL = 1.5; EXPRESSED IN HELA, SIGNAL = 1.7; EXPRESSED IN BONE MARROW, SIGNAL = 1.3; EXPRESSED IN FETAL LIVER, SIGNAL = 1.2; EXPRESSED IN LUNG, SIGNAL = 1.1; NT HIT: gi14741165, EVALUE 7.00e-22; SWISSPROT HIT: P08547, EVALUE 1.00e-39; EST_HUMAN HIT: BF798369.1, EVALUE 3.00e-19
gccccagacccagatggcttcactggtgaattttaccaaacacttaaggaaaaaaaaaatgataccacttctctacaatctctttcagaaaatggaagcagagagaacatttcctaattcattctatgaggccaaaactaccctaataccaaaacaaggcaaagacattacaagaaaggaaacttataaaccactatctctcatgaacacagatgcgaaaaccctcagtaaaatattatcaaatcaaatccaacaatatataaaaagaattatttaccacaaccaactgggattcatcccaggtatacaagcctggtttaacaaccaaaaatcaattcataaaatccttcacatcaacaagctaaagaagaaaaattgtatgacgataccaatagatgcagaaaaagcatttgacaatccaacattaatttatgataaaaatgttcagcaaactaggaatacaggagaacttcctcagtttgatagagcatccacaaaaacagtttcacctaatatcatacttagtgatgagaaactacatgctttcctcctaaaaccaggaacaagacaagtgtggactcctcctcccatcacc

SEQ ID NO: 6566 - DNA, 582 bp, Homo sapiens
  MAP TO AL137225.7; EXPRESSED IN HELA, SIGNAL = 5.7; EXPRESSED IN ADULT LIVER, SIGNAL = 4.7; EXPRESSED IN PLACENTA, SIGNAL = 8.8; EXPRESSED IN HEART, SIGNAL = 5.3; EXPRESSED IN BONE MARROW, SIGNAL = 5.8; EXPRESSED IN LUNG, SIGNAL = 4.4; NT HIT: Z35875.1, EVALUE 2.20e+00; SWISSPROT HIT: Q28009, EVALUE 3.00e-03; EST_HUMAN HIT: BF242350.1, EVALUE 8.20e-01
gccccaggctgactgttcattgactctgctccaagttgacccataccattagatggtctagacccagattgaacatttattgaccctgcctcagactgaccataccttccaaatgaccctgtcccaaactgatcgtagccaccagattgcccagcctcagtttgaccataaccactaggaaacctattgccggtctgagaattcattgaacctaccccagattgacccaaacccctaaatgatccagccccttacttaccattcattggctctgctccagattgacccaagccaccagatgacccaggctcaggctgtttattgactccaccccagactgaccataccctccaaatgacttgtttccttgctgaccatactcatatgacctatccccagtttgaccgtaaccagatgacctaccaccagtctgataactcattaaccctgcctcagactgaccaaaatcatcatttttcccagtcccaggatgatcagttattagtcctgccctagattgacccaaaccatcagatgactcagccccatactgaccgtaactgccaggtgaagccaccccag

SEQ ID NO: 6567 - DNA, 508 bp, Homo sapiens
  MAP TO AL035551.6; EXPRESSED IN ADULT LIVER, SIGNAL = 1.3; EXPRESSED IN HELA, SIGNAL = 0.99; EXPRESSED IN LUNG, SIGNAL = 1.4; EXPRESSED IN FETAL LIVER, SIGNAL = 1.1; NT HIT: gi4885136, EVALUE 1.00e-102; SWISSPROT HIT: O00409, EVALUE 3.00e-72; EST_HUMAN HIT: AI057430.1, EVALUE 3.00e-89
tgccctcattgccctcctggctctccttgctggcaaacttgtagtggtcgtcggccaaggaggaggaggggatggagtcgctggtgggcaaggtgctccgggcgttggaggatttggcattggtgcagttgtgatcctccttagggtctccgctaaccaccggggagccacacgatggctcgctctcagtccgcatccggcagctggtgatgccgtacatcatggcagccgtcatctcaatgggactgatcggcagctgccgcacaccaggaaacagtcctctcagctcaggacccgcgctccgttttgtatcactcctggaggaaaacctgcttgtatttcagggggagtcccatggccctggtagcatcaatgtcaggatcttggagaagggctccatttctcttgaagaaggtactgcccggccagacgggtagacctgatgtgctttgatatgcctgaggacaggtgggaggtgtattgaacacgtgtggatgtgggtgtggga

SEQ ID NO: 6568 - DNA, 504 bp, Homo sapiens
  MAP TO AL022394.1; EXPRESSED IN BONE MARROW, SIGNAL = 4.4; EXPRESSED IN LUNG, SIGNAL =   4; EXPRESSED IN HEART, SIGNAL = 4.1; EXPRESSED IN HELA, SIGNAL = 6.7; EXPRESSED IN ADULT LIVER, SIGNAL =   4; EXPRESSED IN PLACENTA, SIGNAL = 3.6; EXPRESSED IN BRAIN, SIGNAL = 4.1; EST_HUMAN HIT: AL449659.1, EVALUE 0.00e+00; NT HIT: AF099017.1, EVALUE 1.20e-01; SWISSPROT HIT: Q15303, EVALUE 1.40e-01
tggtggacatggtgttgggcatgcactgggggctgctgctggagggagaggaactgtgctatgccagctggcaaaactggcactgttcctatcaggggcccgttggcggcatgggggttttttgcagagctggcagatgcctggctgactggaactgccccattgatgaaggaatggtccccctctctcacctccatttctccagtcgacagctttggtaaggcctcacccacaggctggctagggacattctccttgagtgtatgaatttttttggcttcagctttgcctttcattatcttcatgattggagttttggtaatgatgatttctgcctgtccatcagccccttcagcactgggctcacccgctaggtcaggagtgctggtgctctcagggatgctctgctccacaaccacatgattgtctggcttggccacgttccacacaaagctggcttccccggagtgacatgtggcattgtgcaaggaaagcccctcaggg

SEQ ID NO: 6569 - DNA, 554 bp, Homo sapiens
  MAP TO AF025422.1; EXPRESSED IN ADULT LIVER, SIGNAL = 2.2; EXPRESSED IN PLACENTA, SIGNAL =   2; EXPRESSED IN HELA, SIGNAL = 2.2; EXPRESSED IN BONE MARROW, SIGNAL = 2.3; EXPRESSED IN LUNG, SIGNAL =   2; EXPRESSED IN HEART, SIGNAL = 2.2; EXPRESSED IN FETAL LIVER, SIGNAL = 2.2; NT HIT: gi12056481, EVALUE 6.00e-10; SWISSPROT HIT: Q9UJU3, EVALUE 9.00e-38; EST_HUMAN HIT: BE467627.1, EVALUE 6.00e-57
tgccacgtgtgtgggaagggctatagtcagagctcacatcttcaaggtcatcagagggtccacactggtgagaaaccctataaatgtgaggagtgtgggaagggctttggccgcaactcctgtcttcatgttcatcagagagtccacactggagagaagccctatacgtgtggtgtgtgtgggaaaggcttcagttatacctcaggtctgcggaaccaccaaagagtgcatttaggcgagaacccttataagtagatgtacatagaggattccatctgggactcagagctttctatccatctgagagccaacacaggagaaaaaccataggaaagtgacatgtaggagggctataggagaaactgatgattttacattttctagtctgcataggaagggaacacctggatgtgtgataaataggttagcacttcagttacaaacttcagtctttaagagtctgttgtgcagcggagtaggctttaaagaaacagtgcagcagtggtttcagtaataatcctcacttccatcagaatctgcctgggagggagctt

SEQ ID NO: 6570 - DNA, 517 bp, Homo sapiens
  MAP TO AC005015.2; EXPRESSED IN ADULT LIVER, SIGNAL = 2.2; EXPRESSED IN HELA, SIGNAL = 0.21; EXPRESSED IN PLACENTA, SIGNAL =   4; EXPRESSED IN BONE MARROW, SIGNAL = 1.8; EXPRESSED IN FETAL LIVER, SIGNAL =   2; EXPRESSED IN LUNG, SIGNAL = 2.5; EXPRESSED IN HEART, SIGNAL = 2.9; NT HIT: AF041055.1, EVALUE 0.00e+00; EST_HUMAN HIT: BI047278.1, EVALUE 3.00e-43; SWISSPROT HIT: P30622, EVALUE 6.00e-43
gcactcaccagcacgcggtcccccaggcgcaggtccttttcgccccgcttcacagagccgctgtctgagaggttggatcccgactcgttgccagtcttcacggagctgttgaggacgctctcccgcagggggatgacgcggctggtcagcgggggcgtggccgtgcccgaatgcaatgacaggttctgggcagtcagcgactccacggagtgggcatcactccccgagccctcggccgtgggctgccgggtcagcttggagggccgcgtgaagataccctggagggccgggcactcgaagtagcgcacgccgcccaccgcgccatcattcttgcccaccgggtcgtccagcaccacgccagcccactggcccggtgcgaactgcgtctctcccagatactgcaccacgcctggcttcacgccgttcacccacacccgctcgcccaccacaaagtcccccaggaagtcatcccccacttccgccgccttggggcccggcttctcgggggcagcagctg

SEQ ID NO: 6571 - DNA, 542 bp, Homo sapiens
  MAP TO AP000536.1; EXPRESSED IN ADULT LIVER, SIGNAL = 1.8; EXPRESSED IN PLACENTA, SIGNAL = 2.6; EXPRESSED IN HELA, SIGNAL = 3.2; EXPRESSED IN LUNG, SIGNAL = 1.7; EXPRESSED IN FETAL LIVER, SIGNAL =   2; NT HIT: AL163202.2, EVALUE 2.00e-86; SWISSPROT HIT: P26010, EVALUE 2.00e-01; EST_HUMAN HIT: AW976364.1, EVALUE 2.00e-35
ccctcgtagctgtgttctgcaatcctatgagagggaaaaacattcagaacccagcagcagtgttctggagtcctttgtgacggacaagcattcagacccttgtagcagtgttctggaatcctatgtgagagacaaatattcaaaccttcatatcagtgttctggatttctatgtgagggtcatacactcagaacccagcagcagtgttctggaatcctatctgagggagtaacattcagacccttgcatcagagttctgggatcctatgtgagggacaaacactcagaaactagcagcagtgttctggaatcctatgtgaaggacaaacactcagaacccagcaacagtgttctggaatcccatgtgagggactagcattcagaccatcgtagcaatgttctggaatgctatgttgcggagaatccttaagaccgtcgtaccagtgttctggaatcctatgagagggacaaacaatcagaacccagtagcagtattccggaatactttttgagggacaaacactcggaacccagcagcagtg

SEQ ID NO: 6572 - DNA, 500 bp, Homo sapiens
  MAP TO AC015478.3; EXPRESSED IN ADULT LIVER, SIGNAL = 2.5; EXPRESSED IN HELA, SIGNAL =   1; EXPRESSED IN HEART, SIGNAL = 2.8; EXPRESSED IN BRAIN, SIGNAL = 2.4; EXPRESSED IN PLACENTA, SIGNAL = 5.8; EXPRESSED IN FETAL LIVER, SIGNAL = 3.9; EXPRESSED IN BONE MARROW, SIGNAL = 2.5; EXPRESSED IN LUNG, SIGNAL = 2.7; SWISSPROT HIT: Q55563, EVALUE 1.40e-01; EST_HUMAN HIT: AI271942.1, EVALUE 4.50e-02; NT HIT: M86261.1, EVALUE 8.00e-03
ggtgagggccctgggtctgggtctaggatggaaatgtcctctgtgtgaccagaggaacttggatggtcctgggagcacaggcagggcctcatctaagatgaaggccaagaagaggctgagggggaggctgagcaggggtcagacagaatgagagttacaggaaaggaaatgggtggagctcaggccaggcctcaatgaaggcagagactcttagccaagtgctcatgtgagctgggagctccctgggtgtcctctcactcaccctccacacaccctgaacaaagtgtccaagggcccagccaggcagggtgatgtagctgggaggggagccctgggctgagtctccagccccaagaatccttctttctcctcctgaggtggggccatcatcatggccaacatctgcggaaccccagagggaggccatgagaggccgtgtcatggtggagggagctctgcattggggtatggaggcttggagccacctctgggccctccaa

SEQ ID NO: 6573 - DNA, 543 bp, Homo sapiens
  MAP TO AC000015.2; EXPRESSED IN HELA, SIGNAL = 1.5; EXPRESSED IN PLACENTA, SIGNAL = 1.6; EXPRESSED IN BRAIN, SIGNAL = 0.98; EXPRESSED IN ADULT LIVER, SIGNAL = 1.3; EXPRESSED IN LUNG, SIGNAL = 1.3; EXPRESSED IN BONE MARROW, SIGNAL = 1.2; NT HIT: gi13653141, EVALUE 0.00e+00; SWISSPROT HIT: O70173, EVALUE 5.20e-02; EST_HUMAN HIT: BG165876.1, EVALUE 0.00e+00
tcttgtggagtgtctttgttgggtgaccaagttgtagatggagaatgaaatctagatcttcgagtacgaggctttttggttttatctatggtatcttttgggctttcagatggttgagaaacagtttcaaccttttcatccgcaagatcagaagacggcatattattttcagaacagtgtgtcacagaattttcattcatttgtttaagatcagcatttacagatggttcaacttcagattcattttggtcactgcaaaatgaatcacactccataggtatcatttcattgttgtcctcactaaaatgcttctgaatctgttcaatgtgtgttttaggcaactctgtagatctaggatgttcggtcagcgattcattcttttcttctaaagatttttccaatttggtgttcagaagattattttttagtaagttattttcagagtcttgaatattattgaaatcttcattcccaaaagtatcacatgttgcaattatttctacatcttcagtttcaacatgcccaagcaattgaacctctggg

SEQ ID NO: 6574 - DNA, 504 bp, Homo sapiens
  MAP TO AP000356.1; EXPRESSED IN HELA, SIGNAL = 2.3; EXPRESSED IN LUNG, SIGNAL = 2.6; EXPRESSED IN HEART, SIGNAL = 1.5; EXPRESSED IN FETAL LIVER, SIGNAL = 1.5; EXPRESSED IN ADULT LIVER, SIGNAL = 2.2; EXPRESSED IN BRAIN, SIGNAL = 1.8; NT HIT: gi16167673, EVALUE 1.00e-125; EST_HUMAN HIT: AA632626.1, EVALUE 1.00e-108; SWISSPROT HIT: P19440, EVALUE 3.00e-29
ccctccccacctcctcaggccagctctggggtctcggcaggtggtccgcaacatgacctccgagttcttcgctgcccagctccgggcccagatctctgacgacaccactcacccgatctcctactacaagcccgagttctacacgccggatgacgggggcactgctcacctgtctgtcgtcgcagaggacggcagtgctgtgtccgccaccagcaccatcaacctctagtaggggctgctgggccgcctgggtgggaaagggccaggggcgggtggcccagggactgcccacttatccagtaaggtggctccgtcacctcttttcctggtgggaaactgaggcccaaccttggtagcttatcctgggcctctcagtgagtatgtttgagcctcagtgggtggatagggaccaggctgggccaggcaaggtcgggcactgtctgacctggctgggcggtagctttggctccaaggtccgctccccggtcagcgggatcctgttca

SEQ ID NO: 6575 - DNA, 514 bp, Homo sapiens
  MAP TO AP002025.1; EXPRESSED IN HEART, SIGNAL = 3.5; EXPRESSED IN LUNG, SIGNAL = 2.9; EXPRESSED IN ADULT LIVER, SIGNAL =   3; EXPRESSED IN HELA, SIGNAL = 0.45; NT HIT: gi16164754, EVALUE 0.00e+00; EST_HUMAN HIT: BI545676.1, EVALUE 0.00e+00; SWISSPROT HIT: P78992, EVALUE 1.20e+00
atcggggctcagggcaggagcaacttccggagtcctagggttgggtttacctggattgaaattagctgcaaggcggatcatggtttccttcaagcacaaaagcaacaacaaggtttgagaggtaaaactccaagtgacatccacagagttttgtggccattctgccttatcagcaatttcatctcttaggagtttcagattcttccactgaggatccttcagaaacttgtcctccaaagcagacaggttagattttaaagtagccaacaagacatcatgttttgtgacctgtagtgaacttgagcccgagccttttgaagaagaaaaaaaggagagtttatacacatagaaaacaagctgcacttccccctgtggaatgccctgcctactccagttcatcctcgcaggccgggcgccactgtcactggctctggaaagcctcccccaggggtaccaacccagcctatgaagaatttaagaccacattttctgccttcccacagcactttgcatg

SEQ ID NO: 6576 - DNA, 517 bp, Homo sapiens
  MAP TO AL035685.17; EXPRESSED IN ADULT LIVER, SIGNAL = 1.7; EXPRESSED IN BONE MARROW, SIGNAL = 1.5; EXPRESSED IN FETAL LIVER, SIGNAL = 1.5; EXPRESSED IN LUNG, SIGNAL = 1.5; EXPRESSED IN HEART, SIGNAL = 2.1; EXPRESSED IN BRAIN, SIGNAL = 1.4; NT HIT: AF361365.1, EVALUE 1.90e+00; EST_HUMAN HIT: AA166676.1, EVALUE 3.00e-31; SWISSPROT HIT: Q13233, EVALUE 7.20e-01
tctgggggctgctggtctggggggatctgcttgcatccccatattgaggaccactgctggaggactctggctttgttcccaacgatgaagattagtaatggggaggggctaggactgagtccccagaggtgaggaccaaccccctcagacttttcccatgtggcactggtcactccatctttttattatccaagacgttatacccctacttggttggagaggtttcacagggacccataaaaagccacagcaagaagatggacactgacgaataagagagagagcacagagagacaacagtggcttgctggggtggagtagggtttgcttccctgtgaagtcccagacctaggctggattggatcaccctgtgattttaatatctccatatttataacctcactctgccccagcaagggaaaaaagcagcttacagacatgcttacaggacattgagatactgtcagatagtttaaacataagtaagaagggaccccgaggggtgggtgtggaccca

SEQ ID NO: 6577 - DNA, 536 bp, Homo sapiens
  MAP TO AL033383.24; EXPRESSED IN ADULT LIVER, SIGNAL = 2.6; EXPRESSED IN PLACENTA, SIGNAL = 4.2; EXPRESSED IN BRAIN, SIGNAL = 2.2; EXPRESSED IN BONE MARROW, SIGNAL = 2.2; EXPRESSED IN LUNG, SIGNAL = 2.4; EXPRESSED IN HEART, SIGNAL = 2.6; EXPRESSED IN FETAL LIVER, SIGNAL = 2.2; SWISSPROT HIT: Q92633, EVALUE 8.60e+00; NT HIT: gi14746983, EVALUE 0.00e+00; EST_HUMAN HIT: AU132437.1, EVALUE 0.00e+00
tggaccgtgaccttctgtctttggatttacctcttaaatcaactggggatctggattttttacctcgatcgcgacttctactttcatttataattggggattttttcctatcttttgatttacttttatcttcaattttaaccttatcatcagtaggagatctggccttaccaattttctcttgagatcgccttctaagggtaggggattttgatttccttgcttgatcttgagacttacttcttttggatgggcttttagattttttcctctcctttgacttgctcctagttgttttctctttaacgatttcaataccccccttacttttctttttatcagacctatgtctagtccgttctttggatctgcttttacttcgtttctttgtagtaattttattgtccacaagttcaagtttcccctttgtacttgaagatctagtactagacctatttccatttcttgccttttcatgaatttccccctcttcttcagagccagactcataaccttgcaaaatgagccccatacca

SEQ ID NO: 6578 - DNA, 513 bp, Homo sapiens
  MAP TO AL035685.13; EXPRESSED IN HELA, SIGNAL = 0.7; EXPRESSED IN ADULT LIVER, SIGNAL = 1.9; EXPRESSED IN HEART, SIGNAL = 1.9; EXPRESSED IN BONE MARROW, SIGNAL = 1.8; EXPRESSED IN FETAL LIVER, SIGNAL = 2.1; EXPRESSED IN LUNG, SIGNAL = 1.9; NT HIT: gi14786308, EVALUE 1.00e-109; EST_HUMAN HIT: BI755283.1, EVALUE 2.80e+00; SWISSPROT HIT: P15387, EVALUE 5.00e-27
cagtcgcggagcttgcccagccgcgtgcggggcaggcggtccagggtacgccagagtacctcgtgcgccagccccccgacgttgaggcggacccgccgagagcacgccttgctgcgcacgatctccatgggctcgggcggcagcgagctggtggagcgggagccatgcttcgtcatgcccgccggcatcgctgatccggccgcccccgccccccctgcccccccaggccgctgtcactcgacggcaaggcccgctgctgcgggggaggggggcagggagcgctgtgggctgctgggggtgcagggggccccgcgggcgcgcgtcacggccgtcttctcacctccatcccgacggctgcgaggcagaaagcgaaagcggacgcgggtcagcaaacggggagctgggcatgctgtccccccgccccccacctctccaccaggctcccagccggccttgaccttcccccgcgcttaagcggctcagtggggtaggacggatggtcgctgtccctcc

SEQ ID NO: 6579 - DNA, 510 bp, Homo sapiens
  MAP TO AC005950.1; EXPRESSED IN BONE MARROW, SIGNAL = 1.8; EXPRESSED IN LUNG, SIGNAL = 1.9; EXPRESSED IN HEART, SIGNAL = 1.6; EXPRESSED IN FETAL LIVER, SIGNAL = 1.8; EXPRESSED IN BRAIN, SIGNAL = 1.8; EXPRESSED IN ADULT LIVER, SIGNAL = 2.1; EXPRESSED IN PLACENTA, SIGNAL = 1.8; EXPRESSED IN HELA, SIGNAL = 2.4; SWISSPROT HIT: P53617, EVALUE 9.40e-01; NT HIT: gi14774392, EVALUE 1.00e-78; EST_HUMAN HIT: AA479005.1, EVALUE 3.00e-89
tgagcaccccgcgcttcttcttccatagctggaagaggctgtcgctgcgcttctccaactcgccctcgcgtagcacctcgtcgggggatttcatgtcgtgccgagcgcgggactgggagcggcaatgcgggcggtgacggcgccggctctgctcctcgtggccccggcgcggcctttatagctgcccctccccgccccgcccctccccgccccgccccggccctcgggccaccccgcccgcctgagccccgcgcgccccgggccataccctccccaagcccagccgtccgggcccgcaccgtcgcgtccgcgctctggtcggtccccggccgtcccctcccatctcagaagcccgcgctcctcttgccccccgtgccccagctgtccggccccgtggggtgactcgaggtcccgccccgcccgggcgctcgcccgcaccgtctcgcaggccggccccgcggaagaatgcgctgcagccagccctgcccgcgatgactcacgccggggagc

SEQ ID NO: 6580 - DNA, 500 bp, Homo sapiens
  MAP TO AP001747.1; EXPRESSED IN ADULT LIVER, SIGNAL = 1.4; EXPRESSED IN HELA, SIGNAL = 1.1; EXPRESSED IN LUNG, SIGNAL = 1.2; EXPRESSED IN BONE MARROW, SIGNAL = 1.2; EXPRESSED IN FETAL LIVER, SIGNAL = 1.4; SWISSPROT HIT: P22470, EVALUE 9.10e-01; NT HIT: AF195272.1, EVALUE 7.40e+00
acctgcactgggcctgccaccctgtttatatctatgcctgcgttttcctcttgccttttcaatccagaggcctcactagctttggcctagtcatcctttctccttgtcttctcttcaggtattttattgatgacttcctgatagcaccaaatggctccccgagggctctgaggcattcacacgtgtgtgagagtgtgcagggattccctggaattcagagggactgccttagactaatttgactgcttttgggcaaaataagcttatggcctgaaacttgccgattatcctggcccagccgtgccttgccaaaggtgtctctggcctggctagcgggttggggcagcagcagcaatcaccagtgtgacctgagggcgccgtgtcacaagcgcagggtactttggtggacacctgagaggcaggaatcctgctcaggaggatgaggctgcaggacgcccccacagcctgttgtggtcagaccccgaggatccagtgccagc

SEQ ID NO: 6581 - DNA, 523 bp, Homo sapiens
  MAP TO AC019063.4; EXPRESSED IN BONE MARROW, SIGNAL = 2.6; EXPRESSED IN FETAL LIVER, SIGNAL = 3.8; EXPRESSED IN LUNG, SIGNAL = 2.5; EXPRESSED IN ADULT LIVER, SIGNAL = 2.5; EXPRESSED IN PLACENTA, SIGNAL = 5.3; EXPRESSED IN BRAIN, SIGNAL = 2.5; EXPRESSED IN HEART, SIGNAL = 2.8; EXPRESSED IN HELA, SIGNAL = 4.3; SWISSPROT HIT: P46100, EVALUE 1.40e-01; EST_HUMAN HIT: BF057355.1, EVALUE 1.00e-73; NT HIT: AL163202.2, EVALUE 4.00e-94
gcctcaaagcgctccaaatgtccacttgcagatactacaaaaagagtgttacaaaacttctctatcaaaagaaatcttcaattctgtgacttgaatgcacacatcaggaagaagtttctgagagcaattctgtctagtttttatgtgaagatatacccctttccaaagaaggcctcaaagcactctaaatgtccacttgcagattctacaaaaagagtgtttcaaaagtgctgcatgaaaacaatggttgaattctgtgagttgaatgaacacatcacaaagaagtttaggagaaagcttctgtccagtttttatgggaagatattcctgtttacaatgaagtcctcaaagcggtccaaatatccacttgcagattctagaaaaacagtgtttcaaaactgctctacgaaaagtaaggttcaattctgtgagttgatgtcacacatcacaaagaagtttctcagaatgcttctgtccagtttttatgtgaagatatttctgtttccaatgaagggctcaaagc

SEQ ID NO: 6582 - DNA, 562 bp, Homo sapiens
  MAP TO AC010642.4; EXPRESSED IN ADULT LIVER, SIGNAL = 1.9; EXPRESSED IN BRAIN, SIGNAL = 1.7; EXPRESSED IN HELA, SIGNAL = 0.67; EXPRESSED IN PLACENTA, SIGNAL = 2.9; EXPRESSED IN FETAL LIVER, SIGNAL = 2.4; EXPRESSED IN LUNG, SIGNAL = 1.9; EXPRESSED IN HEART, SIGNAL = 1.8; EXPRESSED IN BONE MARROW, SIGNAL =   2; SWISSPROT HIT: P17029, EVALUE 7.00e-25; EST_HUMAN HIT: BE792666.1, EVALUE 1.00e-123; NT HIT: M88360.1, EVALUE 3.00e-67
gccttcatttgccctggccctcagaaccagtctaaatcctcagttcggctgccttctctctgggacagccctgagtgggaaatagagggtagcagtgcagggcccttctggaagcttctccagctggcctgaatcaccttgtgctcatcagggttcctcaaatgcagagtggttcctagacagcccgagtctgccctcaggcacctatcattttgacaactcatcaatcacccaccctgtctgtggctcttcaggaactcagcgtttctcttagacctcgagcctccgagaagacgctgtgctacgcccccaggggcgacttccggtcattgcagcaccgtgatgtggatccgcaagtgaaccatcagggctgagctacgactgaaggccttcccacagtcgctgcacttataaggcttctctcccgtgtggatcctctggtgctcaatgagggaggagctctgtgcaaaggccttcggacaaaccttacactgatatggcttctctccagagtggattctcagatgtcggatcagggctgagcagtcgctgaaggctcggc

SEQ ID NO: 6583 - DNA, 507 bp, Homo sapiens
  MAP TO AC005973.2; EXPRESSED IN HEART, SIGNAL = 2.7; EXPRESSED IN BRAIN, SIGNAL = 2.3; EXPRESSED IN ADULT LIVER, SIGNAL = 4.2; EXPRESSED IN FETAL LIVER, SIGNAL = 4.1; EXPRESSED IN BONE MARROW, SIGNAL = 2.6; EXPRESSED IN LUNG, SIGNAL = 2.2; EXPRESSED IN HELA, SIGNAL = 0.61; EXPRESSED IN PLACENTA, SIGNAL = 4.9; NT HIT: AE005703.1, EVALUE 7.50e+00; SWISSPROT HIT: P41996, EVALUE 2.40e-01; EST_HUMAN HIT: BI760716.1, EVALUE 6.00e-91
agtagtgctccgcgtccgggccgtgcacccgagcctccaggtctgtcaccttggtgaaggcctccctagtggcgaaggcgaagacggagccgaggggagtcaggaacctgcgggcgagacgatttgagagaatggagatggagccgccaaggaggcggggaccggctggggggcgggaggccactcactcgacgagtgccctccatcccgccaggtacggcgacagccccacatccccttcgggtttcagactggcgtggaaccgcctcatcatgcggcccagcatcccccgagggcccagacacggaggctgtttcctctccggggcctccagggttcccgactcctgccggacctggtggggagacacgatgggaagaggtgggagcagattctgccctgaagaaattgttccgaaggtttagctggcggctcttctgctgtgcgctcagcttccgacgggagagggtagaccgggggaggacccgccctttgccggaccctcag

SEQ ID NO: 6584 - DNA, 584 bp, Homo sapiens
  MAP TO AC008821.4; EXPRESSED IN PLACENTA, SIGNAL = 1.4; EXPRESSED IN BRAIN, SIGNAL =   1; EXPRESSED IN BONE MARROW, SIGNAL = 1.2; EXPRESSED IN LUNG, SIGNAL = 1.3; EXPRESSED IN FETAL LIVER, SIGNAL = 1.6; EXPRESSED IN ADULT LIVER, SIGNAL = 1.3; EXPRESSED IN HELA, SIGNAL = 1.6; EST_HUMAN HIT: BF086934.1, EVALUE 1.00e-117; NT HIT: gi13646934, EVALUE 1.00e-102; SWISSPROT HIT: O00472, EVALUE 6.00e-18
ccagcaatggagggtgactgcctctgtttaatactctcctgagtggtataatccacataaatcagcatagtctctcttggaacttagggtaaagctgtatgattagaaagaattcagtaagcacttcaagaaacatttgccagattctgctttttgacattaaacatgaaaatgtatttcacatttggttttgtgttgttgttgttctggtttagtttttgtttgggttttttgtttgtttgttttttgcttaagcatgaagaaagcgtgtaatattacaaccctggtaatattaatagtaagtaaggttacttagttgtttaaccagccatgcatgtattgaatttatttaattttagtgcaaactggctcacttttctccttttccctcccctagaaacggcttttggattcagagtttattgatcctttaatgaataaaaaagcccgaatatctcacctgacgaacagagtaccaccaacactaaatggtcatttgaatcccaccagtgaaaaatctgctgcaggcctcccgctgccccctgcggctgctgccatccctacccctccaccgctgccttcaa

SEQ ID NO: 6585 - DNA, 504 bp, Homo sapiens
  MAP TO AC008103.27; EXPRESSED IN PLACENTA, SIGNAL = 1.8; EXPRESSED IN ADULT LIVER, SIGNAL = 1.9; EXPRESSED IN BRAIN, SIGNAL = 1.5; EXPRESSED IN HELA, SIGNAL = 1.3; EXPRESSED IN LUNG, SIGNAL = 1.6; EXPRESSED IN HEART, SIGNAL = 1.7; EXPRESSED IN BONE MARROW, SIGNAL = 1.7; EXPRESSED IN FETAL LIVER, SIGNAL = 1.5; SWISSPROT HIT: P10266, EVALUE 4.00e-91; EST_HUMAN HIT: BE217830.1, EVALUE 0.00e+00; NT HIT: Y10391.1, EVALUE 0.00e+00
cccttagccccactccagcttttgatttttgccactgcacattctccaacaggcatcattattcaaaatactgatcttgtggagtggtcattccttcctcacagtacagttaagacttttacattgtacttggatcaaatggctacattaatcggtcagacaagattacgaataataaaattatgtggaaatgaccaagacaaaatagttgtccctttaaccaaggaacaagttagacaagcctttatcaattctggtgcatggcagattggtcttgctaattttgtgggaattattgataatcattacccaaaaacaaagatcttccagttcttaaaattgactacttggattctacctaaaataaccagacgtgaacctttagaaaatgctctaacagtatttactgatggttccagcaatggaaaagcagcttacacagggccgaaagaacgagtaatcaaaactccatatcaatcggctcaaagagcagagttggttgca

SEQ ID NO: 6586 - DNA, 559 bp, Homo sapiens
  MAP TO AL136179.15; EXPRESSED IN ADULT LIVER, SIGNAL = 3.2; EXPRESSED IN PLACENTA, SIGNAL = 5.6; EXPRESSED IN BRAIN, SIGNAL =   3; EXPRESSED IN LUNG, SIGNAL = 3.9; EXPRESSED IN HEART, SIGNAL = 3.4; EXPRESSED IN FETAL LIVER, SIGNAL = 4.2; EXPRESSED IN BONE MARROW, SIGNAL = 3.4; SWISSPROT HIT: Q06945, EVALUE 8.00e-18; EST_HUMAN HIT: BE793927.1, EVALUE 0.00e+00; NT HIT: gi4507162, EVALUE 0.00e+00
cctgggaggccgcgagaaacttgcattggaagcttcagcaaccagcattcgagaaactcctctctactttagcacggtctccagactcagccgagagacagcaaactgcagcgcggtgagagagcgagagagagggagagagagactctccagcctgggaactataactcctctgcgagaggcggagaactccttccccaaatcttttggggacttttctctctttacccacctccgcccctgcgaggagttgaggggccagttcggccgccgcgcgcgtcttcccgttcggcgtgtgcttggcccggggaaccgggagggcccggcgatcgcgcggcggccgccgcgagggtgtgagcgcgcgtgggcgcccgccgagccgaggccatggtgcagcaaaccaacaatgccgagaacacggaagcgctgctggccggcgagagctcggactcgggcgccggcctcgagctgggaatcgcctcctcccccacgcccggctccaccgcctccacgggcggcaaggccgacgacccgagctggtgcaagaccccgagtgggc

SEQ ID NO: 6587 - DNA, 519 bp, Homo sapiens
  MAP TO AC000099.1; EXPRESSED IN HELA, SIGNAL = 0.24; EXPRESSED IN ADULT LIVER, SIGNAL = 1.6; EXPRESSED IN PLACENTA, SIGNAL = 1.4; EXPRESSED IN BRAIN, SIGNAL = 1.3; EXPRESSED IN LUNG, SIGNAL = 1.3; EXPRESSED IN BONE MARROW, SIGNAL = 1.2; EXPRESSED IN FETAL LIVER, SIGNAL = 1.4; SWISSPROT HIT: O00222, EVALUE 4.00e-20; NT HIT: gi14753087, EVALUE 1.00e-97
ggctggcgtaaacagggctgcaaaatgtgaaacatgtagacccactgaactgaacccccttttttcccctcttcccaggaataattctgctacaaggctgatttcaaggacatgaattgttgacctcatcccaacatcagaacctcagatgttctaatttttgcaccattccaggcaagttgatcttataaggaaataaaattgaaccttaggggtctgatggaaattcactgtgacattcaaatcaagaaaacttgctaatgcccacagagccttttccccatgggccctgatggtagcctccagaaggtgcagcctcaggtggtgccctttcttctgtggcaagaataaactttgggtcttggattgcaataccacctgtggagaaaatggtatgcgagggaaagcgatcagcctcttgcccttgtttcttcctcttgaccgccaagttctactggatcctcacaatgatgcaaagaactcacagccaggagtatgcccattccatacgggtggatg

SEQ ID NO: 6588 - DNA, 505 bp, Homo sapiens
  MAP TO AC007956.5; EXPRESSED IN LUNG, SIGNAL = 1.9; EXPRESSED IN HELA, SIGNAL = 4.4; EXPRESSED IN ADULT LIVER, SIGNAL = 2.2; NT HIT: gi14784504, EVALUE 0.00e+00; SWISSPROT HIT: P35922, EVALUE 2.00e-03; EST_HUMAN HIT: BE784849.1, EVALUE 0.00e+00
aaacagaggtcgcggccaggcaatcagtcgaggcccaggattggtcaagcaagaagactttcgggataagatgatgggtagaagagaagatagtcgagagaagatgaacagaggagaaggtagccgggacagagggttggtgaggcctggaagcagtcgggagaaagtgccaggtggtcttcaagggagccaggacaggggtgcagctggcagccgagaaaggggaccacctcggagggctggcagtcaggagaggggacctcttcgaagggctgggagtagagagagaataccaccccgaagagctgggagcagggagagaggaccacctcgagggcctggcagtcgagaaaggggactgggaagatcagattttggtcgtgatagaggtccattcagaccagaaccaggagatggtggggaaaaaatgtatccatatcaccgggatgagcctcctagggctccatggaaccatggagaagagcgagggcatgaagagtttcca

SEQ ID NO: 6589 - DNA, 553 bp, Homo sapiens
  MAP TO AC025738.1; EXPRESSED IN LUNG, SIGNAL = 1.5; EXPRESSED IN HEART, SIGNAL = 1.7; EXPRESSED IN ADULT LIVER, SIGNAL = 1.4; EXPRESSED IN PLACENTA, SIGNAL = 1.7; EXPRESSED IN HELA, SIGNAL =   4; SWISSPROT HIT: O43909, EVALUE 7.90e-01; EST_HUMAN HIT: BF951318.1, EVALUE 0.00e+00; NT HIT: gi14740885, EVALUE 1.00e-124
tgcgtcctaggagaggcattttgccttaatggctagaaagcatttgaagcaccatcccctctaatggagttgaattctttcttactaacaatatttgggttagatttgatgaataattcacctgcaggttatgaactctcaaagagcatttagccacatccatgaaaaactattatgatccattttccccacaatataaagataaataaaatactgatcatctaattcattcatgtagttcatgcttcactacatgtgcttagaaatgccaataaagtaacactaaaggcaggagggatattcttacagagaaacaccagacataccctgtctaaccgtctagcttctatatgtctaagcagctgttgtctccagtctgcaggcattttaccacagctctcctctcccttcacaggagtaggcctcgtctttaaatcactgttatctgatggcttgtcaccatagttacccaagttatagtcagatggtattttttccaaaagagctgccatagtaggcctagctgaaactggcctggtttgggaggcaccgt

SEQ ID NO: 6590 - DNA, 509 bp, Homo sapiens
  MAP TO AC000080.2; EXPRESSED IN FETAL LIVER, SIGNAL = 2.2; EXPRESSED IN HELA, SIGNAL = 1.8; EXPRESSED IN ADULT LIVER, SIGNAL = 2.3; EXPRESSED IN LUNG, SIGNAL =   2; EXPRESSED IN BONE MARROW, SIGNAL = 2.4; SWISSPROT HIT: P10264, EVALUE 4.00e-17; EST_HUMAN HIT: H11869.1, EVALUE 4.00e-30; NT HIT: L41825.1, EVALUE 2.00e-96
ttctgctcccccaatgcccctttctcacactcttataccagtccgaccccgtcaatctcagtttctcttatctatacatacttttcctgtcacttctatgccgactctatctcatgtgcctgctcttgaaactttcatgcaatgcttattacgccaaaacaaacaagtagattagaggcgtgggcttattcggtcatgctggaacctcctaatgctcaaggggtacaagtgtgtcgatatacgccgctcaatcttacctttttaaaagaattcaaggatgcttgtactcagtatgttcctacttctccatatgttaaaacggtattacagactctttgtaccgaggtcattttgcttcctatagactgcgaccttttggcaaaagctgttctaactccatctcagcatttacaattccatacctggtggtcagaggaggcccgcctgcaggctcagctaaatcgggctgatggcattccaattactcaggctcagctcacaggctccga

SEQ ID NO: 6591 - DNA, 548 bp, Homo sapiens
  MAP TO AL353999.2; EXPRESSED IN PLACENTA, SIGNAL = 3.1; EXPRESSED IN BONE MARROW, SIGNAL = 1.9; EXPRESSED IN LUNG, SIGNAL = 1.8; EXPRESSED IN HEART, SIGNAL = 1.7; EXPRESSED IN ADULT LIVER, SIGNAL = 1.9; EXPRESSED IN BRAIN, SIGNAL = 2.1; EXPRESSED IN HELA, SIGNAL = 0.34; SWISSPROT HIT: P54271, EVALUE 3.00e+00; EST_HUMAN HIT: BI518920.1, EVALUE 0.00e+00; NT HIT: gi14786219, EVALUE 3.30e-02
tcgccaccgtcttccggttcttaaccagcaggtactgcaccagctcagctactttctagctcacagggcccctgggcatgcgcatcagggatgtcgggggccggaggggtactgcgggggcggggggcggcgggggcgcggggcggggcagacagttgcctaggggtttctggggtccacaaaggaactttcagaagcacctgagcaggggctccatgcctcagaagaagtgctcccagggctccggggagcacttggtgtccccgctgcaggcgcccccgtgggggtttcttgggcaaggaggagaggagcaggccaccgggcctctgagacccgcaggccctgggtgtcacctctaccgcggacgttctcacctgcggctttggctggcccaggaagcaggaactctgggaagagatgcgcgtccacgggcattcggcggccggagcgctgtgtgccaggccgagaggacagtgacgtcgccgcggctgctgcggcggctgctaagaagacccggagccccagggtcttgagtcggagaccgccgc

SEQ ID NO: 6592 - DNA, 513 bp, Homo sapiens
  MAP TO AC004189.1; EXPRESSED IN ADULT LIVER, SIGNAL = 1.3; EXPRESSED IN HELA, SIGNAL = 1.3; EXPRESSED IN LUNG, SIGNAL =   1; EXPRESSED IN FETAL LIVER, SIGNAL = 1.1; SWISSPROT HIT: Q02084, EVALUE 4.00e-14; EST_HUMAN HIT: BE872086.1, EVALUE 0.00e+00; NT HIT: gi14761262, EVALUE 0.00e+00
atgatcacggcccagacgccgtcctcggcgctgagtcccatctctcccttcctcctcaccccctccccggccacccccaccgtgcagccgccgccgtcgcccagctgcaggtcaacctgccagcggtggcgcccggaggagaagcccgggaagcccagaaccgccgggaggccgtcgaagcgcagggggctgtctggcaggctcttcttctgccgggtgtacctcactgacttcctgtcttccgagagaaccaggctccggctggcggtctgagggtccagagtgatgacccctagagggaggagcgcgcagacatcaacagcgggcggcaaccacagatgttcctagagcaggcaacgcacgtgggaggcagaaggagtactggacttgggcagcctgccattgggccacttctctgaaccgcccttctacctaatcagcaagtggtgctgttaaggatttgcttctcaaagtgcagcgggagggaccagcagcatccccaccacctgggtg

SEQ ID NO: 6593 - DNA, 526 bp, Homo sapiens
  MAP TO AC008151.1; EXPRESSED IN BRAIN, SIGNAL = 1.7; EXPRESSED IN ADULT LIVER, SIGNAL = 1.7; EXPRESSED IN PLACENTA, SIGNAL = 1.5; EXPRESSED IN HELA, SIGNAL = 0.33; EXPRESSED IN BONE MARROW, SIGNAL = 1.6; EXPRESSED IN LUNG, SIGNAL = 1.4; EXPRESSED IN HEART, SIGNAL = 1.5; SWISSPROT HIT: P22273, EVALUE 2.80e+00; EST_HUMAN HIT: BG036930.1, EVALUE 4.70e-02
ttgactggcggcaggaaggcagaaaaacagagggtcatatttttgacatgtgtattttcagaggcctattaaacatctgagcggagatttcatagagttcaccaggtgaatggtctgaaactccagggaaggtgtgcactcaagatgttatgagcagaaagaaaacacttacatccatgaagagaaggttggtagagagggaggttcaggccagggccctggcacctcatcatttagggggcaggtagcagagagggagccgaggagagtgcatagacgcacgcagccaggtgggaagaaaaccagcagaatgagatagtgtgagagcatgggaggagaatgctttccatggggacagagagagtggtcggttgagtctcctttgtggctctttctcaagatggaaggttctagagcatgtttgaatattcttaggatgctccagcagagtggggtgactgcaggagagaaggccttgaggaggaagggaacaggacccagaactcaggtgaggggtggcctctga

SEQ ID NO: 6594 - DNA, 535 bp, Homo sapiens
  MAP TO AC007286.18; EXPRESSED IN ADULT LIVER, SIGNAL = 1.8; EXPRESSED IN PLACENTA, SIGNAL = 2.1; EXPRESSED IN BRAIN, SIGNAL = 1.9; EXPRESSED IN HELA, SIGNAL = 4.6; EXPRESSED IN LUNG, SIGNAL = 1.9; EXPRESSED IN HEART, SIGNAL = 2.2; SWISSPROT HIT: P30414, EVALUE 2.20e+00; EST_HUMAN HIT: BF681264.1, EVALUE 1.90e-01
tgggctgaaacaaccatccttcatcttctacattaaaatgcagctgaatttgtaattagatccctgtccaaaacttgtattcccttattaagagaattaattgagttatctcagaagagaatattgattacattgagatttgactaataaaaacttctctccagaacttatctaaagtgaggtctggaactaggtcaccgtcactcatgagaaagccctcagaaaccaagataagacagagaagaaagggaattcagcacaagggtcaagaagccagggctgggggcatccttcagtggaggagaatagcatttgacagctgcctctagagaaagtggaagatgtgcagggctcgcaatgttgggcatgttaacagggggagaaatccgtgaaaaagctgtgaaaggaagtctgtgcaactgaatgaagtgctaaaacagatgactgattttaaaatttaggggcttgagggcagagtgtgcctgtggctttttctctttgtgctaagtggtttcctgagtggaccctgccacaa

SEQ ID NO: 6595 - DNA, 564 bp, Homo sapiens
  MAP TO AL022578.1; EXPRESSED IN PLACENTA, SIGNAL = 2.7; EXPRESSED IN BRAIN, SIGNAL = 2.2; EXPRESSED IN HELA, SIGNAL = 2.7; EXPRESSED IN ADULT LIVER, SIGNAL = 1.7; EXPRESSED IN BONE MARROW, SIGNAL = 3.6; EXPRESSED IN LUNG, SIGNAL = 3.7; EXPRESSED IN HEART, SIGNAL =   3; NT HIT: AF134304.2, EVALUE 0.00e+00; EST_HUMAN HIT: AW499926.1, EVALUE 0.00e+00; SWISSPROT HIT: Q9Y6W5, EVALUE 1.00e-22
tggggccttttgggtatccacccaccttggtgtaccagaatggcagcattggctgtgttgaaaacgtggatgcaagtagctatccaccaccatcacagtcagactctgcttcttcaccttctccttccttctccgaggacaacttgcctcctccaccagcagaattcagttacccagtggacaaccaaagaggatctggtttggctggacccaaaagatccagtgtggtcagcccaagccatccaccaccagctcctcctctaggctctccaccaagctctaaacccgggtttgctccaccacctgcccctccaccacccccgcctccaatgataggcatcccacctccaccaccgcctataggatttgggtctccagggacgcctccaccaccctcaagcccatctttcccacctcaccctgattttgctgcccctccacctcttcctccaccaccggcagctgactacccaactctcccaccacctcccttgtcccagccaacaagaggagcacctcctcctccccctcctcctcctccggggccccctcctccccctttca

SEQ ID NO: 6596 - DNA, 574 bp, Homo sapiens
  MAP TO AC006548.19; EXPRESSED IN ADULT LIVER, SIGNAL = 1.2; EXPRESSED IN BRAIN, SIGNAL = 1.1; EXPRESSED IN HELA, SIGNAL = 1.9; EXPRESSED IN FETAL LIVER, SIGNAL = 1.3; SWISSPROT HIT: P11420, EVALUE 4.20e+00; NT HIT: AB047488.1, EVALUE 5.50e-01; EST_HUMAN HIT: BF855515.1, EVALUE 1.00e-102
tcggcctgtgaggctggaatgggcccttctggagaacacgacagagaagttatctactgcctttgcccccagggcccaggcaacacttttaccctccattgcttgtttccgaagttaaggggaggagacaatgttttgtttagtgacctcgacagaaagggtgtcctcctgcaaccactcatttgttactttccttcttcctgaattgcctggacccactcctcctccatttgactggctccgtgcactgatgttatagtcaggagatttttgggaattgtggcttctaaaaatgtacactcaactctacccacagctggccctgtgaacctacacagctgttccactgtgtctccttctcaaagagacactcttcctgctgagtctctgccctctgctcctagatccaaatggcatctcctaccctatccctgtatggcttaacctagggaaactctttcccaaaggagtcaggtaaggagacggtggctgagcttcttacagacttaaaggagacatcctggaatttaggagtctgtccttcctttctgtctccctggcagctcctgctgct

SEQ ID NO: 6597 - DNA, 516 bp, Homo sapiens
  MAP TO AC008626.5; EXPRESSED IN LUNG, SIGNAL =   2; EXPRESSED IN PLACENTA, SIGNAL = 6.8; EXPRESSED IN HELA, SIGNAL = 3.3; EXPRESSED IN BRAIN, SIGNAL = 2.7; EXPRESSED IN ADULT LIVER, SIGNAL = 1.6; SWISSPROT HIT: Q03923, EVALUE 2.00e-82; NT HIT: gi16163761, EVALUE 0.00e+00; EST_HUMAN HIT: AU143734.1, EVALUE 0.00e+00
ggcctttagccggttatcccaccttactacacataagagaattcattctggagagaaaccctacaaatgtgaagaatgtggcaaagcttttaaacaatcctcaacccttactacacataagaggattcattctggagagaaattctacaaatgtgaagtatgtagcaaagcctttagccggttctcacaccttactacacataagagaattcattctggagagaagccctacaaatgtgaagaatgtggcaaagcttttaacctatcttcacaccttactacacataagataattcatactggagagaaaccctacaaatgtgaagaatgtggcaaagcttttaacctatcttcacaccttactacacataagataattcatactggagagaaaccctacaaatgtgaagaatgtggcaaagcttttaaccagtcctcaactctttctaaacataaggtaattcatactggagagaaaccctacaaatgtggagaatgtggcaaagcctttaacca

SEQ ID NO: 6598 - DNA, 536 bp, Homo sapiens
  MAP TO AC010328.4; EXPRESSED IN LUNG, SIGNAL =   2; EXPRESSED IN BONE MARROW, SIGNAL = 2.4; EXPRESSED IN PLACENTA, SIGNAL = 3.4; EXPRESSED IN HELA, SIGNAL = 1.8; EXPRESSED IN ADULT LIVER, SIGNAL = 2.3; EXPRESSED IN FETAL LIVER, SIGNAL = 2.3; EXPRESSED IN HEART, SIGNAL = 2.3; NT HIT: gi12741394, EVALUE 1.00e-100; EST_HUMAN HIT: AI221161.1, EVALUE 1.00e-109
gccatgtattttctgccaattggtgtgtactttgctgtcaaggtgaaaaaatactcctttcagggctaacgtaggtttgtacaatgtgttttggtcataggatgtttgaatctgtccttccctagaatttatttgaatgccatgtaatcaccctttttttactaaagaatgtgattcctttgtgttcgtaaaaattaaagatcatgattgggaagttttataactctgttgtatataaatgttgctttttgtgtaattctgttattcagtatgaaatatttatatactgtctctaattaattggaaacctatggttttcatttcttatagatctgtctcgtaactgtgtaatcaaggaactagcaccacaacaggaaggtaacccaggagaagtattccacacagtgacattggaacaacatgaaaaacatgacattgaagagttttgcttcagggaaatcaagaaaaaaatacacgactttgactgtcagtggagagatgatgaaagaaattgcaacaaagtgactacggcccca

SEQ ID NO: 6599 - DNA, 511 bp, Homo sapiens
  MAP TO AF127577.2; EXPRESSED IN ADULT LIVER, SIGNAL = 1.2; EXPRESSED IN PLACENTA, SIGNAL = 1.5; EXPRESSED IN BRAIN, SIGNAL = 1.1; EXPRESSED IN HEART, SIGNAL = 1.2; EXPRESSED IN BONE MARROW, SIGNAL =   1; EXPRESSED IN FETAL LIVER, SIGNAL = 0.98; EXPRESSED IN LUNG, SIGNAL = 1.1; SWISSPROT HIT: P48552, EVALUE 1.00e-80; NT HIT: gi4505454, EVALUE 0.00e+00; EST_HUMAN HIT: BG285363.1, EVALUE 0.00e+00
tggcttgacattccttttgggagctggtaactgccaacatccttctggccattttcttgcaatctggccatagcagcaagtctttcacttgctgcttgatttgcattttgcgtttttaaagcgtgttctcgagaatactgctgcaaatgggcttcgcttgacagaagtaatgctaactggctacaagcaacactaggtttaggtgaggtggcaggactagcccttttttccaccatgcttgcaacagcctgtaatcttgcagcacatgacaacggttcactcatgacctttgttccactttgtccaacatgatgaggagactctgcaaacctatctctgatgaggtttttagtcacatcaggaagattcgtatcaggcttttgatctttaactttacttttcttcaacaaagtttttaagtgacttgatgcaacaccatagcaccttaaatccttctccacttttaaagaatcatgactgagggcatatccttgctccttgaggctctgcc

SEQ ID NO: 6600 - DNA, 506 bp, Homo sapiens
  MAP TO AC006486.1; EXPRESSED IN ADULT LIVER, SIGNAL = 1.5; EXPRESSED IN BONE MARROW, SIGNAL = 1.6; SWISSPROT HIT: Q9HHH8, EVALUE 1.10e-01; NT HIT: gi14756138, EVALUE 1.00e-66; EST_HUMAN HIT: BE298194.1, EVALUE 2.00e-66
cttgaggggcagcccacaccaccagcccctccacccctgccagagacctggactcccacggcccggagcagccccccactgcccccacctgctgaggagcggaccagcgccaagggccctgagaccatggtgagcgcctgcaggccgtggggctcccactgccacttggctgtgcctctccattgacgtctttgcttttctgtcctactcttctttccatgcctgtgtgtctctcaggttaaagggtcccctctgtcccttctgcctgcctgtgttgtctcctctcccatctgaggcccctgtcttggccttcctgaggccgtgtgacagccttctcaaggggtctgctgggcgggctcagatccaactctttgtttctggcctttgccccagagtctgagctcagtgttcgccatctccctgcccatctccaccccaggccagcaaattccccagctcatcttcagactggcgcgtccctgggcagggcctggagaatcgtgggg

SEQ ID NO: 6601 - DNA, 507 bp, Homo sapiens
  MAP TO AP000127.1; EXPRESSED IN ADULT LIVER, SIGNAL = 1.9; EXPRESSED IN BRAIN, SIGNAL = 2.2; EXPRESSED IN HELA, SIGNAL =   3; EXPRESSED IN LUNG, SIGNAL = 1.9; EXPRESSED IN HEART, SIGNAL = 2.1; EXPRESSED IN FETAL LIVER, SIGNAL = 1.9; SWISSPROT HIT: P24499, EVALUE 3.20e-01; NT HIT: gi15893298, EVALUE 7.50e+00; EST_HUMAN HIT: AW105641.1, EVALUE 1.10e-02
tcaagctggtctcaatgcaggcacataagagcacatgaggaaaatgctgatgaaaaagcgtcaaactatgttaaactgtgtccaccatgccttaccaattttgtcatattttcttaaatcctttcctactttgaattttctataaacattcattgcattcctatatactgagatatattatactttttctggcttctccatttagcataactttctgcatgctttggtacatctttttttctacaaaagaactagcaacaactgagaacctcgtctttgcatcaggtaggatttatcctacatgaaatctaacaaaaagattccagaattaaaattggttaaacacacacacacacacacacacacacacacacacacacacaattggattaatcacctaaacatattgtactcaaatgagttcagataaaatcctctgatgacataaaccacttacattgaaagagactataagaaactgttattggcttggcagatggagggagc

SEQ ID NO: 6602 - DNA, 513 bp, Homo sapiens
  MAP TO AL161747.1; EXPRESSED IN ADULT LIVER, SIGNAL = 1.6; EXPRESSED IN PLACENTA, SIGNAL = 2.5; EXPRESSED IN BRAIN, SIGNAL = 3.1; EXPRESSED IN BONE MARROW, SIGNAL = 1.5; EXPRESSED IN LUNG, SIGNAL = 1.6; EXPRESSED IN HEART, SIGNAL = 1.7; EXPRESSED IN FETAL LIVER, SIGNAL = 1.2; NT HIT: gi16189783, EVALUE 0.00e+00; EST_HUMAN HIT: AU141360.1, EVALUE 0.00e+00; SWISSPROT HIT: P39806, EVALUE 4.00e-22
cccacctcctcctctgccccagatgcctcttctgaatcacctctcactgatattgccttctcacctccactctctgagcctctccctgccagggaatcttcatcagtcacatcttcctcttcttcctcatcctcctcttcctcctcctcagacaactcctcttccggtgatggctgctgggactgctgctgggggaaactccgtgccccggagactgtagattgctcggagccattctcctgagcagctcctccaccttcagggagtgcagtaccaccgttggggatctggccccccaggtgcatccggacatgctgctgcagagtgacagcattggtgaacttcttctggcagatggggcaggaattctgtgcccgggcagctggactggccttgtggcccacgaaatgtgcacgcagattacccctggtggagaaggctctgccacacactttgcatttgaagggcctctcacctccatgttggccataatgaaggcgtagggcccgagga

SEQ ID NO: 6603 - DNA, 548 bp, Homo sapiens
  MAP TO AL096814.26; EXPRESSED IN FETAL LIVER, SIGNAL = 1.7; EXPRESSED IN BRAIN, SIGNAL = 1.4; EXPRESSED IN ADULT LIVER, SIGNAL = 1.4; EXPRESSED IN HELA, SIGNAL = 1.3; EXPRESSED IN HEART, SIGNAL = 1.8; SWISSPROT HIT: Q04891, EVALUE 3.50e-01; NT HIT: AJ277275.1, EVALUE 1.00e-88; EST_HUMAN HIT: BF842037.1, EVALUE 8.00e-38
gggacctggggcctcctgacacaggaatgggagacccagcgagctcagatctgacccgggtcagcagcaccctcccccatcgccccctcctatcccccagtgggatccacctcaacaacatggggcctcagcatcagcagctgtctcccagtgccatgtggccccaggtattctcccattggaagtttctctcaatacccagtgtgctacagggtcagggctgagtctgcagtgctcaatcctctctccaagccccctcaacccttttgttctttactaattccacaaacattaacctacatgtgtcacgcactgtctgtgccaagcacttggaatacaaaatcaatctctattaagtcctttggccatggagcttataatctactaaggagatggccagagtaccacatcatgccctaaatgattcacgtaatggtcaagaccttgagtcacatgccaggggaccacacagtgttggtgtctcagttcccttggatctgtgtgctctggatatgctctgtgacattggtccccctttgggagggaga

SEQ ID NO: 6604 - DNA, 580 bp, Homo sapiens
  MAP TO AL034425.6; EXPRESSED IN PLACENTA, SIGNAL = 1.8; EXPRESSED IN ADULT LIVER, SIGNAL = 1.6; EXPRESSED IN BRAIN, SIGNAL = 1.5; EXPRESSED IN HEART, SIGNAL = 1.8; EXPRESSED IN LUNG, SIGNAL = 1.3; EXPRESSED IN FETAL LIVER, SIGNAL = 1.5; NT HIT: AF308144.1, EVALUE 1.40e-01; EST_HUMAN HIT: AI126503.1, EVALUE 0.00e+00
tgccctcctttctcctcgtcctgtccctcctccttctccgtcttcctcttttcctccttctcctcctgcttcctcatctccctcttctgtttcttctcttcttattctccctccttctccttatttactcttcctcttcttcctccctgtctcttcttcctccttctccacctccttctttttcttttcttcttcaatttggcatttcgctcacaggggaacctgaatggtcacaatcttcttcatgactttcccatctttatcctatcaaaaggttttttccatgaatttacagttctgtcttgccaccccaaccaagcccatctttctttgtctgggtcactcctgcctgaataattttattaaggcttaattttattaggcttaaaacaaagatgcactggatggatttgaagaaaaatagtgagagataaatttgcaggccaaatgcactgaattcctagaattactggagttcagaatttgcctagtggtatactcaataatactgtaatttcatattttcaagaggttttcctagcttgttgcagaagaagaggccgtgaccctgaccccgtgt

SEQ ID NO: 6605 - DNA, 563 bp, Homo sapiens
  MAP TO AC005630.1; EXPRESSED IN HELA, SIGNAL = 0.48; EXPRESSED IN ADULT LIVER, SIGNAL = 1.2; EXPRESSED IN BRAIN, SIGNAL = 1.4; EXPRESSED IN BONE MARROW, SIGNAL = 1.1; EXPRESSED IN HEART, SIGNAL =   2; EXPRESSED IN FETAL LIVER, SIGNAL = 1.1; EXPRESSED IN LUNG, SIGNAL = 1.6; SWISSPROT HIT: Q00657, EVALUE 6.00e-20; NT HIT: gi16161051, EVALUE 3.00e-95; EST_HUMAN HIT: BG991974.1, EVALUE 1.00e-92
gcagcctcagctcccgcaacaccctggccttctcaatggatgtgggaccagtgcacacagatgccaccctacaagtgaccattgccctagagggcccagtagccccactgaagctggcccagcacaagaagatctacatcttccagggagaggcagctgagatcagaagggaccagctggaggtgaggagctggaggtggtgagcagggtgtggaccaggtagagggccttcctcccagcctccatgccgggaacacatgtgacttgggctgtacctgtggtggtcccagcttgcgtgtgtgcacgtgcctcagatatgctcccatatatgttgtgttcccaagagtttctggggagcttgctgtacacccatcctcctgggagtggtgtgtgcctctagagctggtgcccactcatgtccatggcatggctgagcatgcagattcctggacgccacccagccctacagaatctctgaagtggagcccgagaatctgcattgcaatcagttccctgggagggcatcacgggtcctgaacttttgggattgctggccgtggaga

SEQ ID NO: 6606 - DNA, 506 bp, Homo sapiens
  MAP TO AJ011930.1; EXPRESSED IN ADULT LIVER, SIGNAL = 1.9; EXPRESSED IN PLACENTA, SIGNAL = 4.4; EXPRESSED IN BRAIN, SIGNAL = 1.6; EXPRESSED IN HEART, SIGNAL =   2; EXPRESSED IN BONE MARROW, SIGNAL = 1.9; EXPRESSED IN FETAL LIVER, SIGNAL = 2.5; NT HIT: AL163300.2, EVALUE 2.00e-68; EST_HUMAN HIT: BF057369.1, EVALUE 8.00e-47; SWISSPROT HIT: P17589, EVALUE 1.20e+00
gtgggcaggcagcacacaggcttgcagcagacgggcacgcagcaggcctgctggcagggggaggaggcgcagcaagccggctggcagcacgagggcgtgcaggagctggtgcagcctgattggcaggggctgggctcacaggccgcctggcagcaggggctggacacacagctcactggggtgcagaccagggtcaggcagggggcggtgccgcaggggggctcacagcagctctctgggcagtcgtccactcgccaggagtcagagcaagcgctggagcagacggacatggtgcacgcggccatgctggggtggggaagacgtgagctgggagctgggggaggtgtgagtgagtgagtgtgtgagtgagtgaaggagggagtgagtgagtgaggtgctcagggctgtggggcttttaaatccctccctggcgtgtgttgtcctgacaggaggctccacaagcttctcttccttgttggtgtttagagctggtggctggagatgcg

SEQ ID NO: 6607 - DNA, 515 bp, Homo sapiens
  MAP TO AC004755.1; EXPRESSED IN HEART, SIGNAL = 2.7; EXPRESSED IN BRAIN, SIGNAL = 2.6; EXPRESSED IN FETAL LIVER, SIGNAL = 3.1; EXPRESSED IN HELA, SIGNAL = 3.6; EXPRESSED IN ADULT LIVER, SIGNAL = 2.8; EXPRESSED IN PLACENTA, SIGNAL = 2.5; NT HIT: AE005402.1, EVALUE 4.90e-01; EST_HUMAN HIT: BF370341.1, EVALUE 7.20e-01; SWISSPROT HIT: O60423, EVALUE 2.00e-15
caggcccacctcaccttggcacgtagctccttgagggctgggaagatgactcggagggccaggacagggaaggtgtttatggacacactcagcaggaccaccagcaggatggagggagaggacatcacgctgaggtcggcatctggggacagggcggggtcacagcagagcctacccccagctccaaggatgcccccaggctagggagcgccttggtgcctttgtgcctggtccataaaggagcgccttccccaggacactttgccggacgactgtcatgagcaacctgcaacctcttccatcggggctcccctgcaccacgaccgcccgtcccacttccccatgggggctcacacagaaacgggaaggtcgtgggggatactctgaagagccagaagctctgggtggtggtagtcatgatggcgtagaaaccaaggctgaggaggatggtcgccacgcacagggcggtccagtacttgatgataagaatgacctggacaggcagcggtggggta

SEQ ID NO: 6608 - DNA, 509 bp, Homo sapiens
  MAP TO AL008724.1; EXPRESSED IN LUNG, SIGNAL = 2.9; EXPRESSED IN HEART, SIGNAL =   3; EXPRESSED IN BONE MARROW, SIGNAL = 2.6; EXPRESSED IN ADULT LIVER, SIGNAL = 2.9; EXPRESSED IN BRAIN, SIGNAL = 2.4; SWISSPROT HIT: Q9MYU4, EVALUE 2.40e-01; NT HIT: gi14778004, EVALUE 5.00e-78; EST_HUMAN HIT: AL042044.1, EVALUE 7.00e-69
tctgaggcgatgctgtccgcaccggtgggagagaaggggggttgctggtaacccaagggcagggcgttggaaacagactgagcagaagcaagagactcgagggaggaggagctgtcaaggctgaggcgcttgggtagctcagtagaatctaagcacaaaacacaagggccccaagggcagttagaattctatatggttttgatttttctttcaaaatttacgacatctttatatgcatagaagctagcaaagaattatgcaagagctactcatattaatcttacaatcctcaaaaacatggtcctgttagaaaaagtaaatctaacatagggacaaaatcattctaggagagctcacagccacacccaccccagacccaccatggcccatctccactctgctccctgtcacatgcggggtcagggtaagcagcatgaccctgtatccgccttcctctgagcagggctggccgtgctcctggggtgggggccctttgctcagctggggca

SEQ ID NO: 6609 - DNA, 540 bp, Homo sapiens
  MAP TO AC026717.3; EXPRESSED IN BRAIN, SIGNAL =  16; EXPRESSED IN HELA, SIGNAL =  23; EXPRESSED IN ADULT LIVER, SIGNAL = 6.8; EXPRESSED IN LUNG, SIGNAL =  20; EXPRESSED IN HEART, SIGNAL = 9.8; NT HIT: AF209434.1, EVALUE 0.00e+00; EST_HUMAN HIT: BG403426.1, EVALUE 0.00e+00; SWISSPROT HIT: P53505, EVALUE 6.00e-80
tccctgtacgcctctggccgtaccactggcatcgtgttggactccagtgatggggtcacccacactgtgcccatctacgaggggtatgccctccccaacgccatcctgcttctggacctggctggccgggacctgactacctcatgaagatcctcaccgagcgccgctacagcttcatcaccacgcggagcgggaaatcatgcgtaacatcaaggagaagctgtgctacctcgtcctggacttcgagcaggagatggctaccgcggcttccagctcctccctggagaagagctaccagctgcccaacagccaggtcatcaccattggcaacgagtggttctgctgccccgaggcgctcttccagccttccttcctgggcatggagtcctgtggcatccacgaaactaccttcaactccatcatgaagtgtgacttggacatccgcaaagacctgtacaccagcacagtgctgtctggtggcaccactatgtaccctggcattgctgacaggatgcagaaggagattaccgccctggcgcc

SEQ ID NO: 6610 - DNA, 501 bp, Homo sapiens
  MAP TO AF134576.1; EXPRESSED IN ADULT LIVER, SIGNAL = 1.7; EXPRESSED IN PLACENTA, SIGNAL = 4.1; EXPRESSED IN BRAIN, SIGNAL = 1.4; EXPRESSED IN LUNG, SIGNAL = 1.6; EXPRESSED IN HEART, SIGNAL = 1.9; EXPRESSED IN FETAL LIVER, SIGNAL = 2.3; EXPRESSED IN BONE MARROW, SIGNAL = 1.8; NT HIT: U10685.1, EVALUE 0.00e+00; EST_HUMAN HIT: BE277068.1, EVALUE 5.00e-91; SWISSPROT HIT: P43363, EVALUE 2.00e-13
gggcccagacagtgccaggagtcaaggtgaggtgcatgccctgaatgtgtaccaagggccccacctgctccaggacaaagtggaccccactgcatcagctccacctaccctactgtcagtcctggagccttggcctctgccggctgcatcctgaggagccatctctcacttccttcttcaggttctcaggggacagggagagcaagaggtcaagagctgtgggacaccacagagcagcactgaaggagaagacctgtaagttggcctttgttagaacctccagggtgtggttctcagctgtggccacttacaccctccctctctccccaggcctgtgggtccccatcgcccaagtcctgcccacactcccacctgctaccctgatcagagtcatcatgcctcgagctccaaagcgtcagcgctgcatgcctgaagaagatcttcaatcccaaagtgagacacagggcctcgagggtgcacaggctcccctggctgtggagg

SEQ ID NO: 6611 - DNA, 506 bp, Homo sapiens
  MAP TO AC009963.2; EXPRESSED IN ADULT LIVER, SIGNAL = 2.9; EXPRESSED IN PLACENTA, SIGNAL = 4.7; EXPRESSED IN BRAIN, SIGNAL = 3.6; EXPRESSED IN HELA, SIGNAL = 5.6; EXPRESSED IN BONE MARROW, SIGNAL = 2.8; EXPRESSED IN FETAL LIVER, SIGNAL = 2.7; SWISSPROT HIT: P49792, EVALUE 1.00e-75; NT HIT: gi14720742, EVALUE 0.00e+00; EST_HUMAN HIT: AU143272.1, EVALUE 0.00e+00
ggcccagtgttttcaggattgggttttattgttgtgtctgaggcaccggccgcacctgtacctgaacccttattttcttcctcagtgacttttgtttgatcatttgtcaaaaatgttttgaaatctttcagtccactcttcatttcttcagctctctgtattaacttggcagctctgccagtatctacaagtttatggggagtttgaagtggtatgtctaacagaagctgctggcattcctcaaatttctgcttgaattcttcagccagctctggtgttttaaattttgctgctaaccgctctagtttggcatcaccatcagagaaatcactggctgaccacatccatgctctatctgatccagacaggggcttcaggttcattgtagtcgttatccaatgattagcacacacttttagtacttgttctcttcgcatcagcattcttggtttgccattgacctcgtttttgagaatttttaagttccccaagcccctttctttcca

SEQ ID NO: 6612 - DNA, 566 bp, Homo sapiens
  MAP TO AC004943.1; EXPRESSED IN ADULT LIVER, SIGNAL =  29; EXPRESSED IN PLACENTA, SIGNAL =  34; EXPRESSED IN BRAIN, SIGNAL =  29; EXPRESSED IN BONE MARROW, SIGNAL =  18; EXPRESSED IN LUNG, SIGNAL =  22; NT HIT: gi14777629, EVALUE 1.00e-128; EST_HUMAN HIT: AI738776.1, EVALUE 1.00e-128
tggggcagctggggtctttgggaccctccaccgggctcgccggtccgtcggacttttggctgagatccgtgtcagactcctccgaatagtcgtctgttggcatcgagggctgaacccctgaggtgctgcatgaacttgaggtaaccgttgaagatgaggagagaggaggaaaagaagggggcttcgctgccgaagcccgggagaccacttgcggccaagacttcctggaggcgtggggggaagcggaggagggggcggcggccgacgggggaggggggctgtcgtttgagtgagcggcagactgcgaggtagatgcggtgctaggatcggggaagcaggcagagtgaggtaataaactagggtgctctttggcgtttcttgctgctctcgtgattgttctgtgtttgtgcaaggccgactcgagatgttgactcagagcttcctccccacagagcgcgctctcgcacgccaggcagtggtacgagccgccgccgccgccgccgccgccaccgccgccgccgccgccactgccaccgccgccgccgccggtggggacgtgaagcacc

SEQ ID NO: 6613 - DNA, 532 bp, Homo sapiens
  MAP TO AC010683.1; EXPRESSED IN LUNG, SIGNAL = 1.3; EXPRESSED IN FETAL LIVER, SIGNAL = 1.8; EXPRESSED IN BRAIN, SIGNAL = 1.3; EXPRESSED IN HELA, SIGNAL = 0.85; EXPRESSED IN ADULT LIVER, SIGNAL = 1.4; EXPRESSED IN HEART, SIGNAL = 1.5; EXPRESSED IN BONE MARROW, SIGNAL = 1.5; EST_HUMAN HIT: AL521707.1, EVALUE 3.00e-74; SWISSPROT HIT: Q9Y6K5, EVALUE 4.90e+00; NT HIT: AL163303.2, EVALUE 3.00e-33
gaacatttgtgattcatgggaggaggtcaaaatagcaacattagcaggagttaggaaaaagttgaatctaatcctcattaatgactttgaggggtttaagatgtcagtggaggaagtaacagcaaatgtggtgaaaatagcaagagaactagaattagaagtggagcctaaagatgtgactgaattgctacaatctcatgataaaacttaaacagatgaggagttacttcctgtggatgactaaagaaagtgctttcttaagatggatctactcctggggaggatgctctgaacagtgttgaaatgacagccgaggctttaaaacattacaaaagttgataaagcagtaacagagtttgagaggatctatcccaattttgaagaattttgaaagaagttatcctctgggtaaaatgctatcaaacagcatctcatgccacagagaaatctttcgtgaaagcaagagtcaatcaatgcagcaaacctcatttttgtcttatattaagaaaatgccacagcacctgaaccacca

SEQ ID NO: 6614 - DNA, 600 bp, Homo sapiens
  MAP TO AP000271.1; EXPRESSED IN FETAL LIVER, SIGNAL = 1.2; EXPRESSED IN ADULT LIVER, SIGNAL = 1.3; EXPRESSED IN BRAIN, SIGNAL = 1.3; EXPRESSED IN BONE MARROW, SIGNAL = 1.3; NT HIT: AJ277557.1, EVALUE 3.00e-15; EST_HUMAN HIT: N86169.1, EVALUE 4.00e-06; SWISSPROT HIT: P40100, EVALUE 3.40e+00
tccccaggcaaccacccatctactttctgtctttatggatttgcctcttctagacatttcctagaaatggaatcatacaatgtgtggtgctttgtgtctggcttccttacttagcatctgttttcaaggttcgtacatgttgtagcatgtctcagtactttatttctttttgtggcatcataatattccattgcatccttagaattttatatcctgaactaaaaatgttgttctctgcaatatcaatgctgcaatagatatgatgaagtgactacataaatgtattaccaaaataatggcacccactcttacatcacaggagggatggctttacctgctctgtctttattcctgctgtcatgtctaagcaactctaagtagcatggggcccattttggctgaggttcccccagaggccaaaaaggtcactttgagtacatccttggatagctcctctggtagaatggaggacggtagactggacacgggtcacactgaggttccagtaacttcaggcctcttcatcagagtgttgaataagaagcagaactttagcctccaaataaggtgtagttttggccggggaccgggaaagctgag

SEQ ID NO: 6615 - DNA, 583 bp, Homo sapiens
  MAP TO AC008151.1; EXPRESSED IN HELA, SIGNAL = 0.38; EXPRESSED IN ADULT LIVER, SIGNAL = 2.6; EXPRESSED IN PLACENTA, SIGNAL = 1.6; EXPRESSED IN BRAIN, SIGNAL = 1.9; EXPRESSED IN HEART, SIGNAL = 2.2; EXPRESSED IN LUNG, SIGNAL = 2.2; EXPRESSED IN FETAL LIVER, SIGNAL = 2.1; SWISSPROT HIT: P23578, EVALUE 4.30e+00; NT HIT: U26425.1, EVALUE 2.00e-03; EST_HUMAN HIT: BG993862.1, EVALUE 9.00e-04
tggcttttgcccaaccccactccctcatcatgtgtccttcataagaaccctggcacaggaaacgtcagctgtgcctctgacttgctgtgtgacctggtgcaagtgccttcccctctcggggccctagaaccctctctgtaagttgttaccaggggccacaggtgttcggtaaatattgaataaccagtgtcttggccactaaagcaaacactgagctaactgggagggttccataaagcctggagtctgtgattttcagaaaggaccaaagcaaagttaccaaactgaatgaaagcagctggcactgagatttcggcttcccaggatgcatgtatttgagactattgggagcagtagtaactgcacacagaaatgggacatttgcagtgtctggagtgcagaaagggtgaaagcaaatcctttggtctttctttacaaacatttgaagtccccagcatccagcacgcgttatgggattgccttcaaacaaaaacttataaatcattcaccaccagcaatcaccccctcctggtctttccaaatgagctactggaaaggggttggggggcagggagtgacagga

SEQ ID NO: 6616 - DNA, 507 bp, Homo sapiens
  MAP TO AL031282.1; EXPRESSED IN FETAL LIVER, SIGNAL = 2.4; EXPRESSED IN ADULT LIVER, SIGNAL = 2.5; EXPRESSED IN PLACENTA, SIGNAL = 2.4; EXPRESSED IN HELA, SIGNAL = 1.8; EXPRESSED IN BRAIN, SIGNAL = 2.5; SWISSPROT HIT: P24563, EVALUE 2.10e-02; EST_HUMAN HIT: BF594407.1, EVALUE 0.00e+00
gaggacgggccctacctgccaggcgcagcatgatgccccatgccagggcacctacccctcggtgtaccttggggccggtgcccaggccggatgtcacgtactctgggtggcctgtggcccgacgcctacgctcagcagcactaaggggcagaggcgctcacaaggcatagggcagtcgacagaggcctgctgcatgcgccagagagaacctctccgcccacaggcaccaaggagggggccgagtccctgccggtctcccaggcccccgaggccactggtaccttctcaggcttgtcccttccaaatcactcccaacaatatcctgccttattgatagctgcctgagcaaaaggcttctggtcacacatctacactgactcccgtagccgctcccccatccaagccctgcacagatgccggtaacaaggccttggtgcctacataacccgcccacgcaggggtcaagtggaaggcactgctctccagtgcggaggaggacgcaactcg

SEQ ID NO: 6617 - DNA, 567 bp, Homo sapiens
  MAP TO AC005494.1; EXPRESSED IN HEART, SIGNAL = 1.5; EXPRESSED IN LUNG, SIGNAL = 2.4; EXPRESSED IN BONE MARROW, SIGNAL = 2.4; EXPRESSED IN FETAL LIVER, SIGNAL = 1.9; EXPRESSED IN ADULT LIVER, SIGNAL = 2.3; EXPRESSED IN BRAIN, SIGNAL = 2.1; EXPRESSED IN HELA, SIGNAL = 3.7; NT HIT: gi14753097, EVALUE 1.00e-124; SWISSPROT HIT: O00222, EVALUE 2.00e-38; EST_HUMAN HIT: BF082374.1, EVALUE 1.00e-124
gcagagctgggaagggagactcagaaagtgatgtgagctttgtcaatcttcaaccttgccaaggaggacacattaaagtgtttttcatggaaaatcaggctttgtcaacacaaattcaaagcaatgtgaccttgacggatggagatatatatatatatatatatatatatatatatatatatatatatatatatatatatatatatgcatgctaagtaagaatagcacagactgaagcatctttagagaatataagtgaaccaaataaaaggaggaaaagcatcctaaaagaagatgttaaatccaggaaaaagttgtcaagtgtatttccttctacttaccttttctgctgactgggctgtaccaaaaaagatggggatgaaagctaaccaaatgatgcaggtggtatacatggtaaatccaataggtttggcttcattgaaagtctctgggacacctctcgttttaatggcataaacagtacaagtgaccatcaagaggatactgtatccaagtgaacaaatgagtgagagatcagaaatgtcacacttgagcactcccctggcc

SEQ ID NO: 6618 - DNA, 519 bp, Homo sapiens
  MAP TO AC004186.1; EXPRESSED IN HEART, SIGNAL = 2.3; EXPRESSED IN BONE MARROW, SIGNAL =   2; EXPRESSED IN LUNG, SIGNAL = 1.9; EXPRESSED IN PLACENTA, SIGNAL = 1.5; EXPRESSED IN BRAIN, SIGNAL = 1.8; EXPRESSED IN HELA, SIGNAL = 0.99; EXPRESSED IN ADULT LIVER, SIGNAL = 2.3; SWISSPROT HIT: Q02084, EVALUE 1.00e-07; NT HIT: gi4508004, EVALUE 0.00e+00; EST_HUMAN HIT: BI906732.1, EVALUE 0.00e+00
tccggcatctgggccaacaccagccccgaggctgagcttttcccagcactgcggccccggagagtgggcatcgccctggattatgaagggggcaccgtgactttcaccaacgcagagtcacaggaactcatctacaccttcactgccaccttcacccggcgcctggtccccttcctgtggctcaagtggccaggaacacgcctcctgctaagaccctgagccctgacatctgcccccagccccaaccctcagatgcttcacttctttggaattccaggactctcaatggggggacgggatgcctggcctaagcacctggagcaggggaccccatatccactggtagccacctccccattgctgtggccccctgaaatctcactcagtgctgttgctccatctactgccctaatggggctcttttcccacctcctgctggtttcccgagggaacttctgaccctggagtccatgagggctcctttcctttttgaccacgaccttggccccagctctgcac

SEQ ID NO: 6619 - DNA, 572 bp, Homo sapiens
  MAP TO AC006427.13; EXPRESSED IN HEART, SIGNAL =   3; EXPRESSED IN BONE MARROW, SIGNAL = 2.4; EXPRESSED IN FETAL LIVER, SIGNAL = 2.6; EXPRESSED IN LUNG, SIGNAL = 2.3; EXPRESSED IN ADULT LIVER, SIGNAL = 2.6; EXPRESSED IN HELA, SIGNAL = 2.1; EST_HUMAN HIT: AL519606.1, EVALUE 6.00e-11; SWISSPROT HIT: Q91836, EVALUE 2.40e+00; NT HIT: AL163268.2, EVALUE 3.00e-12
gtggggttggggcttgagggaaatgagaaaagtttgcaacagccactgtgaagaactggaaactaagttcaccaccaaagagccgtactgacactgcccagtgccaggttgatcagaagccttcagtttctgatggcaccagtcagtctccaggcaaaattgtctcttctgagagtcttgggactgttctttttttcacaagcaggcatttgagcattttgaaaatgcagaagtatatatatatatatcactacacatctctgggtagtgagactatggaggtgttactttgtattactattaggttggtcaaaagtaattgtggttttcatcgttactttcaatggcgaaaactgcaattatttttgcaccaacctaatataaatgtccctaagtcttctcctttccagcttaacatctcaacctacaatcattcctcaaaaagcaatcattttgccatcttggcagttttctcttggaaaaagataaattacaacaaaaagttaataattcttcacattactttatgtgatggttaactttatgtgtcaacttggctgggccacaatgcc

SEQ ID NO: 6620 - DNA, 534 bp, Homo sapiens
  MAP TO AL050330.9; EXPRESSED IN HELA, SIGNAL = 0.75; EXPRESSED IN ADULT LIVER, SIGNAL = 1.8; EXPRESSED IN LUNG, SIGNAL = 2.1; EXPRESSED IN HEART, SIGNAL = 2.2; EXPRESSED IN BONE MARROW, SIGNAL = 2.2; EXPRESSED IN PLACENTA, SIGNAL = 1.7; EXPRESSED IN BRAIN, SIGNAL = 1.5; EST_HUMAN HIT: BG323253.1, EVALUE 0.00e+00; SWISSPROT HIT: P07102, EVALUE 3.80e+00; NT HIT: gi14751923, EVALUE 0.00e+00
tggagcccactgccctgaccgtttgcccaataccaaaagtagagagttcccccgatcccgacctagtgcctgatcattccctggagataccactgaccccaggcttagctaatgaaagtggggagcctcaggctgaagtaacatctctgcttctccctgcccagcctggagctaagggtctcaccctccacaacagccagtcagaaccataaagctacaggcacacactgaagcactttactgatattcattcaattattccataggacagttgtttgagtttggtgccaccttattggcccctttatacagataaggaaactggggtgtagaaaagtgtattgactttacaaagcagacaggaatagtgaacaacagagctgggatctgaacaacaatgactaacattaatggagaatttaaaacgttctgagtgctgtgttatgagctttggtgggtgtcactcctttaatcctcacaacaccctgtcaggtagtctcatttggcaagtatggaagcagaggcagggcaaca

SEQ ID NO: 6621 - DNA, 548 bp, Homo sapiens
  MAP TO AC002123.1; EXPRESSED IN ADULT LIVER, SIGNAL = 1.9; EXPRESSED IN BRAIN, SIGNAL = 1.9; EXPRESSED IN BONE MARROW, SIGNAL = 2.3; EXPRESSED IN LUNG, SIGNAL = 2.1; EXPRESSED IN FETAL LIVER, SIGNAL = 2.1; EXPRESSED IN PLACENTA, SIGNAL = 1.8; EST_HUMAN HIT: BG542877.1, EVALUE 2.00e-23; SWISSPROT HIT: P07210, EVALUE 8.90e+00; NT HIT: X90761.1, EVALUE 4.00e-45
agcagggtttgaggggattgattccaattttgaaagaggttctctgggtaaaatgttatcaaacagtattgcatgcttcagagaaatctttcatgaaagagagagtcaatcgatgcagcaaacttcactgttgtctcattttaagaaatttccacagccagcccagccttcagcaaccaccctcatgatcaatcaacagccatcaacatagaagcaagacccttcaccagcaaaaagattacaacttgctgaaggctcagatgatcgttagcattttttatcaaaaaagtatttttaattactgtatgtacattttttaaacatatgttattgcacacttaatagactacattatagtgcaaacataatttctatatgcacttggaaagcagaaaattcatatgactcactttattgggacatttgttttattgtggtggtctggaactgaacctgcaatatctccaaggaatgcctgtagatggaaggcagaatgtgtcaacatagacgactgtaagaaggaaaatgtggtgtggggagtctggcca

SEQ ID NO: 6622 - DNA, 514 bp, Homo sapiens
  MAP TO AC007606.2; EXPRESSED IN HELA, SIGNAL = 1.3; EXPRESSED IN ADULT LIVER, SIGNAL = 2.3; EXPRESSED IN PLACENTA, SIGNAL = 1.7; EXPRESSED IN BRAIN, SIGNAL = 3.2; EXPRESSED IN LUNG, SIGNAL = 1.9; EXPRESSED IN BONE MARROW, SIGNAL = 2.2; EXPRESSED IN FETAL LIVER, SIGNAL = 1.8; NT HIT: gi14778121, EVALUE 1.00e-124; SWISSPROT HIT: P30519, EVALUE 3.00e-37; EST_HUMAN HIT: BG754409.1, EVALUE 1.00e-124
tgcaatgagggaggaagccagctccattcttccagacccctctatgtgcgagaggactcacccttcccaaaacactacccactggcatctatcacaccaggcctccatgctgggaaccacccactgggcccacaagctctggtggccaatctggtggccaccttcctctcggcaccctgcagctcatctgtcctaatgccatgtgtgccttcatgggccactatggatctgctaccactgtcaaagtttccctcttcagccctagcagctggcagcccccaatagtacctgcatgttatactcaaaagccttgttggcctcctccacgatcctctctttggtcttcatgttcaggtccagggcgttcatcctggcccggtagagctgcttgaactgctgggcattgtccacattctcaaacaggtagaactgggtcccttcccctgtgctggggagtttcagtgctcgctgggccaccttcttcagcacctggccccccgagagatcccccatg

SEQ ID NO: 6623 - DNA, 510 bp, Homo sapiens
  MAP TO AC011330.4; EXPRESSED IN ADULT LIVER, SIGNAL = 1.2; EXPRESSED IN PLACENTA, SIGNAL = 2.3; EXPRESSED IN HELA, SIGNAL =   2; EXPRESSED IN HEART, SIGNAL = 1.4; EXPRESSED IN BONE MARROW, SIGNAL = 1.6; EXPRESSED IN LUNG, SIGNAL = 1.3; EXPRESSED IN FETAL LIVER, SIGNAL = 1.7; NT HIT: U25714.1, EVALUE 4.80e-01; SWISSPROT HIT: Q04503, EVALUE 3.20e-01; EST_HUMAN HIT: BF766979.1, EVALUE 1.00e-67
ccaccccctaccagctgccctgaaggcctgccccctgttcccctcaccccagacatcttttggggctgcttcttggagaatgagactctgtgggctgagcgactgtgtggggaggcaagtctacaggctgtgccccccagcaaccaggcttgggtccagcatgtgtgccagggccccaccccagatgtcactgcctccccaccatgccacattggaccctgtggggaacgctgcccggatgggggcagcttcctggtgatggtctgtgccaatgacaccatgtatgaggtcctggtgcccttctggccttggctagcaggccaatgcaggataagtcgtgggggcaatgacacttgcttcctagaagggctgctgggcccccttctgccctctctgccaccactgggaccatccccactctgtctgacccctggccccttcctccttggcatgctatcccagttgccacgctgtcagtcctctgtcccagctcttgctcaccccacacgc

SEQ ID NO: 6624 - DNA, 557 bp, Homo sapiens
  MAP TO AL022319.2; EXPRESSED IN ADULT LIVER, SIGNAL = 2.1; EXPRESSED IN BRAIN, SIGNAL = 2.5; EXPRESSED IN PLACENTA, SIGNAL = 4.4; EXPRESSED IN HEART, SIGNAL = 2.5; EXPRESSED IN BONE MARROW, SIGNAL = 2.3; EXPRESSED IN FETAL LIVER, SIGNAL = 2.7; EST_HUMAN HIT: BG332245.1, EVALUE 7.80e-01; NT HIT: AB032946.1, EVALUE 0.00e+00; SWISSPROT HIT: P78363, EVALUE 8.30e-01
ccttctgtgacgggcagggccgggtctgacctgggtttgaggcggatgctagctcctctcgggggacctctcggggcaggtgaaggccctgcggtgacgccgcctaagctggacgtgcggaggggagaagccctgctccgaagggagctccttggatggggtctgcctgctgcctgctgtgcgggggagggcggcgtccaggttgctggggtgggggccgacacaggcggcctccacggctcccacctccccccaggccaccgggagcgacacgtcgctggacgccagccccagcagctccgcgggcagcctgcagaccacgctcgaggacagcctgaccctgagcgacagcccccggcgtgccctggggccgcccgcgcctgctccaggaccccgggccggcctgtcccccgccgctcgccgccgcctgagcctgcgcggccggggcctcttcagcctgcgggggctgcgggcgcatcagcgcagccacagcagcgggggctccaccagcccgggctgcacccaccacgactccatggacccctcggacgaggagg

SEQ ID NO: 6625 - DNA, 514 bp, Homo sapiens
  MAP TO AC006062.4; EXPRESSED IN LUNG, SIGNAL = 1.2; EXPRESSED IN PLACENTA, SIGNAL = 3.7; EXPRESSED IN ADULT LIVER, SIGNAL = 1.7; EXPRESSED IN BRAIN, SIGNAL = 1.5; EXPRESSED IN BONE MARROW, SIGNAL = 1.5; EXPRESSED IN HEART, SIGNAL = 2.2; EXPRESSED IN FETAL LIVER, SIGNAL =   2; EST_HUMAN HIT: AA393129.1, EVALUE 0.00e+00; NT HIT: AJ243947.1, EVALUE 0.00e+00; SWISSPROT HIT: O14598, EVALUE 6.00e-03
tgggtcccctcgctcactggctcctccggcggcagctcgtgctgagggagctcctggctgggctggtcgctggggccgggtgccgctggcccgctctccgcctcaggtgccgtcacggccgccatctttgtcgcagcccctttcttcccgcgtctccctctacgaactgcttttcccttcttggccaccttggtagtctggaaggacaacagggagatcacagaagggctccggtttagggacgaggatggaggaggctgggaacagggacgtgtcctcagaagcggtgggggccgggttggggggttgtgccaagtgacgacaggagaggcttcttgtgaggaaggaggcgaggggaagacgaggaggagcttgggagggtcactcaccttcttcttcgggtcactggggctcggctgagaggaggacttcctctttcctgcctccttggccttggccggaggtcccgaggctctcggctttggactcatcttccgcagctcaacgtctcgca

SEQ ID NO: 6626 - DNA, 516 bp, Homo sapiens
  MAP TO AL356017.1; EXPRESSED IN LUNG, SIGNAL = 1.5; EXPRESSED IN BONE MARROW, SIGNAL = 1.4; EXPRESSED IN FETAL LIVER, SIGNAL = 1.4; EXPRESSED IN ADULT LIVER, SIGNAL = 1.6; EXPRESSED IN BRAIN, SIGNAL = 1.7; EXPRESSED IN HELA, SIGNAL = 1.6; EXPRESSED IN PLACENTA, SIGNAL = 2.3; EST_HUMAN HIT: AW747968.1, EVALUE 0.00e+00; NT HIT: gi14748176, EVALUE 0.00e+00; SWISSPROT HIT: P34529, EVALUE 1.10e-01
tgctgcagcgcatcacatcacaacacaggacgcctccctgttctcatgtgaaaggagtcaacttacagatttacctgtttaagacaactgctgtgtatcttctttccacaaaaataattccgcacaaaatgttggtaaaaggagaaggaaaatttgtctctggcttctctttttcttcaatttcttcatcctcatcatcatcctcagaatcactccatgacacataattatcctgatttctattattataccactcaacgctttcaaactgctgtcgctcatatggtttatatttgcgtaagatttcgagcagtttgattactttaggagttacaaatttcaggtcaagtgaggcaggtgagaagtgctcttcacatagtgcatgtattttccttaggaaagtgtctgtaaacaataaaaatttcctgtgcagctcctcttgctcatgtttgatgtatttctgtagttctcttaccatcattccagctactttatctgcacaccagggtcccagaa

SEQ ID NO: 6627 - DNA, 532 bp, Homo sapiens
  MAP TO AL133543.2; EXPRESSED IN LUNG, SIGNAL = 1.4; EXPRESSED IN ADULT LIVER, SIGNAL = 1.5; EXPRESSED IN BRAIN, SIGNAL = 0.97; EXPRESSED IN HELA, SIGNAL = 1.9; SWISSPROT HIT: P15924, EVALUE 8.00e-98; EST_HUMAN HIT: BF087707.1, EVALUE 0.00e+00; NT HIT: gi15300248, EVALUE 0.00e+00
ttgctggaagcccaagcagctactggctttatagtggatcctgttagcaacttgaggttaccagtggaggaagcctacaagagaggtctggtgggcattgagttcaaagagaagctcctgtctgcagaacgagctgtcactgggtataatgatcctgaaacaggaaacatcatctctttgttccaagccatgaataaggaactcatcgaaaagggccacggtattcgcttattagaagcacagatcgcaaccggggggatcattgacccaaaggagagccatcgtttaccagttgacatagcatataagaggggctatttcaatgaggaactcagtgagattctctcagatccaagtgatgataccaaaggattttttgaccccaacactgaagaaaatcttacctatctgcaactaaaagaaagatgcattaaggatgaggaaacagggctctgtcttctgcctctgaaagaaaagaagaaacaggtgcagacatcacaaaagaataccctcaggaagcgtagagtggtca

SEQ ID NO: 6628 - DNA, 514 bp, Homo sapiens
  MAP TO AP001679.1; EXPRESSED IN LUNG, SIGNAL = 3.9; EXPRESSED IN ADULT LIVER, SIGNAL = 4.4; EXPRESSED IN PLACENTA, SIGNAL =  16; EXPRESSED IN HELA, SIGNAL = 7.8; SWISSPROT HIT: P05783, EVALUE 2.00e-58; EST_HUMAN HIT: BE621583.1, EVALUE 0.00e+00; NT HIT: gi4557887, EVALUE 0.00e+00
tgctgctgtccagggcattaccaagattgaagtcctcaccatcttccagcagggggtggtaggtggcgatctcagcctccagcttgaccttatgttcagcagcgcctcctactcctgggcctggtgctgcccctctgcccaggtctgtggcaactcggactccaggtgcatcagggtccccttgggctgctccatttgcagggcatagcgggcctccacctccttcaggctgttctccaagctggccttcagatttctcatcgagtacaggtcgatctccaaggactgaactgtatgtctcatccccatgagtatcatctcagcagctccaacctcgatgaactgtgtggtgaccactgtggtactctcctcaatcagccgagactagtatttgtccagctcctctcggtttttccgagccagctcatcgtattgggcctggatgtctgccatgatcttggtgaggtcctgcaatttgagggcatctacttccacggtcaacccagagctggca

SEQ ID NO: 6629 - DNA, 513 bp, Homo sapiens
  MAP TO AC000082.4; EXPRESSED IN ADULT LIVER, SIGNAL = 2.1; EXPRESSED IN PLACENTA, SIGNAL = 2.8; EXPRESSED IN BONE MARROW, SIGNAL = 2.1; EXPRESSED IN FETAL LIVER, SIGNAL = 1.7; NT HIT: gi14777026, EVALUE 0.00e+00; SWISSPROT HIT: O00501, EVALUE 6.00e-15; EST_HUMAN HIT: AL538454.1, EVALUE 0.00e+00
gcatccgcccctccgaagtcagcaggagcctctgggaagtaaggcagcagccaagacccccagcgtcttggaggggaagcgaaatcctcagtctgacacccgctctgcctatggaaacagcgccgcgcacagaaaaggaaacttcattccgtctgttaagggcagggccgggctagtggcaggagaaggtcagctgcgggcgcaggcaggagcggatccaggagccgcgtcggggcgcagagccggacgttccgaggagcctgcgcgccgcgctacccggcggaagccgcggtccatgcggggctccccaggcttatccaacgcctcgcaggcgtggctggcaggaggggcccggccgtgcccagcgccctcagacgtagttcttcttgtcgtagtcgccggtggccgtgggccgccgcggcgctgagtacttcacggggaagctgaggtcgggacggccggtgcagacccaggcgccgcagcacaagaggcagccgcctaccatgagcagcg

SEQ ID NO: 6630 - DNA, 551 bp, Homo sapiens
  MAP TO AL021707.2; EXPRESSED IN ADULT LIVER, SIGNAL = 1.9; EXPRESSED IN PLACENTA, SIGNAL = 1.9; EXPRESSED IN BRAIN, SIGNAL = 1.2; EXPRESSED IN HELA, SIGNAL = 1.7; EXPRESSED IN BONE MARROW, SIGNAL = 2.1; EXPRESSED IN LUNG, SIGNAL = 1.2; EXPRESSED IN HEART, SIGNAL =   2; EST_HUMAN HIT: AU117868.1, EVALUE 0.00e+00; NT HIT: gi5802973, EVALUE 0.00e+00; SWISSPROT HIT: P30048, EVALUE 3.00e-67
tcttccacgcttcggcccactgggaggtcattgacgctcaagtgcttgatgactccattggggtcagttatgaagagacctcttagtgcaagaccagaaccttctaacagcacaccgtagtctcaggaagtttgctcaaatctgacaagagtgggatgttcatgtggtccaaaccaccattatttcttggtgtatttatccaggcaagatgactaaagtgggaatccactgagaccacaacttcacagttcacatcatgaaattccttagctttgtcactaaaagcaacagtttctgtaggaccacgaaggtgaaatccaaaggatagaagaaaagcaccaaattatttccccttaaagtcatcaaggcttaggtctttgaactctccattgacaatggctgtacccttaaaatagggtgcatgctgggcgacagcaggtgcatggtatgaggagctggtgctaaagaattttgcttgactggaaccagaccataatatgtttgtcaagctcgttcttccagaagcagcaagcttgagggctgcagtggca

SEQ ID NO: 6631 - DNA, 509 bp, Homo sapiens
  MAP TO AL022067.1; EXPRESSED IN HELA, SIGNAL = 0.41; EXPRESSED IN ADULT LIVER, SIGNAL = 2.5; EXPRESSED IN PLACENTA, SIGNAL = 2.1; EXPRESSED IN HEART, SIGNAL = 2.4; EXPRESSED IN BRAIN, SIGNAL = 2.3; EXPRESSED IN BONE MARROW, SIGNAL = 2.5; EXPRESSED IN LUNG, SIGNAL = 2.5; EST_HUMAN HIT: BG697234.1, EVALUE 0.00e+00; NT HIT: gi14756695, EVALUE 0.00e+00; SWISSPROT HIT: P41183, EVALUE 1.00e-17
tgctgtgtgcccacatccccccgtttgcttaataccacactggaggtgccacaaggaggcttctcacctcctaggttgctgggcgttggccggtaagcctgcccctcccgttggcaactcttaatcttctggccttcctgtctcccttccctgctgtctctctcccctacactgtaggtctgccacaagagatttagcagcaccagcaatctcaagacccacctgcgactccattctggagagaaaccataccaatgcaaggtgtgccctgccaagttcacccagtttgtgcacctgaaactgcacaagcgtctgcacacccgggagcggccccacaagtgctcccagtgccacaagaactacatccatctctgtagcctcaaggttcacctgaaagggaactgcgctgcggccccggcgcctgggctgcccttggaagatctgacccgaatcaatgaagaaatcgagaagtttgacatcagtgacaatgctgaccggctcgaggacgt

SEQ ID NO: 6632 - DNA, 547 bp, Homo sapiens
  MAP TO AC007308.13; EXPRESSED IN FETAL LIVER, SIGNAL = 1.6; EXPRESSED IN ADULT LIVER, SIGNAL = 2.6; EXPRESSED IN HELA, SIGNAL = 0.35; SWISSPROT HIT: P05546, EVALUE 6.00e-41; EST_HUMAN HIT: BI553740.1, EVALUE 0.00e+00; NT HIT: M58600.1, EVALUE 0.00e+00
tcctccctgggatgcctgagctcccaggattctagaaggttagttttgcaaacctttaaagaagggattttcatcaaggggcccacagatccttcattgaggtttatgagtcccacatcaaaggttgggtgtctatctacatcagattctcttaaagtccatgatcctaaaacagttaagaactaatgctgtgagggcctcttcctgggtcaaagccacagggaacctgccatgtggatgctgcagcggggtgtggatcagccaggccgcctttcactgtgttctgttttccctcccagctttagctccgccaaaatgaaacactcattaaacgcacttctcattttcctcatcataacatctgcgtggggtgggagcaaaggcccgctggatcagctagagaaaggaggggaaactgctcagtctgcagatccccagtgggagcagttaaataacaaaaacctgagcatgcctcttctccctgccgacttccacaaggaaaacaccgtcaccaacgactggattccagagggggaggaggacgacg

SEQ ID NO: 6633 - DNA, 516 bp, Homo sapiens
  MAP TO AP001679.1; EXPRESSED IN FETAL LIVER, SIGNAL = 1.1; EXPRESSED IN ADULT LIVER, SIGNAL = 1.2; EXPRESSED IN HELA, SIGNAL = 1.9; NT HIT: AL163282.2, EVALUE 1.00e-126; SWISSPROT HIT: P48000, EVALUE 9.40e-01; EST_HUMAN HIT: BI334976.1, EVALUE 1.00e-111
tccgcctcagcctggaccttactgtccatatcgctatcagcatttttggcagaaccactcaacaagtctctaggaagttccaaattttcccatattttcctgtcatcttctgagccctccaaactgttccaacctctgcctgttacccagttccaaagttgcttccacatttttgggtatcttttcagcaatgacccactctactggtaccaatctactgtattagtccattttcacactgctgataaacacatacctgggagtgggaagaaaaagaggtttaattggacttacagttccacatggctggggaaacctcagaatcacagcaggaggcgaaacgcactactagcatggtggcagcaagagaaaatgaggaagaagcaaaagcagaaatccctgataaacccatcagatttcgtgagacttattcactatcacaagagtagcacagaaaagtctggaaaaactggccaccatgatttaattacctccccctgggttcctttcacaaca

SEQ ID NO: 6634 - DNA, 558 bp, Homo sapiens
  MAP TO AL031864.1; EXPRESSED IN ADULT LIVER, SIGNAL = 2.6; EXPRESSED IN PLACENTA, SIGNAL = 3.8; EXPRESSED IN HEART, SIGNAL = 2.9; NT HIT: gi14736531, EVALUE 0.00e+00; SWISSPROT HIT: P17588, EVALUE 6.90e+00; EST_HUMAN HIT: BE870705.1, EVALUE 0.00e+00
gcaggtgggcggtcgctatctctgcatctccctggctcaggctcacatcctgaagaaagcagtgggccacttctcccgggaggggtggatggtgagggtgcaccaagtggccaacagccaggaccaggtgttggaagcagagcctcagttctccttgcctgtctttgccttcatcatgaccaagttcaggccagtccctggctctgcccttcagatctttgagctgtgtgctcaggagcagcgcaagcctgtgcggctggagagtgccgagcggctggccgaggcggtgcaggagcgacagcagtatgcctggctgtgcagccagctgcgccgcaaggccaggctggggagtgtgtctctggacttgtgcgatggggacacgggggagccacgctacaccctccacgtggtggacagccccactgtgaaaccatcgcgggacaatcattttgcgattttcatcagtgagttgggattgctccctctcttccctggaggggctggcttacaggggctggggcttgggctggggctggggctgaggctgggctggggctt

SEQ ID NO: 6635 - DNA, 507 bp, Homo sapiens
  MAP TO AC005300.10; EXPRESSED IN LUNG, SIGNAL = 9.5; EXPRESSED IN BONE MARROW, SIGNAL =  11; EXPRESSED IN FETAL LIVER, SIGNAL = 8.3; EXPRESSED IN ADULT LIVER, SIGNAL = 8.9; EXPRESSED IN PLACENTA, SIGNAL = 4.6; EXPRESSED IN BRAIN, SIGNAL = 8.1; EXPRESSED IN HELA, SIGNAL =  16; EST_HUMAN HIT: BF528147.1, EVALUE 1.00e-14; NT HIT: U78027.1, EVALUE 2.00e-22; SWISSPROT HIT: P39188, EVALUE 3.00e-11
ggccacctctctggtccaggccaaccaaggagcaggaattaggccctcaccagacaccaaatctgctgatgccttgatcttggactgtccagtctccaaaagtatgagaaataaatttctgttttcacaggacacccagtctatggtcttctaatagcctgaatggactaagacatagaccaattgcacttatgaacatagacaaagaactcctgaacaaattaccagcagtagcggccagcaacatgtaacataaccaacttggttttatcccagggatgaaagaaagagttaaagatgacaacaggctgggcatagtgactcacgcctgttatcccaacattctagaggccaaggtgggaggagcgcttgaagcccaggagtttgagagccgcctaggcaacatggcaagacctcacctctacaaaaaattaaacaataaaattagctggggtgtggtggcacatacctgtagtcccagctacttgggaggctgaggcgggagaa

SEQ ID NO: 6636 - DNA, 524 bp, Homo sapiens
  MAP TO AL049649.4; EXPRESSED IN ADULT LIVER, SIGNAL = 3.2; EXPRESSED IN PLACENTA, SIGNAL = 2.8; EXPRESSED IN HELA, SIGNAL = 3.4; EXPRESSED IN LUNG, SIGNAL = 3.7; EXPRESSED IN BONE MARROW, SIGNAL = 3.4; EXPRESSED IN FETAL LIVER, SIGNAL = 3.3; SWISSPROT HIT: P71377, EVALUE 6.40e+00; EST_HUMAN HIT: BI831451.1, EVALUE 1.00e-107; NT HIT: AF324890.1, EVALUE 9.00e-09
ggcctgaacctaccacctcagggttcttcacctcctgaaaggcaggatgagtttcatcctgaaggaggtctggatggagtgtccaaatgataagtgaatttctggaaaactaacccatacctcctgaaatagaatttccaagaaagagcctcaaaatctctattttaattaagcatagacaggtgagggagcaggtacgtatgcttctacaggtttccatttcaatacgggaattaggcccagtgattttgaggctgattacaagtgtcccttatctgtgtgatcacttagtgttgttaactggcatgtcttttacaggaacatcaaagaccctgagaagccaaaagttatgaaatgcatcagcagtgggttgaagacaagacctctccttttcctgctgacatttcttccatgagcagtacccagacagccgacagaaagagcccaggaggtaactggggacatgagatgaaaactcaagatgcaagggtatcccatcttttggcttccttgggccacattgg

SEQ ID NO: 6637 - DNA, 528 bp, Homo sapiens
  MAP TO AL355076.2; EXPRESSED IN ADULT LIVER, SIGNAL = 7.6; EXPRESSED IN PLACENTA, SIGNAL = 9.9; EXPRESSED IN HELA, SIGNAL = 5.6; EXPRESSED IN BRAIN, SIGNAL = 6.9; EXPRESSED IN HEART, SIGNAL = 6.2; EXPRESSED IN LUNG, SIGNAL = 7.2; EXPRESSED IN BONE MARROW, SIGNAL = 9.3; EXPRESSED IN FETAL LIVER, SIGNAL = 8.4; SWISSPROT HIT: P46778, EVALUE 2.00e-44; EST_HUMAN HIT: BG774396.1, EVALUE 1.00e-119; NT HIT: gi16190498, EVALUE 0.00e+00
gctctggatggagcaggctggtgcttcagttgaacccaggtacctttctctttggcttctttctttttctgatcattttcctttacgtgtttcaggaagctattttggctcttagagtgctgaatgtgctcaatacgcacattaattctcttggcaagaatcctgcccttaacttgtttgtttacaacaatgccaacggcgtgctgggtaacactgcagactcttccagttttgccattataacactcgcggagcattcctttttgaacagtacccattcccttgatgtctacgatatctacgatatcacctttctttccttctttctttctttctttctttctttctttctttctttctttctttctttctttctttctttctttctttctttctttctttcctgctttctttctttcttttctctttctttctttctttctttccttctttctttctttctttccttctttccttctttctctttctttctttctttttcttccttccttcattccttccttcctc

SEQ ID NO: 6638 - DNA, 563 bp, Homo sapiens
  MAP TO AC002988.1; EXPRESSED IN ADULT LIVER, SIGNAL =   2; EXPRESSED IN HELA, SIGNAL = 3.3; EXPRESSED IN BONE MARROW, SIGNAL = 2.1; EXPRESSED IN FETAL LIVER, SIGNAL = 1.8; NT HIT: gi14768167, EVALUE 0.00e+00; SWISSPROT HIT: O14581, EVALUE 4.00e-69; EST_HUMAN HIT: AI909504.1, EVALUE 3.00e-62
ggatgacagatggccacaaaccgatcataggccatcacagccaggagtaagctgtctaaccctccaaaaagtacaaaaaagcacatctgggtgatgcagcctgcataggtgatgactctgctctgtgtctggatgttaatgagcatctttgggattgtagtggagatgaaacagatgtctgcaaaggacaggttggagaggaagaagtacatgggggtgtggaggtgggagtctgagattgtggccaggatgatgagcagattcccgagcacagtgaccaggtacatggacagaaacagcccaaagaggaagggctgcaattctggttcctcagaaagtcccagaagaacaaattctgaaatccctgtgtcattctctggttccatctttttttttctatttatttatttatttatttatttatttatttatttattaacatagacagggtctctcactctgttgccaacgctggtctgaacctcctggactcatgcgatcctcccacttcagcctacaaaagtgctgagattataggcataagccattgtgcccaggcttgg

SEQ ID NO: 6639 - DNA, 500 bp, Homo sapiens
  MAP TO AL022067.1; EXPRESSED IN ADULT LIVER, SIGNAL = 2.4; EXPRESSED IN BONE MARROW, SIGNAL = 2.2; EXPRESSED IN LUNG, SIGNAL = 2.6; EXPRESSED IN FETAL LIVER, SIGNAL = 1.9; EXPRESSED IN PLACENTA, SIGNAL = 3.3; EXPRESSED IN HELA, SIGNAL = 0.44; NT HIT: AF156962.1, EVALUE 0.00e+00; SWISSPROT HIT: P10272, EVALUE 7.00e-12; EST_HUMAN HIT: AA368311.1, EVALUE 1.00e-130
ggcaagcaccagcccatgccatcaccctcacagagccctgggtatgcttgaccattgacggccaggaggctaactgtctcctggacactggtgtggccttctcagtcttattttcctgtcccagacaacggtcctccagagctgtcactatccaaggggtcctaggacagccagtcactagatacttctcccagccactaagttgtgactggggaacttcactcttttcacatgcttttctaattatgcctgaaagcccaactcccttgttagggagagacattctagcaaaagcaggggccattatacacctgaacataggagaacacccgtttgttgtcccctgcttgaggaaggaattaatcttgaagactgggcaacagaaggacaatatggacgagcaaagaatgcccgtcctgttcaagttaaactaaaggattctgcctcctttccccaccaaaggcagtacccccttagacccgaggctcaacaaggactcc

SEQ ID NO: 6640 - DNA, 521 bp, Homo sapiens
  MAP TO AC006357.2; EXPRESSED IN LUNG, SIGNAL = 1.3; EXPRESSED IN ADULT LIVER, SIGNAL = 1.3; EXPRESSED IN HELA, SIGNAL = 1.7; EXPRESSED IN PLACENTA, SIGNAL = 1.5; EXPRESSED IN BRAIN, SIGNAL = 1.3; EXPRESSED IN HEART, SIGNAL = 1.3; EXPRESSED IN FETAL LIVER, SIGNAL = 1.3; EST_HUMAN HIT: BF798031.1, EVALUE 0.00e+00; NT HIT: gi14250967, EVALUE 7.70e+00; SWISSPROT HIT: Q04360, EVALUE 8.30e+00
ggcaacgctccagctttcggatctctcggtcctcctcctcgttcgccgctaaaagcgcccgtttccgggcagcggcggtggcggctgcggagggtctggtctttgcggtggcggccgtggccttggccttgacccgggacggccgcggcttcctgggaggcgaggggtcccgactaggggctgggcgggcgcgctcctccgtgtcctgccggtgaccgctggcttcttcggctccgcttcggcctcccaggcgggacctgttcggggccgccgtcctctgcagccggcgtgctttccgcaggtgccgcttctccttcctcagttccttacggctttttctccctcccgggcgaaacgtcaccgggcgccgcgcccctcgcaacccccgggagcctcgccttccgaagtcgcgtgcacgaactcctccaccgctagcttcagcctcttcagggccttctccccaccgccagcaggaccgcggcgcccgcgcccgccttctgcgcttcatgcgaccacgcgtc

SEQ ID NO: 6641 - DNA, 501 bp, Homo sapiens
  MAP TO AC025249.2; EXPRESSED IN FETAL LIVER, SIGNAL = 3.5; EXPRESSED IN BRAIN, SIGNAL = 3.9; EXPRESSED IN ADULT LIVER, SIGNAL = 4.5; EXPRESSED IN PLACENTA, SIGNAL = 3.5; EXPRESSED IN LUNG, SIGNAL = 4.4; EXPRESSED IN BONE MARROW, SIGNAL = 4.3; EST_HUMAN HIT: N43999.1, EVALUE 3.00e-06; NT HIT: AL163278.2, EVALUE 3.00e-05
agggagggagggagggagggaaagaaaatgctaagagagtgaattttaactgatattccccacaaaaatcataaatgtatgaggtaatgcttgtgttaaatagctagatttcaccattccacagtgtacatatactggaaaacttcatgttgtacaggataaatacatacatttttatgtcaatttaaagaaataaacatgagaaaaaaacaaattttatatctaccattatcattcatgtcttgttaactagggaagagttacgctatcccttaagacttgaatttcatttgagggcttattagttaatgtctgcacattcctggaacagttaataataacagaccaagggctaggaacaatggaaaacaattaatgaaaaagcctacacagcataaatgaatgtctttctactgacaggcatcctggcaatgtcctcctatctactcagattgaagaactcacatctctccagagccttcggctgcctccctaggatgc

SEQ ID NO: 6642 - DNA, 562 bp, Homo sapiens
  MAP TO AC002994.2; EXPRESSED IN PLACENTA, SIGNAL = 3.5; EXPRESSED IN BRAIN, SIGNAL = 2.4; EXPRESSED IN ADULT LIVER, SIGNAL = 2.1; EXPRESSED IN HELA, SIGNAL = 5.8; EXPRESSED IN LUNG, SIGNAL = 3.4; EXPRESSED IN HEART, SIGNAL = 3.1; EXPRESSED IN FETAL LIVER, SIGNAL = 1.4; NT HIT: AJ278883.1, EVALUE 0.00e+00; SWISSPROT HIT: P38879, EVALUE 3.00e-04; EST_HUMAN HIT: BG397031.1, EVALUE 0.00e+00
caccgcaccactcagaccgcgtaacttacagtctctaaatccaatagatccttttccattccaacttgacctcatggcagtgtagcactgctgacaaatgtctttttaaatgctctctttttgcttcccgctgcaacaagcgtgggtcacgctctcgctcgcgctctttctgccgccatcttgcttccgcgttccctgcacaaaatgccgggcgaagccacagaaaccgtccctgctacagagcaggagttgccgcagtcccaggctgagacagggtctggaacagcatctgatagtggtgaatcagtaccagggattgaagaacaggattccacccagaccaccacacaaaaagcctggctggtggcagcagctgaaattgatgaagaaccagtcggtaaagcaaaacagagtcggagtgaaaagagggcacggaaggctatgtccaaactgggtcttctacaggttacaggagttactagagtcactatctggaaatctaagaatatcctctttgtcatcacaaaactggacgtctacaagagccctgcttcggatgcct

SEQ ID NO: 6643 - DNA, 516 bp, Homo sapiens
  MAP TO Z97055.1; EXPRESSED IN ADULT LIVER, SIGNAL = 2.2; EXPRESSED IN BONE MARROW, SIGNAL =   2; EXPRESSED IN FETAL LIVER, SIGNAL = 2.2; EXPRESSED IN LUNG, SIGNAL =   2; EXPRESSED IN HEART, SIGNAL = 2.1; NT HIT: AF111168.2, EVALUE 1.90e+00; SWISSPROT HIT: P42201, EVALUE 1.20e+00; EST_HUMAN HIT: BG764687.1, EVALUE 1.80e-01
cagggaagcccaagtggcccgactgcagcccatcatcggtagctaagtccaagcagatgagtccctggggcagaaggaagagtcaaatggccctgtgaacacggaaggtaaagaaaaaccccacttcattccaaggaagcatgtagcaagatgtcaaaaacagacatcccggtgacatggagttgcagggggaaatagtgtgaggactctggaaggagcaaggcatgaaggactgcacgtgtggtcctgcgctgatgtgaggagcaagtgcacggagtccccacagcaggaggggggacgggaatgagctgtaggttgctgggtggagagccttcccaccggaatgcctgagaggaggcgaggacgccgggcccctccacgcttttccctgggctccacgctgctctgtgaaagggaagggaatcatccatctggaatatgaaggaagaataacaaaacctcactgtccaccccagagaagacacggtcacagaggctgcatgccacactgcgggt

SEQ ID NO: 6644 - DNA, 558 bp, Homo sapiens
  MAP TO Z98050.1; EXPRESSED IN LUNG, SIGNAL = 3.5; EXPRESSED IN ADULT LIVER, SIGNAL = 3.2; EXPRESSED IN PLACENTA, SIGNAL = 4.6; EXPRESSED IN HEART, SIGNAL = 2.9; EXPRESSED IN BRAIN, SIGNAL = 3.3; EXPRESSED IN BONE MARROW, SIGNAL = 3.5; EXPRESSED IN FETAL LIVER, SIGNAL = 3.3; EST_HUMAN HIT: BG679671.1, EVALUE 0.00e+00; NT HIT: gi14783193, EVALUE 0.00e+00; SWISSPROT HIT: P15822, EVALUE 4.00e-95
ggccccacaagtccatccaccaggactggctctgaatgctgtcggactgcaggttctgactgcaaacccttcatcacaaagcagccccgcccctcaggcacacattccaggtctccagatcttgaacatagcattgcccaccttaatcccctcagtcagtcaagtagccgttgatgcacagggagctccagaaatgccagcttcccaaagcaaagcatgcgagacacaacccaagcagacttctgtagccagcgcaaaccaggtcagcaggaccgagtctcctcaggggttacctacagtccagcgggaaaatgcaaaaaaagttctgaatccacctgcccctgcaggtgaccatgcaaggcttgatggcctgagtaaaatggacacagagaaggctgcctcggcaaatcacgtgaagcccaagcctgaactcacttccatacagggccaaccagcgtccacgtcacaacctctgctgaaggcacattctgaagtttttacaaagccctcaggccagcagactctctctccagacagacaggttcccaggcccacagc

SEQ ID NO: 6645 - DNA, 553 bp, Homo sapiens
  MAP TO AC006256.1; EXPRESSED IN PLACENTA, SIGNAL = 5.3; EXPRESSED IN BRAIN, SIGNAL = 4.7; EXPRESSED IN HELA, SIGNAL =   9; EXPRESSED IN ADULT LIVER, SIGNAL = 4.6; EXPRESSED IN FETAL LIVER, SIGNAL = 6.3; EXPRESSED IN LUNG, SIGNAL = 4.8; EXPRESSED IN HEART, SIGNAL = 4.9; SWISSPROT HIT: P31792, EVALUE 2.00e-17; EST_HUMAN HIT: BE061067.1, EVALUE 0.00e+00; NT HIT: D11078.1, EVALUE 0.00e+00
cacacgtgctctccctgccgatcgtgtctgactgatctctcaaaccccagcaccttctacaaaacaacaactcctttccttcctaggcatggttagatactttcgactttagatacctggttttgccatcctaacaaaaccattatataaactcacaaaaagaaacctagctgaccccatagatcctaaatcctttcctcactcctctttccgttccttgaagacaactttaaagactgccccaaccctagctctccctgactcatctcaaccgtcttcattacccacagctgaagtgctgggctgtgcagtcagaattcttacacaaggaccaggatcacatcctgtagcctttttgtccaaacaacttgaccttactgttttaggctggccatcatgtctccgtgcagcggctgctgccgccttaataattttagaggccccaaaattacaaactatgctcaactcactctctacagctctcataacttccaaaatctattttcttcctcacacctgaggcatatacggtctgcttcctggctccttcagc

SEQ ID NO: 6646 - DNA, 506 bp, Homo sapiens
  MAP TO AC008403.3; EXPRESSED IN ADULT LIVER, SIGNAL = 1.9; EXPRESSED IN LUNG, SIGNAL = 1.5; EXPRESSED IN FETAL LIVER, SIGNAL = 1.3; NT HIT: AF181988.1, EVALUE 0.00e+00; SWISSPROT HIT: O15067, EVALUE 1.20e-02
cacaggcctccgactgtgccacagtgtccagtgggaattgtacacccgagtaatagaacggtcacgcaggccctccaccaccccctcgcaaagctgcatctgaggccaccccatctttggacaggtcccttgacccagaggcttctgggaattacggcccagagccttgacaggccaggcgtggcccttttggggtctacccacaggcgggcaatcctcaagccacaggaagctctgtatgccccaaatccaggcctccaggaagagctggtcacatacctttctgttgggtttacatccccagctgcccagtgacccattcgcaggccccaggcccaagaggctgctgggagttgtagtccacgccccctccaggaccgcacgcccctcgccctcgggcctacatctcccacaatcccccagggctcacggaagtccccgcctctcctcccgggcgcacctgcagcagctgggcacgcacgtgggcctcgaccaggtggctgcgg

SEQ ID NO: 6647 - DNA, 570 bp, Homo sapiens
  MAP TO AP000346.1; EXPRESSED IN LUNG, SIGNAL = 2.6; EXPRESSED IN HELA, SIGNAL = 5.2; EXPRESSED IN ADULT LIVER, SIGNAL = 1.9; EXPRESSED IN BRAIN, SIGNAL =   3; EXPRESSED IN PLACENTA, SIGNAL = 2.4; EXPRESSED IN HEART, SIGNAL = 1.9; EXPRESSED IN BONE MARROW, SIGNAL =   3; NT HIT: X60004.1, EVALUE 1.00e-124; EST_HUMAN HIT: BE160856.1, EVALUE 0.00e+00
tgactgtcccctggcccgacacccgtaaagggtctgtgctgaggattagtaaaagaggaaggaaggcctctttgcagttgagataagaggaaggcatctgtctcctgctcatccctgggcaatggaatgtcttggtgtaaagcctgattgtatatgccatctactgagataggagaaaactgccttagggctggaggtgggacatgctggcggcaatactgctctttaaggcattgagatgtttatgtatatgcacatcaaaagcacagcacttttttctttaccttgtttatgatgcagagacatttgttcacatgttttcctgctggccctctccccactattaccctattgtcctgccacatccccctctccgagatggtagagataatgatcaataaatactgagggaactcagagaccggtgcggcgcgggtcctccatatgctgagcgccggtcccctgggcccacttttctttctctatactttgtctctgttgtctttcttttctcaagtctctcgttccacctgaggagaaatgcccacagctgtggaggcgcaggccact

SEQ ID NO: 6648 - DNA, 527 bp, Homo sapiens
  MAP TO AL035682.16; EXPRESSED IN HELA, SIGNAL =   1; EXPRESSED IN ADULT LIVER, SIGNAL = 1.5; EXPRESSED IN BRAIN, SIGNAL = 1.3; EXPRESSED IN BONE MARROW, SIGNAL = 1.5; EXPRESSED IN FETAL LIVER, SIGNAL = 1.2; EXPRESSED IN LUNG, SIGNAL = 1.3; EXPRESSED IN HEART, SIGNAL = 1.7; NT HIT: AB044947.1, EVALUE 3.00e-05; SWISSPROT HIT: P40226, EVALUE 2.20e+00; EST_HUMAN HIT: N74907.1, EVALUE 3.00e-03
tgccatggtgccctcactcgctccaaaagcaagtactaaatttccaagtagccccactcgtgcatggcaccatgcacacagcaggtgcttaatgcctgcattagcccaccccaaagaccctgcaccatcagtctaggtcccttggtttaaggaagctgattttcatgcgattgacaaatgggttgctgatctgttacttgtttggagtctttctctctatgaaagaatacgagccattcacatttcctgagagctgtgtgccaggccctatacagtgccagggactattatttaattctcacactgctcctaggtaacgtcatcatccccattttatagatggggaaatagagacaggcagaccaatactctccctagcaggtgacaggggattgggatttgaactcagagcctatttaattaacttgtatggtattgatcctttaattaacttgtacggtattgatcctctttcttttggggatcccagaatcctctgtgtcatttgcgtgaagtcaggggacggc

SEQ ID NO: 6649 - DNA, 597 bp, Homo sapiens
  MAP TO AC021090.5; EXPRESSED IN HEART, SIGNAL = 1.9; EXPRESSED IN FETAL LIVER, SIGNAL = 1.9; EXPRESSED IN HELA, SIGNAL = 4.1; EXPRESSED IN ADULT LIVER, SIGNAL = 1.7; EXPRESSED IN BONE MARROW, SIGNAL = 1.9; NT HIT: gi4758513, EVALUE 1.00e-110; SWISSPROT HIT: O75437, EVALUE 3.00e-36; EST_HUMAN HIT: BI761470.1, EVALUE 1.00e-110
gctctgggcagttgtgaaacactggttaagtccattataaccttctttgttcaccttatactcatccacacttttacagccttttcttaactgtaaattctcatgtccatattttccatatcttctcagtattgctttttgaaaagaatcttccatgccctgctctggccaaaggtcttgagcaaaatgaggacacatacctgaaaaaaaaataaaaataaataaattactccacttactagactcacatgaatatagtttaaaaatcttacctataaaattatacaaactacatagacaagatagcattgcaaaataccacaggctctaattctttcatagacataaatgtaacaaaaacattcagaccaaaatacatctgtggaaaattcataaatgatttaagtgtgtgcagtgtcccaggtgagcacaatgcaaaaaaacacaaagaagaaaaagaaaagtctgttaaatttactcaatacatcttttcctgtttcccactataccatagtgtctttacaagtaaattgccaactcttggtttctgttttaaaagaaaggtaaaataccggcacaatcattgccatttctggc

SEQ ID NO: 6650 - DNA, 569 bp, Homo sapiens
  MAP TO AC006477.2; EXPRESSED IN FETAL LIVER, SIGNAL =  11; EXPRESSED IN LUNG, SIGNAL = 9.3; EXPRESSED IN PLACENTA, SIGNAL =  15; EXPRESSED IN HELA, SIGNAL =  22; EXPRESSED IN ADULT LIVER, SIGNAL = 9.7; EST_HUMAN HIT: BG756367.1, EVALUE 1.00e-116; NT HIT: gi4506660, EVALUE 1.00e-114; SWISSPROT HIT: P12970, EVALUE 2.00e-51
gctttgtgaaatggccccgctatatcaggttgcaatggcagagatccatactctataagcagctgaaagtgcctcctgcgattaaccagttcacccaggccctggaaggccaaacagctactcagctgcttaagctggcccacaaatacagaccagagacaaagcaagagaagaagcggaggctgttggcccaggcagagttgtgggcaaaggggacctccccattaagagaccacctgtctttcgagcaggagttaacaccatcaccacctttgtggataacaagaaagctctgctggtggtgactgcacacgacatggatcccattgagctgactgttttcctgcctgtcctgtgtcataaaatgggagccacttgctgcattatcaaggggaaggcaagactgggatgtctagttcacaggaagacctacaccactgtcgacttcacacaggttaactcagaagacaaaggagctttggctaagctgatggaagctatcgggaccaattacaatgccagatacgatgagacccactgtcactgggacggcaatgtcctgggtccca

SEQ ID NO: 6651 - DNA, 508 bp, Homo sapiens
  MAP TO AC022216.3; EXPRESSED IN HELA, SIGNAL = 1.3; EXPRESSED IN ADULT LIVER, SIGNAL = 1.2; EXPRESSED IN LUNG, SIGNAL = 1.5; EXPRESSED IN BONE MARROW, SIGNAL = 0.96; SWISSPROT HIT: P36894, EVALUE 1.00e-61; EST_HUMAN HIT: AU123612.1, EVALUE 0.00e+00; NT HIT: gi13642387, EVALUE 0.00e+00
tgctccacggcactgggatgaaatcagactccgaccagaaaaagtcagaaaatggagtaaccttagcaccagaggataccttgccttttttcaagtgctattgctgagggcactgcccagatgatgctattaataacacatgcataactaatggacgttgctttgccatcatagaagaagatgaccagggagaaaccacattagcttcagggtgtatgaaatatgaaggatctgattttcagtgcaaagattctccaaaagcccagctacgccggacaatagaatgttgtcggaccaatttatgtaaccagtatttgcaacccacatgccccctgttgtcataggtccgttttttgatggcagcattcgatggctggttttgctcatttctatggctgtctgcataattgctatgatcatcttctccagctgcttttgttacaaacattattgcaagagcatctcaagcagacgtcgttacaatcgtgatttggaacaggatgaagca

SEQ ID NO: 6652 - DNA, 586 bp, Homo sapiens
  MAP TO AC007029.2; EXPRESSED IN ADULT LIVER, SIGNAL = 1.3; EXPRESSED IN BRAIN, SIGNAL = 1.3; EXPRESSED IN HELA, SIGNAL = 1.4; EXPRESSED IN HEART, SIGNAL = 1.4; EXPRESSED IN FETAL LIVER, SIGNAL =   1; SWISSPROT HIT: P26755, EVALUE 2.50e+00; EST_HUMAN HIT: BG106743.1, EVALUE 0.00e+00; NT HIT: gi7662303, EVALUE 0.00e+00
tgctcattcatcccacagccgtctataaataggatttcaaggaagccacttaatacaatgtgtagagtgatttagagaagaattcccttttccccagacagacagatataaaaattgggttgatctacctcattactcttgctttgagatagggtcaggctatcattggtcagttcctcatcatcagcactgtttctgctaagaactttactcttcttcttcttgcaacccccttcactggcagggctactatgatcttcatcattgccttcatcattctcgtcttcatcactcccgcttccctcatcttcatcatcctcattgtctccatcacttccctctttctgagacgcagatctcccttttctctttactacagtaggtcgccaatcattgtcatcctcactgtcatagtcatccatgtcattcagctcttccatggacacaaaatccagaagtggtcggtttcgtcgaaggttccatttttttggctcgctgacttgttcctctgtagcggttgtcgtagtgggaacagaaggggatgtgttaacagcaggaggacttgtggctggtgtggtggcagcag

SEQ ID NO: 6653 - DNA, 500 bp, Homo sapiens
  MAP TO AC003005.1; EXPRESSED IN HELA, SIGNAL = 3.9; EXPRESSED IN FETAL LIVER, SIGNAL = 2.8; EXPRESSED IN LUNG, SIGNAL = 2.6; EXPRESSED IN HEART, SIGNAL = 3.3; EXPRESSED IN PLACENTA, SIGNAL = 4.2; EXPRESSED IN ADULT LIVER, SIGNAL = 2.5; EXPRESSED IN BRAIN, SIGNAL = 2.6; NT HIT: gi16162756, EVALUE 2.00e-03; SWISSPROT HIT: P52740, EVALUE 4.00e-03; EST_HUMAN HIT: AW966118.1, EVALUE 0.00e+00
tgccagtggtcagcagaacaaagctcccatttttctggctaaaactgggtcatgctcatgcttaaaccagtagtggggcagaaaaaaagtgagaatccttgatggcctcaggctactgatgattccctccagggaagggaatagtacagaggtctgtcttttgaaacacattggggttactttggcacaaggcaggactcttccagcacaaagacagatggcttctaacaggcactgccttgacgaaattccagcaagagtctagaaaattcagcatagctccagaaggcttcccatatagctggcactcggaagaacctccccagggtgagtgtttgagtgtataaagttctacttctggctgtcggctacacataaaggctatgcttggagcttctctctgatgtcagttattatgttgaacaaggaaacggaattatctcccatcctaaggcctttctccagtgtgaattttccagtggcggatgagggaagccctc

SEQ ID NO: 6654 - DNA, 568 bp, Homo sapiens
  MAP TO AC005768.15; EXPRESSED IN HEART, SIGNAL = 1.3; EXPRESSED IN FETAL LIVER, SIGNAL = 1.4; EXPRESSED IN LUNG, SIGNAL = 1.2; EXPRESSED IN ADULT LIVER, SIGNAL = 1.2; EXPRESSED IN HELA, SIGNAL = 1.6; EXPRESSED IN BONE MARROW, SIGNAL = 1.3; NT HIT: L25118.1, EVALUE 3.50e-02; SWISSPROT HIT: P04775, EVALUE 1.40e+00; EST_HUMAN HIT: AA361791.1, EVALUE 2.00e-01
ccgcgaaagtctgtttcttggggtatctttgtaagctattttcatctttgagtgcctatgtttttccttctgacttttatttttctgcaaatgcagtttatatgatttatggagcagagcgtttctataaataagtgagctagaagatgctaatgaatgtaagaaatgcagagatggttttctatccctaatagaatgtctcaaaggtacagtagcaatcatacgttttgatccatttttaaatatatcagcttcagtgtgccttattttatccatttgagtgcactgttggtcatacttttcttcaggcagattttttcctgacgtattatcctgttctaaaggaggcaagcagctgctaatacttacttctctttcctgaggtgaagttctattaatagtcacagatatgccagagattttcacttttgccggtctaccaggcttcctacttattgccaaaggcttctgatttggtcgaataatgttcttggaaggctgaggtatcacagatttgttcttgatgggtctcacatattcaaagccagaccccaagatctcactttca

SEQ ID NO: 6655 - DNA, 528 bp, Homo sapiens
  MAP TO AC003112.1; EXPRESSED IN ADULT LIVER, SIGNAL = 1.8; EXPRESSED IN HELA, SIGNAL = 2.7; EXPRESSED IN LUNG, SIGNAL = 1.7; EXPRESSED IN HEART, SIGNAL = 1.8; EXPRESSED IN BONE MARROW, SIGNAL = 1.9; EXPRESSED IN BRAIN, SIGNAL = 1.9; EST_HUMAN HIT: BF823210.1, EVALUE 3.00e-62; NT HIT: X57147.1, EVALUE 6.00e-50; SWISSPROT HIT: P21414, EVALUE 8.00e-30
gagggactggtgcttcagatgcgcacttgtgcagctcttaacccaaacttatgctgcccagaaggatcttttagaggtccccttagccaaccctgacctcaacctatatatatactgatggaagttcgtttgtagaaaagggattacaaagggcaggatataccataggttagtgataaagcagtagttgaaagtgggcccctcccccagggaccagcacccagttagcagaactagtggcgcttacccgaactttagagctgggaaagggaaaaagtataaatgtatatacagagagcaaatttgcttatctagttctacatgcccatgctgccatatggaaagaaagggagttcctaacctccggaggaacacccattaaataccatgaagaaattatgaaattattacaggcagtgcagaaacccaaggaagtggtagtggccttgcactgcaaaggccatcagaaaggcaaaggaaaggaggcaaaaggaaatcgctgcacagacgctgaggccaaagttgccg

SEQ ID NO: 6656 - DNA, 514 bp, Homo sapiens
  MAP TO AC000029.17; EXPRESSED IN LUNG, SIGNAL =   2; EXPRESSED IN FETAL LIVER, SIGNAL = 1.6; EXPRESSED IN PLACENTA, SIGNAL = 2.3; EXPRESSED IN ADULT LIVER, SIGNAL = 1.9; EXPRESSED IN HELA, SIGNAL = 0.36; SWISSPROT HIT: P10628, EVALUE 9.40e-01; EST_HUMAN HIT: AL539819.1, EVALUE 0.00e+00; NT HIT: D90150.1, EVALUE 0.00e+00
ctgcagggagcacaccagcgaccggccctccaaccctccagccactcagcaacatcgccacagcaaccagcaaccagacggcagcagccgaggcaaacacaagcggacggcttcccaccgtcgccgaggacagggaatgactacggcaaatcaggccactttgccaactagggaggtggagtgtcactagtggggaggggcggccaccgcccgctgcacagagcgccatgccggctggagaagaggcgctggggcaggggctgcagtgtggctcggcctcacccccctgctggcactgagtgcctccagggcagctgggctcttgtctgcctggtctcagtgtcccctgtggcaagagggagaggtgccccatcccgtgctccttgtctgggcccgctgctgccagaccatgggatgtcggcaaagctcagaggaaaaagaagcagcccggcggtcccggagaattgaccgccacctgcgctcagagagccagcggcaacgccgcgaaatcaag

SEQ ID NO: 6657 - DNA, 573 bp, Homo sapiens
  MAP TO AP001687.1; EXPRESSED IN PLACENTA, SIGNAL = 3.7; EXPRESSED IN ADULT LIVER, SIGNAL = 2.3; EXPRESSED IN BRAIN, SIGNAL = 4.3; EXPRESSED IN BONE MARROW, SIGNAL = 5.3; EXPRESSED IN LUNG, SIGNAL = 2.8; SWISSPROT HIT: P05209, EVALUE 4.00e-56; EST_HUMAN HIT: BG260745.1, EVALUE 0.00e+00; NT HIT: gi14761475, EVALUE 0.00e+00
tggagggctgaaggcaatggataattagaattcctctccttccttctcaccctcttcttcaacagaatccacactaaccacttcataatccttcttaaggacaaccatgtcctggtgggcctcggaaaactctccttcctccacccgttcacccacggaatactgaacaaaggaacttggcatacatcaggtaaaacttgcggtccaggtgagcccacacctcagcaatggctgtgatgttgctcagtatgcacacagctctctgtcctttggctgggtctccaacaggtaccacagtgggaagttggtaactaatgccaaccttgaagctagagggacagcaatccacaaactggatgctgcatttgtttttgatggtgtcagtggcagcactgaagtctttgggaaccacgtcaccagggtacaataggctgcaagttatgtatttaccatggtgtggatcacatcttaccatctggttggctggctcaaaataagcattggtgatctctactacagaaaaccgttcatggtaggctttttcagcagagatgacaggggcacacatggcca

SEQ ID NO: 6658 - DNA, 548 bp, Homo sapiens
  MAP TO AC006205.7; EXPRESSED IN ADULT LIVER, SIGNAL = 1.2; EXPRESSED IN BRAIN, SIGNAL = 0.89; EXPRESSED IN HELA, SIGNAL = 0.53; EXPRESSED IN LUNG, SIGNAL = 1.2; EXPRESSED IN HEART, SIGNAL = 1.6; EXPRESSED IN BONE MARROW, SIGNAL = 1.3; SWISSPROT HIT: Q63627, EVALUE 3.10e-02; EST_HUMAN HIT: BF336893.1, EVALUE 0.00e+00; NT HIT: AF040908.1, EVALUE 5.20e-01
tgggaccagaccttcagtgcccggaatctcgacttccaagccctgaggactgactggatcgatctgagctgtaacacatctggcaacctgctgcttccagagcaggaagctctggaggtcacgcgagtcttcttgaagaagctcaaccagaggagccgggggtaaggtaaagggctctcctggggccagggactggggcacgtggcagccagctggcctggaaggcaggggcctaagggctggtagtgggttcccccagccgcggaaatagctggaactttgcccccgactcaggctcctgggaaggacaagtgcccggggcccctgtccctggagaggatcttgaccaggcaggtgtttgtcccgccattaggcaaggttctgaaatccctgggtgcctggcccagtacgtgtgttgaggactggaaggactcagtagatgaggtcccctcctccgaggaaagagctagtaaatagacaaacaggcaaaacagaggctagaaaaatacaaattaagaccctgcatgtgggctggaagggttagggcg

SEQ ID NO: 6659 - DNA, 521 bp, Homo sapiens
  MAP TO AC006445.10; EXPRESSED IN BRAIN, SIGNAL = 1.6; EXPRESSED IN HELA, SIGNAL = 2.8; EXPRESSED IN ADULT LIVER, SIGNAL = 1.3; EXPRESSED IN LUNG, SIGNAL = 1.5; EXPRESSED IN FETAL LIVER, SIGNAL = 1.4; SWISSPROT HIT: P28968, EVALUE 3.20e-01; EST_HUMAN HIT: AI799027.1, EVALUE 0.00e+00
gatttgcatggtgccctcgctaagataatatattagagaggtagataattcagaatatggtatatactagtactggtacctgaaagtctaaaagaatatacagatggtctgcacagcatatgcatcatataaagatgacaatggcatgtggtattgatttagcagaggtattttccttctgattaaatgtattctaaaacttctgtttttctttaaggtgttcctactcctgggcccagtgctaatgtagccaatgatgccatgtcgatattggaaaccataacttctcttaaccaagaagccagtgctgctagggcttcaacagaaacatcaaatgccaagaccagtgagagagcgtcaaaaaaacttccatctcagccaaccactgatactagtactgacaaagaaagaacttcagaggacatggctgataaagaaaaatctacagctgactctggaggtgaaggactggaaacagccccaaagtctgaagagttcagcgacctcccctgtccagtcga

SEQ ID NO: 6660 - DNA, 510 bp, Homo sapiens
  MAP TO AC003006.1; EXPRESSED IN ADULT LIVER, SIGNAL = 2.1; EXPRESSED IN BRAIN, SIGNAL = 2.3; EXPRESSED IN PLACENTA, SIGNAL =   3; EXPRESSED IN HELA, SIGNAL = 2.4; EXPRESSED IN BONE MARROW, SIGNAL = 2.6; EXPRESSED IN FETAL LIVER, SIGNAL = 2.1; EXPRESSED IN LUNG, SIGNAL = 2.1; EXPRESSED IN HEART, SIGNAL =   2; SWISSPROT HIT: Q13398, EVALUE 2.00e-75; EST_HUMAN HIT: BE790712.1, EVALUE 3.00e-37; NT HIT: U20648.1, EVALUE 6.00e-96
tccccagtgtgaaccctcctgtgcttaatgaggccggaattttgagtaaaggatttcccacattcactgcactcatagggtcttgatccagtgtgaactctctggtgttttcggagactggagctgtagggaaagaacttcccacattcactgcactcataaggcctctccccagtgtgaactccccgatgttgaaggagtgcagacctttggctaaaggatttcccacattcgctgcacttataaggcctttctccagtgtgaaccctatggtgttcaatgaggctagagttttggctaaatgacttcccacattcgctgcactcataaggcctggatccactgtgaactttctggtgttttatgagactggaatgatatgtaaaaaacttcccacattcactgcactcataaggcctctccccagtgtgaactccccgatgttgaaggagtgcagacctttggctaaaggatttcccacattcactgcactcatatggcctttcccca

SEQ ID NO: 6661 - DNA, 532 bp, Homo sapiens
  MAP TO AL136295.2; EXPRESSED IN PLACENTA, SIGNAL = 2.6; EXPRESSED IN ADULT LIVER, SIGNAL = 2.1; EXPRESSED IN BRAIN, SIGNAL = 1.6; EXPRESSED IN HELA, SIGNAL = 1.8; EXPRESSED IN BONE MARROW, SIGNAL = 2.1; EXPRESSED IN LUNG, SIGNAL = 2.2; EXPRESSED IN HEART, SIGNAL = 2.1; NT HIT: gi14750850, EVALUE 0.00e+00; SWISSPROT HIT: O15321, EVALUE 2.00e-43; EST_HUMAN HIT: AI752330.1, EVALUE 0.00e+00
gagtgacaggcgccgtggtgacgatggtggtttctttcctcgaacactggaaatccattggttgtccatcatcaactccatggtgcttgtgtttttactggtgggttttgtggctgtcattctaatgcgtgtgcttcggaatgacctggctcggtacaacttagatgaggagaccacctctgcaggttctggtgatgactttgaccagggtgacaatggctggaaaattatccatacagatgtcttccgcttccccccataccgtggtctgctctgtgctgtgcttggcgtgggtgcccagttcctggcccttggcactggtgaggtgataaaaatgaattggggatttatctcatgggatagaactaggtagggagtttgttcagaaaaggtctgtggatcttctcttctatccagaggggcagacctaagggatagggtggctctagcaagaatgcacgtattctattgtagattttctggatagcaaaactgggggagattgttttgctggaggccctgggtctgggag

SEQ ID NO: 6662 - DNA, 556 bp, Homo sapiens
  MAP TO AC004172.1; EXPRESSED IN FETAL LIVER, SIGNAL = 2.1; EXPRESSED IN BRAIN, SIGNAL = 2.4; EXPRESSED IN ADULT LIVER, SIGNAL = 2.4; EXPRESSED IN HELA, SIGNAL = 7.5; EXPRESSED IN LUNG, SIGNAL = 2.4; EXPRESSED IN HEART, SIGNAL =   2; EST_HUMAN HIT: AI815466.1, EVALUE 1.00e-64; NT HIT: AF055066.1, EVALUE 0.00e+00; SWISSPROT HIT: O57592, EVALUE 5.00e-07
gggggaacaatgcctccaagttctttgccaatgcataacaaaagtgacctttcctctaggtcccaataagttcctcatctccatgtgagaccttatcagcctggactctattgtccatatcactatcagcattttggtcacaacagcttaacaaatctctaggaagttgcaaattttcccccattttcttgtcttctgaactctccaaactcttccaacctctgcctgttacccagttccaaagctgtttccacattttcaagaatttttatagtaatacccaactcctggtaccgattttctgaattagttcattctcacacttttataaagaaatacctgagactgggtaatttataaagaaaataggtttctttctttctcctcccaccatccaagatgccaaaaggaaagaaggccaaggagaagaaggtggctccagcccctgctgtcgtgaagaagcaggaggccaagaaagtggtaaatcccttgtttgagaaaaggcctaagaattttggcactggacaggatatccagcccaaaagagacctcaccc

SEQ ID NO: 6663 - DNA, 501 bp, Homo sapiens
  MAP TO AL163636.2; EXPRESSED IN ADULT LIVER, SIGNAL = 1.6; EXPRESSED IN HELA, SIGNAL = 0.73; EST_HUMAN HIT: BI460032.1, EVALUE 8.00e-87; NT HIT: gi4506556, EVALUE 7.00e-68; SWISSPROT HIT: P34096, EVALUE 2.00e-06
cggagttcccccaagagacacacaactgcagtttcatgtaggttcaccttttctctctttttatactctgtccacacaaacctggcagccacgcagtcagtccctgccctgtgtcattgtactggccacagcaacttctctctgtaaatgagaaaggtcttgctttcagaaaagatcatgtttgcaaactactcactcttgaggaagaagggtgggaaaagtagcagagatgagtggggagatggtgcatataagaaggaggaaagaggagactatggagtcaggatgccggcttgctattctcaacacctttttccagtgcccagttcttaccttatttctcctgccccttgctttcttttctaggcacctctaagatactgatggctctgcagaggacccattcattgcttctgcttttgctgctgaccctgctggggctggggctggtccagccctcctatggccaggatggcatgtaccagcgattcctgcggcaac

SEQ ID NO: 6664 - DNA, 596 bp, Homo sapiens
  MAP TO AL163202.2; EXPRESSED IN PLACENTA, SIGNAL = 3.1; EXPRESSED IN BONE MARROW, SIGNAL = 2.5; EXPRESSED IN LUNG, SIGNAL = 1.7; EXPRESSED IN HEART, SIGNAL = 1.9; EXPRESSED IN BRAIN, SIGNAL = 2.4; EXPRESSED IN ADULT LIVER, SIGNAL = 1.7; EXPRESSED IN HELA, SIGNAL = 2.5; SWISSPROT HIT: P17038, EVALUE 8.00e-84; EST_HUMAN HIT: BF817669.1, EVALUE 0.00e+00; NT HIT: AL163202.2, EVALUE 0.00e+00
cacatttgcagggtttctctcccgtatgaattctcttgtgtatagtaaggtttgaagaccacttaaaagctttgccacattcttgatatttgtagggtttctctcccctatgaattatcatatgtttagtaaagcttaaaacccaataaaaggctttatcacattcttcgaatttgtaagggttctctccagtatgaattctcttatgtagagtaaggcctgaagggtgcttaaaagctttgccacattcttcacatttgtagaatttctctccagtatgagctctcatatgttcattcagttttgaagattgcttaaaggctttgccacattcttcacatttgtagggtttctctccactatgaattctctgatgtatagtaaggttcgaagaccacttaaaaattttgccacaatctttacatttgtagggtttgtctccagtatgaactatgttatgttgagtaaggcctgaggaatagtaaaaagctttgccacattcttcacatttatagggtttctctcaagtatgaattcttttatgttctttcagttttgaggattttctaaaggctttgccacattcatcacatttg

SEQ ID NO: 6665 - DNA, 510 bp, Homo sapiens
  MAP TO L39891.1; EXPRESSED IN ADULT LIVER, SIGNAL = 2.2; EXPRESSED IN PLACENTA, SIGNAL = 4.4; EXPRESSED IN BRAIN, SIGNAL =  11; EXPRESSED IN HEART, SIGNAL = 4.4; EXPRESSED IN BONE MARROW, SIGNAL = 2.6; EXPRESSED IN LUNG, SIGNAL = 3.9; SWISSPROT HIT: P98161, EVALUE 2.00e-49; EST_HUMAN HIT: AI906019.1, EVALUE 3.00e-89; NT HIT: L39891.1, EVALUE 0.00e+00
agctcgtgtgcccgtcctcggtgcagagtgacgagagcctcgacctcagcatccagaaccgcggtggttcaggcctggaggccgcctacagcatcgtggccctgggcgaggagccggcccgaggtgagtgtctgctgcccactccccttcctccccagggccatccagatggggcagagcctggtacccccgtcttgggcccacactgaccgttgacaccctcgttcccaccggtctccagcggtgcacccgctctgcccctcggacacggagatcttccctggcaacgggcactgctaccgcctggtggtggagaaggcggcctggctgcaggcgcaggagcagtgtcaggcctgggccggggccgccctggcaatggtggacagtcccgccgtgcagcgcttcctggtctcccgggtcaccaggtgcctgcccccaccccccgaggggccataggttgggagatctctgaagcactggggcagagactgcggctggggagtctcagga

SEQ ID NO: 6666 - DNA, 505 bp, Homo sapiens
  MAP TO AC010503.3; EXPRESSED IN HELA, SIGNAL = 8.1; EXPRESSED IN ADULT LIVER, SIGNAL = 1.9; EXPRESSED IN PLACENTA, SIGNAL =   2; EXPRESSED IN BRAIN, SIGNAL =  33; EXPRESSED IN HEART, SIGNAL = 4.1; EXPRESSED IN LUNG, SIGNAL = 2.2; SWISSPROT HIT: Q9YHC3, EVALUE 5.00e-31; EST_HUMAN HIT: BG388360.1, EVALUE 0.00e+00; NT HIT: gi16175554, EVALUE 0.00e+00
cagaaggggtgaagcggggctcctcctgggaatgtcaaggttggaagagctcaagggggttaaagataaattagggctcaaaggggagccagggtcggagatgaagtagccagaggtaaagcgagctccaaaggtattgttagggtcagcggggagtcagccttggagggaaagcggggctctagggttcagagatggggggcctagcggatcaaaggtcagaagcctcgaggggacaggtgggaagcgatgggagcagcctaggccacctcctcctccgcctcctcctcgaactcgccctcctcggccgtggcgtcctggtactgctggtactcagataccaggtcattcatgttgctctcggcctcggtgaactccatctcgtccatgccctcgcccgtgtaccagtgcaagaaggccttgcgccggaacatggccgtgaactgctcggagatgcgcttgaacagctcctggatggccgtgctgttgccgatgaaggtcgcgg

SEQ ID NO: 6667 - DNA, 502 bp, Homo sapiens
  MAP TO AL022345.2; EXPRESSED IN ADULT LIVER, SIGNAL = 3.6; EXPRESSED IN PLACENTA, SIGNAL = 3.7; EXPRESSED IN HELA, SIGNAL = 4.4; EXPRESSED IN BRAIN, SIGNAL = 3.7; EXPRESSED IN HEART, SIGNAL = 3.7; EXPRESSED IN BONE MARROW, SIGNAL = 3.7; NT HIT: gi15299300, EVALUE 0.00e+00; SWISSPROT HIT: Q06730, EVALUE 3.00e-95; EST_HUMAN HIT: AL539492.1, EVALUE 0.00e+00
gggtttctcccctgtgtgcgttctctgatgtattgtgaggtctgacttcaagcagaaggttttcccacattcataacattcataaggtttcaaccctgtatgaattatctgatgcctggtgagtactgacttgtggtagaaagttttcccacatgcattacattcataaggtttatctcctatgtgagttctctgatgctgtgtaagatgtgacttttgacaaaaggatttcccacactcaagacattcaaaaggtttctcacctgtgtgagttctctggtgtactgtaaggtgtgaattcatacagaaggattttccacattcataacattcatagggtttctgccctgtgtgtgttctctgatgtttagtgaggtcagatttctggtaaaaagttttcccacatgcattacactgatagggtttctcccctgtatgtgttctctggtgtaatgtgagggctgacttatggctaaaggctttcccacattcattgcattca

SEQ ID NO: 6668 - DNA, 506 bp, Homo sapiens
  MAP TO AL121907.2; EXPRESSED IN ADULT LIVER, SIGNAL =   2; EXPRESSED IN BONE MARROW, SIGNAL = 1.9; EXPRESSED IN FETAL LIVER, SIGNAL = 1.3; EXPRESSED IN LUNG, SIGNAL = 1.9; NT HIT: gi14769949, EVALUE 8.00e-74; SWISSPROT HIT: Q03692, EVALUE 4.10e-01; EST_HUMAN HIT: AI613183.1, EVALUE 6.00e-66
aaggctgcagcatggcccacccaggacttctggggatgagtcttgtttttcgtttttatagaaacacagatctttgtcctaaccacaaggttcccctttggtttatgtggtttcctctggttcctgccaccaccacctccccaggccggggccttcccatccctgcccagtggggagtgggaggaagagcctgggacagtggccatacgtcccgggctgatttctggattgggggttctggggaccagggaggtgcaggtgtctgcagtgtcagaggagccgctgggctcgcccaggtgttgcctgaagccctccgtggcctcttgccccttggactcctgacaggagggacaccagtgtttgctgctcacctctgacagccagacaagggctgtgctcaggggcagctcggctgggcacacagtaggtgctttagcggacagcactgaggcccccagcaagaagcccatgagctcctccccctcccgcagtgccgccgacatcta

SEQ ID NO: 6669 - DNA, 506 bp, Homo sapiens
  MAP TO AC008554.6; EXPRESSED IN ADULT LIVER, SIGNAL = 1.4; EXPRESSED IN PLACENTA, SIGNAL = 2.8; EXPRESSED IN HEART, SIGNAL = 1.2; EXPRESSED IN BONE MARROW, SIGNAL = 3.7; EXPRESSED IN LUNG, SIGNAL = 1.3; EXPRESSED IN BRAIN, SIGNAL = 3.8; EXPRESSED IN HELA, SIGNAL = 3.6; EST_HUMAN HIT: AV704018.1, EVALUE 0.00e+00; NT HIT: gi14767612, EVALUE 1.00e-75; SWISSPROT HIT: Q03923, EVALUE 3.00e-37
tccgacattcatcaaactcacagggtttctctccagtacgaattatcttatgtctagtaagggcagaggtgtccttaaaggctttgctgcattttcttatttgttgggtttctttcccgcatgaattatctaatgtctactaaggtttgaggatgaaataaaggctttgccacatttatcacacttgtacagtttccctccaatatgaattttcttatgtgaaaaaagcatagtgggatagcttaaagctttgccacattcctcacatttatagtttctctccagtatgaattaccttatgtgtagtaagggtagaggggcacttaaagcctttgccacattcttcacatttgtagggtttctctccagtatgaattctcttatgtctagtaaggataaaggagcgcttaaaagccttgccacatcgttcacatttgtagggtttctctccagtatgaattctcttatgtgcagtaaggtgtgaggacgagttgaaggctttgcca

SEQ ID NO: 6670 - DNA, 531 bp, Homo sapiens
  MAP TO AC007263.3; EXPRESSED IN ADULT LIVER, SIGNAL = 2.3; EXPRESSED IN HELA, SIGNAL = 1.7; EXPRESSED IN LUNG, SIGNAL = 3.1; EXPRESSED IN FETAL LIVER, SIGNAL = 1.9; EST_HUMAN HIT: BE255770.1, EVALUE 7.40e-01; NT HIT: AF060115.1, EVALUE 1.30e-01
cccttcctcccccagggctcatctcttttgtcctctgttgtctggcagcccattggccagcttgtgtaatcctttgtaatcacttcttgtttgtgttcctctagaggttccccaccttaaggaaacggaccctgcctttgtgtcacagggccctgcccaactcctgtgctgttagctctttacaagcggtgttcagggacctgcttcaaaatcaggcccaacgatccacctttcgttaggcccacggaagtttgaatgggtttgtgacccactgaagtctgcattctggcctggtggtggtggtggtggaggtggtggtggagatggtggtggtggtggtggtggtggtggtggtggtggtggtggtggagatggtggtggaggtggtggtggagatggtggtggtggtggtggtggtggtggtggtggtggagatggtggtggaggtggtggtggagatggtggtggtggtggtggagatggtggtggaggtggtggtggtcgtagagatggtggtggtggtggtggtcg

SEQ ID NO: 6671 - DNA, 503 bp, Homo sapiens
  MAP TO AC016603.5; EXPRESSED IN FETAL LIVER, SIGNAL =   2; EXPRESSED IN BONE MARROW, SIGNAL = 2.1; EXPRESSED IN BRAIN, SIGNAL = 2.5; EXPRESSED IN ADULT LIVER, SIGNAL = 2.2; EXPRESSED IN PLACENTA, SIGNAL = 1.8; EXPRESSED IN LUNG, SIGNAL = 2.2; EXPRESSED IN HEART, SIGNAL =   2; SWISSPROT HIT: Q29116, EVALUE 8.10e-02; EST_HUMAN HIT: N40602.1, EVALUE 0.00e+00; NT HIT: AB033051.1, EVALUE 0.00e+00
ggtgcagattgtgggccacttgtggggcctcttattatatttggctcttcgggattatgatttgaatcaaacttgaaaattgcctttgttcctgatattaaatcagaagatgaggaagaaccagtaaatacctgcaatggttgatcatacaacagtgtggcagacttgctcctgactatattttttccatcaacagcagatgtgattttaacggttgtacttggctgctgaggtccattatcactaagaatatcatagatttttagccctccaatctccatattagttatgctatgagatttcacaacagatccaactggaccacttttctgaggggagagatcttcagtgcttttggaaatacctaagtcaacagaacaatcactgtcatgtggttcagtcctattaggagactgggaagtttcctcagaatgtccatttaccttatttacggattccaaattaggatacttgtttccattttccaagtgctcagtttcctc

SEQ ID NO: 6672 - DNA, 510 bp, Homo sapiens
  MAP TO AL022067.1; EXPRESSED IN ADULT LIVER, SIGNAL = 2.2; EXPRESSED IN PLACENTA, SIGNAL = 2.1; EXPRESSED IN BRAIN, SIGNAL = 1.9; EXPRESSED IN HELA, SIGNAL = 0.35; EXPRESSED IN BONE MARROW, SIGNAL = 2.1; EXPRESSED IN LUNG, SIGNAL = 2.7; EXPRESSED IN HEART, SIGNAL = 2.6; NT HIT: gi4557362, EVALUE 0.00e+00; SWISSPROT HIT: Q9QZZ4, EVALUE 2.10e-02; EST_HUMAN HIT: AW408568.1, EVALUE 4.00e-64
gaacgcgtcctacggcacggaaggtttgggctcctaccctggctacgcacccctgccccacctcccgccagctttcatcccctcgtacaacgctcactaccccaagttcctcttgcccccctacggcatgaattgtaatggcctgagcgctgtgagcagcatgaatggcatcaacaactttggcctcttcccgaggctgtgccctgtctacagcaatctcctcggtgggggcagcctgccccaccccatgctcaaccccacttctctcccgagctcgctgccctcagatggagcccggaggttgctccagccggagcatcccagggaggtgcttgtcccggcgccccacagtgccttctcctttaccggggccgccgccagcatgaaggacaaggcctgtagccccacaagcgggtctcccacggcgggaacagccgccacggcagaacatgtggtgcagcccaaagctacctcagcagcgatggcagcccccagcagcgacgaagccat

SEQ ID NO: 6673 - DNA, 532 bp, Homo sapiens
  MAP TO AC020757.2; EXPRESSED IN ADULT LIVER, SIGNAL = 1.6; EXPRESSED IN BRAIN, SIGNAL = 1.1; EXPRESSED IN BONE MARROW, SIGNAL = 1.2; EXPRESSED IN PLACENTA, SIGNAL = 1.6; EXPRESSED IN HELA, SIGNAL = 0.51; NT HIT: AF083440.2, EVALUE 7.90e+00; SWISSPROT HIT: P08572, EVALUE 6.60e-02
tgggactcggggatcaagcggctggagggagggcgctgcaggagcctggggacccgggcaggagccggggctctgagaccggagctgcttcagaggcctgaagggccagggcaaaggctagaggctggggtgtttgattgcgaaaatttgcaggaggcactggctggggagccgagaaattggggagccagaggtccaccaggtcaggaatttagaggactagggtcggggctcagactctggggttgggtgtagaccaaggctggaggtaggcagggctgcggaggtctttgccccctgaaaaaggcccacgggaaaataaaggagatcccagttcaaggccgtagcagctgcaatgaccgtgaaccagtcgtgggacagggaaggaaccgacctgctgttcagaaaatccacgcctggggccccggggccaacacaggaacaaaatgcaaggggatcagtgaccctgaggggcagagcaggtggaatctgaggttgggcctggatcttcagcaaattcatgcccaggggc

SEQ ID NO: 6674 - DNA, 512 bp, Homo sapiens
  MAP TO AH005332.1; EXPRESSED IN ADULT LIVER, SIGNAL = 2.2; EXPRESSED IN HELA, SIGNAL =   2; EXPRESSED IN LUNG, SIGNAL = 2.4; NT HIT: gi15298381, EVALUE 0.00e+00; SWISSPROT HIT: P00519, EVALUE 2.00e-88; EST_HUMAN HIT: BE795878.1, EVALUE 0.00e+00
gcctagccaccggcgaggaggagggcggtggcagctccagcaagcgcttcctgcgctcttgctccgcctcctgcgttccccatggggccaaggacacggagtggaggtcagtcacgctgcctcgggacttgcagtccacgggaagacagtttgactcgtccacatttggagggcacaaaagtgagaagccggctctgcctcggaagagggcaggggagaacaggtctgaccaggtgacccgaggcacagtaacgcctccccccaggctggtgaaaaagaatgaggaagctgctgatgaggtcttcaaagacatcatggagtccagcccgggctccagcccgcccaacctgactccaaaacccctccggcggcaggtcaccgtggcccctgcctcgggcctcccccacaaggaagaagctggaaagggcagtgccttagggacccctgctgcagctgagccagtgacccccaccagcaaagcaggctcaggtgcaccagggggcaccagcaag

SEQ ID NO: 6675 - DNA, 574 bp, Homo sapiens
  MAP TO AC018702.2; EXPRESSED IN PLACENTA, SIGNAL = 2.4; EXPRESSED IN HELA, SIGNAL = 7.5; EXPRESSED IN ADULT LIVER, SIGNAL = 2.7; EXPRESSED IN LUNG, SIGNAL = 2.5; EXPRESSED IN FETAL LIVER, SIGNAL = 2.6; NT HIT: gi14768588, EVALUE 0.00e+00; SWISSPROT HIT: P22544, EVALUE 3.30e-02; EST_HUMAN HIT: AW411538.1, EVALUE 0.00e+00
tgttgaaccgttgccagagttaatgagacacttactgtcatttccttcactttgaattttacttaagttgagctctctttcacttcctggtgttttattacaatcaggtcccttgttactatcaagctcttcatcattttcaaaactttcatcactatcaagctcttcatcactatcaaattcttcactatcaagctcttcatcactatcaagtaattgtgagatactacttcttttagttcgcctccaatcaactcgagatttctgctcaggcacgtgactcttagaatttctccttgtttcatgtcttctaacatgtatcattttcacttaagcttctataaaataaagttgttaggaatataacagtgataaccagattagagcaatgaatgcatttatggtataaattatatttatttggctttatttaatggtccacaaacacaaaatcacatgaaatatctgagtgaagatggtagaacattaatttaacaaataatttactgaatgcccatgaaataattatatgaacatctactctgaattacgttgtatgttgtgctgcaaggga

SEQ ID NO: 6676 - DNA, 511 bp, Homo sapiens
  MAP TO AL121966.2; EXPRESSED IN ADULT LIVER, SIGNAL = 2.4; EXPRESSED IN HELA, SIGNAL = 3.7; EXPRESSED IN BONE MARROW, SIGNAL = 2.4; EXPRESSED IN LUNG, SIGNAL = 2.1; EXPRESSED IN FETAL LIVER, SIGNAL = 2.3; EXPRESSED IN BRAIN, SIGNAL = 2.4; EST_HUMAN HIT: R15219.1, EVALUE 2.00e-19; NT HIT: gi15300484, EVALUE 6.00e-53; SWISSPROT HIT: Q15375, EVALUE 2.00e-16
ggaaaacgcccccaggatgcactgcagtgcagaaggagaatggttagtgcccattggaaaatgtatctgcaaagcaggctaccagcaaaaaggagacacttgtgaacgtaagtaatgtgtcctattaaaactccactttgcctttttaaatttcagtatcagacattttaaactttaatagttatttgaatacgtgaatctgctctgtaccagaagcgcaattcagtagatcttaaacaaagtcaccgttgaacttagtgattgccctacagtagcatctgcactaagtgtatgtaatcaatataggtgataatgaaatttgttactaaaatttaatgtgtcctatgcttaacatggaagtcaatagttgcacgttgggctatggagtttagagaggagtctgggtagttggacatatagcctggcaagactgaggtgacatttaacaggatttaatgagatgccattcctcctgtttttaaacccatattgtctgggcccttgagtagca

SEQ ID NO: 6677 - DNA, 568 bp, Homo sapiens
  MAP TO AC005604.1; EXPRESSED IN PLACENTA, SIGNAL = 3.5; EXPRESSED IN BRAIN, SIGNAL = 1.6; EXPRESSED IN FETAL LIVER, SIGNAL = 2.2; EXPRESSED IN LUNG, SIGNAL = 1.5; EXPRESSED IN HEART, SIGNAL =   2; EXPRESSED IN BONE MARROW, SIGNAL = 1.9; EXPRESSED IN ADULT LIVER, SIGNAL = 1.6; SWISSPROT HIT: O95013, EVALUE 2.00e-47; EST_HUMAN HIT: BF690233.1, EVALUE 5.10e-02; NT HIT: X64985.1, EVALUE 5.40e-01
ccagttggcctttgccgtgcacttacccttctgtggtcccaatgaggtcgatagtttttattgtgaccttcctagggtaatcaaacttgcctgtacagatacctacaggctagatattatggtcattgctaacagtggtgtgctcactgtgtgttcttttgttcttctaatcatctcatacactatcatcctaatgaccatccagcattgccctttagataagtcgtccaaagctctgtccactttgactgctcacattacagtagttcttttgttctttggaccatgtgtctttatttatgcctggccattccccatcaagtcattagataaattccttgctgtattttattctgtgatcacccctctcttgaacccaattatatacacactgaggaacaaagacatgaagacggcaataagacggctgagaaaatgggatgcacattctagtgtaaagttttagatcttatataactgtgagattaatctcagataatgacacaaaatatagtgaagttggtaagttatttagtaaagctcatgaaaattgtgccctccattccca

SEQ ID NO: 6678 - DNA, 532 bp, Homo sapiens
  MAP TO AC007101.1; EXPRESSED IN BRAIN, SIGNAL = 1.2; EXPRESSED IN LUNG, SIGNAL = 1.2; EXPRESSED IN BONE MARROW, SIGNAL = 1.2; EXPRESSED IN ADULT LIVER, SIGNAL = 1.2; EXPRESSED IN PLACENTA, SIGNAL = 1.5; EXPRESSED IN HELA, SIGNAL = 0.8; NT HIT: Y19216.1, EVALUE 0.00e+00; SWISSPROT HIT: P15241, EVALUE 2.00e-14; EST_HUMAN HIT: BI829625.1, EVALUE 0.00e+00
cacactcgccccacacacggtgcccgctgcgggggaccggggctatgggactgggaccgaagtggaggccggatccaacaaggcaaagctcggagtcccggcggaggggcggacaggtggaggggttccactcgcactgaccgcagcgcacgggcagcggggctgaccaggcgcttcccggccccataaaactcgggcgggaggcgaacgccgttttatgcaggcggccgggcggcctggctcgctttcattcccggctccgcgaggcgcgagggccgagccctccaagctcgtaaacgccttggccgcgagctccctccccgggcccgcgggccgtcatataaggcgcagcgccggcttggggtccagccgcccgcccctgccgccaccgcaccatgtcctgcctctactcccgcctcagcgccccctgcggggtccgcgccttcagctgcatctcggcctgcgggccccggcccggccgctgctgcatcaccgccgccccctaccgcggcgtctcctgcttccgcggcct

SEQ ID NO: 6679 - DNA, 529 bp, Homo sapiens
  MAP TO AC004476.1; EXPRESSED IN ADULT LIVER, SIGNAL = 1.2; EXPRESSED IN HELA, SIGNAL = 1.9; EXPRESSED IN LUNG, SIGNAL = 1.2; NT HIT: gi8922853, EVALUE 0.00e+00; SWISSPROT HIT: Q9P2N7, EVALUE 2.00e-03; EST_HUMAN HIT: BG419456.1, EVALUE 0.00e+00
cgggggctacaactggcgtctcaacaacgtcacgggcatcgtacaggtgtacaacacggacaccgacgagtgggagcgggacctgcacttcccggagtccttcgcaggcatagcctgcgcccccgtcctgctgccccgggccgggaccaggaggtagcccccaagacccccgggaccctggcctgaccgcatgttgtctccaagtggggcttggcgaatgcacgtctgcctgagaaccccagtgccccccttcgcccgggctgcccttgaggggcctgctgcgttgataagcccccctcccaggggtccctccctccctccttcccaaagcagatcctggctgcgagtccatccgagggagcctgccggcaaagcgtctgacatgtggtggcagcaaattcgtccccggggtggtttcctcgcctggcccccgagtccccacgggctggcgggtggaatcccaggtctccagggggtccctgtgcagctccatctcacttctctactgcctcccagccccacggtttca

SEQ ID NO: 6680 - DNA, 508 bp, Homo sapiens
  MAP TO AL121829.12; EXPRESSED IN ADULT LIVER, SIGNAL = 3.4; EXPRESSED IN PLACENTA, SIGNAL = 3.2; EXPRESSED IN HEART, SIGNAL = 3.5; EXPRESSED IN LUNG, SIGNAL = 3.5; EXPRESSED IN HELA, SIGNAL = 3.9; EXPRESSED IN BRAIN, SIGNAL =   3; EXPRESSED IN BONE MARROW, SIGNAL = 4.2; EXPRESSED IN FETAL LIVER, SIGNAL = 3.4; NT HIT: gi15011885, EVALUE 1.00e-114; SWISSPROT HIT: O95104, EVALUE 2.40e-01; EST_HUMAN HIT: AW590437.1, EVALUE 1.00e-122
cgaaacctgctgcccaaccgatcctataagttcaccatcaagagggccgagacctccacgctggtgtacgagccctggagggacagcctcaccctgcacaccaagccggagcccctggaggggcccgccctcagccactctgtctgagagatgattttctaatatttatccactaataaagaagagtgtaaatgcacatatggaattaaagaagcaaacctatttatgttttaaaggcagcagccaccagtgtttttcctggctcaaaacatgccaagccccaggccttctgctcctgctctttcccagggggagccacaggccggacctcccaagacagctgagcctggagcaagaagtaccagcccctgacacctacgggtccaacgacgacgacaaaagctgctccacggggcctctgcggtcctagcccccgcccctcctcaccacccccatcaccgtgaccgggctccggccttccttacccacctccctggcttgtggggct

SEQ ID NO: 6681 - DNA, 508 bp, Homo sapiens
  MAP TO AC002472.3; EXPRESSED IN BRAIN, SIGNAL = 1.2; EXPRESSED IN HELA, SIGNAL =   2; EXPRESSED IN BONE MARROW, SIGNAL = 1.6; EXPRESSED IN LUNG, SIGNAL = 1.4; EXPRESSED IN HEART, SIGNAL = 1.2; EXPRESSED IN ADULT LIVER, SIGNAL = 1.3; EXPRESSED IN PLACENTA, SIGNAL = 1.6; NT HIT: AB002059.1, EVALUE 1.00e-102; SWISSPROT HIT: O35973, EVALUE 9.30e-01; EST_HUMAN HIT: BI837149.1, EVALUE 2.00e-13
ggagggcctggggaacttcgcagagccaggtcaccctctcactctgtggctctcagttctcttgcatgcgctggcctttgcatacgctgttcgctcccctgggaacctccatccccatctttgtctgcttgttgaacttcagaatctgcaagcgtcagctcagaagtcacttattcctgaagctttactcagagcccccccggggctgttgctgccctcaggccgtcttctcacagcactgataacagctgtccttccccatcctctcaccacgtccactcccaccggaggaagtgaggccagagggcagggacagagctgctgttttctgtgtgccaccagggcccagcaaagagaatgtagggagggtgggaggtgcagggcagctggggttaggggctgaaggctgggtgttggaggctggatcctgctttagtggaagtgtccctttaacagcggctggcgtggcctggctcgggccctgctttgcctcctgttcagctgcggc

SEQ ID NO: 6682 - DNA, 569 bp, Homo sapiens
  MAP TO AC004409.1; EXPRESSED IN BRAIN, SIGNAL =  18; EXPRESSED IN HELA, SIGNAL =  14; EXPRESSED IN ADULT LIVER, SIGNAL =  17; EXPRESSED IN PLACENTA, SIGNAL =  23; EXPRESSED IN BONE MARROW, SIGNAL =  22; EXPRESSED IN LUNG, SIGNAL =  19; EXPRESSED IN HEART, SIGNAL =  21; EXPRESSED IN FETAL LIVER, SIGNAL =  20; SWISSPROT HIT: Q9MUT1, EVALUE 8.20e-01
tgaacagctccagcaagccaaagaagtcatccacaaattgaacctagagaacagaaatctaaaagaagctgttaggaagttaaagcatcaaaccgaggttggaaatgtgctcctaaaagaagaaatgaaatcatattatgaattagaaatggcaaagatccgcggagagctcagtgtcatcaagaatgaactgagaactgagaagaccctacaagcaagaaataacagagccttggagttgcttagaaaatactatgcttcttcaatggtaacatcatcaagtatccttgaccactttactggggattttttttaaaacttaaaaaaatccttccagtaggcaagtcattgagccaaatcagtgtttattgtattttctttgcgtattacttaaaatatatgtaataggatgttattttcattttcagtaaatcacagtatctataaaacatatacatgtttccaagcttctgctttctctttctgatgaagttattgcaggaatacaaatggaaacgaagctttggaaatctcatatcagagtgtgtgtgtgtgtgtgtgtgtgtgtg

SEQ ID NO: 6683 - DNA, 521 bp, Homo sapiens
  MAP TO AC008132.26; EXPRESSED IN ADULT LIVER, SIGNAL = 1.4; EXPRESSED IN HELA, SIGNAL = 0.33; EXPRESSED IN HEART, SIGNAL = 1.6; SWISSPROT HIT: P08125, EVALUE 1.40e-01; EST_HUMAN HIT: AL555878.1, EVALUE 0.00e+00; NT HIT: gi11427757, EVALUE 0.00e+00
cgggtgcttctcggaggctgacaagggcgtggagagcatgtcggtgagcacccgggtgcagatgctcatcagcacgctgcagagcgacagggctgctaggggcaccagcgatgagcgcactgcgcagagggggcagagggatgccacgacgccaggcctgctgccaagcccaccatgcacaaggagctgcctgcgttggctgcctgtggtcttgttgctgactttgaccccgtgggggaggaggaaactgcagactttggcccattggtgctagattcagacagtgacgattccgtggaccgggacattgaggaggccatccaggagtacctgaaggtaaagagtggagcggcacagcccggggccagcggggcccagccatgcacagccttccagggctgcgggcggaggcagtagatgtaagcgggaactggctcacagcagtgcccaactgccctgtgttccccaaaacttgtacctggctcaggtggtgtggccctggcagccaggtgggatccagc

SEQ ID NO: 6684 - DNA, 528 bp, Homo sapiens
  MAP TO AC000088.2; EXPRESSED IN ADULT LIVER, SIGNAL = 1.3; EXPRESSED IN HELA, SIGNAL = 0.56; EXPRESSED IN HEART, SIGNAL = 1.6; EXPRESSED IN BONE MARROW, SIGNAL = 1.2; EXPRESSED IN LUNG, SIGNAL = 1.9; SWISSPROT HIT: P08399, EVALUE 1.90e-01; EST_HUMAN HIT: BI819895.1, EVALUE 1.00e-24
tgggtctgccagctcctgccggggggtaccctctttgaaggttcgggggcggattctgtcccccgggcccggccccccggcccgaagcagccaatccgtgcgcgggtcatcgtgccgcagccaatcacagagcctctggcagctgaagttagggaaacaacggctcttgaggggtagctgagggcgcgggaccgctccccgcccggcagccgcccccagccccacccgccgttgtcctagtcgcggccgagcgcattctgggctggcctagggcgcgcttcttgggccgcctccctgcgcgtcccggccccgtcacttcagaaggcgctcgacccccagtctgcaccacccagtccactcccacatccccgactgagccgggtggtctcttccactcgagccagctccacttccctgaccaaggtttgcagaagccccccaccccgtcaccgccgtagaggccctcgtaggggggctctccagaaagcccgccccggggtccaagccccacccaggccctttctcgca

SEQ ID NO: 6685 - DNA, 521 bp, Homo sapiens
  MAP TO AL121907.2; EXPRESSED IN ADULT LIVER, SIGNAL = 1.6; EXPRESSED IN PLACENTA, SIGNAL = 1.8; EXPRESSED IN HELA, SIGNAL = 0.33; EXPRESSED IN BRAIN, SIGNAL = 1.8; EXPRESSED IN BONE MARROW, SIGNAL = 2.1; EXPRESSED IN FETAL LIVER, SIGNAL = 1.6; NT HIT: gi14769960, EVALUE 0.00e+00; SWISSPROT HIT: Q9EPZ6, EVALUE 3.70e+00; EST_HUMAN HIT: AW005267.1, EVALUE 0.00e+00
gtgacagtgcccgcaggggctgcccccgggcctgaggagcacacggccaccattgaggtggctgccatggcagaggaccacgagcggaagtagccgacaggagggcgaggcccctgggacggacagggctggctgtctctcagccgcggcagcagggagcgggcagaggccgcagggctggctcgggcaggtgggtcacgtggtctgcagaaccaaagagaggaatcgccaaaacaaatcacgagaagagagaaggggacagaacagcgagagcaacctggaaaatcggtcttcaggtcccacgtttcctcccccttttttcttgggaaatatatttttccatctgttgcttattaatactgtttacacattgggccttgatcaggagccaggtgggcgggggctagggggagcctgggtgcagcagagacagaggaagcagagccaggtgccgagcgcgaccctgcaggtgctggacgcggtgcagcaggtcacgaggcccccatgtctgcacccagcca

SEQ ID NO: 6686 - DNA, 515 bp, Homo sapiens
  MAP TO AL034419.12; EXPRESSED IN HEART, SIGNAL = 1.7; EXPRESSED IN BONE MARROW, SIGNAL = 1.9; EXPRESSED IN FETAL LIVER, SIGNAL = 1.6; EXPRESSED IN LUNG, SIGNAL = 2.2; EXPRESSED IN BRAIN, SIGNAL = 1.7; EXPRESSED IN ADULT LIVER, SIGNAL = 2.1; NT HIT: AB024444.1, EVALUE 3.00e-67; SWISSPROT HIT: O95416, EVALUE 3.60e+00; EST_HUMAN HIT: AI242312.1, EVALUE 1.00e-76
accgtgccgttgctgtgctcgctgcgcagggacgacagcgacgtgcgcagcggcgagcgcaccaccacggccatcccgtagggcacgctctggcgtactccgtagccatggcgcatgccgttggtgaactggccttggtacgtccctgcgggcgaggagagggcgcgtcagtaggcggcacgacgggtccccgcgtgtgcacggtggcctgggagggcaagggcgggagtgggcaaggcggggtgggaccgagaggcgcaaggccgtctgagggtcagggtgcacagtgctatgagtgtttgagtctactcgagtgtgcaataacacgagtgggtgagccaggaggagcttgcacgatggtaggaatacgttggtgggaacatggcaaggtcacaagtcgtgaacggataagctagtgagttcgcatggtagtgcaaatgttggagagcatgggcttgtgtgtgtatttgtgcaagatcgtgcgtacaagacacttgtgggcgtgcatatcggtg

SEQ ID NO: 6687 - DNA, 502 bp, Homo sapiens
  MAP TO AC002428.1; EXPRESSED IN BRAIN, SIGNAL = 1.1; EXPRESSED IN HELA, SIGNAL = 0.87; EXPRESSED IN ADULT LIVER, SIGNAL = 1.3; EXPRESSED IN FETAL LIVER, SIGNAL = 1.2; EXPRESSED IN HEART, SIGNAL = 1.4; EXPRESSED IN LUNG, SIGNAL = 1.2; SWISSPROT HIT: Q9Z507, EVALUE 4.60e+00; EST_HUMAN HIT: W88455.1, EVALUE 8.00e-87; NT HIT: gi16306585, EVALUE 1.00e-114
tgcctccaaggaaaggtgagaaatctacttagaaaccatctgtagtttttggcatatcgaccatctaatccatatacagggcttgtgccctatttacagcaatttcttgcttttcaaatttcttatttttttccaaatgtttctgcagcaatccatcacgacagtttgcaaacaatcaaatatttgacctaaaatacagcagcaacacattttaaaatttacatttgcttagatagaaagcagctaatcatactgattaaaaaaacaacaacaacaatttcagaatctttggcagcccattaccagagaggcatcacatcagggaaccatactcttcccaggtatttggagacttcagtgtgaatttcatctaggctataatcctcatcagggatcaaaacttcctccattacagagagctgtgttaaccttctctcacacagtcttacaaacctgatgaaggcactgcagctaacttcacatttgctgaggcccaaggctg

SEQ ID NO: 6688 - DNA, 524 bp, Homo sapiens
  MAP TO AF131215.1; EXPRESSED IN BONE MARROW, SIGNAL = 3.5; EXPRESSED IN FETAL LIVER, SIGNAL = 3.7; EXPRESSED IN BRAIN, SIGNAL = 3.1; EXPRESSED IN ADULT LIVER, SIGNAL = 4.2; EXPRESSED IN HELA, SIGNAL = 6.9; EXPRESSED IN PLACENTA, SIGNAL = 3.2; EXPRESSED IN LUNG, SIGNAL = 3.2; EXPRESSED IN HEART, SIGNAL = 3.6; SWISSPROT HIT: P22105, EVALUE 1.30e+00; EST_HUMAN HIT: BI038656.1, EVALUE 1.00e-61; NT HIT: Y09846.1, EVALUE 3.20e-02
tgtctggcacaaggcagggctgtaatagagatgtgttgaaagaagggagggaagttgagggcaagactgtttgccctccccaggctcaccagagaaggtacaggctcactccaacagcaggatggctcaggagctggggccattgcagactgcagctaggggtctgctccagggcatggtcaaacacccctccaagccctgcctcctgccctctcaggacctaccttacaaggctcctgagaagactaaaggaggtaatgcccacaaaggtgttgacactggccctcccctcatgagcactgaggagcagtagtggctttgctggtggtggagatggtgatagtgattgtgaccatgaagataaaaagatgacaacgatgatgatggtaccgatggtgattgtagtggtgataatggtgatggttgtgatgatgaaaacgatgatcaggatggtaaggatgatgatggtaataatgatgaagatgatgatgatggtaatgtggtggtgacgatggtaatggtga

SEQ ID NO: 6689 - DNA, 539 bp, Homo sapiens
  MAP TO AP000885.1; EXPRESSED IN ADULT LIVER, SIGNAL = 1.7; EXPRESSED IN PLACENTA, SIGNAL = 2.2; EXPRESSED IN BRAIN, SIGNAL = 1.8; EXPRESSED IN HELA, SIGNAL = 0.51; EXPRESSED IN BONE MARROW, SIGNAL = 2.4; EXPRESSED IN LUNG, SIGNAL = 1.8; EXPRESSED IN FETAL LIVER, SIGNAL = 2.2; NT HIT: AF131736.1, EVALUE 1.30e-01; SWISSPROT HIT: Q58692, EVALUE 6.60e+00; EST_HUMAN HIT: W72002.1, EVALUE 0.00e+00
cactggcatgcccggagaatctccccacacactaggcctgatgacattaccgatggaaatggatgtccaaggaaaagacgtctgggggcctggagcccccaaaacagatcacaaatcaaactttggaaaccaataaaagacaaagagaacatattggaatcaacagtaaatgaatttattacgtgaaacaaaactgaacttccatatactttataagatgaacttacgtgataacgaatcacttgtttcaaaattatagacatttgactctatattttgctcattcattaatttcacagtctgaaagaactagcctgtccagccagtacttgatgccagagaaaggatgaagagctagtagtaagaggggttagctcacattgctggaaatgcctatgataacagctctacgtagagactgagacactttgcttaaaaggtctggaaattcagcaagttgatctgcagaaggttgatccataggctggtctgtaacaaggagactggcagctcctagaagccaagtaggttgggcggca

SEQ ID NO: 6690 - DNA, 525 bp, Homo sapiens
  MAP TO AC007564.9; EXPRESSED IN HELA, SIGNAL = 1.2; EXPRESSED IN ADULT LIVER, SIGNAL = 2.6; EXPRESSED IN FETAL LIVER, SIGNAL = 2.4; EXPRESSED IN LUNG, SIGNAL = 2.7; EST_HUMAN HIT: BI760641.1, EVALUE 3.00e-03
gggagggaatgagagaaaggcaggaaaatggagcagatcattagggtcctaaagaggaaaaagaatccatttcattatagcatgacatgattgtgttttgttattgtcatttactttttccaaaaaactttactacaaacaacaacttggattgtttccaaaacttaaatttgtccttaaaaatatgaatttttaccctttcaagctgaggcaaattcaaaagagaatcttccaaaatgtcttgttcagtaacatccctgctaggatagatgtacagcctcccaaagtgaatacctttacaaggctcctgtttttatttattcttttattttttaaaaaaaaaattcttttattcttttaaaaaatgagtcagttgataatcttatctgatgccaaaaacaaagttaaattatcataagggagaagaaattctgcctttcttatgtgtggcttgtaggaaatgcatacatcttaatacatatgtttagttagtttagcggtacaccagcagcgcagtatctgggg

SEQ ID NO: 6691 - DNA, 513 bp, Homo sapiens
  MAP TO AL033527.26; EXPRESSED IN ADULT LIVER, SIGNAL = 1.2; EXPRESSED IN BRAIN, SIGNAL = 1.1; EXPRESSED IN LUNG, SIGNAL = 1.3; EXPRESSED IN HEART, SIGNAL = 1.5; EXPRESSED IN FETAL LIVER, SIGNAL = 1.2; NT HIT: gi16168538, EVALUE 7.00e-28; EST_HUMAN HIT: BI462869.1, EVALUE 2.00e-07
gtggtgtgagccctgcgtgcgcctcgggccgcgcgtcacagagcagggcgggcgcccgcgccctgacgcactccctcccagcaggtctccccggccaggcgcaggctctaggctaggcccgcgacccgcaacagggagggggccggctccgccctgggctgggggcccccgagtcagtcctccgtgtccagcgcacaggcccgggcgcaggacagagctgaggtcaggctccgcgagaagggcacaggctaggtcccctcctgccccagtggagcctcagacacaaactccaaccaccccgcccaagcttccccccagcttccccagctcattaaagacaccaagtgtccaatgagcaggcgccgctgggtgacaccgacgctcatgaacaccttcactgggcatcactctgtgccaagcaccctcctttaatcctgtgacaacccggagagtgagtgcctgccccactacagcctcccagagctcaggttcacccctcactgcgacagtggg

SEQ ID NO: 6692 - DNA, 550 bp, Homo sapiens
  MAP TO AF019413.1; EXPRESSED IN HEART, SIGNAL =  16; EXPRESSED IN LUNG, SIGNAL = 9.6; EXPRESSED IN BONE MARROW, SIGNAL = 3.4; EXPRESSED IN PLACENTA, SIGNAL = 3.3; EXPRESSED IN HELA, SIGNAL = 0.85; EXPRESSED IN ADULT LIVER, SIGNAL = 2.3; EXPRESSED IN BRAIN, SIGNAL = 2.3; NT HIT: gi15208634, EVALUE 0.00e+00; SWISSPROT HIT: P22105, EVALUE 1.00e-17; EST_HUMAN HIT: BI010479.1, EVALUE 7.00e-35
gggcacgaggacggggtcaccatctcaggcctggagccagaccataaatacaagatgaacctgtacggcttccacggtggccagcgcgtaggccctgtgtctgccattggggtgacgggtgagtgaatgatgggagccccagggtgggagctgtgggagggccacctcttgctctttggtgatgactggtggggaatgggacaggggtctggtcagcaccacagaactgcttgtggctggggctgggactccccttgggccttcctatgtggttgacccctggctccccctgagcagggaggggccatcaggagttttgctgtgctggtggctgtgccaggtccccccacagctgaccctggaacttgttacgtgtgttagctgtcagctgagcaggaccacccagccccaagaatggacttctctgaaatgacctcaggtcccccagtcatagccttggcttctccctccttttccccaggacccaaggacatccccctcactctctctccctccttctccactgcagaggaagagacccccagcccca

SEQ ID NO: 6693 - DNA, 514 bp, Homo sapiens
  MAP TO AC022515.2; EXPRESSED IN BONE MARROW, SIGNAL = 2.2; EXPRESSED IN LUNG, SIGNAL =   2; EXPRESSED IN HEART, SIGNAL = 2.5; EXPRESSED IN FETAL LIVER, SIGNAL = 2.5; EXPRESSED IN ADULT LIVER, SIGNAL = 2.2; EXPRESSED IN PLACENTA, SIGNAL = 2.5; EXPRESSED IN BRAIN, SIGNAL = 2.1; NT HIT: gi14756311, EVALUE 2.00e-99; SWISSPROT HIT: O15015, EVALUE 1.90e-01; EST_HUMAN HIT: AL542363.1, EVALUE 2.00e-99
tgtgctgggcggaactgtggggcccactgtgaggtgtgggagatgaggggactggacaggttacaaggatctggtgggtggagtttgatgcaagttgatacagaggtgagactgtgggtaaattcctggggaagggactgcctgggagatttgtgtttggtgtttgttatgctgaggggaggaaggattattgggagggaggcagaattttaaaaatcgaaggaagaacttaagggggtgtagatctaaggtattaggagtggagagtgatgaagggaagagctgaggaatcggtgacctaactggtttgtccccactgtctcctcttccagcccagggccttgctgccgccatgactgaggaatcagaggagacagtcctgtacattgagcaccgctatgtctgctctgagtgcaaccagctgtatggatcactggaagaggtgcttatgcaccaaaactcccacgtgccccagcagcactttgagctggtgggcgtggctgatcccggagtc

SEQ ID NO: 6694 - DNA, 534 bp, Homo sapiens
  MAP TO AL031282.1; EXPRESSED IN HELA, SIGNAL = 1.2; EXPRESSED IN ADULT LIVER, SIGNAL = 2.3; EXPRESSED IN LUNG, SIGNAL = 1.8; EXPRESSED IN HEART, SIGNAL = 1.7; EXPRESSED IN FETAL LIVER, SIGNAL = 1.8; EST_HUMAN HIT: BF871236.1, EVALUE 0.00e+00; NT HIT: gi14726553, EVALUE 8.00e-71; SWISSPROT HIT: O95544, EVALUE 9.00e-19
tctcacggggcggtgatgtggatggaggcccccccaactccatgtgcaccccaggcccccttcccccctgccccgcgtgcctccatgaggtgcgtgcagagctccttgaacggctgcagtaggctggcatctctcatcttcttgatgacaaggacgctctttggggacttgttccacgtcagccgctggctcgcggggtcctgaatgtgcctttaggggaggagaaaagagttcacaccagctgcgatctccctcttgcggaaaaggtgtatgacttagaaaataaaaaaaaaaatctttaaaaaggtgttttcacctcccagggaaacgtgctcggtggccacgggctcacagggcctagggtcgcgccacagagacagggtcaggggtcagtagggtccggagtgaccacctctcacctgcttggcccatcacacgcaggctcaggcccacaacccccacccgggcaccacgctgacccaagtgcacgcaccacagcccttcccagcccccggccacttgcctgcctggctc

SEQ ID NO: 6695 - DNA, 559 bp, Homo sapiens
  MAP TO AC010958.2; EXPRESSED IN HEART, SIGNAL = 2.3; EXPRESSED IN FETAL LIVER, SIGNAL =   2; EXPRESSED IN BRAIN, SIGNAL =   2; EXPRESSED IN ADULT LIVER, SIGNAL = 2.4; EXPRESSED IN BONE MARROW, SIGNAL = 2.2; EXPRESSED IN LUNG, SIGNAL = 2.2; EXPRESSED IN HELA, SIGNAL = 0.91; EXPRESSED IN PLACENTA, SIGNAL = 1.8; EST_HUMAN HIT: AA148718.1, EVALUE 2.00e-13; NT HIT: gi13645912, EVALUE 1.00e-119; SWISSPROT HIT: Q91193, EVALUE 4.00e+00
gctccctcctccctggctggaggcagggggatgaagtcatccacagcaggcgtggaatctctcggacttactaaatttatttttagctaggcgtagaaaattaaaaatccaaggaaaggggtggggcaggaggacaaaggccagtgactttgcccagcgctgccacggggagtcaggcagggccccgccaagttctggggctgctcacgcacgagggccgaggacgcggccggcaggagccgctcccccaggccagacgccccccaccccttggcgcacctcgggggtcccgacgctgcagctggagggggcagggggtctccgtgtgggcggcgcaggcgtcagcgccctgcccgcacccacagcgcatccgcggagtcgtcggccaggcccgcgctgtcggggccctgcgagctgtcctcggtggctgtggccgagtgcgtgctgtcctcctgcagggccggctcggggctggccgcgcgctgctgctgctccttgagctcggagtaggagcgcgaaaaggtgtggaagatggaggtgaccgggaaggccatgagca

SEQ ID NO: 6696 - DNA, 514 bp, Homo sapiens
  MAP TO AP000503.1; EXPRESSED IN LUNG, SIGNAL = 1.6e+02; EXPRESSED IN HEART, SIGNAL =  25; EXPRESSED IN BONE MARROW, SIGNAL =  42; EXPRESSED IN ADULT LIVER, SIGNAL =  16; SWISSPROT HIT: Q27965, EVALUE 3.00e-76; EST_HUMAN HIT: AL045580.1, EVALUE 0.00e+00; NT HIT: M59830.1, EVALUE 0.00e+00
tctgcgtctgcttggtggggatggtggagttgcgcttgatcagggcagtcatcacgcctccggccgtctccagccccagcgacaggggagccacgtccagcagcagcaggtcctgcacgttctcggacttgtcccccatcaggatggccgcctgcaccgccgccccgtaggccacagcctcgtcggggttgatgctcttgttcaggtcgcgcccgttgaagaagtcttgcagcagcttctgcaccttggggatgcgggtggagcccccgaccaggaccaggtcgtgaatctgggccttgtccagcttggcgtcgcgcagagccttctccacgggctccagggtgcttcggaacaggtcggagcacagctcctcgaacctcgccctggtgatggacgtgtagaagtcgatgccctcaaacagggagtcgatctccaggctggcctgggtgctggacgacagggtcctcttggccctctcgcaggcggtgcgcagccgcctcacggctcgcttgtt

SEQ ID NO: 6697 - DNA, 527 bp, Homo sapiens
  MAP TO AL133551.4; EXPRESSED IN ADULT LIVER, SIGNAL = 3.6; EXPRESSED IN BRAIN, SIGNAL = 6.3; EXPRESSED IN HEART, SIGNAL =   7; EXPRESSED IN LUNG, SIGNAL =   3; EXPRESSED IN BONE MARROW, SIGNAL = 4.5; SWISSPROT HIT: P06565, EVALUE 8.40e+00; EST_HUMAN HIT: BG757667.1, EVALUE 1.00e-116; NT HIT: gi14748192, EVALUE 1.00e-115
gcagtcgcctgggcctcttgctccccgcctgccgccgccgcctctgcctccgcctcccgccacagcgccgccgccgccgcacccgggcagcccctggccgccgccggcacctcacgctctggggccgccccaccgggctcgcccgggctccgctcgaggccgggaccatctctccgcggcctcttgcggagcggctccccggcgggggacgacgcggcctccctgtcggcccccgccgccgagggggagccgccgggctgaagggcgagggccgcctcgtccgccatcttccaactgcctctctggccctcctccctcgcctcctctgctcccgctcgacgcgcggcactggcgcccccgcggctccggctgcgggagatttaaaccccatcacgtgacccgccccatcgccgcccccgccctctcggcgctcccgccacccacgcgggccagaccacaacactacgggtcacgtggcgggcggaggctgttgcgtctaccgctccgcctgggctggaagcgcactc

SEQ ID NO: 6698 - DNA, 504 bp, Homo sapiens
  MAP TO AC005020.1; EXPRESSED IN ADULT LIVER, SIGNAL = 2.8; EXPRESSED IN PLACENTA, SIGNAL = 2.9; EXPRESSED IN HELA, SIGNAL = 3.2; EXPRESSED IN LUNG, SIGNAL = 3.2; EXPRESSED IN BRAIN, SIGNAL = 2.8; EXPRESSED IN BONE MARROW, SIGNAL = 3.6; EXPRESSED IN HEART, SIGNAL = 3.1; EXPRESSED IN FETAL LIVER, SIGNAL =   3; NT HIT: gi13937343, EVALUE 0.00e+00; SWISSPROT HIT: Q9Z1D9, EVALUE 6.00e-19; EST_HUMAN HIT: BE540085.1, EVALUE 0.00e+00
ccagctttgttcggcagggggacacagacagtccactgaaggagaaaatctcagcctgaactgaaccgcaggagactgcttccctcaaacattggaagaaaaattgtttagcaccacttgggtaagagatggaagcagctatgctctctggaagctctaagtaagccaggccttgcctttcccgcgttggcgaatgggtgggaaggcgatgggaccagtgctttcctgcagccatcaccttgcaccccgcaaggccctgcagtgagaaagatgaatgatggtgctgcctgccacctgctatgctcactgcaccagcggctcctggcggtgctgggtcttctggtgccggttgaggatggacctctggttgaagcttcgcccgcaggcaggacagtggtagggcttctcccctgtatggattctctggtgtcggaccagccgctcccctttgctgaaccgcttcccgcacacctggcacccatatggcttctcgccagtgtgggc

SEQ ID NO: 6699 - DNA, 509 bp, Homo sapiens
  MAP TO M63544.1; EXPRESSED IN ADULT LIVER, SIGNAL = 1.3; EXPRESSED IN HELA, SIGNAL = 2.3; EXPRESSED IN LUNG, SIGNAL = 1.3; EXPRESSED IN HEART, SIGNAL = 1.5; NT HIT: gi14729302, EVALUE 1.00e-111; SWISSPROT HIT: Q9Y6A5, EVALUE 1.00e-41; EST_HUMAN HIT: AW821224.1, EVALUE 1.00e-125
tcctgcccagggttggttgcatttggcttctggcctgagcccgcccttattggatccctccttaggccaggagcactaaagagatgcatggcagccaaggcaagggcaagcaccctcagctgggagccacctgagccctgtttttatccagaggcccctcctcaggcagaacctacccggcctcaaaggagtatctgatgacacttctggcctcgggtcctggaccacatacactgcagggcagctgccccacgccacgctccccatcccatcctcacacttactggctcagacagggacctggctcctccgtggcaggcccagcatgcaactgttcagccgctggctggcccagcctggtctcagggctttctgggggctgggcctcactgcaaccagacttggtgtcacctccgaacgggatgaagtttgggtcatccattttgtcccagtcgaggtggtaagagccccgagaagctggcatgggggggtcctctcccgctccgctc

SEQ ID NO: 6700 - DNA, 516 bp, Homo sapiens
  MAP TO AC007059.1; EXPRESSED IN ADULT LIVER, SIGNAL = 1.8; EXPRESSED IN PLACENTA, SIGNAL = 1.7; EXPRESSED IN HELA, SIGNAL = 3.8; EXPRESSED IN BONE MARROW, SIGNAL = 1.6; EST_HUMAN HIT: BG475935.1, EVALUE 1.00e-124; NT HIT: gi14761720, EVALUE 3.00e-42; SWISSPROT HIT: O15015, EVALUE 4.20e-01
gcttttgggcttggccctggtgggttgggaggtccaccaggccgagactgggtccgtctcttcaggatctcccgcagcgtgtcgatgggcgagccattgacgtaccactcggtcacgcccatttgccgcagatgggagcgcgcgtggctcgagaggcccttgcggttctcgaagaactcaccacagaactcgcagcggatgtctcgtgctggctctgggcctgaggctgcagcaggaggagaaaggggcagttagcatcgtggaactgccagcatggtcacctgcaggagtgtcctggtcggctgggcgtgggcggcagcagcacgcccacaggttagggtggtgagggcaggtgcaggtaagggagtggaggagcggggctgggggccagatacccggcaggagtgaggggaggctccagagagcacatgggccctcagtcctggcggaggaggatggaaccaagattccattgctctgtgggtcccaacaaggacagggtgaggcagggaggca

SEQ ID NO: 6701 - DNA, 541 bp, Homo sapiens
  MAP TO AC010680.2; EXPRESSED IN ADULT LIVER, SIGNAL = 1.2; EXPRESSED IN PLACENTA, SIGNAL = 1.7; EXPRESSED IN BRAIN, SIGNAL = 1.1; EXPRESSED IN HEART, SIGNAL = 9.9; EXPRESSED IN LUNG, SIGNAL = 1.1; EXPRESSED IN BONE MARROW, SIGNAL = 1.3; SWISSPROT HIT: O70468, EVALUE 1.00e-13; EST_HUMAN HIT: AA194556.1, EVALUE 0.00e+00; NT HIT: gi16157781, EVALUE 0.00e+00
gcttcgctggccttgctaacacctgcagcattgagtgcataagttctgaactgatattccagtccttctactaaaccagttactttgtagttgcactctaagcatggcactttgttttctttcacccaaagaattgtattacgttctttcttctcaacccagtagccaatgattttactgccaccatcgtggtagggttcttcccaacgaatagacatggcattggcagacacatggtagacctcaggtctggtaggagcgcttggtgggactaaatataaacaaaggtattaagtatgaatacaattttataaaattcaggggaaacatttaataatagagactttgaaataggatttttatttttcttaccaaatggatgttcagcaattattggtgctgattctagaggtttgctgacaccaaatctgttctctgaactgacacggaaagaatattccatgtattttgtgagatgagtgactttaatttgagtgcgcttgacactggaattgacaagctgccaagctgttgtacccga

SEQ ID NO: 6702 - DNA, 520 bp, Homo sapiens
  MAP TO AL122002.16; EXPRESSED IN ADULT LIVER, SIGNAL = 1.3; EXPRESSED IN HELA, SIGNAL = 1.1; EXPRESSED IN BRAIN, SIGNAL = 1.1; EXPRESSED IN HEART, SIGNAL = 1.4; EXPRESSED IN LUNG, SIGNAL = 1.2; EXPRESSED IN BONE MARROW, SIGNAL = 1.3; SWISSPROT HIT: P31623, EVALUE 1.00e-09; EST_HUMAN HIT: AI446581.1, EVALUE 1.00e-108; NT HIT: gi16162244, EVALUE 1.00e-38
tcctggcgacttgcagtcacattctaatgattttcaagggccaaaatatagtaataatcatttgaaatatccatcgcttccatgccttagtttaacaggtaggctttatcttttgccatttctgtattttacatctgttatgtacctgtctcataatccctctaaacatacacaaaagacaacagatttaatagcttctcttctcataaagggacgccaacgttgcgtccagctgtcaggatatgaccctgctactctttcctacctttaagcaaggaacaatttcatactctcttagctcgtgatcttgattggcaagtagcaatggctgactttattcgtaatatcagcttcaatttaccagcctctaagctcctgaactttttacaaactatgcctgtgaagtttgtatctattgttgtctctgagcctttacttcatgccatcactctctttacagatggttcaggaaaaactggaaaagcagctatagtgtggcaagatgccatgcaaaactggc

SEQ ID NO: 6703 - DNA, 600 bp, Homo sapiens
  MAP TO AP000345.1; EXPRESSED IN ADULT LIVER, SIGNAL = 1.7; EXPRESSED IN HELA, SIGNAL = 2.9; EXPRESSED IN BONE MARROW, SIGNAL =   2; EXPRESSED IN LUNG, SIGNAL = 1.9; NT HIT: AB016195.1, EVALUE 0.00e+00; SWISSPROT HIT: P10266, EVALUE 4.00e-67; EST_HUMAN HIT: AI080480.1, EVALUE 0.00e+00
cctggccactcaggaggcaagagttaatcccagaggtctatgtcctaatgtgttatggcaaatggatgtcatgcacgtaccttcatttggaaaattgtcatttgtccatgtgacagttgatacttattcacatttcatatgggcaacctgccagacaggagaaagtacttcccatgttaaaagacatttattatcttgttttcctgtcatgggagttccagaaaaagttaaaacagacaatgggccaggttactgtagtaaagcagttcaaaaattcttaaatcagtggaaaattacacatacaataggaattctctataattcccaaggacaggccataattgaaagaactaatagaacactcaaagctcaattggttaaacaaaaaaaaggaaaagacaggagtataacactccccagatgcaacttaatctagcactctatactttaaatgttttaaacatttatagaaatcagaccactacctctgcagaacaacatcttactggtaaaaggaacagcccacatgaaggaaaactgatttggtggaaagataataaaaataaaacatgggaaatggggaaggtgataacgtggggg

SEQ ID NO: 6704 - DNA, 520 bp, Homo sapiens
  MAP TO AC003038.1; EXPRESSED IN ADULT LIVER, SIGNAL = 1.2; EXPRESSED IN BRAIN, SIGNAL = 1.2; EXPRESSED IN HELA, SIGNAL = 1.4; EXPRESSED IN BONE MARROW, SIGNAL = 1.4; EXPRESSED IN HEART, SIGNAL = 1.2; NT HIT: gi15529983, EVALUE 2.00e-90; SWISSPROT HIT: P48247, EVALUE 9.50e-01; EST_HUMAN HIT: BG701514.1, EVALUE 2.00e-90
tggggcctcttgatggcaggtagggctggaatgtttaatatgtctgcatttatgtgtgcagcccttcggcagggacactgagttgtctggatctctctctctctctctgtgtgtgtgtgtgtgtgtgtgtgtgtgtgtgtgtgtgtgtcagtcttccacgctatggcctctgaagctcaaagctcctagaatcacaggtctggaagttgccagagctgtaacttgccccacatcacttccactgcaggcccagatcccaggggagggaaccttgcaggggtccagacactgttgctgtggccatgggttcctcttgcctgagctgatgctgaggtttctcccatgtctcccagatgctcagtgacctccaggagtctgtggccagctctcgcccccaggaggtgtcagcatacctcacccgcttctgcgaccagtgcaaacaggacaaggcctgccgcttcctcgcggcccagaagggggcctaccccatcatcttcactgcctggaagctggccactgc

SEQ ID NO: 6705 - DNA, 513 bp, Homo sapiens
  MAP TO AC008543.4; EXPRESSED IN LUNG, SIGNAL = 1.9; EXPRESSED IN BONE MARROW, SIGNAL = 2.3; EXPRESSED IN ADULT LIVER, SIGNAL = 1.9; EXPRESSED IN PLACENTA, SIGNAL = 2.5; EXPRESSED IN HELA, SIGNAL = 2.4; EXPRESSED IN BRAIN, SIGNAL = 1.8; EXPRESSED IN HEART, SIGNAL =   2; NT HIT: gi14760087, EVALUE 4.00e-26; EST_HUMAN HIT: AA083811.1, EVALUE 0.00e+00; SWISSPROT HIT: P17024, EVALUE 7.00e-48
ccgatgggtgtaagcaatgtgggaaagccttcagatctgccaagtacattcgaatacatggaaggactcacactggtgagaaaccctatgaatgtaagcaatgtgggaaagcatttcattgtgtcagctcctttcatagacatgaaaggactcacgctggagaaaaaccttatgaatgtaagcattgtgggaaagccttcacttgttccatatatattagaatacatgaaagaattcacactggagagaaaccttaccaatgtaaggaatgtgggaaagccttcattcgttccagttactgtcgaaaacatgaaagaactcacactattaatatatgagagaaatgctattttttaatttttattttaatagagacagggtctcactatcttgtccaggttggtcttgaactcctggcctcaagcatccctcccagcttgaagtgtcaataaaggaaggcaataaaatgtagagatggagttaggtgatgccacgctgggattcactggtggc

SEQ ID NO: 6706 - DNA, 521 bp, Homo sapiens
  MAP TO AC007708.13; EXPRESSED IN PLACENTA, SIGNAL = 2.3; EXPRESSED IN BRAIN, SIGNAL = 1.6; EXPRESSED IN HELA, SIGNAL = 1.4; EXPRESSED IN ADULT LIVER, SIGNAL = 1.9; EXPRESSED IN BONE MARROW, SIGNAL = 1.8; EXPRESSED IN FETAL LIVER, SIGNAL = 1.9; EXPRESSED IN LUNG, SIGNAL = 1.5; EXPRESSED IN HEART, SIGNAL = 1.9; SWISSPROT HIT: P18899, EVALUE 2.00e-03; EST_HUMAN HIT: AL110383.1, EVALUE 3.00e-49; NT HIT: gi14756466, EVALUE 2.00e-62
tcctccttggcgatgccctgggcggcgtcctcgttggcgatgccctgggcggcgtcctcgttggcgatgccgtggacggcgtactccttggcgatgccctggatggcgtcctcgttggcgatgccctgggcggcgtcctcgctggcgatgccgtgggcggcgtcctctctggcgatgccgtgggcggcgtcctcactggcgatgccgtgggcggcgtcctcgctggcgatgccgtgggcggcgtcctcgttggcgatgccgtgggcggcgtcctcgttggcgatgcccttgtcggcggcctcgttagcgatgtcgtgtacagtatcctcgttagcgatgtcgtgtgtggcgtcctcgttagtgatgtcgtgtacggtgtcctcatggggagctagaaaaacacagagttaaggtcagtgccctggtggtggagactgtgaatcacccaggggcttgcttggtgtgatgcatggaggtggctgatcacagcatgggtcaagctgatgctgggacatcctccc

SEQ ID NO: 6707 - DNA, 524 bp, Homo sapiens
  MAP TO AC025436.2; EXPRESSED IN ADULT LIVER, SIGNAL = 3.7; EXPRESSED IN HELA, SIGNAL =   2; EXPRESSED IN LUNG, SIGNAL = 3.6; EXPRESSED IN BONE MARROW, SIGNAL = 3.6; EXPRESSED IN FETAL LIVER, SIGNAL = 3.1; SWISSPROT HIT: Q9Y5E7, EVALUE 1.00e-18; EST_HUMAN HIT: BI009006.1, EVALUE 0.00e+00; NT HIT: gi14861873, EVALUE 0.00e+00
tgggtgcaatgaagagcctttcgaaacgccaataagacttcggtacactgagagacactacttgaaaatactcaatttcgattgccatcagcctgaaagaaagcactgggattttcttaaagtttaggagaaaataaatactcggaagagacgcggggtggcgctgcagccttagaagtagcagaaacaaagcacccagccgacgctcccttacccagatactcagctaaagaagcagcaagcaggaagaggaggctttctaaggcggtcgctccgggaaatccgggccctaggattgtccactcatcccagtatcagcgagatacggggagatagagttagcgacaacgtgagccagagctggagcacgtttggtgagagaccagaaagcaatggaggccggagaggggaaggagcgcgttccgaaacaaaggcaagtcctgatattctttgttttgctgggcatagctcaggctagttgccagcctaggcactattcagtggccgaggaaacggagagtggc

SEQ ID NO: 6708 - DNA, 508 bp, Homo sapiens
  MAP TO AL031711.17; EXPRESSED IN ADULT LIVER, SIGNAL = 2.1; EXPRESSED IN LUNG, SIGNAL = 1.5; EXPRESSED IN HEART, SIGNAL = 2.1; EXPRESSED IN FETAL LIVER, SIGNAL = 3.3; NT HIT: gi14745220, EVALUE 1.90e+00; SWISSPROT HIT: Q05152, EVALUE 1.60e-02; EST_HUMAN HIT: BI765749.1, EVALUE 2.80e+00
tgggcctctgcatggttggcaccctgccagctggtcctgggcctctgcatggttggcaccctgccagctggtctctgggcctctgcatggttggcacactgccagctgccgcagcgcccaccccagcacctgcccaggtctgcctccaactgcagtgctgcaaaagggacctgcgcgtagtgggctctgtgccgttgtccaggctgcatcctgctttaggcacggggccctcaccacagttctgatctgtccctgatctccccccgcaccccactgtctgaatacagaggccccctcctctctactggggagcccagacatctagcccttgccctgtgtggttctctccgggtgaggtgggagggacctgccgggagagacaacatccctgctgcttcactcacggtgtgaagccggaagggaccagactcagaccccctcccgggccagcctctccgtgaagcccctttctccagcaggagagtgtagctgcccctctgggtgctca

SEQ ID NO: 6709 - DNA, 501 bp, Homo sapiens
  MAP TO AL096710.8; EXPRESSED IN BONE MARROW, SIGNAL = 2.4; EXPRESSED IN FETAL LIVER, SIGNAL = 2.8; EXPRESSED IN LUNG, SIGNAL = 2.1; EXPRESSED IN HEART, SIGNAL = 2.3; EXPRESSED IN PLACENTA, SIGNAL = 2.1; EXPRESSED IN ADULT LIVER, SIGNAL =   2; EXPRESSED IN BRAIN, SIGNAL = 1.8; EXPRESSED IN HELA, SIGNAL = 2.3; NT HIT: AF396879.1, EVALUE 1.00e-106; SWISSPROT HIT: Q9D952, EVALUE 3.00e-11; EST_HUMAN HIT: AW891341.1, EVALUE 2.00e-04
tgctgcaaggaagatgatgtgggaaatatttcaccagaatggggccaaatgagtccaacatagcctcgctgagcttccaggaccagaagagcactgctggaagttattaaatcacactgtactgcttcgtctacagttaaacgcttggcagggtttgactggatgattccaccagtttgaacctgatatgtgaggatactgctagcagtgtccctgtcaatcaccccttctctgacagcttcttcaacagtcattctttggccagagttggaattgatcagacctccagaaagaagctgtgcacttaacaacctaaacatggtttcacggtctatgagaccttcatgagctgctcttaaaatgcttatgtttcttccacattttaatgttattctacctccttcttgtggtctcacaggtagaagccacatccctgtgttttcctgtaaagtacttctttgtaccatatctattaaagaaaccttctcagaggtgcagggg

SEQ ID NO: 6710 - DNA, 534 bp, Homo sapiens
  MAP TO AC009567.8; EXPRESSED IN BONE MARROW, SIGNAL = 2.2; EXPRESSED IN FETAL LIVER, SIGNAL = 2.2; EXPRESSED IN LUNG, SIGNAL = 1.9; EXPRESSED IN BRAIN, SIGNAL =   2; EXPRESSED IN ADULT LIVER, SIGNAL = 1.8; EXPRESSED IN PLACENTA, SIGNAL = 1.8; EXPRESSED IN HELA, SIGNAL = 2.9; SWISSPROT HIT: P38827, EVALUE 3.00e-03; EST_HUMAN HIT: X85679.1, EVALUE 1.00e-129
tgggctgccagttcctttgcatcttctaacgtagtacagagtttgtctggcatgaagtaactctgggatccatttgcaatagcaggaataactatcttatacaccaagagtactttcccatcttgacttgttgttgaatataaataatattctggtggtgcccagttatttttgttgcagtaataatccaaatgcattactgcagaattaaaatgattggattttaaagaatacatactaattggagtaagctttgttccaggataaaaagggtaagtgcatctttcaacttcaggcggacttgggctatgctgaccattgagacgagcaggaagagttggcagcttgcctagagtttttgggtggctctcttctttgttagcaaacacaatcagattttcagaatttggactaatctgaccattaagatgctgtctccaagtgttttctttatttactggtttagctagtgttacctcaatacttgctccatcaatgcattttccattcataacagacatggcagccactgca

SEQ ID NO: 6711 - DNA, 512 bp, Homo sapiens
  MAP TO AC000025.2; EXPRESSED IN LUNG, SIGNAL = 1.1; EXPRESSED IN BONE MARROW, SIGNAL = 1.6; EXPRESSED IN HELA, SIGNAL = 1.2; EXPRESSED IN ADULT LIVER, SIGNAL = 1.2; EXPRESSED IN FETAL LIVER, SIGNAL = 1.2; SWISSPROT HIT: P12036, EVALUE 4.00e-13; EST_HUMAN HIT: BF856014.1, EVALUE 0.00e+00; NT HIT: gi16167928, EVALUE 0.00e+00
tgttccagcctgggcaacacagtgagaccctctcaaaaacaacaacatcaacaaaaaaagaccagtcccaccggggtacacattctgggtggtcactggaatgatttgccaagtgactttctctagtctcataatgcccaccattcacattcctgttccaccaaaacccatatcattcgatgtcagtgaccttcaggatagtctaggaagaacccaaatagtgaatttgccctgagtttatactaatgtgttccgtgatccatcctgcagaaaactcctggaaggtgaagagtgtcggattggctttggcccaattcctttctcgcttccagaaggactccccaaaattccctctgtgtccactcacataaaggtgaaaagcgaagagaagatcaaagtggtggagaagtctgagaaagaaactgtgattgtggaggaacagacagaggagacccaagtgactgaagaagtgactgaagaagaggagaaagaggccaaagaggaggagggca

SEQ ID NO: 6712 - DNA, 526 bp, Homo sapiens
  MAP TO AC018720.2; EXPRESSED IN HEART, SIGNAL = 2.7; EXPRESSED IN BONE MARROW, SIGNAL = 6.4; EXPRESSED IN FETAL LIVER, SIGNAL = 1.4; EXPRESSED IN ADULT LIVER, SIGNAL = 3.3; EXPRESSED IN LUNG, SIGNAL = 4.1; SWISSPROT HIT: Q09511, EVALUE 1.50e-01; EST_HUMAN HIT: BG030247.1, EVALUE 0.00e+00; NT HIT: gi14746079, EVALUE 1.00e-124
tgcctttaccccggaggatgcagatgtaccttctctcaggccgatgacctcaggcctccacggtccctggagctctaggaaaggcgagcgcgatctcgcgcccacacccagtgctctgggtcataagcctggatctggaaaaacaaacgcgctttgagaagacggggactcgccaggatacccctctctcccctcatccagcctccagcccacccgattcctccccacctcctccacctccccaggccccacctacctcctccaactcctccggggaaacccaagccctgccgctcatggaacagaagaactggaaccgacgtttctggaacaggactatctgagagcggttcttcctggccctcaggttcatggaacggcctaactggaaccgacgcttacggagcaagggtatgcgagagcggttcttcctggccctcgggttcatggaacggcctaactggaaccgacgcttacggagcaagggtatgcgagagcggttcttcctggccctcgggttcatgga

SEQ ID NO: 6713 - DNA, 503 bp, Homo sapiens
  MAP TO AL356020.2; EXPRESSED IN PLACENTA, SIGNAL = 1.7; EXPRESSED IN LUNG, SIGNAL = 1.9; EXPRESSED IN HEART, SIGNAL = 2.4; EXPRESSED IN FETAL LIVER, SIGNAL = 1.7; EXPRESSED IN ADULT LIVER, SIGNAL = 1.9; EXPRESSED IN HELA, SIGNAL = 2.1; NT HIT: AF149773.1, EVALUE 0.00e+00; SWISSPROT HIT: P10272, EVALUE 5.00e-10; EST_HUMAN HIT: AI076830.1, EVALUE 0.00e+00
tcctgggcaggggcaaatccccgagcttgatgtatagggaagggagggggcctgaacaatccctgaggagtagtagaatagtggatggaacactgagaagtgatttccctgaggatagatttccatgatggaaaggaaatgagaggttctaagagatgggctagcagcctgtaaccttcatggacgaggttatgaaatgatgacagaatagaatgggcctgtgagtctggaaggagatattttccttgttccaagaaccatttgccttatgtgggaaaagattggtaggtggaagtttcagtgggagagtaggtgggagtgaccggtgagaaggagaaaaactggccatgagggacagaagttggaacgctagctgcttctttagctaccttatcagcagaagcgttgccctgagcactgggatgtgatgccttttgatggcccttgcagtgaatgattccagcttccttttgaagtaaagtggcctttggaagtaaagcggc

SEQ ID NO: 6714 - DNA, 504 bp, Homo sapiens
  MAP TO AL031033.5; EXPRESSED IN LUNG, SIGNAL = 1.6; EXPRESSED IN BONE MARROW, SIGNAL =   2; EXPRESSED IN ADULT LIVER, SIGNAL = 1.6; NT HIT: gi14777078, EVALUE 0.00e+00; SWISSPROT HIT: P33240, EVALUE 1.20e-02; EST_HUMAN HIT: AL524240.1, EVALUE 0.00e+00
gctcgcggacggtatggaggactacgagcaggagctgtgcggcgtcgaggatgatttccacaaccagttcgcggccgagctggaggtgctggcagagctggaaggtggggcgcggcccccggccgttggggaggagctgcgaaagccgggacagtggcgacctcggggagggcgtgccgggggccgaaggggcctccacgtcgccgctggcgggatctgctgtctcggggcggccgctgacaatctcctctcccagcaggggcgtcgactccgtcgccctccggggtccccctgttcaccgcgggccgacccccgcggacgttcgaggaggcccttgccagaggggacgcggcctccagtcccgccccagccgcatctgtgggcagcagccagggcggcgccaggaagaggcaggtggacgccgacctgcagccggccgggtccctgccccacggtaggttggcggcattgccccagggcctccggagtgggcgcgaggctgag

SEQ ID NO: 6715 - DNA, 500 bp, Homo sapiens
  MAP TO AC006285.9; EXPRESSED IN ADULT LIVER, SIGNAL = 1.5; EXPRESSED IN HELA, SIGNAL = 1.7; EXPRESSED IN FETAL LIVER, SIGNAL = 1.2; SWISSPROT HIT: P56819, EVALUE 2.10e+00; EST_HUMAN HIT: BE890164.1, EVALUE 0.00e+00; NT HIT: gi7662505, EVALUE 0.00e+00
tggcatctagtgggtggagcccaccacacacaggacagccccaacacagagaatggtcagaacagcactagtgccaaggctgagaaacccggtcctggagggggtgctttacccctaagattctcaatttagcatgagcggaggcccttgggatttacagtcagatgaatgtgaatgccccacctcaagccctaacatgcctaacatgccactgccatgttgagcagaagtccccaattatcccagagtgttccacaaatgtccagacagctgctggaggttcaaattccagccaatacaactccaaccttacatccttctgtctttctcttctgaaaagcctcctatttctttctcagagccagggctaccccgatggccactgccaggatggcaacagcagcagcccctccaaacagcagtatagacttgccctcagacagcggcatgggcttcatctcaccggcgggggacagtctagacttgccctcagacggcgg

SEQ ID NO: 6716 - DNA, 514 bp, Homo sapiens
  MAP TO Z83732.1; EXPRESSED IN HELA, SIGNAL = 1.8; EXPRESSED IN ADULT LIVER, SIGNAL = 1.7; EXPRESSED IN PLACENTA, SIGNAL = 2.7; EXPRESSED IN BRAIN, SIGNAL = 1.9; EXPRESSED IN LUNG, SIGNAL = 1.5; EXPRESSED IN FETAL LIVER, SIGNAL =   2; EXPRESSED IN HEART, SIGNAL =   2; EXPRESSED IN BONE MARROW, SIGNAL = 2.2; EST_HUMAN HIT: T95652.1, EVALUE 7.20e-01
gccatgatgcaggtggcagtgatcctgaaggtggcggtgatggtggtgataatgatggtggtggtagtgatgctgatggtggtggtagtaattatagccatggtgcaggtggtggtgatcatgaaggtggtggtgatggtgatgataatgattgtgatgcaggtggtgatgatgaaggtggtggcagcagagatggtgcttgtgatgataacagggattgttatcatccgaataactaccatttggaacaactcttcacggtgtccaaaacctttaacgtgtattacttcattttagaagaaaaattctgaatttttcaaaacaacaactatttctaaccaagttccaccgtgagtgtcaccaaaactcagccaagttaagagaacagggagagctggagtgggctctttctccatcacacgtaagtgggcagtgacctagggaggaacagttacaaaaacgagagcaaggctacaaaagctctctccagtcttccctcaaccaatcgcctcca

SEQ ID NO: 6717 - DNA, 500 bp, Homo sapiens
  MAP TO AP000503.1; EXPRESSED IN ADULT LIVER, SIGNAL =   2; EXPRESSED IN HELA, SIGNAL = 3.9; EXPRESSED IN BRAIN, SIGNAL = 2.1; EXPRESSED IN HEART, SIGNAL =   2; EXPRESSED IN BONE MARROW, SIGNAL = 2.3; EXPRESSED IN LUNG, SIGNAL = 1.8; SWISSPROT HIT: P26640, EVALUE 1.00e-48; EST_HUMAN HIT: BE791025.1, EVALUE 1.00e-113; NT HIT: gi16174850, EVALUE 1.00e-113
ctcacaggcacagcgagggctcaaggctagacctccagccgtgagccctgtacctctcgtcccctaggagtgcctgaaacctgtactgaatggggtggaccaggtggcagctgagtgtgcccgccagaccctgtacacttgcctggacgttggcctgcggctgctctcacccttcatgcccttcgtgacggaggagctgttccagaggctgccccggaggatgccgcaagctccccctagcctctgtgttaccccctacccggagccctcagaggtatggcatggcctggagaggggagtctgacctgccctccaggccccctcaccccctcctccaccccacagtgctcctggaaggaccccgaggcagaagccgcccttgagctggcgctaagcatcacgcgagccgtgcgctccctgcgggccgactacaacctcacccggatccggcctgactgtgagcctcaggcccccatgtccgccccatcccactgtcccct

SEQ ID NO: 6718 - DNA, 502 bp, Homo sapiens
  MAP TO AJ003147.1; EXPRESSED IN ADULT LIVER, SIGNAL = 1.8; EXPRESSED IN PLACENTA, SIGNAL = 2.3; EXPRESSED IN HELA, SIGNAL = 2.7; EXPRESSED IN BRAIN, SIGNAL = 1.8; EXPRESSED IN HEART, SIGNAL = 2.4; EXPRESSED IN BONE MARROW, SIGNAL = 1.6; EXPRESSED IN FETAL LIVER, SIGNAL = 1.5; SWISSPROT HIT: O95201, EVALUE 5.00e-12; EST_HUMAN HIT: BI826058.1, EVALUE 0.00e+00; NT HIT: gi4508014, EVALUE 0.00e+00
ccctacgcctgcccgttgtgtggcaagagcttcagccggcgctccaacctgcaccggcacgagaagatccacaccaccgggcccaaggccctggccatgctgatgctgggggcggcggcggcgggggctctggccacacccccacccgctcccacctaggaggccaggaaagggggagcggggcgcccagggccactggaacagccccactggagtcaaggctccgagggaggagagaggggctcgggaagggagctggggcggtgagggcatggggtgaggcatggcgatgggggagggcgagggcgagaaagggcaggcactctgcgaattaaaggccttggacttgaagcgcccgcctacacagctttgtctcctggtgccctggcgctgattccccgagcgtgggggagctcctgggctaatcccctgtcctcattgaggcatccccgcatcaccactcttggcttgggtctccaccagggttggggtcccttttgcc

SEQ ID NO: 6719 - DNA, 507 bp, Homo sapiens
  MAP TO AC008753.5; EXPRESSED IN LUNG, SIGNAL = 3.7; EXPRESSED IN HEART, SIGNAL = 3.4; EXPRESSED IN BRAIN, SIGNAL = 2.3; EXPRESSED IN HELA, SIGNAL = 2.4; EXPRESSED IN ADULT LIVER, SIGNAL = 1.6; EXPRESSED IN PLACENTA, SIGNAL = 2.2; NT HIT: gi14758030, EVALUE 0.00e+00; SWISSPROT HIT: P07645, EVALUE 5.40e-01; EST_HUMAN HIT: BF791792.1, EVALUE 0.00e+00
ggggtgaaaacaggatgtgggcaacaaaacaacacaggaaggaaacagcaagaggaaagggaaggaagaagatgcatccaagaactggttagagtgcaaggaattgggaaggaaagaaaaaggtgggagggaggggagacaggaagaggaaaacagaggaaaggcggaggaaagaagtactccataaagaaaactcgggcaagaagaacaaagaggttggagagggaacgggagcctcttgggagagtcttagaccttgacaaaaaccaggtgggcagagtgcaccaggtcagccacatacgccagtaggttgatggccgtcaggatggccacagccagtcggcggtcccaggcacacacgtagtaggcatggctgcggctgcagcttacatctctcgagcgccgaggctggccgccatacttctcatcgaactggtagaggggccagagaacaagggcggtggcatagaggaggacagacagcaaggccagccccgacaggaagct

SEQ ID NO: 6720 - DNA, 539 bp, Homo sapiens
  MAP TO AL109612.7; EXPRESSED IN BONE MARROW, SIGNAL = 1.2; EXPRESSED IN FETAL LIVER, SIGNAL = 1.1; EXPRESSED IN ADULT LIVER, SIGNAL = 1.5; EXPRESSED IN HELA, SIGNAL = 0.94; NT HIT: Z83320.1, EVALUE 8.00e+00; SWISSPROT HIT: P27113, EVALUE 1.00e-02
tggaagaatggcatccacaaccctcatcatatgtggtaaattggacactaacagaaaacatctgcttggacttctacagagattgctggtttttgggtgtaaacactaaaatagatacttcaggcaatcaagctgttccccagatttgccctttgcaaattcaattaggagatatccttgtaatttcttctgaaccatctcttcaatttccagaaataaatttgatgaatgtttctgaaacatctttcgttggctgtgtgcaaaataccacaacggaagatcagttactttttggctgcagactaaaaggaatgcacactgttaattctaagtggctgagtgttgggacacattattttatcacagttatggcaagtggtccatcaccttgtccactgggacttcgactaaatgtgacagtgaaacagcagttctgccaggaatctctgagttcagaattttgctctggtcatggtaaatgtcttagtgaagcttggagcaagacatatagctgccattgccagcctccattttctgga

SEQ ID NO: 6721 - DNA, 503 bp, Homo sapiens
  MAP TO AC008688.4; EXPRESSED IN BONE MARROW, SIGNAL =   1; EXPRESSED IN ADULT LIVER, SIGNAL = 1.2; EXPRESSED IN HELA, SIGNAL = 1.1; NT HIT: gi14861873, EVALUE 0.00e+00; SWISSPROT HIT: Q9Y5E7, EVALUE 8.00e-93; EST_HUMAN HIT: BG722685.1, EVALUE 0.00e+00
gtgacctgggcgttggtgcccgagtctctgtctgtggcgctgacgctgccgatgtgcagggcggggctgttgttctcgcggacgaacagggtgtaggaggtttgggtgaaggcgggggcgttgtcattgacgtcggagaccagcacggttatgttgtgctcggttttcagcctgggtgtcccgaagtcggtgacggtgatggtgatgttgtattcggatctggtctcccggtccagggccgtgcttatcaccagagtgtaaaagttctcaacagaaggtttcaagaaaaaaggaagatcatcttggatggagcacaccatccttccgttgtctccggagtcaggatctgaaacgctgaatacagcaatgagggtgtcctgcaagttttctgggatctgattgataagtgtcgacatagttagttccggaggattgtcattcaaatccatcacttggacaaataccacacaagttccagataggcccccaccatctgtcgcctg

SEQ ID NO: 6722 - DNA, 574 bp, Homo sapiens
  MAP TO AL121984.14; EXPRESSED IN ADULT LIVER, SIGNAL = 1.2; EXPRESSED IN PLACENTA, SIGNAL = 1.4; EXPRESSED IN BRAIN, SIGNAL = 1.8; EXPRESSED IN HELA, SIGNAL = 3.3; EXPRESSED IN LUNG, SIGNAL = 1.2; EXPRESSED IN FETAL LIVER, SIGNAL = 3.6; SWISSPROT HIT: Q00056, EVALUE 9.40e+00; EST_HUMAN HIT: BI063117.1, EVALUE 0.00e+00; NT HIT: AL163227.2, EVALUE 1.00e-112
gcatgagaaagatccgcccccataattcaattatctcccaccaggtccctcccatgacatgtgggagttgtgggagctacaattcaagatgagatttgggtggggacatagccaaacatatcattctgctcctggcccctcccaaatcccatgtcctcacatttcaaaaccaatcatgccttcccaacagtcccctaaagtcttaactcatgtcagcattaactcaaaagtccacagtcgaaagtctcatctgagacaaggcgagtcccttctgcctatgagcctgtaaaatcaaaagtaagttagttacttcctagatacaatgggggtacccactggataaatacacccattccaaatgggagaaattgaccaaaacaaggggataaaggccccatgcaagtctgaaatccagtggggcagtcaaatcttaaagctccaaaatgatctcctttgactccatgtctcacatccaggtcacactgatacaagtgggctcccatggccttgggtagctctgcccctgtggctttgtagggtatagcccccctcctggctgctttcatgggctggc

SEQ ID NO: 6723 - DNA, 559 bp, Homo sapiens
  MAP TO AL049779.5; EXPRESSED IN ADULT LIVER, SIGNAL = 1.5; EXPRESSED IN PLACENTA, SIGNAL =   3; EXPRESSED IN BRAIN, SIGNAL = 1.7; EXPRESSED IN HEART, SIGNAL = 1.8; EXPRESSED IN LUNG, SIGNAL = 1.5; EXPRESSED IN BONE MARROW, SIGNAL = 1.7; EXPRESSED IN FETAL LIVER, SIGNAL =   2; SWISSPROT HIT: Q09804, EVALUE 2.70e-01; EST_HUMAN HIT: BF878079.1, EVALUE 0.00e+00; NT HIT: gi14784246, EVALUE 0.00e+00
tgggcctctggggaagggacccaaacatttgtagtctgtagaatttcacaagaattgtgatatacagtattgagaatactggttatgcgtggctgtttaaagtcagatggacttgggttctaagctctactctaccacttaccaccctgggcaagtttcctaacccctctgagacctggtctcctcttaataacatgagattatagtggggcttctctctagagttaccgtgaggattaaatgtgataatatacccagtgaataccaaatattaccactagtgaaaaagggaggcatagcattctgctcaccacatgccacagcacagctcaggactgcatcctttatgctgctcaaatcgtccacatctcgcccgtacacttcagtgagctgaagggcccgggaccaatctctggccaccaaggattcctcaaaagcctcactcagtacatctagggcaatgggagaatgtaggcccaggagaacggtagaaagactggcccaaccacagagattcactgccagactctgcccctgctgcaaagaccctcgcaggggc

SEQ ID NO: 6724 - DNA, 528 bp, Homo sapiens
  MAP TO AL163284.2; EXPRESSED IN HELA, SIGNAL = 1.5; EXPRESSED IN ADULT LIVER, SIGNAL = 1.9; EXPRESSED IN PLACENTA, SIGNAL = 2.2; EXPRESSED IN BRAIN, SIGNAL = 1.9; EXPRESSED IN HEART, SIGNAL = 2.2; EXPRESSED IN BONE MARROW, SIGNAL =   2; EXPRESSED IN FETAL LIVER, SIGNAL = 1.9; EST_HUMAN HIT: BF699585.1, EVALUE 3.00e-03; SWISSPROT HIT: P37276, EVALUE 3.70e+00; NT HIT: AL163284.2, EVALUE 0.00e+00
ccaccgcgaagaggaacctggtaggtaactgagagtcttctgaaattttcggagtacagcgtggacaggtgtaatagagaaatagagggagaggactattgagaatataaaaaggccattacagaaagttacagcagggctgtggctttgccagataattgattttgaaaggtgacatagttatttgcagtttatctgcttgcagcacaaaaatagggcaaatcactgaaatctttcttaggggattgatgttcattttatgacatccttcaatgagcagaaacataaaagccaccatcacaccaccagcagcaggaccactgccatgcacgaagctctgaaacaaacagggggtactcctgaaaggctaaggaatgaacaggaacagagtgagcttgcctgtccagggagtgggcacactggccaaacccaggctgaccctgtgtgcaggtgggcacccattgctggcctgtatcgcacaggctttcctttgggtagggatggctttgtgcatgtggctgcctggga

SEQ ID NO: 6725 - DNA, 501 bp, Homo sapiens
  MAP TO AC021092.1; EXPRESSED IN ADULT LIVER, SIGNAL = 3.2; EXPRESSED IN PLACENTA, SIGNAL = 2.6; EXPRESSED IN HELA, SIGNAL = 6.6; EXPRESSED IN LUNG, SIGNAL = 2.8; EXPRESSED IN BONE MARROW, SIGNAL = 3.2; EXPRESSED IN FETAL LIVER, SIGNAL = 2.8; NT HIT: gi12741365, EVALUE 0.00e+00; SWISSPROT HIT: Q9UK10, EVALUE 1.00e-105; EST_HUMAN HIT: BG211495.1, EVALUE 2.00e-75
cgttattctcaccagagagcgcacagtggagaaaagccatatagatgtgaggagtgtgggaagggctacaaaaggaggttggatcttgactttcatcagagggtccacagaggagagaaaccctataattgtaaggaatgtgggaagagctttggctgggcctcgtgtcttttgaatcatcagagaatccacagtggagaaaaaccatttaaatgtgaagaatgtgggaaaagatttactcagaattcacaactttatacccatcgtagagtccacagtggagaaaaaccattcaaatgtgaagagtgtgggaaaagatttactcagaattcacaactttattctcatcgcagagtccacactggagtaaagccatacaaatgtgaagagtgtgggaagggcttcaacagtaagtttaatcttgacatgcaccagagggtccacaccggagagagaccttataattgtaaagaatgtgggaagagctttagccgggcctca

SEQ ID NO: 6726 - DNA, 507 bp, Homo sapiens
  MAP TO AC004643.1; EXPRESSED IN ADULT LIVER, SIGNAL = 1.6; EXPRESSED IN PLACENTA, SIGNAL = 1.6; EXPRESSED IN LUNG, SIGNAL = 1.4; NT HIT: AJ130941.1, EVALUE 4.00e-91; SWISSPROT HIT: O95484, EVALUE 3.00e-19; EST_HUMAN HIT: BE264576.1, EVALUE 0.00e+00
cacaccacctgggccaccacgatgctgttgccgatgaaggcggtcaccttccacaggggcagggcgcaggacaccagggtccccagccagcccagcacagccagggtcatgcccagcagttctaagccggtcgaagccatctggcccctcggttaggtcttctcagccccaggcggcctaggtgactcagagggtgtgtctggtgtgctgggtgggtgtctctgtgtccagcaggagggggaaggcttgttggtgtccccaagccaggccagtcctcagttccatgaaaggcgcctcttgaaaggcgcctcctctccgtgcctcttgcaggtgtttctggtcctcgcggagcacaaagcagactcgtagtcccgctcggctgagtggtgggtgtcacctcgaggggcctccgcccatcggatgccctgagggtgctgctgctcttaccaccccgctgtcacacctgggctgagctcgcacaggccctccagacgcactgccaggctg

SEQ ID NO: 6727 - DNA, 521 bp, Homo sapiens
  MAP TO Z83822.1; EXPRESSED IN LUNG, SIGNAL = 1.7; EXPRESSED IN HEART, SIGNAL = 1.6; EXPRESSED IN BONE MARROW, SIGNAL = 1.7; EXPRESSED IN HELA, SIGNAL = 3.5; EXPRESSED IN ADULT LIVER, SIGNAL = 1.6; EXPRESSED IN PLACENTA, SIGNAL = 1.7; EXPRESSED IN BRAIN, SIGNAL = 1.4; NT HIT: gi14758563, EVALUE 0.00e+00; SWISSPROT HIT: P32442, EVALUE 1.90e-01; EST_HUMAN HIT: BF975529.1, EVALUE 1.80e-01
ccgaggcctcccaaatcccctggatgtgcctgtcagaatttacacagagcccaatgtctggggccataaagagatcagaagataagcaaggacacagaagcccacactattatgagctgactgaccattattaaaccagaagtgggacctccatttctacacagaccgaggcctatatactagtcacagctggtcaccttaccctctccaggtcctggcgtagatgcataaacattctcattcgagtgtgaatgctttcctcttttggctgcaccagcccattttcttcatcctcctttggaggaaataatggcttattgaagttacttttccgcttcagtttccagtagttatagataaagtccacagctagcgtgggcatacccagctctgcggccacatcttccactcgtaccaaggaatagaactcctcctccagctcccgaagcttctgtgcccgcaggctggttttctcacttttggcctggctctgctctttagccctgtggtgggggtactca

SEQ ID NO: 6728 - DNA, 519 bp, Homo sapiens
  MAP TO Z69720.1; EXPRESSED IN BONE MARROW, SIGNAL = 1.6; EXPRESSED IN HELA, SIGNAL = 0.93; EXPRESSED IN ADULT LIVER, SIGNAL = 1.4; EXPRESSED IN BRAIN, SIGNAL = 1.3; EXPRESSED IN LUNG, SIGNAL = 1.3; EXPRESSED IN HEART, SIGNAL =   2; NT HIT: gi15320794, EVALUE 1.90e+00; SWISSPROT HIT: Q02817, EVALUE 2.50e-01
cgctggccccttcttcccaccaccctatctccgggaagccctcctgaatgctccccgcgctgaccccttcttcccaccaccctatctccgggaagccctcctgaatgctcccccggcgagcatctaagctccagtgcccctcctccccagcccgtgatactgaccatggcctttggcaccacagggcttcgtgggctgaggtgaaggtagcctggctgtccagctgacctatctggcctaaaaacgagaggtgcaggggatgtggttggtccccagtgctctgctgttaactctggggctccgagcagtgacacaactgttggccgttaccaggaccatggtccaggctggggcaccgtggggcagctgggcctactgctcagaaagccggagggtgggagctgagtatgagggtcccttgtggccacctcagcagcccaggtttaggggacttcacgggctctgggattgcccaggtagctggtgtggggacatccttggggtcctgtgccttccgtg

SEQ ID NO: 6729 - DNA, 502 bp, Homo sapiens
  MAP TO AL121723.35; EXPRESSED IN HEART, SIGNAL = 2.8; EXPRESSED IN LUNG, SIGNAL = 2.8; EXPRESSED IN HELA, SIGNAL = 2.2; EXPRESSED IN ADULT LIVER, SIGNAL = 3.4; EXPRESSED IN FETAL LIVER, SIGNAL =   2; NT HIT: gi14772414, EVALUE 0.00e+00; EST_HUMAN HIT: AL563368.1, EVALUE 0.00e+00; SWISSPROT HIT: P16084, EVALUE 5.30e-01
tggtctggccctgcaggatgactggagccagctggaactggctcacagacaggacatctgccttctcactcaactccactgctctctgggctaagaagatctcaagttccatgagctcatcaaggaactgattctgggtctcagtgtattcaagaagtgtcagagcatctgggcccctggcaacaccttctggagcctggattcctgcttccaccactgtgatctgcaaagcaacagcatcgtctccctagtctatcccatcatctccaaggtcctttgagtctgattccgggaagatgccccagtcgattccagcagcctcggcagagatgccagcgtcagtccccccagacactgcctctaccccaaagtcgccccagtcaatcgcgtcttctgccacctgctcaggaagctcctcgaggtggggtcgctccacgacagagggctctgtccctgtcctccactcgtacaccgttgagtttccccgcttctgcacgaacca

SEQ ID NO: 6730 - DNA, 532 bp, Homo sapiens
  MAP TO AL022312.7; EXPRESSED IN HELA, SIGNAL = 7.5; EXPRESSED IN ADULT LIVER, SIGNAL = 8.2; EST_HUMAN HIT: BI862186.1, EVALUE 0.00e+00; SWISSPROT HIT: P18848, EVALUE 1.00e-77; NT HIT: gi13655140, EVALUE 0.00e+00
ccgaccaggttgcccccttcaccttcttacaacctcttcccctttccccaggggtcctgtcctccactccagatcattcctttagtttagagctgggcagtgaagtggatatcactgaaggagataggaagccagactacactgcttacgttgccatgatccctcagtgcataaaggaggaagacaccccttcagataatgatagtggcatctgtatgagcccagagtcctatctggggtctcctcagcacagcccctctaccaggggctctccaaataggagcctcccatctccaggtgttctctgtgggtctgcccgtcccaaaccttacgatcctcctggagagaagatggtagcagcaaaagtaaagggtgagaaactggataagaagctgaaaaaaatggagcaaaacaagacagcagccactaggtaccgccagaagaagagggcggagcaggaggctcttactggtgagtgcaaagagctggaaaagaagaacgaggctctaaaagagagggcggattccctggc

SEQ ID NO: 6731 - DNA, 503 bp, Homo sapiens
  MAP TO AL035425.11; EXPRESSED IN LUNG, SIGNAL = 2.3; EXPRESSED IN BONE MARROW, SIGNAL = 2.5; EXPRESSED IN FETAL LIVER, SIGNAL = 2.4; EXPRESSED IN ADULT LIVER, SIGNAL = 2.1; EXPRESSED IN PLACENTA, SIGNAL = 2.6; EXPRESSED IN HELA, SIGNAL = 2.6; EXPRESSED IN BRAIN, SIGNAL = 2.3; EST_HUMAN HIT: BG388300.1, EVALUE 2.80e+00; SWISSPROT HIT: P33349, EVALUE 7.00e-01; NT HIT: gi4504732, EVALUE 0.00e+00
tgagccctgaccacctcgggatccctgtccctcgcctgaacactggtttcctcccgagctatggctactggagccttggccatttgagccctggccacctcctgagccccggccatttcctgagccccaattgttcataggcatgtagtcacctccgcttccttcctgatcttctttgccctggggattgccttcctccccaaagttgccagagccagaaccagacacttcagaagacaggcgagctccattgttcggggcttctgcagggtgccggggacgtgctgggctgggtgctaagcggcgaaaaaagctggccggcactgaaaccgctctccttgacctgcgccctctgggcaggtgcagtcttcctcgcctggagtgggccacaggctcgctgggtgttacgaagcgcctggtgaaaagcatctcgtcttccccgtcgccgatggccctgaggtggcaaaactgctcaaagcgggaccttctgagccagcctcccg

SEQ ID NO: 6732 - DNA, 543 bp, Homo sapiens
  MAP TO AP000350.1; EXPRESSED IN ADULT LIVER, SIGNAL = 1.9; EXPRESSED IN PLACENTA, SIGNAL = 1.8; EXPRESSED IN HELA, SIGNAL = 2.1; EXPRESSED IN FETAL LIVER, SIGNAL = 2.2; EXPRESSED IN BRAIN, SIGNAL = 1.6; EXPRESSED IN BONE MARROW, SIGNAL = 2.1; EXPRESSED IN HEART, SIGNAL = 2.1; EXPRESSED IN LUNG, SIGNAL = 1.9; EST_HUMAN HIT: BE179749.1, EVALUE 8.00e-07; SWISSPROT HIT: P08548, EVALUE 2.00e-40; NT HIT: AF240786.1, EVALUE 0.00e+00
ccacaaagaaaagcccaggaccagatggttttactggtgaattcaaccaaaagcttgaagaactaacacaaagccttcacaaactcttccaaaaaatagaacaggaagaaatatttttcaactcatactatgaggccagaattactctgataccaaagacagaaaaagacattacaagaaaataaagttacaaagcaatatccttataaatatagatgtaaaaatcctcacaaaatattagcaaatcaaatccagccgcatattaaaaggatcatacaccttgaccaggtaggatttatcccaggagtacaaatgcagttcaacatacaaaaatcaatcaatgtagcataccatgttaataaaaagtcacatgatcatcctaatgcagagaaggcatttgacaaaatctaacatccttttacgataaaattactcagcagatgaagatgagaaaggaacttcctcaacttggcaaaaagcatctatgaaaaacctataactaacaccacacttcactcattgtgaaagatggagcatttcccc

SEQ ID NO: 6733 - DNA, 540 bp, Homo sapiens
  MAP TO L81800.1; EXPRESSED IN ADULT LIVER, SIGNAL =   4; EXPRESSED IN PLACENTA, SIGNAL = 4.1; EXPRESSED IN BRAIN, SIGNAL =   9; EXPRESSED IN HELA, SIGNAL = 4.8; EXPRESSED IN HEART, SIGNAL = 3.1; EXPRESSED IN BONE MARROW, SIGNAL = 4.8; EXPRESSED IN LUNG, SIGNAL = 3.4; NT HIT: AL163227.2, EVALUE 2.00e-93; EST_HUMAN HIT: BE420422.1, EVALUE 0.00e+00; SWISSPROT HIT: O35787, EVALUE 2.00e-01
tggcagcattttgcccctgccctagagatttgtggaattttgaacttgagagagatgatttaggctatctggtgaaagaaatttctaagcagcaaagcattcaagaggtgacttgggtgctgttaaaggcattcagtttaataagggaagcagaatctaaaagtttggaaaatttgcagcctgacaatgagatagaaaagaaaatcccattttctgaggagaaattcaaggcggctatagaaatttgcataagtaacaagaagcccaatgttaatccccaagacaatgaggaaaatgtctccaggacatgtcagaggtcttaatggcagcctcacatgcctggaggcctaggaggaaaaagtggtttcgtgggccggtcccagggtctccgtgctgtgtgcaaccaagggacttggtgccctgagtcccagccgctccagctgtggctgaaaggggccaacacagaactcaggtcatggcttcagagggtgcaagccacaagccttggcatcttccatgtggtgctgagcctgcaggtgc

SEQ ID NO: 6734 - DNA, 508 bp, Homo sapiens
  MAP TO AB003151.1; EXPRESSED IN PLACENTA, SIGNAL = 6.3; EXPRESSED IN HELA, SIGNAL = 9.1; EXPRESSED IN ADULT LIVER, SIGNAL = 5.8; EXPRESSED IN BRAIN, SIGNAL = 5.5; EXPRESSED IN BONE MARROW, SIGNAL = 4.9; EXPRESSED IN LUNG, SIGNAL = 4.7; EXPRESSED IN HEART, SIGNAL = 7.8; NT HIT: gi14730333, EVALUE 1.00e-125; EST_HUMAN HIT: AL536019.1, EVALUE 1.00e-125; SWISSPROT HIT: Q9Y316, EVALUE 2.00e-31
ctgggcagcagcggggacgccgggggccggggccagggctttccgggcttaggtgaggccgccgtgggccccatcttccggcggtcgccggagtttgtggtgattgttgctgccgccgccacccccccggctgccatctcctcctcctgggccgccgcctcctcctcttcctcctcctcctgggccgggctgatcccctccccgctgccgcctcctcctgggctgggcccgcggtgtctcgtcccctcgcggagccgctcctgccgccgccgccgccgcctcctcattcatcctcgtgcaccataggcggcacaggcaccaagatgtccaaccgagtggtctgccgagaagccagtcacgccgggagctggtacacagcctcaggaccgcagctgaatgcacagctagaaggttggctttcacaagtacagtctacaaaaagacctgctagagccattattgccccccatgcaggatatacgtactgtgggtcttgtgctgcccatgc

SEQ ID NO: 6735 - DNA, 600 bp, Homo sapiens
  MAP TO AC008103.7; EXPRESSED IN ADULT LIVER, SIGNAL = 6.2; EXPRESSED IN HELA, SIGNAL =  13; EXPRESSED IN LUNG, SIGNAL = 5.7; EXPRESSED IN BONE MARROW, SIGNAL = 6.7; EXPRESSED IN FETAL LIVER, SIGNAL = 5.8; SWISSPROT HIT: P10266, EVALUE 1.00e-100; NT HIT: Y10391.1, EVALUE 0.00e+00; EST_HUMAN HIT: BF107334.1, EVALUE 0.00e+00
ccaatgctggactggcaatagcatctgataagatccaaacctctactccttttcattatttagggatgcagatagaaaatagaaaaattaagccacaaaaatagaaataagaaaagatacattaaaaacactaaatgattttcaaaaattactaggagatattaattggattcggccaactctaggcattcctacttatgccatgtcaaatttgttctctatcttaagaggagactcagacttaaatagtaaaagaatattaaccccagaggcaacaaaagaaattaaattagtggaagaaaaaattcagtcagcgcaaataaatagaatagatcccttagccccactccagcttttgatttttgccactgcacattctccaacaggcatcattattcaaaatactgatcttgtggagtggtcattccttcctcacagtacagttaagacttttacattgtacttggatcaaatggctacattaatcggtcagacaagattacgaataataaaattatgtggaaatgaccaagacaaaatagttgtccctttaaccaaggaacaagttagacaagcctttatcaattctggtgcatggca

SEQ ID NO: 6736 - DNA, 518 bp, Homo sapiens
  MAP TO AP000190.1; EXPRESSED IN ADULT LIVER, SIGNAL = 2.1; EXPRESSED IN BRAIN, SIGNAL = 2.7; EXPRESSED IN HEART, SIGNAL = 3.1; EXPRESSED IN LUNG, SIGNAL = 2.6; EXPRESSED IN HELA, SIGNAL = 1.7; SWISSPROT HIT: P08640, EVALUE 7.00e-06; NT HIT: gi15055516, EVALUE 0.00e+00; EST_HUMAN HIT: BF869988.1, EVALUE 0.00e+00
tggattcctttgcagcagcaccagtgcctactacaacactggtgttgaagtcatctgagccagttgtaacaatgtcagtggagtatcagatgaagtctgtgctgaaatctgtggagagcacatctccagagccatcaaagatcatgttggtagagcccccagtagcaaaagtgttagagccttcagaaacccttgtggtatcatcagagacacctactgaggtgtaccctgagccaagcacatcaacaacaatggattttccagagtcatctgcaattgaagcgctaagattgccagagcagcctgtagacgtaccatcggagattgcagattcatccatgacaagaccgcaggagttgccggagctgcctaagaccacagcgttggagctgcaggagtcgtcggtggcctcagcgatggagttgccggggccacctgcgacctccatgccggagttgcaggggccccctgtgactccagtgctggagttacctgggccctctgctaccccggtgcca

SEQ ID NO: 6737 - DNA, 571 bp, Homo sapiens
  MAP TO AC009464.7; EXPRESSED IN ADULT LIVER, SIGNAL = 1.8; EXPRESSED IN HELA, SIGNAL = 4.5; EXPRESSED IN PLACENTA, SIGNAL = 2.1; EXPRESSED IN BONE MARROW, SIGNAL =   2; EXPRESSED IN FETAL LIVER, SIGNAL =   2; EST_HUMAN HIT: BG391234.1, EVALUE 0.00e+00; SWISSPROT HIT: P16143, EVALUE 3.70e-01; NT HIT: gi14768468, EVALUE 0.00e+00
tgtctgcgttccgctcatggtaattcctgctggagcaatgagctgagttgcatttccctgactcacagttgcaggtgcaaaactcgtatttggcacaactgttatggttacctggttgccagaagtcccttggaaaatggttgctgggctatttgagatcagtggacctggcaatatttgtaagttcgaaatgggcacagtttgtactccccctgagggtggcattgcacttgggaccaactgaacattttgctgcccaaccaatagctgctgagctggagtttgcccctgcactccaaaacctgcggcttggttactggccacctgatagaccacctgagggctaggagctcttgcattattagggggaggaatctgtggagctgggagaataagcttaccacctggtgttgaaggaccacgtttcggaagcagaagctgtttaatcagactcgactcaccagaggcaggctgaccaactcctgcattcgactgttgaggttgaacttgcatctgtacttgttggggctgctgaacttgtacttgtacctgctgtggtgggggtgctggt

SEQ ID NO: 6738 - DNA, 543 bp, Homo sapiens
  MAP TO AF186193.1; EXPRESSED IN BRAIN, SIGNAL = 1.7; EXPRESSED IN HELA, SIGNAL =   1; EXPRESSED IN ADULT LIVER, SIGNAL = 1.6; EXPRESSED IN BONE MARROW, SIGNAL = 1.9; EXPRESSED IN FETAL LIVER, SIGNAL = 2.3; NT HIT: gi16177749, EVALUE 4.00e-11; EST_HUMAN HIT: BI917324.1, EVALUE 0.00e+00; SWISSPROT HIT: P13683, EVALUE 1.00e-49
tgcacagagtgcgggaaggccttcaagcaaagctccatcctgctgcggcaccagctgatccacactgaggagaagccgttccagtgcggcgagtgcgggaaggccttccggcagagcacgcagctgggtgcccaccaccgcgtccacacccgcgagcggccctacgcatgcggcgagtgcggcaaggccttcagccgcagctcccggctgctgcagcaccagaagttccacaccggggagaagcccttcgcgtgcacagagtgcggcaaggcgttctgccgcaggttcaccctcaacgagcacggccgcatccacagcggggagcggccctaccggtgcctgcggtgtgggcagcgcttcatccgagggtcctcgctcctgaagcaccaccggctgcacgcgcaggagggtgcccaggacggcggcgcggggcagggcgccctgctcggagctgcgcagaggccccaggcgggggacccgccccacgagtgcccggtgtgcgggaggccgttccgacacaactccctgctgctgctgcacctg

SEQ ID NO: 6739 - DNA, 518 bp, Homo sapiens
  MAP TO AC004761.1; EXPRESSED IN LUNG, SIGNAL = 1.7; EXPRESSED IN HEART, SIGNAL = 1.7; EXPRESSED IN ADULT LIVER, SIGNAL = 1.6; EXPRESSED IN BRAIN, SIGNAL = 1.8; EXPRESSED IN HELA, SIGNAL = 2.1; EXPRESSED IN FETAL LIVER, SIGNAL = 2.2; NT HIT: AL163227.2, EVALUE 3.00e-98; EST_HUMAN HIT: AU124571.1, EVALUE 0.00e+00; SWISSPROT HIT: P10221, EVALUE 9.50e-01
tgttgtaggagggaccgggggggggaggtaattgaatcatgggggccagtctttcccatgctattcttgtgatagtaaataagtctcatgagagctaatgggtttatcaggggtttccacttttgcttcttccccctttttctcttgccaccaccatgtcagaagtgtcttttgcctccccccatgattctgaggcctccccagccatgtggaggtgtaagtccaattaaacttctttttcttcccagtcttgggaatgcctttatcagcagtgtgaaaacagactaatacagtaaattgttaccagtagagtagggcactgctgaaaagctacctgaaaatgtggaagcgactttggaactgggtaataggcagaggttggaacagtttggagggatcagaagaagacaggaaaatgtgggaaagtttggaacttcctagagacttgttgaatggctttgcccaaaatgctgatagtaatatggacaataaagtccgggctgaggtggtctcagatg

SEQ ID NO: 6740 - DNA, 600 bp, Homo sapiens
  MAP TO AL096710.8; EXPRESSED IN ADULT LIVER, SIGNAL = 1.7; EXPRESSED IN PLACENTA, SIGNAL = 2.1; EXPRESSED IN HEART, SIGNAL = 3.1; EXPRESSED IN BONE MARROW, SIGNAL = 1.9; EXPRESSED IN FETAL LIVER, SIGNAL =   2; EXPRESSED IN HELA, SIGNAL = 1.4; EXPRESSED IN BRAIN, SIGNAL = 1.7; EST_HUMAN HIT: BG996494.1, EVALUE 0.00e+00; SWISSPROT HIT: Q99024, EVALUE 1.50e+00
gccacattttggcacctgggctttccattctcatctcttatacctcctccttcttcatcaatgccatcatcatcatcgtcatcctgatcattactgtcatatatataatccccataactttcttcactttgcatagaatctaaatgatcagtatcggagtgaaattcctgtccagttacatactcttcctttcttcctctccaactgccactgtcatcaaattttaatgatgcagtgaagctctcttttcctcctacaatatcataatcagtcaatgagtcagattcatcaccttcaaggatatttgtgcattccctttctgatccagtttccagtgactgtccattcaccttatctgagccaacaggatttaaatgtattttttcaccagaatctaattcatctttctcaacatccataaggaaatcctgaagacaatgtgctttgttcttcacacttaagctaccaactggtgccccctggggaaccatggaattttcattctcttttgagacatcataaaaaacatcagcaggagaagccgtctcatcattttcctcttgcagtgtgtcgtagtcctcagggtgcaggcaatcacga

SEQ ID NO: 6741 - DNA, 504 bp, Homo sapiens
  MAP TO AL121774.3; EXPRESSED IN BONE MARROW, SIGNAL = 5.4; EXPRESSED IN ADULT LIVER, SIGNAL = 3.4; EXPRESSED IN PLACENTA, SIGNAL = 3.5; EXPRESSED IN HELA, SIGNAL = 7.6; EXPRESSED IN BRAIN, SIGNAL = 3.8; EXPRESSED IN HEART, SIGNAL = 4.3; EXPRESSED IN LUNG, SIGNAL = 4.2; EXPRESSED IN FETAL LIVER, SIGNAL = 4.6; SWISSPROT HIT: P11277, EVALUE 6.00e-04; NT HIT: U00828.1, EVALUE 1.00e-81; EST_HUMAN HIT: BI818729.1, EVALUE 2.80e+00
gctggccgagatggaaatgccagacaccctggaggacctggaggtcgtgcagcacaggtcagagttaactcatcttttcctcacgtccctgtacccaggcctgggcaccatctcccacctagtttggtaatagtctctggatcagcaaaggtctctttgagaggccctgggatgtcctttgttgcaaagtcctggcattaggagtcataagttctattctggctctgtggcctggggtacttcaccctttggggccttgtgttcctcaaacaaagggaatttatctagtccagttattcaattacttttcagcaatagcagtctttgctcagatgaattgtgtatggaacccccaggtcacacagaggaaaaatggagctactctggagaaggaggttgagaggccaggaccctgccagctctagctttctgtggcagtccttaagccaggagactctgaggggccacagagagaatttgcaaaccccctgtctgcaaggccac

SEQ ID NO: 6742 - DNA, 502 bp, Homo sapiens
  MAP TO AL023585.1; EXPRESSED IN HELA, SIGNAL = 2.1; EXPRESSED IN ADULT LIVER, SIGNAL = 1.6; EXPRESSED IN BRAIN, SIGNAL = 1.4; EXPRESSED IN HEART, SIGNAL = 1.2; EXPRESSED IN BONE MARROW, SIGNAL = 1.5; EXPRESSED IN FETAL LIVER, SIGNAL = 1.2; EXPRESSED IN LUNG, SIGNAL = 1.4; EST_HUMAN HIT: BF879505.1, EVALUE 7.00e-04; SWISSPROT HIT: O60810, EVALUE 9.00e-22; NT HIT: AF184614.1, EVALUE 4.80e-01
caggcatgagccaccgtccctgacctatttttcatcatcttaacttagacacacgtcctcaggaagaattcagaaaggcaccctcactagatctgaaccccccagtagctagcttcctagtatggcaacctctctatagcatctcccctagctgatccctctgcctctattgggatggttgcatgatacccatttcaggacagggccgccaacaggacaatgtatggacattctagtgtccccttcactgtttcatcctcataggctggctcacagtagatgcccactagcgtttagtgaaacaggctctgctgtggtctgcagagaaagctcaccaccctccctcacctgagcagctggtccaggtggccttcgaggaaagaaacagagttcatataaagcttttggaggcagtgcagcttgaggaactgagtggtgaactgggtaacaatctccttcttctgctctggggaaacgtagcgagagacatccatgtgggaga

SEQ ID NO: 6743 - DNA, 517 bp, Homo sapiens
  MAP TO AC022845.2; EXPRESSED IN BONE MARROW, SIGNAL = 2.4; EXPRESSED IN FETAL LIVER, SIGNAL = 2.5; EXPRESSED IN ADULT LIVER, SIGNAL = 2.1; EXPRESSED IN HELA, SIGNAL = 0.76; EXPRESSED IN BRAIN, SIGNAL = 2.2; EST_HUMAN HIT: BE080233.1, EVALUE 4.00e-98; SWISSPROT HIT: O13433, EVALUE 4.20e-01; NT HIT: AF094674.1, EVALUE 4.90e-01
ccccattcccttttcctgggctttttgaatcttggctatagtccatatttttactcccttgacttggggtgccatagctttcaaatggttgcaatatacctgggccttcctttggggtgcctttttgggacaaattcatgaatttggatttgatattcacattattatcttggcaactttcagaaaccagcatatctccctctgcttggaatggtgagtcagatctcacaggcttcaattcaattttgctgggtgatagggtctttgagccattttctcttaaagtagtgtcatctgtcaccaagtcaacagcaacctgtgattttgagtctgttttttctttggactctattcctcggggatgttggaggaatgacttattgtcatctgaataagaacttcggttaaaccagtctagaactttaaatatggaatcatcagttgacttctttatctcagtggcatatggaccagaacgtgaagatgtcttagcttttagagccgggagaggaggggg

SEQ ID NO: 6744 - DNA, 529 bp, Homo sapiens
  MAP TO AC020667.3; EXPRESSED IN PLACENTA, SIGNAL = 4.5; EXPRESSED IN HELA, SIGNAL = 2.4; EXPRESSED IN BRAIN, SIGNAL = 1.4; EXPRESSED IN BONE MARROW, SIGNAL = 2.1; EXPRESSED IN ADULT LIVER, SIGNAL = 2.2; NT HIT: gi16161201, EVALUE 5.00e-01; EST_HUMAN HIT: BI560057.1, EVALUE 0.00e+00; SWISSPROT HIT: P12107, EVALUE 4.00e-04
gatggtggaggggctgtggcccgagcacccactctgccctccggccccaccggctcctggctgcagctcgtgcctcctgtctcctgcagcctcctggggccacaccttgacaaaggtgactttggtcagctctccggtccagaccccccaggtgaggtgggcgaaagagcacctgatggagcctcccagtcctctcatgagcctatggaagatgctgctcccattctctccccgttagcttccccggatcctcaagccaagcatcctcaggatctggcctccaccccatcaccaggcccaatgaccacctcagtctcctccctaagtgcctcccagccaccagaaccttcccttcccctagaacacccctcacccgagccacctgcacttttccctcacccaccacacacccctgatcctctggcctgctctccgcctcctccaaaaggcttcactgctcctcccctgcgggactccacactgataactccatctcactgtgactcagtggcacttccactgggcaccg

SEQ ID NO: 6745 - DNA, 532 bp, Homo sapiens
  MAP TO AC002093.1; EXPRESSED IN BONE MARROW, SIGNAL = 1.2; EXPRESSED IN HELA, SIGNAL = 0.67; EXPRESSED IN ADULT LIVER, SIGNAL = 1.4; NT HIT: gi16164744, EVALUE 0.00e+00; EST_HUMAN HIT: AW576721.1, EVALUE 1.00e-98; SWISSPROT HIT: O14994, EVALUE 4.40e-01
  unsure 59
  unsure 153
  unsure 345
  unsure 490
ccatccactctccccactccccaaattcaaggtcatcagggttctggtggcctggagantgggtacaacattctcatactcaggttcctcctgcctttcctcttcagcctgcttctggggatcctgttctggggagccacagccagagactgngctcctgggctctccttgaactctcggtgccagcccccagcccccggaccgcttcctctggtctgactgccataggccctgtggccccaggaagcccagcttttggggctgagttggggctctggccgacagagccagaggcaaggccagggctgccctttttccgattcagggcctggcgcggaggcttangggatggccctcttgaccttggcttccgcctggcctttctggaagctaccaaaatggcggaagacagagcggacagggccttcggatccgcggggcttccctgccagcatgtagatcgtggtcacagggcccgagctctcctggnacgctgccctcaatggcttccacgtgctcagccactgtccgg

SEQ ID NO: 6746 - DNA, 501 bp, Homo sapiens
  MAP TO AL138848.2; EXPRESSED IN LUNG, SIGNAL = 9.3; EXPRESSED IN HEART, SIGNAL =  17; EXPRESSED IN PLACENTA, SIGNAL =  14; EXPRESSED IN BRAIN, SIGNAL = 6.5; EXPRESSED IN ADULT LIVER, SIGNAL = 9.7; EXPRESSED IN HELA, SIGNAL =  24; EST_HUMAN HIT: BE746020.1, EVALUE 0.00e+00; SWISSPROT HIT: P15880, EVALUE 5.00e-74; NT HIT: gi14739587, EVALUE 0.00e+00
ggtttcggcagtggcatccggggccggggtcgcagccgtagacggggccggggccgaggccgcggagctcgcggaggcaaggccgaggataaggagtggatgcccgtcaccaagctgggctgcttggtgaaggacatgaagatcaagtccctggaggagatctatctcttctccctgcccattaaggaatcagagatcattgactttttcctgggggcctctctcaaggatgaggttttgaagattatgccagtgcagacgcagacccgtgctggccagcgcaccaggttcaaggcgtttgttgctatcggggactacaatggccacgtcggtctgggtgttaagtgctccaaggaggtggccaccgccatccatggggccatcatcctggccaagctctccattgtccccgtgcgcagaggctactgggggaacaagattggcaagccccacaccgtcccttgcaaggtgacaggccgctgcggctctgcactggtgcac

SEQ ID NO: 6747 - DNA, 509 bp, Homo sapiens
  MAP TO U75931.1; EXPRESSED IN BONE MARROW, SIGNAL = 1.5; EXPRESSED IN LUNG, SIGNAL = 1.4; EXPRESSED IN BRAIN, SIGNAL = 1.2; EXPRESSED IN HELA, SIGNAL = 1.3; EXPRESSED IN ADULT LIVER, SIGNAL = 1.4; SWISSPROT HIT: Q08696, EVALUE 3.20e-01; EST_HUMAN HIT: AV756800.1, EVALUE 1.80e-01; NT HIT: X97561.2, EVALUE 1.90e+00
gggtctggccaagaaaacggtgtcacctggagaaaggaaactgagaaggagcaaagagcaaccagagacacaagaatgtattatctcagaaaccaaagaaagagaggctgtggagaaggacaaagcaatcaagccatggagaggaagagctgacatgaagaaggaaccaaagaaagaagaagaaggagaaggagaaggagaagcagaagaggaagaggaagaagaaggaggaggaggaggaaagaaagaaagaaagaaagaaagagagagaaagaaagaaatgaggaggaggaaggagaaagagaggaggaaggagaaagaaggaggagaaaggagaaagaaggaggaagaagaggaaggagaaagaaggaggaggaggaaggagaaagaaggaggaggaggaaggagaaagaaggaggaggaggaaggagaaagaaggaggaggaggaaggagaaagaaggaggaggaggaaggagaaagaaggaggaggaggaaggagaaagaagga

SEQ ID NO: 6748 - DNA, 526 bp, Homo sapiens
  MAP TO AP000884.1; EXPRESSED IN ADULT LIVER, SIGNAL = 1.3; EXPRESSED IN PLACENTA, SIGNAL = 1.6; EXPRESSED IN BRAIN, SIGNAL = 1.2; EXPRESSED IN HELA, SIGNAL = 0.98; EXPRESSED IN BONE MARROW, SIGNAL = 1.3; EXPRESSED IN LUNG, SIGNAL = 1.2; NT HIT: AL163252.2, EVALUE 0.00e+00; SWISSPROT HIT: P02442, EVALUE 4.90e-02; EST_HUMAN HIT: BG826633.1, EVALUE 1.90e-01
tggggagttgcagggcacagaggagtttgacgggtcacaaccagtggtactgcaggtcttgggctcacagctgggagatttgcaggttggtgcttcaccgtaggattcttggcagtaatccaggagccagagatttccttggtagctactgggtaagcagtgtccaaaggtagggcttaaatcactggagctaagagtaacagaagaggtcactgggatataacagtgagttctgtatgatgtggtactgcagacaccaggatagcctgtagtagacatggagcctgcaggcatgctcagtggtcgctgtgcagtgtgtctgtggcctaaggacgttttataccttccctggtgattgtcaaaagcctctccagactctttcttctgtctgcttggggcaataacacagcaacatctcattagtgtgttggttagccacagaggctaatgttttcacacgtgtaaaaataagtttattttaattcttcaaagtatccataatcaccactttgaccatcacccatca

SEQ ID NO: 6749 - DNA, 548 bp, Homo sapiens
  MAP TO AJ011930.1; EXPRESSED IN BRAIN, SIGNAL = 1.6; EXPRESSED IN HELA, SIGNAL = 2.7; EXPRESSED IN ADULT LIVER, SIGNAL = 1.4; EXPRESSED IN LUNG, SIGNAL = 1.5; EXPRESSED IN HEART, SIGNAL = 1.7; EXPRESSED IN BONE MARROW, SIGNAL = 1.7; NT HIT: AL163300.2, EVALUE 6.00e-44; SWISSPROT HIT: O54956, EVALUE 1.80e+00; EST_HUMAN HIT: BF057369.1, EVALUE 3.00e-06
agcacaggcccctgggacactctatttgcagacattacaccctgtctacttcaatattatgctctgaagccaaaggtaggtgagggtgcgtcaacggaaccaaatatagactcaggactttacaaactgaacggcgtctcataggactaaacatgaaactcgcactaataagcgttctctaggttttaaacacaaacaaggaaggggcaggagttgttgacactccagctgggacaacagaccagggagacatataaaagccaacatccctgagcacctaacacacggactcactcactcactcactcacccactcactcccatctcctccagttcaatccccagcatggccgcgtccactatgtctgtctgctccagcgacctgagctacggcagccgcgtctgccttcctggttcctgtgactcttgctccgactcctggcaggtggacgactgcccagagagctgctgcgagcccccctgctgcgcccccagctgctgcgccccggccccctgcctgagcctggtctgcaccccagtgagccgtg

SEQ ID NO: 6750 - DNA, 518 bp, Homo sapiens
  MAP TO AC004821.2; EXPRESSED IN ADULT LIVER, SIGNAL = 1.4; EXPRESSED IN PLACENTA, SIGNAL = 1.4; EXPRESSED IN BRAIN, SIGNAL =   2; EXPRESSED IN HEART, SIGNAL = 6.5; EXPRESSED IN BONE MARROW, SIGNAL = 2.8; EXPRESSED IN LUNG, SIGNAL =  11; NT HIT: M80583.1, EVALUE 0.00e+00; SWISSPROT HIT: P18146, EVALUE 1.00e-14; EST_HUMAN HIT: AL553329.1, EVALUE 0.00e+00
aagggtgcagggcagggctctgaggggcccaaaccccattttgccaactcgattttctagcattgaagggagcaaggggtcaggcatatgatggagatgatactgaaatgatttatccaaaatccatgcaaatcaagttctttggatagaggtgaagaacttggacatggctgtttcaggcagctgaagtcaaagggaatagtaattggggaaggggaagtgggcagaaaggattgttggccaatagaccttccactccagtagagagggaggacttggctctgagaacctccatctgacctaagaggaaccctcctctcctatggccatctcctcctcctgtcctttaagtctcttgtgtttctttttctcccttttccctttctttcccctttccctttagcaaatttcaattgtcctgggagaaaaggttgctgtcatgtccgaaagccctgtggaggcgctgaaggagttggtgacagctgaggaagggaagctgctgacctgggccgggaaag

SEQ ID NO: 6751 - DNA, 518 bp, Homo sapiens
  MAP TO AC002988.1; EXPRESSED IN ADULT LIVER, SIGNAL =   2; EXPRESSED IN PLACENTA, SIGNAL = 2.2; EXPRESSED IN HELA, SIGNAL =   2; EXPRESSED IN BRAIN, SIGNAL = 1.8; EXPRESSED IN BONE MARROW, SIGNAL = 2.2; EXPRESSED IN FETAL LIVER, SIGNAL = 2.2; SWISSPROT HIT: O76100, EVALUE 2.00e-77; EST_HUMAN HIT: AI909504.1, EVALUE 2.00e-25; NT HIT: AF127906.1, EVALUE 4.00e-88
ggggttgagcatgggggtgaccacagtgtacatcaccgaggcgacagcagttgagtgtaagttttgggtcatagtagagctaaggtacacccctagccccgtaccataaaatatggagacaactgagaggtgagatgcacaggtggaaagtgccttgtacttcccctgagttgacgagattgcacgtatggaggaaactatcctacagtaagaataaaggatcccaacgagaggaccaccgtccagcagcacagctgcaaaatgcatcaccatgttgttcacaaaggtgtcagaacaggcaaggtggatcatctcattaagttcacagaaaaagtgagggatttccaagtctgtgcagaaggacaactgcaatgtcactaagctttgtaacatggagtttaggacactcatgatccaggacaccagaaccagcagtccacagagctgagggctcatgatgaccgtgtagtgcagggggtgacagatggccacaaactggtcataggccatcacggtca

SEQ ID NO: 6752 - DNA, 501 bp, Homo sapiens
  MAP TO AL096708.14; EXPRESSED IN BRAIN, SIGNAL = 1.4; EXPRESSED IN ADULT LIVER, SIGNAL = 1.3; EXPRESSED IN HELA, SIGNAL = 1.4; EXPRESSED IN BONE MARROW, SIGNAL = 1.4; EXPRESSED IN FETAL LIVER, SIGNAL = 1.3; EXPRESSED IN HEART, SIGNAL = 1.5; SWISSPROT HIT: O33479, EVALUE 3.00e-10; EST_HUMAN HIT: AA884835.1, EVALUE 7.00e-01; NT HIT: gi13650398, EVALUE 4.80e-01
aggggcacacaaagctgggcatccaggccctcctccaccatgaagggcaggggcacacaaagccgggcatccaggccctcctccaccgtgacgggcaggggcacacaaagccgggcatccaggccctcctccaccgtggcaggcaggggcacacaaagctgggcatccaggccctcctccactgtggcgggcaggggcacacaaagccgggcatccaggccctcctccaccgtgaagggcaggggcacacaaagccgggcatccaggccctcctccaccgtggcggccaggggcacacaaagccgggcatccaggccctcctccaccgtggcggccaggggcacacaaagccgggcatccaggccctcctccaccgtggcgggcagggacacagatgtcatggccagattgcctccacattggaaaacaggaggtgctttctctccaccccgctacagcaacctggatacccaccaccagccttcccacggcagcctggaa

SEQ ID NO: 6753 - DNA, 520 bp, Homo sapiens
  MAP TO AL009049.1; EXPRESSED IN PLACENTA, SIGNAL = 2.1; EXPRESSED IN HELA, SIGNAL =   3; EXPRESSED IN HEART, SIGNAL = 1.4; EXPRESSED IN LUNG, SIGNAL = 1.6; EXPRESSED IN BONE MARROW, SIGNAL = 1.7; EXPRESSED IN FETAL LIVER, SIGNAL = 1.7; EXPRESSED IN ADULT LIVER, SIGNAL = 1.3; SWISSPROT HIT: P05790, EVALUE 1.00e-11; NT HIT: AJ002253.1, EVALUE 7.70e+00
cagatgtgtcccctgccccggatgtgctccctgccccggatgtgttccctgccccggatgtgctccctgccccagaggtgctccctgtctcaagtgtgctccttgtcctagtgtgctccctgccccaggtgtgctccctgtcctagtgtgctcccagtctcaggtatgctccctgcctcaagtgtactccctgtcctagaatgctccctgccccaggtgtgctccctgcctcaggtgtgctccctgtcccaggtgtgctccctcccccagatgtgctccctgcctcaggtgtgccccctcccccaggtgtactccctccctcaggtgtgctccctgtctcaggtgtgctccctcccccaggtgtgctctttgtctcaggtgtgctccctaccccaggtgtgttccctgcctcaggtgtgctccctcccccaggtgtgctccctgtgtctggtgtgctccctgctccaggtgtattctctgctcccaccactgctcaaaagctcactctggcccctgggtc

SEQ ID NO: 6754 - DNA, 502 bp, Homo sapiens
  MAP TO AL133392.1; EXPRESSED IN ADULT LIVER, SIGNAL = 1.7; EXPRESSED IN PLACENTA, SIGNAL = 1.7; EXPRESSED IN BRAIN, SIGNAL = 1.2; EXPRESSED IN HELA, SIGNAL = 1.1; EXPRESSED IN LUNG, SIGNAL = 1.9; EXPRESSED IN HEART, SIGNAL = 1.7; EXPRESSED IN BONE MARROW, SIGNAL =   2; EXPRESSED IN FETAL LIVER, SIGNAL = 1.2; NT HIT: gi11418060, EVALUE 2.00e-65; EST_HUMAN HIT: BI059234.1, EVALUE 2.00e-65; SWISSPROT HIT: P32927, EVALUE 2.00e-19
ttgcccagtgcacaggctgggcatgagcctggtgctgaaggaggatggactttaaggtcaaaagggagagggtaccagccttgcagaggaagaccttgagctcagcatggaggatggagctcctgagccacggaaagactgaatccatgtcccatgtccttctctggggcccctgctccctcaaccctgtcccgttcaggttctctctgtgagatctgggggacatcagggcttccagagaaccatctccaccccaccaagacccttgtgcctgacccggatcatctgcccagggtggtcccaactcttctgcccattttcttcccacagggtgttccctgtaggattcggggacagcgaggtgtcacctctcaccatagaggaccccaagcatgtctgtgatccaccatctgggcctgacacgactccagctgcctcagatctacccacagagcagccccccagcccccagccaggcccgcctgccgcctcccacacacct

SEQ ID NO: 6755 - DNA, 516 bp, Homo sapiens
  MAP TO AC003110.1; EXPRESSED IN LUNG, SIGNAL =   2; EXPRESSED IN HEART, SIGNAL = 1.8; EXPRESSED IN ADULT LIVER, SIGNAL = 1.8; EXPRESSED IN BRAIN, SIGNAL = 2.5; EXPRESSED IN HELA, SIGNAL = 3.5; EXPRESSED IN BONE MARROW, SIGNAL = 2.1; EXPRESSED IN FETAL LIVER, SIGNAL =   2; NT HIT: gi14766861, EVALUE 1.00e-102; EST_HUMAN HIT: AL134752.1, EVALUE 1.00e-102; SWISSPROT HIT: P55067, EVALUE 1.00e-10
ccagcagcaggaaccggagccggggctgcaaggggggatggaggccagcgcccagccccccacctcagaggctgcagtgaaccaaatggagcctccgttggccatggcagtcacagagatgttgggcagtggccagagccggagcccctgggctgatctgaccaatgaggtggatatgcctggagctggtgagttgctctgggggaggcgggacctacctggggatctggaggtgagggtagagaggtagccatggctacactcagaatgagggaggaagctccaaatcccagctgggtcctctggccccagaagccccctctcccttgggcctggagtccaaccaaaggggctgctgagagatcattgtaatgattgccttgatgttgttgcaggttctgctggtggcaagagctccccagagccctggctgtggccccctaccatggtcccacccagcatctcaggccacagcagggcccctgtcctggagctagagaaagccgagggccccag

SEQ ID NO: 6756 - DNA, 520 bp, Homo sapiens
  MAP TO Z82216.1; EXPRESSED IN ADULT LIVER, SIGNAL = 1.2; EXPRESSED IN HELA, SIGNAL = 2.9; EXPRESSED IN LUNG, SIGNAL = 1.3; EXPRESSED IN HEART, SIGNAL = 1.6; NT HIT: gi16163318, EVALUE 0.00e+00; EST_HUMAN HIT: AU137084.1, EVALUE 0.00e+00; SWISSPROT HIT: P08048, EVALUE 5.00e-91
tgatgagagggagcttcaacgccatctggatttgtttcaaggacataagacacaccagtgtcctcattgtgaccataagagcaccaattcaagtgaccttaagcggcacatcatatctgtccatactaaggattttcctcacaaatgtgaggtctgtgataaaggttttcatcgtccttctgagctcaaaaagcatagtgatatccataagggtaggaagattcatcagtgcaggcactgtgactttaaaacatccgatccatttattcttagtggccatatcctttcagttcatactaaagatcagccattgaaatgtaaaaggtgcaagagaggattcagacaacaaaatgagctaaaaaaacatatgaagacccatactggaaggaagatttaccaatgtgagtattgtgaatacagcactacagatgcatctggctttaaacgacatgtgatatcaatacatacaaaagactatccacacaggtgtgaattctgcaagaagggattccgaagacca

SEQ ID NO: 6757 - DNA, 543 bp, Homo sapiens
  MAP TO AC007463.3; EXPRESSED IN LUNG, SIGNAL = 2.2; EXPRESSED IN HELA, SIGNAL = 1.2; EXPRESSED IN ADULT LIVER, SIGNAL =   2; EXPRESSED IN HEART, SIGNAL = 2.1; EXPRESSED IN BONE MARROW, SIGNAL = 2.4; NT HIT: AB048403.1, EVALUE 5.20e-01; SWISSPROT HIT: P56526, EVALUE 3.90e+00
gctggtgccactgacctgggataacacactgaaaaccatgttgcatagaaatgtgcatgttctttgctttagatgtcttgcttgtataccaccagctatgctttcatgaagtttatttacttccattacatctgtatggtgtaaataccacataacagtatttttctgagcatctcttcccaactacctgttcagtgacatcaccttgataggttgaaatcagccaaagcaggatgtttatagcatggaaatcagcaaatgccagaaagtcagggttcccctactacctcccacaagagacagttgttaaacatttactaacacactgttgattacacaaaaccatcattgctgcataactctttaatatgcatgtccggggttcaaacgggtgctggctttctggcttagacaccctaaattctccttactccacctagaaaggaggctgttgtctggctaagatatgtttttgagcttggtaaaacacactttcttgaaaaaaaaggaaaggaaataaaaaccgaaggccgtccagtttgg

SEQ ID NO: 6758 - DNA, 502 bp, Homo sapiens
  MAP TO AL008724.1; EXPRESSED IN ADULT LIVER, SIGNAL = 1.3; EXPRESSED IN BRAIN, SIGNAL = 1.2; EXPRESSED IN HELA, SIGNAL = 0.7; EXPRESSED IN BONE MARROW, SIGNAL = 1.1; EXPRESSED IN FETAL LIVER, SIGNAL = 1.3; SWISSPROT HIT: P57074, EVALUE 3.10e-01; NT HIT: gi14778004, EVALUE 1.00e-105
ccttggtggccacactgcccactaggggctggcagcccagcagctcggacaccatgtaggcctcttcctcggccgatggcatgggcccccacagccacctgtccatcacggccgatggtagcttggggttgccgatgacagccgccatggatgtggagctggagtatgtgggcgggttcttccgtaagtgagactaggaggggaggggacaaagcagaccacccgtcagacagaacagccaggctgcccggcagtggtcggccgagcacagggacggccagctctctgctggttgagcttgaatccacctgtttccccagtcaccacattcactcttatttttcaacatctttttgacacaggtgcctaacttactgagaatcatgcctgctgtgatgagcccttggaaaccatcaggactggatggtaggggtcctgagaggattgggggaggaggccttgatatgacagagtggacagaggccgtggaacccaggacagc

SEQ ID NO: 6759 - DNA, 501 bp, Homo sapiens
  MAP TO Z98883.3; EXPRESSED IN ADULT LIVER, SIGNAL = 1.8; EXPRESSED IN HELA, SIGNAL = 0.8; EXPRESSED IN BONE MARROW, SIGNAL = 4.5; EXPRESSED IN LUNG, SIGNAL = 1.7; EXPRESSED IN HEART, SIGNAL = 2.1; EXPRESSED IN PLACENTA, SIGNAL = 1.9; SWISSPROT HIT: O14357, EVALUE 4.00e-06; NT HIT: AF030177.1, EVALUE 4.00e-57; EST_HUMAN HIT: BG122319.1, EVALUE 6.00e-57
ctgggcgggcgttcgagtggggcgggggcggggcggggcggggcggggccgggcccgacagcactgcgtcctgtaggctgtactgcctgaagatccatggcctgtcctcactgtggcgtctgttccgggggaagaagtggaacgttctgcgccagcgcgtggactcctgttcctatgacctggaccaggtatggggcagggttcgtggctggaggggctgactgcctccggcctgtgcccgctgggccagcgcggtgcttgggcaccacaagggggcagcctgctcccgtcctgcagctgaggccgcgcacaggccctgggaatagataagtctgcggtgtgggctgcacgtggggctctgaagcagcgcagagcttccctgggccacagagaagagacagacacacagccccgaaggtggtgcaggcacaggccctagaggtgccccgggcccagagactagagatgccccgggcccggagactagaggtgccccgggcc

SEQ ID NO: 6760 - DNA, 503 bp, Homo sapiens
  MAP TO AL159140.2; EXPRESSED IN HELA, SIGNAL = 1.3; EXPRESSED IN ADULT LIVER, SIGNAL = 1.4; EXPRESSED IN LUNG, SIGNAL = 1.4; EXPRESSED IN BONE MARROW, SIGNAL = 1.2; EXPRESSED IN FETAL LIVER, SIGNAL = 1.1; SWISSPROT HIT: P96921, EVALUE 7.00e-01; NT HIT: gi15300801, EVALUE 4.00e-60; EST_HUMAN HIT: BF752036.1, EVALUE 0.00e+00
cagccagcctggaaccctggtacattggctgttcttcgctctttccttgaccccaccgtaccttgctttatccaccggtgaaatctctaggaatgcctcaccagtgcagagggaggcgctgagtcagggtaacacgcaattcctcgctcctcaagggtctcccaaaaccacaggcggatgggagtcagggaaaatcgaaattacacgcaccaaatacgcaaggctgctgacacacgttggcagtgatttacctttctattaattgcaaggtttcgcggagtaggttagttgccagagttccagcccagaaaaaccgttaatgtagttagtcgcgtcccggttgcagctctgccctgggctggaaaggtcccgcccattacctgtggccagcacgaaggccgggacgctgtggaagcgcaccggtccgtggctgcggccgtcctcgcatgccacgaaggcggtcaccagcccgcagggccagtggatattgacgcgggcctcgc

SEQ ID NO: 6761 - DNA, 565 bp, Homo sapiens
  MAP TO AC002988.1; EXPRESSED IN BRAIN, SIGNAL = 2.6; EXPRESSED IN FETAL LIVER, SIGNAL = 3.4; EXPRESSED IN HEART, SIGNAL = 2.6; EXPRESSED IN BONE MARROW, SIGNAL = 2.8; EXPRESSED IN LUNG, SIGNAL = 2.5; EXPRESSED IN ADULT LIVER, SIGNAL = 2.6; EXPRESSED IN PLACENTA, SIGNAL = 4.5; SWISSPROT HIT: O14581, EVALUE 4.00e-60; NT HIT: AF127847.1, EVALUE 0.00e+00; EST_HUMAN HIT: AA758739.1, EVALUE 2.00e-20
tggccctcctgtttctgctctctgaagaatcgattcagagctctgtttatgtctttattcctcaggctgtagatgaaggggttcagcatggaggtgaccacagtgtacatcaccgaggctgcagcatttgagagtgagttatgggttgcagcagaactaaggtacacacctacgcctgtacaataaaataaggagacaactgagaggtgagatgcacaggtggaaagtgctttattcatcccctgagctgatgagatcgaacatatgcaacaaagtatcttaaagtaagtaaaatattccagcgaggcatcccccacccagcagcacacttgtaaaattcatcatcatgtcattaataaaagtgtcggaacaggcaaggtggatgacctgattaagttcacagaaaaaatgagggattttcaattctgtacagaaggacagctgcaatgccattatgctttgtaacagagaatataggatgctcacgatccaggacaccagaaccagcagtccacagagccaggagttcataatgactgtgtagtgcagggggtgacagatggcc

SEQ ID NO: 6762 - DNA, 520 bp, Homo sapiens
  MAP TO AP001759.1; EXPRESSED IN FETAL LIVER, SIGNAL = 1.4; EXPRESSED IN BONE MARROW, SIGNAL = 1.2; EXPRESSED IN HELA, SIGNAL = 1.3; EXPRESSED IN BRAIN, SIGNAL =   1; EXPRESSED IN ADULT LIVER, SIGNAL = 1.7; EST_HUMAN HIT: AL540637.1, EVALUE 1.00e-103; SWISSPROT HIT: P12110, EVALUE 2.00e-32; NT HIT: M81835.1, EVALUE 0.00e+00
tacccaggtgccaggggtcgggggccgggggctctgggcatttggggggcagttgggaccagtacccaggtgccaggggtcgggggccgggggctctgggcatttggggggcagttgggaccagtacccaggtgccaggggtcgggggccgggggctctgggcatttggggggcagttgggaccagtacccaggtgccaggggttgggggccgggggctctggcattcgggggcagtgaggtcaaacccacaaacaggcacggggccaggaaacggggctccaacagcagtccctcctgaggctggctcgtgacaggtcctgtgccccacagagaagaccgactgccccatccacgtgtacttcgtgctggacacctcggagagcgtcaccatgcagtcccccacggacatcctgctcttccacatgaagcagttcgtgccgcagttcatcagccagctgcagaacgagttctacctggaccaggtggcgctgagctggcgctacggcggcctgcacttc

SEQ ID NO: 6763 - DNA, 534 bp, Homo sapiens
  MAP TO AC004927.2; EXPRESSED IN ADULT LIVER, SIGNAL = 2.3; EXPRESSED IN PLACENTA, SIGNAL = 3.4; EXPRESSED IN BRAIN, SIGNAL = 2.1; EXPRESSED IN HEART, SIGNAL =   4; EXPRESSED IN BONE MARROW, SIGNAL = 2.2; EXPRESSED IN FETAL LIVER, SIGNAL = 1.7; EXPRESSED IN HELA, SIGNAL = 1.4; EXPRESSED IN LUNG, SIGNAL = 2.4; NT HIT: gi15595198, EVALUE 5.10e-01; EST_HUMAN HIT: BG771560.1, EVALUE 4.80e-02; SWISSPROT HIT: P19691, EVALUE 8.60e+00
gggctaacaaggcgcgtcccgggccggccggcgggagggcgaggcggagaagagcggcctgagccgccgccgcggcgcgcggagctaagagcgaggcggcggcggcggcgacaggacaaaggagaccatgtgcggagggagggaggagggagagggaggaggaggaggagggcgcgcggcggcttctccccggcggccgcccggggctccccgacagccggtcccgcctctccagccgcgccgcgggctgcctggtcctgggcccgccgcggtgctggagggagccgctccgggagtctggattttgtgcggatctcgccggcgcgcggcccaggaggcgctgcaacggcggggcgcggggcggcggcgcctctggccggagcttgcgggctggcgggtgagcgcccggggctggctgggctccggcccgcgctcggcttgcgggcgcctgcctctcccgccggttcacagctcaagtgaactccatcggcggccgccgcgggctccctggctggacggtagcaggagggggcg

SEQ ID NO: 6764 - DNA, 505 bp, Homo sapiens
  MAP TO AC006501.5; EXPRESSED IN ADULT LIVER, SIGNAL =   2; EXPRESSED IN HELA, SIGNAL = 1.7; EXPRESSED IN BRAIN, SIGNAL = 1.6; EXPRESSED IN FETAL LIVER, SIGNAL = 2.7; EXPRESSED IN BONE MARROW, SIGNAL = 1.7; EXPRESSED IN LUNG, SIGNAL =   2; NT HIT: gi14738284, EVALUE 1.00e-103; EST_HUMAN HIT: BF838436.1, EVALUE 1.00e-125; SWISSPROT HIT: P48837, EVALUE 1.20e+00
atgctggccacatccagggggagcagggatgggaagactttcagcagaggatggacgccctctcctgcttcctcattaagaggcgagacaaaacccgcatgttctgccacccgtccttcagggagtggcttgtatggagagcagacggggaaaacacggccttcctgtgtgagcccaggtacggcaggcgctttctttcagctctttgcagggaatctcgtgtgcagttggggaaaggatttaaatgtgatgcacgtgtctcaatggaagggcaatccagaatgactaattcagtgttactgctttgttttattatttttcttcctttttggcagaaggatgggcaatggggaattctctatacagaagctgccttctaattgctaggactcccttatggatggtacatgtggataaaagagaagctgggtggtgcctgtgtggtccttccttactgtccattgtctcatggagccccgtctcctcccccacccagcttctgcag

SEQ ID NO: 6765 - DNA, 513 bp, Homo sapiens
  MAP TO AC009086.5; EXPRESSED IN HEART, SIGNAL = 1.7; EXPRESSED IN LUNG, SIGNAL = 1.7; EXPRESSED IN BONE MARROW, SIGNAL = 3.2; EXPRESSED IN FETAL LIVER, SIGNAL = 1.7; EXPRESSED IN HELA, SIGNAL = 1.5; EXPRESSED IN ADULT LIVER, SIGNAL = 1.4; NT HIT: M61827.1, EVALUE 0.00e+00; EST_HUMAN HIT: AL532281.1, EVALUE 1.00e-17; SWISSPROT HIT: P16271, EVALUE 1.20e+00
aggatggaggggtgggtggggtgggtggagccagggcccacttcctttccccttggggccctgtccttcccagtcttgccccagcctcgggaggtggtggagtgacctggccccagtgctgcgtccttatcagccgagccggtaagagggtgagacttggtggggtaggggcctcagtgggcctgggaatgtgcctgtggcttgaaaagactctgacaggttatgatgggaagagattgggagccattgggctgcacagggtcagggaaggccaggaggggctggtcactgctggaatctaagctgctgaggctggagggagcctcaggatggggctgatgggggagctgccagcatctgttcctctgtcatttctgataacagtaaaagccagcatggaaaaaaccgttaaaccgcaggttgggcctggccgttggcagggaagtgggcagaggggaggcccggccaggtcctccggcaactcccgcgtgttctgcttctccggctgcccac

SEQ ID NO: 6766 - DNA, 594 bp, Homo sapiens
  MAP TO AC020893.4; EXPRESSED IN ADULT LIVER, SIGNAL = 1.5; EXPRESSED IN HELA, SIGNAL = 1.4; EXPRESSED IN LUNG, SIGNAL = 1.9; SWISSPROT HIT: P38757, EVALUE 1.00e-03; NT HIT: gi14772274, EVALUE 0.00e+00; EST_HUMAN HIT: AW796725.1, EVALUE 0.00e+00
caggctgccaacgcctgtccgccagctccccgttccgctgggctttccaaaacctcgccaggggtgactttctgagccgcttgctccatacccctctctgcagcctctcctgccacttagggctgccgttccccctcccggcaacggggggctggcggagctgtgccacgggggcccccggggccggcggggccggcagagcaggcagtgccagggtcatcaggatgatgcggacgcagtgtctgctggggctgcgcacgttcgtggccttcgccgccaagctctggagcttctccgcccttttgcggtggcagatctgcatggtaattcagcaccaaactgttcgatatgatatcatccccttatcttcttgtcctggaatcagctaggtgaagaggaagatcatggtgctggatccggatgagatacttattcactcccaccatgatggggtcctgaggctcacagtctggcctggaacgcctcctgacttcatcctcaaggtggtaatagacaaacatcctgtccgtttctttgtacattagaggccccatgtggatttctttttggaagtcgtgagcgagtggtgggagc

SEQ ID NO: 6767 - DNA, 511 bp, Homo sapiens
  MAP TO AL078611.1; EXPRESSED IN HELA, SIGNAL = 0.5; EXPRESSED IN ADULT LIVER, SIGNAL = 1.2; EXPRESSED IN HEART, SIGNAL = 1.3; EXPRESSED IN LUNG, SIGNAL = 0.98; EXPRESSED IN BONE MARROW, SIGNAL =   1; SWISSPROT HIT: Q95031, EVALUE 3.60e+00; NT HIT: gi11418311, EVALUE 0.00e+00
gcccgtgtatgaggagccatcggatgaagtggaagcaatgacctatttgtgccgtaagctgagaaccatgttcagctttctgacctcgcaatctaaggccaaagatgagcctgagttctttattgacatgctgtatgggcagccagagaagaacagccaccgttatctggggctgaagaccagaaacatcaacgggaagaaaatggtttaccttgttgtttgatgaatgatggtttcatgagtcacaagcaagcgttcccccaactgctgagtctgtgggattaaggggattagggagtgtcagtggcctagtcatgctttctactcatgtccttcacaaggcacatcccctacatttggaagaatccccaatcttgtcctctgctcttgggagtgtaaaagttgggagtgtagtgtagcatctggggagacagcaggatcacagtgtgggattcctggactgatttccctttagaggggagttatgtgactccccgtacaagggcaaccc

SEQ ID NO: 6768 - DNA, 544 bp, Homo sapiens
  MAP TO AL009172.1; EXPRESSED IN ADULT LIVER, SIGNAL = 3.1; EXPRESSED IN PLACENTA, SIGNAL = 2.6; EXPRESSED IN BRAIN, SIGNAL = 3.3; EXPRESSED IN HELA, SIGNAL = 3.2; EXPRESSED IN HEART, SIGNAL =   3; EXPRESSED IN FETAL LIVER, SIGNAL = 2.6; EXPRESSED IN LUNG, SIGNAL =   3; SWISSPROT HIT: P19419, EVALUE 2.00e-15; NT HIT: AB016194.1, EVALUE 0.00e+00; EST_HUMAN HIT: AU132393.1, EVALUE 1.00e-92
ttctggctcggccttggtggtttctggcacaaaccctctctcccccgcaacttccaactcttccttgggcccttctactttcacttctgggggcaaagcccggcccaaacccggctccacattaagctcttccgatttcaggtttggggcctcgggcggggtcaggatgacctggtagaggagcaggcacaaagagggtgtgtaaggattgttgggaccacaggattctcctgtgggccacccagtgatttccccgggaaggtggcacttggtactcagggcatgactgcacatcagagcaagtcctccaacaggacataggacttcgtcaaggaagtagggcttcctctggggcaggtcctcctatgggacaggggacttggggtgagacaacctgaagcgggtaggaatctgagggataccatcctcattcattaaaacagtggttctcaaaaatttaccttcctctggaccagcaatatctgcctcatttggtaacaagttaaaaatgcaaattattgggcccctccccagccccacaaat

SEQ ID NO: 6769 - DNA, 529 bp, Homo sapiens
  MAP TO AC005618.1; EXPRESSED IN BONE MARROW, SIGNAL = 1.3; EXPRESSED IN ADULT LIVER, SIGNAL = 1.3; EXPRESSED IN PLACENTA, SIGNAL = 1.5; EXPRESSED IN BRAIN, SIGNAL = 1.4; EXPRESSED IN HELA, SIGNAL = 0.7; EXPRESSED IN LUNG, SIGNAL = 1.4; EXPRESSED IN HEART, SIGNAL = 1.7; SWISSPROT HIT: Q9Y5E1, EVALUE 5.00e-43; NT HIT: gi14724271, EVALUE 0.00e+00; EST_HUMAN HIT: BG818832.1, EVALUE 0.00e+00
gcctccaggcacctccatcctgagagtgaaggccactgaccaggacgagggcatcaactcagagatcacttattccttctttggtgtggctgacaaagctcagcacgtgttctctctggattacactacaggaaacattctaactcagcagcctttggattttgaagaagtagaaagatatacgataaacatagaagcaaaagaccgaggatctctctcaacacggtgtaaagtaattgtagaagttgtagacgaaaacgacaacagcccagaaataatcatcacgtcactctctgatcagattatggaggattcccctccaggagtggttgttgccctcttcaaaacacgggaccaagactcaggggaaaatggggaagtcaggtgtagcttaagtagaggtgttccatttaagattcattcttcttctaataattactacaagctagtaacagatgaggccctggatcgggagcagaccccagagtacaacgtcaccatcgcagccacagacaggggcaagcctccg

SEQ ID NO: 6770 - DNA, 513 bp, Homo sapiens
  MAP TO AL157789.1; EXPRESSED IN LUNG, SIGNAL = 9.3; EXPRESSED IN ADULT LIVER, SIGNAL = 7.5; EXPRESSED IN PLACENTA, SIGNAL = 7.4; EXPRESSED IN BRAIN, SIGNAL = 5.7; EXPRESSED IN HELA, SIGNAL =  15; EXPRESSED IN HEART, SIGNAL =  10; NT HIT: gi13654754, EVALUE 1.00e-124; EST_HUMAN HIT: BI603694.1, EVALUE 1.00e-122; SWISSPROT HIT: P12970, EVALUE 7.00e-18
ggctctctgccgctgcaacctgatatagcggggccatttcacaaagcgggtgaggtctcttttgggctggatgtcctgtccaatgccaaaattcttaggccttttctcaaacaggggattcaccactttcttagcctcctgcttcttcacgacagctggggccggagccaccttctttcccttggccttctttcctttcggcatcttgggcagcgggaggagagagctcctttgaacaacttctatatctggtccacttgtattctaacttgtattaatcctcctgcagtgagcatcttaatatcaggccagcatcttcctcttctttgcaccaagttggccctttagcatttcatgcatgatctgttttgttaaatgaacaaatctgcaagccccttgaggacagaatagagacctcattcatcagggtgcttgtcacattgtaaagcattctgtaaatatatattgaaatgaagtggactgcataatgatgtccaacctgaacccctgctg

SEQ ID NO: 6771 - DNA, 555 bp, Homo sapiens
  MAP TO AL121985.13; EXPRESSED IN ADULT LIVER, SIGNAL = 1.9; EXPRESSED IN PLACENTA, SIGNAL = 1.8; EXPRESSED IN HELA, SIGNAL = 1.5; EXPRESSED IN LUNG, SIGNAL = 1.6; EXPRESSED IN HEART, SIGNAL =   2; NT HIT: AF333069.1, EVALUE 0.00e+00; EST_HUMAN HIT: BG433950.1, EVALUE 0.00e+00; SWISSPROT HIT: P10267, EVALUE 1.00e-101
tgggaagaatgtgtggccaatagtgtggtgatattacaaaacaatgaattcgaaactattatagattgggcacctcgaggtcaattctaccacaattgctcaggacaaactcagtcgtgtccaagtgcacaagtgagtccagctgttgatagcgacttaacagaaagtctagacaaacataagcataaaaaattacagtctttctacctttgggaatgggaagaaaaaggaatctctaccccaagaccaaaaataataagtcctgtttctggtcctgaacatccagaattgtggaggcttactgtggcctcacaccacattagaatttggtctggaaatcaaactttagaaacaagatatcgtaagccattttatactatcgacctaaattccattctaacggttcctttacaaagttgcataaagcccccttatatgctagttgtaggaaatatagttattaaaccagcctcccaaactataacctgtgaaaattgtagattgtttacttgcattgattcaacttttaattggcagcaccgtattctgctggtg

SEQ ID NO: 6772 - DNA, 505 bp, Homo sapiens
  MAP TO AC004877.1; EXPRESSED IN ADULT LIVER, SIGNAL = 2.5; EXPRESSED IN HELA, SIGNAL = 0.92; EXPRESSED IN BONE MARROW, SIGNAL = 2.3; EXPRESSED IN LUNG, SIGNAL = 2.3; EXPRESSED IN PLACENTA, SIGNAL = 1.6; SWISSPROT HIT: P51523, EVALUE 6.00e-42; NT HIT: gi10181127, EVALUE 1.00e-109; EST_HUMAN HIT: BG829526.1, EVALUE 0.00e+00
cctcgctgcggtgcagacactggtgcgtggcgaggttctttttccagccgaagctcaagccgcagtcggagcacgcgaaaggctttggcccgggaaaggatggggtcggggacggggcagtggaatgaggagaagcggacgagtcgggagagggcctggccgggccggccgtctggtgcaccctttggtgccgcaccaagtgctgcttgtgcgtgaagctgcgtgcgcactgtgcgcactggtagggcctctcgcccgtatggatgcgctggtgccgaatcaagtgcgtcttcttgcgaaagcgcttctcgcattccgtgcaggggaagggccgctcgccggtgtgggtcttttggtgcgagcccaggtggatcttctggctgaagcgcttgccgcactccgcgcacgggtagggccgctcgcccgtgtgcgtgcgcaggtggcgggtcagatgggccttcttgctgaagcgcttgtcgcactcggagcacgggaaaggccgctc

SEQ ID NO: 6773 - DNA, 504 bp, Homo sapiens
  MAP TO AC008103.27; EXPRESSED IN LUNG, SIGNAL = 1.5; EXPRESSED IN FETAL LIVER, SIGNAL = 1.3; EXPRESSED IN ADULT LIVER, SIGNAL = 1.5; EXPRESSED IN PLACENTA, SIGNAL = 2.4; EXPRESSED IN HELA, SIGNAL = 1.9; EXPRESSED IN HEART, SIGNAL = 1.5; EXPRESSED IN BONE MARROW, SIGNAL = 1.6; SWISSPROT HIT: P10265, EVALUE 1.00e-77; NT HIT: Y10392.1, EVALUE 0.00e+00; EST_HUMAN HIT: AI964001.1, EVALUE 7.00e-72
ccagcctcaggccccacaacaaactggggcattcccaattcagccatttgttcctcagggttttcagggacaacaacccccactgtcccaagtgtttcagggaataagccagttaccacaatacaacaattgtcccctgccacaagcagcagtgcagcagtagatttatgtactatacaagcagtctctctgcttccaggggagcccccacaaaaaatccccacaggggtatatggccccctgcctgaggggactgtaggactaatcttaggaagatcaagtctaaatctaaaaggagttcaaattcatactagtgtggttgattcagactataaaggcgaaattcagttggttattagctcttcaattccttggagtgccagtccaggagacaggagtgctcaattattactcctgccatatattaagggtggaaatagtgaactaaaaaaaataggagggcttggaagcactgatccaacaggaaaggctgcatattgggca

SEQ ID NO: 6774 - DNA, 573 bp, Homo sapiens
  MAP TO AJ010770.1; EXPRESSED IN BONE MARROW, SIGNAL = 1.2; EXPRESSED IN LUNG, SIGNAL = 1.2; EXPRESSED IN FETAL LIVER, SIGNAL = 1.2; EXPRESSED IN HEART, SIGNAL = 1.5; EXPRESSED IN ADULT LIVER, SIGNAL = 1.3; EXPRESSED IN PLACENTA, SIGNAL = 1.4; EXPRESSED IN BRAIN, SIGNAL = 1.2; EXPRESSED IN HELA, SIGNAL = 1.7; SWISSPROT HIT: Q99996, EVALUE 3.00e-30; NT HIT: AJ010770.1, EVALUE 0.00e+00; EST_HUMAN HIT: AI288731.1, EVALUE 1.00e-130
cctttggtgccatcggttgtagactttatttccgtacttcatccttttccattaagaagtattgatattgactattttcctaatagggaatcagcaactaaaagcttatattactttatacttaacagaactttctgagccttgtttgatatgatgggggagatattggtctataatgaaattaagtagtatgtctgagaagtagtgtattatttttgtgtgtgatcatctctttgaggtactgccctaaaataaagtaaaattttcaaaatgtaaatacatatatattatgtatgttacctttttcattaattattaggttattgaagaaaaaaatgaactgataagggatcttgaaacccaaatagaatgtttgatgagtgatcaagaatgtgtgaagagaaatagagaagaagaaatagagcagctcaatgaagtgattgaaaaacttcaacaggaattggcaaatattggacagaagacatcaatgaatgctcattccctctcagaagaagcagacagtttaaaacatcaattggatgtggttatagctgaaaagctggccttggaaca

SEQ ID NO: 6775 - DNA, 519 bp, Homo sapiens
  MAP TO AC012064.1; EXPRESSED IN BRAIN, SIGNAL = 1.1; EXPRESSED IN HELA, SIGNAL = 0.47; EXPRESSED IN ADULT LIVER, SIGNAL = 1.3; EXPRESSED IN PLACENTA, SIGNAL = 1.6; EXPRESSED IN BONE MARROW, SIGNAL = 1.1; EXPRESSED IN HEART, SIGNAL = 2.2; EXPRESSED IN FETAL LIVER, SIGNAL = 0.92; SWISSPROT HIT: Q00657, EVALUE 1.00e-58; NT HIT: gi16161051, EVALUE 0.00e+00; EST_HUMAN HIT: BF924611.1, EVALUE 0.00e+00
aggcaggggctgtgggaagccttgctgacgcacaacatggtggctggctgcagactggaggaggtagacaatgcctatggccattatgaagctttctccaccctggctcccaaggcttggctgtccgtggagctagctgagccatgcgtgcctgagccagggctacctcctgtctttgccaatttcatccagctgctatcagcacagtggtggtgaccgagggtggcacagcctggcttgagtggtggcatgtgcagcccatgctggcactgatggaggctgaactgcgtaaatcccaggtgctgttcagcgtgacctgaggggcacactacagcgagctcgagctggatgtcctgggtgcccaggcatgaaaaatgttcaccctcctggacgtggtgaactgcaaggcccgcttcatccacgatggccctgaggacacctctgaccagctggtgctggaggtgtcagtgatggcttggttgcccatgccctcatgcctgcggaggggccaaacagacc

SEQ ID NO: 6776 - DNA, 500 bp, Homo sapiens
  MAP TO AC005950.1; EXPRESSED IN ADULT LIVER, SIGNAL = 1.8; EXPRESSED IN PLACENTA, SIGNAL = 4.2; EXPRESSED IN BRAIN, SIGNAL = 2.5; EXPRESSED IN HELA, SIGNAL = 2.5; EXPRESSED IN BONE MARROW, SIGNAL = 2.1; EXPRESSED IN HEART, SIGNAL = 3.1; EXPRESSED IN FETAL LIVER, SIGNAL = 1.9; SWISSPROT HIT: P49918, EVALUE 3.00e-28; NT HIT: U48869.1, EVALUE 0.00e+00; EST_HUMAN HIT: BI918499.1, EVALUE 1.00e-110
cccagcggttctggtcctcggcgttcagctcggccaggcgggcctgcagctcgcggctcagctcctcgtggtccaccggcccgaagaggctgcggcaggcgctggtgcgcactagtactgggaaggtcccacgggcgacaagacgctccatcgtggatgtgctgcggagggacgcgtcggacatggcccggggctgcgcaaacgcgggcagcgagagaggagaggacagcgagaagaaggggaaaggagaggaggagagggcggaggccgggcgcaagggagaccccgcgccgcccgactctgcgtgtgcgagggacgcggcggctacctggctgtccggtggtggactcttctgcgtcgggttcgcctgtctcgtccggacggcagccgcgccccctcgatgcctgctggctagctcgctcgctcaggcctggccggcacccctcgagcacagcgcacttggcctgtggaacgcccagcccgcctgcgccccctttata

SEQ ID NO: 6777 - DNA, 515 bp, Homo sapiens
  MAP TO AC000384.1; EXPRESSED IN BRAIN, SIGNAL = 2.8; EXPRESSED IN HELA, SIGNAL = 5.5; EXPRESSED IN ADULT LIVER, SIGNAL = 3.4; EXPRESSED IN PLACENTA, SIGNAL = 1.8; EXPRESSED IN BONE MARROW, SIGNAL = 3.3; EXPRESSED IN HEART, SIGNAL = 2.3; EXPRESSED IN LUNG, SIGNAL =   3; EXPRESSED IN FETAL LIVER, SIGNAL = 3.1; EST_HUMAN HIT: BE410146.1, EVALUE 1.00e-94; SWISSPROT HIT: P39188, EVALUE 1.00e-03; NT HIT: gi14773950, EVALUE 4.00e-94
gggccaggtgcagtggcttatgcctataatcctagcactttggggggcctaagctagggagcccagaagttcaagaccagcttaggtgacacagcaagaccccatctctagttttaagaaacgtttcatattccaggctaaatgtttggagtttgccacataggcagtagggagccatggaaggtgtcgcagcaggggagtagcatgatcagacaaattatgctaagttcaaggggagatcacagggctggagcagtcatgggagtgtaccttaagctgaaccttgaaggctgaacaggcacatggaaggccacagtgactctcccctgcttctttttcaggtggttccacgagtgtttgggcgcatggtgggtaaaagccgggaggcggtggctcaggccatggtgctggagatgtttcgagaggaggactactacaacgatgatgttctggaccagatgggcgccagtatcctgggcgtggagggcccccggcgccacccagatgagccccct

SEQ ID NO: 6778 - DNA, 549 bp, Homo sapiens
  MAP TO AL078600.14; EXPRESSED IN ADULT LIVER, SIGNAL = 2.7; EXPRESSED IN PLACENTA, SIGNAL = 1.8; EXPRESSED IN HELA, SIGNAL = 0.66; EXPRESSED IN BRAIN, SIGNAL = 1.8; EXPRESSED IN HEART, SIGNAL = 2.8; EXPRESSED IN BONE MARROW, SIGNAL = 2.8; EXPRESSED IN LUNG, SIGNAL = 2.6; EST_HUMAN HIT: BF476773.1, EVALUE 1.00e-95; NT HIT: gi5174520, EVALUE 1.00e-103; SWISSPROT HIT: P33908, EVALUE 1.00e-29
ggggctgatcagtgccgtcgctgttactggtggggcgattaaccgtgtagcggccagagaatgaggtttgcgtattacctgcccatgtatttatacccacctcgtgtggcttgtggtcaccagagcaagagcatgcaaattaaaagcaacgagatttgaccttagatcttactggacacatctactactatattggaaacaggaaaagaaagagcttttgacacagcacctggtggaaggggcaaacctccatctccccatacattgcattgttgcagtcttcagagtttcaaaggcttgccgtttctccctgaaaaacacggccggtcgggagggatttctggcgcggcccactcacctctttgatctttgcccttttctcgcggatggcggcgtcggcgggctcccggctctccaccccgattgggggcacgaagtccaccgggggcaggcctctgaacggcgccttgtcacgcagctggtcctgggccaccttcttcttctccagtaggatgtctctttggatctcctcgggcagcttctgcaggg

SEQ ID NO: 6779 - DNA, 520 bp, Homo sapiens
  MAP TO AC004687.1; EXPRESSED IN BRAIN, SIGNAL = 2.3; EXPRESSED IN HELA, SIGNAL = 1.4; EXPRESSED IN ADULT LIVER, SIGNAL = 1.2; EXPRESSED IN BONE MARROW, SIGNAL = 1.3; EXPRESSED IN HEART, SIGNAL = 1.7; EST_HUMAN HIT: AI653251.1, EVALUE 2.00e-38; NT HIT: gi4758955, EVALUE 0.00e+00; SWISSPROT HIT: P31695, EVALUE 1.90e-01
tgcaggctggcagagggacctgggcttgggtccttcctcagtgctctctgttccaggaggaggctggggcagcagtgctgggcacctcagaggagaggacagccagcacatctaccctgggtgagaaggaccctggccccgcagctccctcactggccaagcaggaggccgagtggactgcaggagaggcctgtccggcctccagctccacccagggagcacgggcccagcaggcgccaaataccgagatgtgccaaggaggagacccagggtctgggctgaggcccagggctgaggtaggggtttggggacacactgtgtcacttcagagaattgaggcctgtctccctaccttttgccagcgcaaatccagttgccctctctgcctgtcctctgctctggtcctgctctcacacctttggctgtgctatgtgtctgtttttcttctaggatttctctgtcccatgtggctcccatctcccttctcccaccctgcccctgagccatggtgtgcctcccc

SEQ ID NO: 6780 - DNA, 506 bp, Homo sapiens
  MAP TO AC009288.8; EXPRESSED IN ADULT LIVER, SIGNAL = 1.9; EXPRESSED IN HELA, SIGNAL = 0.79; EXPRESSED IN LUNG, SIGNAL = 1.7; EXPRESSED IN HEART, SIGNAL = 1.9; SWISSPROT HIT: P29720, EVALUE 3.00e-07; EST_HUMAN HIT: AL110383.1, EVALUE 9.00e-53; NT HIT: gi14756466, EVALUE 4.00e-60
tcctcgttggcgatgccctgggcggcgtcctcgctggcgattccgtgggcggcgtcctcgctggcgatgccgtgggcggcgtcctcgttggcgatgccgtgggcggcatcctcgttggcggtgcccttgtcggcggcctcgttagcgatgccctgggcggcgtcctccttggcgatgccctgggcggcgtcctccttggcgatgccctgggcggcgtcctcgttggcgatgccctgggcggcatcctcgttggcgatgcccttgtcggcggcctcgttagcgatgtcgtgtacagtatcctcgttagcgatgtcgtgtgtggcgtcctcgttagtgatgtcgtgtacggtgtcctcatggggagctagaaaaacacagagttaaggtcagtgccctggtggtggagactgtgaatcacccaggggcttgcttggtgtgatgcatggaggtgcctgatcacagcatgggtcaagctgatgctgggacatcctcccaggtggacctgc

SEQ ID NO: 6781 - DNA, 526 bp, Homo sapiens
  MAP TO AC016594.5; EXPRESSED IN ADULT LIVER, SIGNAL = 1.2; EXPRESSED IN BRAIN, SIGNAL = 1.7; EXPRESSED IN PLACENTA, SIGNAL = 1.6; EXPRESSED IN HELA, SIGNAL = 1.4; EXPRESSED IN LUNG, SIGNAL = 1.1; EXPRESSED IN HEART, SIGNAL = 1.7; SWISSPROT HIT: Q92747, EVALUE 8.00e-54; EST_HUMAN HIT: BI257434.1, EVALUE 0.00e+00; NT HIT: gi13643735, EVALUE 0.00e+00
gccagcatgccctgggacagcaagatgctttttgggcagctgatgtcagagtctggtggcggtggcactggtggctgggtccacggggtcagcttctccgccagtgggagccacctggcctgggccagccacgacagcaccatgtctgctgctgatgcctcaaaaagtgtgcatgtctcaatctgaagacggagttccagctgctcctgagtgtgtcatctgtctcagacaacagcgccgtggctgctggccatgactgctgaccaatgctcttgaactacgatgaccgtggctgcctgacctttgtctccaagttagacattccaaaacagagcatccaacgcaacatgtctgccatggaatgcttctgcaacacggacaagagggccacgactgagggctccaacatggctttgaagatgctgcgccagaatagcatcactcaagtctctatttatgaggtggatgagaaagattgtcgcaaatattgcactactggcatcgatggagagccatgacaatttgg

SEQ ID NO: 6782 - DNA, 550 bp, Homo sapiens
  MAP TO AL023753.1; EXPRESSED IN ADULT LIVER, SIGNAL = 1.9; EXPRESSED IN PLACENTA, SIGNAL = 3.3; EXPRESSED IN HELA, SIGNAL = 1.8; EXPRESSED IN BONE MARROW, SIGNAL = 1.8; EXPRESSED IN HEART, SIGNAL = 2.3; EXPRESSED IN FETAL LIVER, SIGNAL = 2.3; SWISSPROT HIT: O95521, EVALUE 6.00e-27; EST_HUMAN HIT: BG762187.1, EVALUE 8.00e-07; NT HIT: gi13637310, EVALUE 6.00e-81
gggctggtgctctcccatccttggacagtcctctgctgtctgcctcttactcgtggtctctgggaagcaggacagggcccaggctccaggccatctggcccagaaattctcgtcaacatcccgcaaatccagcacttgaagtttccacctcctgtgggtaaagtaagggagagactcagaatttagaaggactcatccctgacctttgctttcattgtcatcccataaatcagctgctcctgtcctcagtgctccctgttctctttgtcttttctcaatccctgttcccttttgattctgacttttgattccccacttctattccctttaccttccactgagtaaaggcaggtttctgttcccacagtggaccctgtatggtgagcagtcctttctctgaggatctggaaaatggccaaagcctccctgatcttcctcgccaacaccatcagaagactctgggccacacttgggctacttctctgcctgaccctgctgttctttccctggacacctgagccctatctaccagccctcctgggtcacctca

SEQ ID NO: 6783 - DNA, 561 bp, Homo sapiens
  MAP TO AC009487.3; EXPRESSED IN ADULT LIVER, SIGNAL = 5.1; EXPRESSED IN HELA, SIGNAL =  10; EXPRESSED IN PLACENTA, SIGNAL = 4.4; EXPRESSED IN HEART, SIGNAL = 4.9; EXPRESSED IN BRAIN, SIGNAL = 4.7; EXPRESSED IN LUNG, SIGNAL = 5.2; EXPRESSED IN BONE MARROW, SIGNAL = 5.8; EXPRESSED IN FETAL LIVER, SIGNAL = 5.6; SWISSPROT HIT: Q09625, EVALUE 6.00e-03; NT HIT: gi10140860, EVALUE 5.30e-01; EST_HUMAN HIT: BE160437.1, EVALUE 2.00e-53
gctgagtgcttgcactggctcctccatgattaattataggttcaatagctgttacccttccaggaagaacaactgctttaactacttttgatattccaaggtcataaagacagagaacactcccttctgtttcttccaatcctattaataatccagttctcttctgccaagagaattctttcacagctaaaactacaggaggctgttcattgactccactgaatctgtaagcagacaatcgctctcctgttatagagtttactacctcaagttgtggaccacaagccaagcaagcaagtccatttttccccgcagcaaactttccacgaagcacagattctaatgttatttcgtcttctccaagggcttgaagagtcacttctggaaatggcaggagaccactagtcacttgagctcttaagtctcgcatacttccacagcgccgttccgccgccatgtgccaccgctcctccggtccgagattatgtaacgaagcccggcgcccgcgagcctgccgtacccgccaccgccagcgctcgccccctcgagccccatccgttg

SEQ ID NO: 6784 - DNA, 533 bp, Homo sapiens
  MAP TO AJ011930.1; EXPRESSED IN ADULT LIVER, SIGNAL = 1.3; EXPRESSED IN HELA, SIGNAL = 1.5; EXPRESSED IN BONE MARROW, SIGNAL = 1.4; EXPRESSED IN LUNG, SIGNAL = 1.2; EST_HUMAN HIT: BF058205.1, EVALUE 1.00e-54; NT HIT: AL163300.2, EVALUE 0.00e+00; SWISSPROT HIT: O75690, EVALUE 1.00e-06
gctgcccagggtggaaccaggcctgctgggggttagttctgcagaatttgggtctgggggagtagctggggtctctcatgcagccagcatctgggaaggacagggggagcatcctggtccctaagacaaagagcctgccccatcttctgagggtgtcaaagccagagagggcagagcttgctggggcagctgggaggtcagcccctggtgggaagggactccggatcacatccagggctgtcagcagctggacttctggccagagcagaggctgtagcaggcagggcgggagcacatggggcggcagaggagggaaacacaggaggccgtgcggcagcagctgggctggcaggaggaggcagaggcaccacaggaggggacgggcacgcagcaggtggacttgcacacagggtggcagaggagggacacggaggaggagggtctgcagcaggaggcggtgcagcaagccggctggcagctagactgctggcagcatgatgtggaagccccagagcagacgggcacacagcagg

SEQ ID NO: 6785 - DNA, 513 bp, Homo sapiens
  MAP TO Z97986.3; EXPRESSED IN HELA, SIGNAL = 2.1; EXPRESSED IN ADULT LIVER, SIGNAL = 1.5; EXPRESSED IN HEART, SIGNAL = 1.8; EXPRESSED IN BRAIN, SIGNAL = 2.2; EXPRESSED IN LUNG, SIGNAL = 1.6; EXPRESSED IN BONE MARROW, SIGNAL = 1.8; SWISSPROT HIT: Q05306, EVALUE 3.00e-05; EST_HUMAN HIT: BE887680.1, EVALUE 1.20e-02; NT HIT: gi12408291, EVALUE 1.20e-01
cggctcctggcctgctgaaggtgccagttccagggctggggccctggccccgagtcacccccagggacccagggcaggagggggagctggagcgggcagcccagagtgaccccaggaggaggctgtccctgggaagcaggctggagcttccgaaggcatcccccagcctgacaaggttctgttcccggagcaggtgggcgtcttgggctcccggttcctggggtggacggaggggctgggcggctgggcatggcggttgggcggctgggcatggcggctggggtccgtcctgagctcagtcgctgggaaagtgggctccaggccacagaggggaactgagacccgagagccagcgcgggggtcctcggggtctccaggagagcctaggctctaggctggggccacagggcagaggccgtgaggggagaggggcaggggccgggggcgctgtgggggcagtgcggcctcctgaccagcttccaccccacagcctgcccaccggctcctctgtga

SEQ ID NO: 6786 - DNA, 505 bp, Homo sapiens
  MAP TO AL138499.1; EXPRESSED IN HELA, SIGNAL = 1.9; EXPRESSED IN ADULT LIVER, SIGNAL = 1.5; EXPRESSED IN BONE MARROW, SIGNAL = 1.1; EXPRESSED IN HEART, SIGNAL =   2; EXPRESSED IN FETAL LIVER, SIGNAL = 1.4; SWISSPROT HIT: P39192, EVALUE 2.70e-02; EST_HUMAN HIT: AW835415.1, EVALUE 1.00e-82; NT HIT: Z22551.1, EVALUE 8.00e-83
tgcacctgttccattgaatgtcgttgaaacttcaagtagtgttagggaaagaaaaaagaaggaaaagaaacaaaagcctgtgcttgaagagcaggtcatcaaagaaagtgacgcatcaaagattcctggcaaaaaagtagaacctgtcccagttactaaacagcccacccctccctctgaagcagctgcctcgaagaagaaaccagggcagaagaagtctaaaaatggaagcggtattgtaatctatttaatctatttaattttattgtatgatttggagcttggaattgagatattctgttaggtacatacacagaatgtttaatattgaatttgaaaccatgattattcatttcattatgtgtttgcttcattaacattaattgctggtagaaattagtattgatcataaaatagcactttaaacttcagggcctgatgcagtggctcatgcctgtaatcctagcacattgggaggctgaagtgggaggaccccttgagccca

SEQ ID NO: 6787 - DNA, 584 bp, Homo sapiens
  MAP TO AC008770.3; EXPRESSED IN BRAIN, SIGNAL = 2.2; EXPRESSED IN ADULT LIVER, SIGNAL = 2.1; EXPRESSED IN BONE MARROW, SIGNAL = 2.7; EXPRESSED IN LUNG, SIGNAL = 2.1; EXPRESSED IN FETAL LIVER, SIGNAL = 2.8; EXPRESSED IN HEART, SIGNAL = 2.2; EXPRESSED IN HELA, SIGNAL = 3.5; SWISSPROT HIT: P52737, EVALUE 2.00e-60; EST_HUMAN HIT: AV745540.1, EVALUE 0.00e+00; NT HIT: gi14760109, EVALUE 0.00e+00
gggaaagccttcagatctgccccaaatcttcaattgcatggtaggactcacactggagagaaaccgtatcaatgtaaggaatgtgggaaagctttcagatctgcctcacaacttcgaatccatcgtaggattcacactggagagaaaccctatgaatgtaagaaatgtgggaaagccttcagatatgtccagaactttcgatttcatgaaaggacacaaacacataagaatgcactctggagaaagaccttataaatataagatatatgggaaacacttttattctgccaagttatttcaaacacatgaaaaaattcacactggagagaaaccctataaatgcaagcaatgtggtaaagccttaattgttccagttcctttcgatatctaaaaggactcacagtggagaaaaactctatgagtgtaagcaatgtgggaaagtcttcagatctgtcaagaacctttcaatttatgaaaggacacacactggagagaaaccctatgaatgtaagaaatgtggaaaagcgttccataatttctcttcttttcaaatacatgaaagttgcacagaggagaggcgccct

SEQ ID NO: 6788 - DNA, 561 bp, Homo sapiens
  MAP TO AL359218.1; EXPRESSED IN ADULT LIVER, SIGNAL = 1.9; EXPRESSED IN PLACENTA, SIGNAL = 2.1; EXPRESSED IN HELA, SIGNAL = 4.4; EXPRESSED IN BRAIN, SIGNAL = 2.1; EXPRESSED IN HEART, SIGNAL = 2.3; EXPRESSED IN LUNG, SIGNAL = 2.1; EXPRESSED IN BONE MARROW, SIGNAL = 2.3; EXPRESSED IN FETAL LIVER, SIGNAL = 2.1; NT HIT: AL163267.2, EVALUE 4.00e-20; SWISSPROT HIT: O95013, EVALUE 3.00e-25; EST_HUMAN HIT: AI356086.1, EVALUE 3.00e-25
cctcacccttctccttcccagcctctggtaaccaccattttactttctatttctgtaagtttgacttttttagattccacatattaagtgacatcatttgatatttgtctttctgtgcctggcttatttcacttaatacaatgtccttgaggtgttgctgcaaatgacaggatttttttctttatttagattacaaacaaagtctgaaacctgaggcaatggacccacagaactattccttggtgtcagaatttgtgttgcatggactctgcacttcacgacatcttcaaaattttttctttatatttttctttggggtctatgtggccattatgctgggtaaccttctcattttggtcactgtaatttctgatccctgcctgcactcctcccctatgtacttcctgctggggaacctagctttcctggacatgtggctggcctcatttgccactcccaagatgatcagggatttccttagtgatcaaaaactcatctcctttggaggatgtatggctcaaatcttcttcttgcactttactggtggggctgagatggtgc

SEQ ID NO: 6789 - DNA, 531 bp, Homo sapiens
  MAP TO Z82187.1; EXPRESSED IN ADULT LIVER, SIGNAL = 1.2; EXPRESSED IN BRAIN, SIGNAL = 1.2; EXPRESSED IN HELA, SIGNAL = 1.7; EXPRESSED IN LUNG, SIGNAL = 1.3; EXPRESSED IN HEART, SIGNAL = 1.6; EXPRESSED IN BONE MARROW, SIGNAL = 1.5; EXPRESSED IN FETAL LIVER, SIGNAL = 1.4; EST_HUMAN HIT: BF360408.1, EVALUE 1.00e-98; SWISSPROT HIT: Q28062, EVALUE 9.80e-01
tccgtgttcctgcagaggcgcctgcaggcatttctgatgcttccccaccgattgtgggaggagacatctctcctgcagaagagcaggtggaccgagggggagcgctgagcgatacgctggcgggtgtgcttcgagcgcttcttgggagaggcggcctcaaccattccagatggaagggctaaggagagggaggacacccaccgctgagtagggtagaggagttattttcctaagaggatttgtttttccctctatgaattgggtgcgttcactgtggcaaattactaaaaataaaagaattctatgtgtgttgcacatgagtgttaaaactagcaaattcaaacaaaacaaaaatgatgagaaaaaaaagtcccacatgcccacgcgcagaccagaatccttttcgatagaggtctgtgtagtgctgtgccccttcccgggaccagaatccttttcgatagaggtccgcgcagtgctgtgccccttcccgggaccagaatccttttcgatagaggtccgcgcagtgctgtg

SEQ ID NO: 6790 - DNA, 514 bp, Homo sapiens
  MAP TO AL355073.2; EXPRESSED IN ADULT LIVER, SIGNAL = 1.5; EXPRESSED IN BRAIN, SIGNAL = 1.8; EXPRESSED IN BONE MARROW, SIGNAL = 2.2; EXPRESSED IN LUNG, SIGNAL = 1.7; EXPRESSED IN PLACENTA, SIGNAL = 1.8; EXPRESSED IN HELA, SIGNAL = 2.8; SWISSPROT HIT: P15505, EVALUE 4.20e-01; EST_HUMAN HIT: AW271838.1, EVALUE 0.00e+00; NT HIT: gi10864062, EVALUE 0.00e+00
acaccctggccttccccagcatcaacaggaaagaggtggtggaggagaagcagccctgggcatatctcagttgtggccacgtgcacgggtaccacaactggggccatcggagtgacacggaggccaacgagagggagtgtcccatgtgcaggactgtgggcccctatgtgcctctctggcttggctgtgaggcaggattttatgtagacgcaggaccgccaactcatgctttcactccctgtggacacgtgtgctcggagaagtctgcaaaatactggtctcagatcccgttgcctcatggaactcatgcatttcacgctgcttgccctttctgtgctacacagctggttggggagcaaaactgcatcaaattaattttccaaggtccaattgactgacgcccttgacagccatctacgactttattaacaggttactgtgaagattttgccactaactctagattttacctttttgtaatgctgtttatcagaggagggtgacaggggctgga

SEQ ID NO: 6791 - DNA, 566 bp, Homo sapiens
  MAP TO AL022068.2; EXPRESSED IN ADULT LIVER, SIGNAL = 6.5; EXPRESSED IN BRAIN, SIGNAL =   1; EXPRESSED IN HELA, SIGNAL = 6.3; EXPRESSED IN LUNG, SIGNAL = 7.6; EXPRESSED IN HEART, SIGNAL = 1.4; EXPRESSED IN BONE MARROW, SIGNAL = 1.4; SWISSPROT HIT: P05783, EVALUE 4.00e-69; EST_HUMAN HIT: BE379392.1, EVALUE 0.00e+00; NT HIT: gi4557887, EVALUE 0.00e+00
gcgccagtctgtggagagcgacatctatgggctccacaaggtcattgatgacaccaatgtcatcaatggctgcagctggagacagagatcgaagctctcaaggaggagctgttcttcatgaagaagaaccacggagaggaagtaaaatgcctacaagcccagattgccagctctgggttgaccatggaggtagatgcccccaaatctcaggacctcgccaagatcacagcagacatctcgacccgatatgacgagctggctcggaagaaccgagaagagctggacaagtactggtctcagccgattgaggagagcaccacagaggtcaccatgcagtccgccaaggttagagctgctgagatgacattcatggagctgagacgtacagtccagtccttggagatcgacctggacttgatgagaaatccgaaggccagcttggagaacagcctgagggaggtggaggcctgttatgccctgcagatggagcagctcaacctggatcctggatcctgctgcacctggagtcagagctaacacagacccgggcagagggacagctctcc

SEQ ID NO: 6792 - DNA, 527 bp, Homo sapiens
  MAP TO AC008403.3; EXPRESSED IN ADULT LIVER, SIGNAL = 3.4; EXPRESSED IN PLACENTA, SIGNAL = 3.1; EXPRESSED IN HELA, SIGNAL = 3.1; EXPRESSED IN BONE MARROW, SIGNAL = 3.1; EXPRESSED IN LUNG, SIGNAL = 2.8; SWISSPROT HIT: Q03391, EVALUE 9.00e-25; EST_HUMAN HIT: H50114.1, EVALUE 7.00e-29; NT HIT: gi13650682, EVALUE 1.00e-78
ccagcggtccactgaggcgcgctcgcggggcacgaaaggtgcgggcccgggagccggccgcggcgcggggtacgcggggctgggcaggggctgtggcggcggcgggggcttggcgggcggtggggcggcctcagcgctgcagcagctgtacatgccctgcgggtccggggacaggacgggggtcagcgcgagatgcccaggacgcctgcccgcctcccctcagtccctctctcctctccatttacccgcctgtgtttcccgctctcttccccactatccacatctcgacccacatctccttgtctctgctcggctttacctttgtccccgcccctgccatctccccctctctgcctccctctctgccccataccctggagaaggccagcaggaagtccatgcggtgggtgggccccaggcagtgccgcaggcgccagtacaccaggtgctcccaggcgaagaccagcagggacaggcccatggccaccaggagcatgtagaagacgcccgccatgttgtcgatgtcc

SEQ ID NO: 6793 - DNA, 547 bp, Homo sapiens
  MAP TO Z81365.1; EXPRESSED IN BRAIN, SIGNAL = 1.8; EXPRESSED IN HEART, SIGNAL =   2; EXPRESSED IN LUNG, SIGNAL = 1.8; EXPRESSED IN BONE MARROW, SIGNAL = 2.4; EXPRESSED IN ADULT LIVER, SIGNAL = 1.7; EXPRESSED IN PLACENTA, SIGNAL = 2.1; EXPRESSED IN HELA, SIGNAL = 2.2; NT HIT: gi14763916, EVALUE 0.00e+00; SWISSPROT HIT: P15771, EVALUE 5.90e-01
tttgtgtgcccctgggtgcctggctttggaaagctttgaggcagtgcctgctgaggggcttgttcacagattctcataccgtcacactgctgagtctgttcagacactttttggaatctttctggaattctgatatttttatcttcatacaaatctttagtaggattgataatcctatcaaaagctacaaacttactggttttcacatatttctttcgttttggattttcgggcactgtttgaaagtcaacttttgagagaggtgtgcctgggctgctggcaggtttacctccagctttgtggaactgacaaagtgaggtatcttccagatacgtcattaagtgagctaacggttctttttcaatgaatgctcgatctcctgagtatacagattctagctcatttggtttagaattttttccaaggtacttttgctgctgtcttctgcttgcccctttaaagactgtctggccttttttttgttcagactccttatctgatccaatgtgtggagccaggatatctttggattcctttgttgcaggcc

SEQ ID NO: 6794 - DNA, 502 bp, Homo sapiens
  MAP TO AC008688.4; EXPRESSED IN ADULT LIVER, SIGNAL = 1.4; EXPRESSED IN HELA, SIGNAL = 0.59; EXPRESSED IN LUNG, SIGNAL = 1.2; EXPRESSED IN HEART, SIGNAL = 1.7; EXPRESSED IN BONE MARROW, SIGNAL = 1.3; EXPRESSED IN FETAL LIVER, SIGNAL = 1.1; NT HIT: gi14861873, EVALUE 0.00e+00; SWISSPROT HIT: Q9Y5E5, EVALUE 4.00e-37; EST_HUMAN HIT: AA458784.1, EVALUE 4.50e-02
tgacgatccagctgcaaacgctgcttgtcatcgtcagacagcacccgggctgaccgggaggccagttccccaattcccaggcccagatccttggccagatgggctacaaaggagccgctctctgtttcctccaacacagaataacgaataggctcgaggcgaacctgagacaagaacaccatcaaaataaaggccaacacttgcctgtttggatgaattctccctagcttcttcatgttggagtccaggtccctatatccaatcccctcagcaaccgcaacgagacttgagacattcaattccaatttcttgcttggaggaatcgtcacacagttgcttttaatattaaatttgtttagtatatcgctgccccaagccgttggtaaacctgcactgcttgtaacgcttcttccgtgtgtttttgattgcgtctagcgacacagaagaatacgcgcgagctttttagggctcattattcacaacttagcctgcagcgccaccc

SEQ ID NO: 6795 - DNA, 545 bp, Homo sapiens
  MAP TO AC016326.4; EXPRESSED IN ADULT LIVER, SIGNAL =   2; EXPRESSED IN HELA, SIGNAL = 1.9; EXPRESSED IN LUNG, SIGNAL =   2; EXPRESSED IN FETAL LIVER, SIGNAL = 1.7; EXPRESSED IN BRAIN, SIGNAL = 2.5; EST_HUMAN HIT: BI033118.1, EVALUE 1.00e-112; NT HIT: Y18276.1, EVALUE 7.00e-62
tgcttgctcacatgaccggtagcgtagacttaacttgtacatccagtataatagaagaaaaagaattcaaaatccatacaacttcagatggaatgagcagtatttctgaaagagacttagcgtcatcaactaaggggctggagtatgctgaaatgactgctacaactctggaaactgagtcttctagtagcaaaattgtaccaaatattgatgcaggaagtataatttcagatactgaaaggtctgacgatggcaaagaatcaggaaaagaaatccgaaaaatccaaacaactactacgacacaagtaagctaccttatatgagttctagaaataaataaaaatgcattgaagagttgttagcaccaaaacagagtaatttcttatcagttacttcatgtttatattgaattatagtataatagtaatttatggaactaaatagtgcggtataatttcatgtatgtaagaaactaaaaatatctcaattatatttccaactctgccacattcttctgtgtaactttgctcaacctctctgggcct

SEQ ID NO: 6796 - DNA, 514 bp, Homo sapiens
  MAP TO AC006487.7; EXPRESSED IN LUNG, SIGNAL = 1.5; EXPRESSED IN ADULT LIVER, SIGNAL = 1.2; EXPRESSED IN HELA, SIGNAL = 0.5; EXPRESSED IN HEART, SIGNAL = 1.9; EXPRESSED IN FETAL LIVER, SIGNAL = 1.2; EST_HUMAN HIT: AL565876.1, EVALUE 0.00e+00; NT HIT: gi14773181, EVALUE 0.00e+00; SWISSPROT HIT: O95157, EVALUE 1.00e-32
gcacccacgacccagccaagatctgctcccgagaccacgctcagagctcagccacctggagctgctcccagcccttcaaagtcgtctgtgtctacatcgccttctacagcacggactatcggctggtccagaaggtgtgcccagattacaactaccatagtgataccccctactacccatctgggtgacccggggcaggccacagaggccaggccagggctggaaggacaggcctgcccatgcaggagaccatctggacaccgggcagggaaggggttgggcctcaggcagggaggggggtggagacgaggagatgccaagtggggccagggccaagtctcaagtggcagagaaagggtcccaagtgctggtcccaacctgaagctgtggagtgactagatcacaggagcactggaggaggagtgggctctctgtgcagcctcacagggctttgccacggagccacagagagatgctgggtccccgaggcctgtgggcaggccgatcagtgtgg

SEQ ID NO: 6797 - DNA, 507 bp, Homo sapiens
  MAP TO AC004775.1; EXPRESSED IN HELA, SIGNAL = 0.94; EXPRESSED IN ADULT LIVER, SIGNAL = 3.2; EXPRESSED IN BONE MARROW, SIGNAL = 0.92; EXPRESSED IN LUNG, SIGNAL = 1.2; SWISSPROT HIT: P42582, EVALUE 7.10e-01; EST_HUMAN HIT: AI828458.1, EVALUE 0.00e+00; NT HIT: AE005823.1, EVALUE 3.10e-02
atggctgcccgagacgcaaccccaaggctccatgaacctggactccgggtccttgaagctcggtgatgccttcaggcccgccagtcggagtcggagcgcttcaggcgaagtcttgggttcctggggaggatcaggagggaccatacccattgtccaggtatggaagtcaggagatgcaggctggtgaggggagcatctgggaaacaaaacttgagccacatttcagtcgactgttcacccttccaggctgttccccaaggagcagaaacccccagaccattgtttcagaccaaactttccaggtgagagacacggaccactctggaccaagttggggggaagcagcttgcatagcttttgcccaaaaaatgaaagggcttcctacctaccctcagtctgagccttctggttattttgaaaataccctactgtctccctggtgcaacaccaagagcttccttcctttcactgtggtcactatggggtccctgcctccaggttcttgcc

SEQ ID NO: 6798 - DNA, 557 bp, Homo sapiens
  MAP TO AL022718.1; EXPRESSED IN LUNG, SIGNAL = 1.4; EXPRESSED IN BONE MARROW, SIGNAL = 1.5; EXPRESSED IN FETAL LIVER, SIGNAL = 1.3; EXPRESSED IN HELA, SIGNAL = 1.5; EXPRESSED IN ADULT LIVER, SIGNAL = 1.4; EXPRESSED IN PLACENTA, SIGNAL = 1.6; EXPRESSED IN BRAIN, SIGNAL = 1.5; SWISSPROT HIT: P25067, EVALUE 6.90e+00; EST_HUMAN HIT: AA971597.1, EVALUE 3.10e+00
tgggctgtacgggaggctgctccagatcgagaggtttccccaggccgctccactggcccatgaaataatgtctgggccgcaagcagagcagaatggggctgcggcatgtcccctggctacagagcagcagagcgatatggtggccatggggacacatgctaatgcccagatgccaaccccgacagatgttctttatgtgccaggacctctgagtccctgggcccagggcatgcaaccccctctgccagtgccacatccattcccacacccaccaccattcccaatgaaattcccatccttgccacctctaccacctgctgtagtcacgggggcagaagcagcagcagtcccacttcagatgcctcctactgagatccacccaccttgcccgtggcctgcagtgggcttccaggaggagatggcccctctgtggtaccagagaagctacatccaggaggaagattccaaaatccttcaggggtcattccccttaggagacagcagaagccacagccagggagaaggttcagagaggtcccaaagaatgcccctccccg

SEQ ID NO: 6799 - DNA, 500 bp, Homo sapiens
  MAP TO Z99130.1; EXPRESSED IN ADULT LIVER, SIGNAL = 3.4; EXPRESSED IN LUNG, SIGNAL =   2; EXPRESSED IN BONE MARROW, SIGNAL = 2.7; EXPRESSED IN FETAL LIVER, SIGNAL = 3.2; EXPRESSED IN HEART, SIGNAL = 4.1; EXPRESSED IN PLACENTA, SIGNAL = 3.9; EXPRESSED IN HELA, SIGNAL = 1.7; EST_HUMAN HIT: AI766017.1, EVALUE 0.00e+00; NT HIT: AF324892.1, EVALUE 8.00e-03; SWISSPROT HIT: Q20765, EVALUE 9.10e-01
ggggctggggtgtgtttatttgggtatatacaatgagtcatggattaaaattgcttccagcggatagatacctaggtgttccacagcattactgaacaagctgtcgtcatttccccattacctcagaagacccccttaattacttacttatattaactgtagaacgtatttatgcataccaggctctacctctgggctttctattctgttccagagacccagtaccagaatatttaaatcactgtggcgttaaatacgttttaatatctgatagggccagtttctgcgcattgcacatttttttttcccctttcaggaacgtgttcaggcccgcggcagggggcgggatcgcgcctcctcctcggctctggttccagccgagcctctcggacgcagagatggaaatcccgaagctgctcccggctcgcgggacactacagggcggcggcggcggcggtatccccgcgggtggcggccgagtccaccgaggccctgactcg

SEQ ID NO: 6800 - DNA, 500 bp, Homo sapiens
  MAP TO AL096710.8; EXPRESSED IN ADULT LIVER, SIGNAL = 1.8; EXPRESSED IN PLACENTA, SIGNAL = 2.6; EXPRESSED IN BONE MARROW, SIGNAL = 1.9; EXPRESSED IN LUNG, SIGNAL = 1.9; EXPRESSED IN HELA, SIGNAL = 1.2; EST_HUMAN HIT: BG996494.1, EVALUE 1.00e-127; SWISSPROT HIT: Q99024, EVALUE 1.20e+00
tccatatcttcagccacattttggcacctgggctttccattctcatctcttatacctcctccttcttcatcaatgccatcatcatcatcgtcatcctgatcattactgtcatatatataatccccataactttcttcactttgcatagaatctaaatgatcagtatcggagtgaaattcctgtccagttacatactcttcctttcttcctctccaactgccactgtcatcaaattttaatgatgcagtgaagctctcttttcctcctacaatatcataatcagtcaatgagtcagattcatcaccttcaaggatatttgtgcattccctttctgatccagtttccagtgactgtccattcaccttatctgagccaacaggatttaaatgtattttttcaccagaatctaattcatctttctcaacatccataaggaaatcctgaagacaatgtgctttgttcttcacacttaagctaccaactggtgccccctggggaac

SEQ ID NO: 6801 - DNA, 500 bp, Homo sapiens
  MAP TO AF235096.1; EXPRESSED IN BRAIN, SIGNAL =   2; EXPRESSED IN ADULT LIVER, SIGNAL = 1.8; EXPRESSED IN BONE MARROW, SIGNAL =   2; EXPRESSED IN LUNG, SIGNAL = 1.9; SWISSPROT HIT: Q9UJP4, EVALUE 1.00e-09; EST_HUMAN HIT: T19839.1, EVALUE 3.00e-37
acagcgactgcggggtggagcacccccacgggcatgctggccatactctcccagacattgcagatgctgtcatacctttccatggagcccatgagctcctgcccttctccaatccccccgatggagaagatgaagttcttatgggcagtgcttctgtgggagtagcgggccaccagcatgggctcccccagcctccactgattgagtttcagggagaagatgtagacattgtgactgaccagactcttccctgagctgacagccatgccccccagcacatagacgctgcggtgcaaggtgatggcagaggccttgtacagccgtgtcgggagtttggcaaggctctgccattggccggtctgtttgctgtacagtaggacgtccctggtggtctgctggctgtccttccttccgcccaagaggatgaggaaatcttggtaagagtttcttggagggacatgcaacaggagtttgcagtctgggacggtggtgccacacaa

SEQ ID NO: 6802 - DNA, 533 bp, Homo sapiens
  MAP TO AC006057.5; EXPRESSED IN LUNG, SIGNAL = 1.2; EXPRESSED IN ADULT LIVER, SIGNAL = 1.5; EXPRESSED IN HELA, SIGNAL = 0.74; EXPRESSED IN BONE MARROW, SIGNAL = 1.2; SWISSPROT HIT: P08672, EVALUE 5.00e-04
ccacacgccgacggaagaggatccagtccacacaccgacggaacaggatccagtccacgcgccgacggaagaggatccagtccacacgccgacagaacagaatccagtccacacacggacgggaatagaatccagtccacacacggacgggaatagaatccagtccacacaccgacggaacaggatccagtccacgcgccgacggaagaggatctagtccacacaccaacgggaatagaatcccgtccacacaccgacggaacagaatccagtccatgcaccgacggaacaggatccagcccacgcaccgacggaagaggatccagtccacacaccgacgggaatagaatccagtccacacaccgacgggacaggatccagtccacacaccgacgggaatagaatccagtccacacaccgacggaacaggatccagtccacgcgccgacggaagaggatccagtccacgcgccgacggaacaggatccagtccacacacggatggaatagaatccagtccatgcaccaacgga

SEQ ID NO: 6803 - DNA, 541 bp, Homo sapiens
  MAP TO AL078614.2; EXPRESSED IN HEART, SIGNAL = 1.4; EXPRESSED IN BONE MARROW, SIGNAL = 2.2; EXPRESSED IN ADULT LIVER, SIGNAL = 2.1; EXPRESSED IN BRAIN, SIGNAL = 2.1; NT HIT: gi14736670, EVALUE 0.00e+00; SWISSPROT HIT: P14105, EVALUE 2.00e-01; EST_HUMAN HIT: BG622137.1, EVALUE 0.00e+00
accagcttccagccccagccccttgcaaacatgaatctactttttgtccctatacatttatcttttctggatgcttcatgtaaatggaattatacagtatggtaaacacacttgtaatctagatttttatattcaactaagttcaacatgtatccagaaccaaatgtttaaattttctttctagaagtttgaaaatatttatcttccttgatacttactactccttctgttttctctctctcatactgaaagagactttcttttaaatgatcacattcattcgttagcttcttacttttctcttctagcacgaggtctttctttccactctcaataaagcctctttggatattagttactgtctctttatgatcctctttctgatgaacgtcatctagttgctgtacaagccacgcattttcacgttggaggtgacatatcctctcttctacacagttccactttccagtggaattattcactttagcttctgcattttgatacatctctttcatttcctgtgtttgctgctgtgtttggg

SEQ ID NO: 6804 - DNA, 526 bp, Homo sapiens
  MAP TO AC002094.1; EXPRESSED IN PLACENTA, SIGNAL = 1.6; EXPRESSED IN HELA, SIGNAL = 3.1; EXPRESSED IN ADULT LIVER, SIGNAL = 1.8; EXPRESSED IN BONE MARROW, SIGNAL = 1.8; EXPRESSED IN HEART, SIGNAL = 1.6; EXPRESSED IN LUNG, SIGNAL = 1.7; EXPRESSED IN FETAL LIVER, SIGNAL = 1.7; EXPRESSED IN BRAIN, SIGNAL = 1.8; SWISSPROT HIT: O60309, EVALUE 3.00e-48; NT HIT: gi13633133, EVALUE 0.00e+00; EST_HUMAN HIT: AL564452.1, EVALUE 1.00e-127
agcaggaggccccaacccagtctccagaggaggtggaaacttctgcaacccaagaggaggccacaactgatcctccaggtcctcctgtggaggctgacccttcccgcagtgagcaggaacagccagcttagccctctgagtcttctggggaggttgaatcttctccagccaagaaggagaccccagctcagcctccagaacattatgaagttacagtttcacctccaggtcaccatcaagctcagcattccggtttgcccaatgtcactgttaagcctccagatatgcagctcaccatagcaacagagcctactgcagaggtgggaacttctccagtctaccaagagggtacagctcagctctcagggccagttaatgatgtagaaccttctgccacccagcatgggggcccacctctgcctccagagtcattggaagaggctgggcctttaccagttcaacaggagacttcagttcagtctccagaacctattaaggatcagaacccctctgcagcccagcagga

SEQ ID NO: 6805 - DNA, 501 bp, Homo sapiens
  MAP TO AL139195.2; EXPRESSED IN ADULT LIVER, SIGNAL = 1.5; EXPRESSED IN PLACENTA, SIGNAL = 2.1; EXPRESSED IN BRAIN, SIGNAL = 1.3; EXPRESSED IN HELA, SIGNAL = 1.7; EXPRESSED IN BONE MARROW, SIGNAL = 1.3; EXPRESSED IN LUNG, SIGNAL = 1.1; EXPRESSED IN HEART, SIGNAL = 1.4; EXPRESSED IN FETAL LIVER, SIGNAL = 1.3; SWISSPROT HIT: P46566, EVALUE 2.10e+00; NT HIT: gi16190317, EVALUE 0.00e+00; EST_HUMAN HIT: BG776298.1, EVALUE 0.00e+00
gccagcttggaaaactgggacgtacaaaggaaaaccacaagtttctatttctatcactgaaaaggtaaaatccatgcaatatgataaacagggtatagcagatacatggcaagttgttggaacagtgacttgcaaggtgagatttttctctggtacttgctttatcgttttatttaacatatggagaaaagttaaatttgctagttgtattttaaataacattttttattttcatcttaagcagcagtttttaaatgggagagtcatgtaaaattttatgttatctttttgcattccttaccaattatattagttatctgtggctgtgtaaagaattgtctcattgtccccaaaatagacatttattattttcatagtttctgtagggattagcttagctgggaactttcagggtagaatcactcatgaagttgcagtcaagttttcagttgaggctatagtcatctgaaggtctgactgaggctggaagatctgcttgca

SEQ ID NO: 6806 - DNA, 501 bp, Homo sapiens
  MAP TO AJ009611.1; EXPRESSED IN LUNG, SIGNAL = 1.6; EXPRESSED IN HEART, SIGNAL = 1.7; EXPRESSED IN FETAL LIVER, SIGNAL = 1.5; EXPRESSED IN PLACENTA, SIGNAL = 1.5; EXPRESSED IN HELA, SIGNAL = 0.9; EXPRESSED IN ADULT LIVER, SIGNAL = 1.6; EST_HUMAN HIT: AU145256.1, EVALUE 5.00e-88; SWISSPROT HIT: O43345, EVALUE 2.00e-37; NT HIT: gi16177795, EVALUE 0.00e+00
ttggaagagcaaagcccgcctgaaggttttcccacactggctgcatttacaggtttctccccagtgtgctttctctcatgtttgtgtaaagatgaggaccaaccatacgttttcccacacgtttcacatttatagactttctctctagtttgtgatttgacatctgtggaggggcgaggcctcgcggaagactttcccacgctgcccccactcacaggtttctttttagcatgcgttctcgcgtgtttgtgtaaggatgagggccaaccgaatgctttcccgcattttccacacttatagggtttctccccgttgtgaattctcacgtgtcgttgaaaggatgttgcccagcagtaggctttcccacactgcttgcactcatacggtctccctccggcgtgcatgatcatatggactcgaaaggatttctgacacctgaaggctttcccacagtgcttgcactcatacggtctccctccggcgtgcatcatcacatgtgcg

SEQ ID NO: 6807 - DNA, 516 bp, Homo sapiens
  MAP TO AL161781.2; EXPRESSED IN ADULT LIVER, SIGNAL = 1.7; EXPRESSED IN BONE MARROW, SIGNAL = 1.4; EXPRESSED IN LUNG, SIGNAL = 1.4; EXPRESSED IN HEART, SIGNAL = 1.6; EXPRESSED IN FETAL LIVER, SIGNAL = 1.4; NT HIT: M59217.1, EVALUE 7.70e+00; SWISSPROT HIT: P03181, EVALUE 1.60e+00; EST_HUMAN HIT: BI464211.1, EVALUE 0.00e+00
agaaggggcagctccggtggcaatgtctgagcccctagctgtgctggtccgggctggcctctctaagacagtgcaggccacgtgatccatcctcctagaggcagtgagcaggtgagggacccctacgacagccaggaggaaaaagctaggcgtccactttccgcagccatgctcaaacagagtgagaggagacggtcctggagctacaggccctggaacacgacggagaatgagggcagccaacaccgcagagcatttgctccctgggtgcccgttccggctcccaggccagcatccacggctggacagagggccactataactactacatcgagaagacgaagacgggagggggaggaccagtggaaggacgacctggcagaagaggaccagcagcaggggaggtcaccaccgccaagcccgagggccccagcgaccctccggccctgctgtccacgctgaatgtgaacgtgggtggccacagctaccagctggactactgcgagctggccggct

SEQ ID NO: 6808 - DNA, 517 bp, Homo sapiens
  MAP TO AC013584.3; EXPRESSED IN ADULT LIVER, SIGNAL =   3; EXPRESSED IN PLACENTA, SIGNAL = 5.7; EXPRESSED IN HELA, SIGNAL = 0.79; EXPRESSED IN BRAIN, SIGNAL = 2.6; EXPRESSED IN HEART, SIGNAL = 3.8; EXPRESSED IN BONE MARROW, SIGNAL =   3; EXPRESSED IN FETAL LIVER, SIGNAL = 4.3; NT HIT: gi14721470, EVALUE 0.00e+00; SWISSPROT HIT: Q04749, EVALUE 7.40e-02; EST_HUMAN HIT: AU124751.1, EVALUE 5.00e-45
tctgggtacagccctgggggggcaccgcctccgccttcagcgtacctgccttcaggaattcctgctcccacccccctaccccccaccactgttcctggctacacctaccagggccatggtttgacacctattgcaccgtcggctctgacaaacagttcagcaagttctctcaaaaggaaagctttctacatggcagggcaaggagatatggactccagttatggaaattacagctatggccaacagagatctacacagagtcctatgtacagaatgcccgacaacagcatttcaaacacaaatcgggggaatggctttgacagaagtgctgaaacatcatccttagcatttaagccaacgaagcagctaatgtcctctgaacagcaaaggaaattcagcagccagtccagtagggctctgacccctccttcctacagtactgctaaaaattcattgggatcaagatccagtgaatcctttgggaagtacacatcgccagtaatgagtgagcatgggg

SEQ ID NO: 6809 - DNA, 533 bp, Homo sapiens
  MAP TO AJ009612.1; EXPRESSED IN FETAL LIVER, SIGNAL = 2.7; EXPRESSED IN LUNG, SIGNAL = 2.2; EXPRESSED IN PLACENTA, SIGNAL = 2.5; EXPRESSED IN BRAIN, SIGNAL = 2.1; EXPRESSED IN HELA, SIGNAL = 5.4; EXPRESSED IN ADULT LIVER, SIGNAL = 2.4; EXPRESSED IN BONE MARROW, SIGNAL = 2.6; SWISSPROT HIT: P23749, EVALUE 1.30e+00; NT HIT: gi10190687, EVALUE 5.00e-75; EST_HUMAN HIT: AU130954.1, EVALUE 8.00e-75
tccagaagccaccttttcctcgcctctctagtctatcatcgtagtcatatgagtcttctaatttgatggtatgggtttcttcctttgtgagtttagacatatcctccactggagtacatgcttgggctttagtttcccattctgaaataaaaaatatattaaaaaatcttcatttatttggagaaaggaaactgccaaaatagaaacaaaagaataaacatagataaaatgcccaaagacaacagctctgaaaacctcatcatcatggtctttaaaacttgggaaaggagacaaagagggcaaaaaaagggagactaagttgttgaaaacagacaggttcttcatattcaacatggacacagagggaataaaacagattaagtcaggtgacagagctaagagaagtcaaaacagtgataacactgtgtgggataacttgggatggcctcatggattaatttatgtaatgtgttcataaagtagacatgctgactctcatcactctctcttccaatctgctccacacaatccca

SEQ ID NO: 6810 - DNA, 517 bp, Homo sapiens
  MAP TO AC011446.2; EXPRESSED IN PLACENTA, SIGNAL = 1.5; EXPRESSED IN ADULT LIVER, SIGNAL = 2.2; EXPRESSED IN LUNG, SIGNAL = 2.2; EXPRESSED IN HEART, SIGNAL = 2.4; EST_HUMAN HIT: AI932384.1, EVALUE 3.00e-68; NT HIT: Z80155.1, EVALUE 2.00e-68
gagggggtctgggggagctggcggcggccccgccgcggagtgctggtaccagatgttgagggggctgggcttccacttacggaactactgccctacacgaaaattgaaacaaaggaaatcaaaaaaaaagatacaacaaaatcaaaggagacacgggattgggaggaagagaggggagcgaagggagaggggccgggaggagagggaggagggggagggggaggaggaggaggaggaggagaggggggacacaggacattgaatggaaaaaagcaacagccacagggaggagggaggggaggagggggagtgagacagggaggggaggagtcgaaaaccaacacaacaaagtgaaaagagaaatgagaaatggagttttgtaagtttcggggttaaaaatagcagaagtttcaaaaattactcacaggcgtccagaggacagaaatcataattgaaacaaaaacagaagccgggttaaaggaaagtgaaaggtcgggcggcacggcccagaactcaa

SEQ ID NO: 6811 - DNA, 518 bp, Homo sapiens
  MAP TO AL157736.2; EXPRESSED IN BRAIN, SIGNAL = 1.8; EXPRESSED IN HELA, SIGNAL = 1.6; EXPRESSED IN ADULT LIVER, SIGNAL = 1.4; EXPRESSED IN LUNG, SIGNAL = 1.7; EXPRESSED IN BONE MARROW, SIGNAL = 1.3; EXPRESSED IN FETAL LIVER, SIGNAL = 1.5; NT HIT: gi4885136, EVALUE 0.00e+00; EST_HUMAN HIT: BE676347.1, EVALUE 0.00e+00; SWISSPROT HIT: O00409, EVALUE 2.00e-67
gcggcagagggaggcaacaggatcagaggggtacagtctgcctttctgttttgggcctcgccagctcatcatttctttgtgatgtctttactaggagccttcacgtaaatgggtccagtcatgcctcccagtaagaagccagaaagctcaggaattagtgtctccagtggactgagtcagtgttacgggggcagcggtttctccaaggcccttcaggaagacgatgacctcgacttttctctgcctgacatccgattagaagagggggccatggaagatgaagagctgaccaacctgaactggctgcacgagagcaagaacttgctgaagagctttggggagtcggtcctcaggagtgtcagccccgtccaggacctggacgatgacacccccccatcccctgcccactctgacatgccctacgatgccaggcagaaccccaactgcaaacccccctactccttcagctgcctcatatttatggccatcgaggactctccaaccaagcgcctgccagt

SEQ ID NO: 6812 - DNA, 510 bp, Homo sapiens
  MAP TO AL078591.17; EXPRESSED IN LUNG, SIGNAL = 1.7; EXPRESSED IN BONE MARROW, SIGNAL =   2; EXPRESSED IN HELA, SIGNAL = 3.9; EXPRESSED IN ADULT LIVER, SIGNAL = 1.6; EXPRESSED IN PLACENTA, SIGNAL = 1.8; EXPRESSED IN HEART, SIGNAL =   2; EXPRESSED IN BRAIN, SIGNAL = 1.8; SWISSPROT HIT: Q39575, EVALUE 4.70e+00; NT HIT: AB037832.1, EVALUE 0.00e+00; EST_HUMAN HIT: BE563044.1, EVALUE 1.80e-01
tcacattttggcaaatcagtcgttcctagatttaatacagttttgctatcatttagatggcattcaggtacaacagatttcttagaattttcatcaggtgacagttcatcatcggagggtagagagtttatggatgtcaaagatgactgtatttcacttatagcacttgtactctcagtacaatgatttcctaatgaaaattttacattataatcaggtttcatcaaaagctgaggaaataatctttcactattgcaaggaccttgcccttgcacagtttcaaagactaaatcagtgtttggatgtgtcgcaaaagaactcggttcactttcaacacctgaatctgaaaatctagatgaggcatatgtggcactaatatctggtaacttaattgtatctccacttactacaacatgatattcttttgtagaaggggcaggtagattacttcgtaatttagttaatgattctccaatagaaagacactttgcttcttgcaaagcttccttt

SEQ ID NO: 6813 - DNA, 502 bp, Homo sapiens
  MAP TO AC016786.4; EXPRESSED IN ADULT LIVER, SIGNAL = 1.2; EXPRESSED IN HEART, SIGNAL = 1.5; EXPRESSED IN FETAL LIVER, SIGNAL = 1.2; EXPRESSED IN LUNG, SIGNAL = 1.6; EXPRESSED IN BONE MARROW, SIGNAL = 1.5; EXPRESSED IN BRAIN, SIGNAL = 1.5; EXPRESSED IN HELA, SIGNAL =   2; SWISSPROT HIT: Q9Y5I4, EVALUE 4.00e-11; NT HIT: gi14758442, EVALUE 0.00e+00; EST_HUMAN HIT: R13215.1, EVALUE 3.00e-03
tgatcgtgctccccacgctgcagaacgacaccgcggagctgcaggtgccgcgcaacgctggcctgggctatctggtgagcactgtgcgcgccctagacagcgacttcggcgagagcgggcgtctcacctacgagatcgtggacggcaacgacgaccacctgtttgagatcgacccgtccagcggcgagatccgcacgctgcaccctttctgggaggacgtgacgcccgtggtggagctggtggtgaaggtgaccgaccacggcaagcctaccctgtccgcagtggccaagctcatcatccgctcggtgagcggatcccttcccgagggggtaccacgggtgaatggcgagcagcaccactgggacatgtcgctgccgctcatcgtgactctgagcactatctccatcatcctcctagcggccatgatcaccatcgccgtcaagtgcaagcgcgagaacaaggagatccgcacttacaactgccgcatcgccgagtacagcca

SEQ ID NO: 6814 - DNA, 529 bp, Homo sapiens
  MAP TO AP001621.1; EXPRESSED IN LUNG, SIGNAL = 1.4; EXPRESSED IN BONE MARROW, SIGNAL = 0.98; EXPRESSED IN HELA, SIGNAL = 1.1; EXPRESSED IN ADULT LIVER, SIGNAL = 1.6; EXPRESSED IN PLACENTA, SIGNAL = 1.6; SWISSPROT HIT: Q9UP79, EVALUE 3.80e-02; NT HIT: AB057765.1, EVALUE 2.00e+00; EST_HUMAN HIT: BG392046.1, EVALUE 7.40e-01
agccccagccaggtgaaccccagccagcggagcaccagccacgcgaactccagccaggggagccccagccaggggagccccagccaggagagccccagccaggggagcaccagccaggcgagccccagccataggaacactatcggggtgataggcaccacctcctccccgaaggctactgggtcaacccacagcttccctcctggggccacagatggcccactggccctccctggacagctacagggaaactccatcatggagccaccctcctggccttcccctactgaggaccccaccggccacttcctgtggcatgccacccgttccacccgggaaacacttctgaatcccacgtggctgcgaaatgaggacagtggaccctccggttctgtagacctgccattgacctccaccctcacagctctgaagacccccgcctgtggtgagttcctcgaatggtgcatggggactaggactaataggacccatagcctgtgtgagcctctggggcaaagctcctgcagcc

SEQ ID NO: 6815 - DNA, 534 bp, Homo sapiens
  MAP TO AL133284.7; EXPRESSED IN LUNG, SIGNAL = 1.5; EXPRESSED IN HEART, SIGNAL =   2; EXPRESSED IN FETAL LIVER, SIGNAL = 1.5; EXPRESSED IN BRAIN, SIGNAL = 1.6; EXPRESSED IN ADULT LIVER, SIGNAL = 1.7; EXPRESSED IN PLACENTA, SIGNAL = 1.9; EXPRESSED IN HELA, SIGNAL = 2.8; SWISSPROT HIT: Q13049, EVALUE 1.00e-104; NT HIT: U18543.1, EVALUE 0.00e+00; EST_HUMAN HIT: AU133660.1, EVALUE 0.00e+00
cacatgccagcaatgcagcggaaatcctcattctccgagaagaagtggctaatctggcgacccagctgcccatcagggcctacagagccaatggaaaagccaccctccaggtggtgctcattctgccgattctccagattgaggcctaagccctgggtgaagtagacggtgccctcagcatcacaggtgacaaatttgggccgcacagcactacataggcagctgtatttgaccacccctgatcctcgatcaactgtgaaacaccaaagctttccaccttccacatcggttactacaaactggccagatggcaaggctgtgataccccatggtttgctcagctggctcctgtgacaggccacgcagtggccatccaaggtatataccttgagggagttatcatagctgtcagtcacaccaatcagcccctggcagttcattgccactgagagaggagtgaggttgggtagatctgccccaaggaagcttagcacaaagctatcaatgccactggggctgcggcggatttccttc

SEQ ID NO: 6816 - DNA, 507 bp, Homo sapiens
  MAP TO AC004923.2; EXPRESSED IN LUNG, SIGNAL =   4; EXPRESSED IN FETAL LIVER, SIGNAL = 5.2; EXPRESSED IN ADULT LIVER, SIGNAL = 4.2; EXPRESSED IN PLACENTA, SIGNAL = 6.8; EXPRESSED IN HELA, SIGNAL =   3; NT HIT: L78810.1, EVALUE 6.00e-96; EST_HUMAN HIT: AI683611.1, EVALUE 0.00e+00
ggttgccactgctggctcgggcagcctgcttttgttctcttacctggccccatccacatcctgctgattggtccattttacagagagcctgagtggtctgtttggacagggcactgattcgtgtctttacaatccctgagctccccacacaaaggctccccacgtccccactagattagctagatacagagtgtccacacaaaggttctccaagtccccaccatagtagctagatacagagtgtcgattggtgcattcacaaaccctgagctagacacagggtgctgattggtgtgtttacaaaccttgagctagatacagagtgcagattggtgtatttacaatcccttagctagacataaattttctccaagtccccaacagactcaggagcccagctggcttcacccagtggattctgcacaggagctgcaggtggagctgcctgccagttcctctctgtgcacccacactcctcagcccttgggtggtcgatgggactgggcg

SEQ ID NO: 6817 - DNA, 540 bp, Homo sapiens
  MAP TO AC009487.1; EXPRESSED IN ADULT LIVER, SIGNAL =   2; EXPRESSED IN PLACENTA, SIGNAL = 1.8; EXPRESSED IN BRAIN, SIGNAL = 1.7; EXPRESSED IN HELA, SIGNAL = 1.3; EXPRESSED IN BONE MARROW, SIGNAL = 2.4; EXPRESSED IN FETAL LIVER, SIGNAL = 2.4; EXPRESSED IN LUNG, SIGNAL =   2; SWISSPROT HIT: P47024, EVALUE 5.10e+00; EST_HUMAN HIT: AL522811.1, EVALUE 0.00e+00
tcacggcctctaagcccaaaagctcttccactgcactaactactaatgtaactgaacaaactgaaaaggatggagataaagatgtatttgcatcagaagtaactccttcagacctacagaaacaaatgggcaatttagaagatgcagaaacaaggatctcttagttgcagcagaggcattttcagaattgaatcacttaagcccagttcaaggaactgaagcttctctttgtgcaccatcagtctatgaagggaaaatcttcacccagaagtccaaggtaccagtgttggatgaaggattaacatctgttgaaacctacacctctgcaattagagcaaatgacaataaatctatggctgatgtccttggtgatggtggaaactcctcactcactatctctgaaggtcctattgtctctgagcgcaggcttaaccaggaagtagcgctgaacttaaaagaagatcatgaagtagaagttggtgtactaaaagaaagtgttgacttaccagaagaaaagcttccaatttctgacagccctcc

SEQ ID NO: 6818 - DNA, 500 bp, Homo sapiens
  MAP TO AC008990.5; EXPRESSED IN ADULT LIVER, SIGNAL = 1.9; EXPRESSED IN PLACENTA, SIGNAL = 4.1; EXPRESSED IN BRAIN, SIGNAL = 2.5; EXPRESSED IN HELA, SIGNAL = 3.9; EXPRESSED IN LUNG, SIGNAL = 2.5; EXPRESSED IN BONE MARROW, SIGNAL = 3.8; SWISSPROT HIT: Q05481, EVALUE 3.00e-66; NT HIT: gi13430887, EVALUE 1.00e-127; EST_HUMAN HIT: BG818171.1, EVALUE 0.00e+00
gccattttgcataagccaccgcacccggccaatatttaatgcttagtaagagttgaggactgcttaaaggctttcccacattcttgacatttgtagagtttctctccagtatgaattattttgtttaataaggtttgaggactggttaaatgtattgtcacattcttcacagttgtagggtttctgtctagtatgaattttcctatgtttagtaagagttgaggattggttaaaggctttaccacattcttcacatttgtaagatttctctcctgtatgaattatcttatgtttagtaagatttgaggatcggttaaaagctttgccacattcttcacatttgtagggtttctctccagtgtgaattctcttatgtgtagtaaggattgatgactggctaaaagctttgccacattcttcacatttgtaaggtttctctccagtatgaattatcttatgtgcagtaagttgtggggaccggttaaaagctttgccacatt

SEQ ID NO: 6819 - DNA, 528 bp, Homo sapiens
  MAP TO AC004525.1; EXPRESSED IN ADULT LIVER, SIGNAL =   3; EXPRESSED IN PLACENTA, SIGNAL = 3.7; EXPRESSED IN BRAIN, SIGNAL = 0.82; EXPRESSED IN HELA, SIGNAL = 0.34; EXPRESSED IN BONE MARROW, SIGNAL = 3.4; EXPRESSED IN LUNG, SIGNAL = 6.9; EXPRESSED IN HEART, SIGNAL = 1.5; EXPRESSED IN FETAL LIVER, SIGNAL = 1.6; EST_HUMAN HIT: AW950285.1, EVALUE 0.00e+00; SWISSPROT HIT: P24394, EVALUE 5.00e-13; NT HIT: AF421855.1, EVALUE 0.00e+00
tgggccatgatctggtgggcaaaacatgccttgggcagttacaacagggacagtctgctgcagaagctgtggagggagcagccaacaactcgttcacaagtcgaggtgcccaagggcctcagttttcctgcaggggcctgccgtggggcacggcgacccagtgccctctactctcatgggatgtggcgagcccagcccaatgctgggcggggtccagtctctgcagcccagtgttaggccaacgtcagtggggccaatcaccttcataccatggttcttcaagtcttttggaaatctgccagcctggctgccttccaggaggtggcatttcccaggcatggataagccctagtcctcatctgcagactcagcaacaagaggacatgcacctaagagaccctcatgtatgtgggtcccacggagacaaagttcacgattttgggggtctggcttgagctctgagcattgccaggggcaggatggaaggatgatgaggatttactcttctctgagatgcccgagggtgcc

SEQ ID NO: 6820 - DNA, 514 bp, Homo sapiens
  MAP TO AL035669.27; EXPRESSED IN LUNG, SIGNAL =   2; EXPRESSED IN BONE MARROW, SIGNAL = 1.7; EXPRESSED IN FETAL LIVER, SIGNAL = 3.3; EXPRESSED IN ADULT LIVER, SIGNAL =   2; EXPRESSED IN HELA, SIGNAL = 3.8; EXPRESSED IN BRAIN, SIGNAL = 1.8; SWISSPROT HIT: Q50634, EVALUE 1.60e+00; NT HIT: gi14769816, EVALUE 6.00e-13; EST_HUMAN HIT: BG170042.1, EVALUE 2.80e+00
caggggcgtggctgggaaccgggcgtggcctgagctgggggcgtggcctagctgtgggggcgtggctgggccgtgggggcgggccctccgcgcaagcatccgccgacgtggggcggggccgggcgtgcgggcggttgggcgggggcggggccggcggcggcgggtaacggagggggcggggctggcgcaggggtggggttgccgttgcgggccgggccggcgcaggcgctgtgcgcggcactcagcggttttccctcccccaacggcgcgccggctgtggccggcgcagagtagtgctcgggccgggggtcgcctcccgcctcccgcctcccgcctcccgccgcccgccgcccgcgtcgccctcgccgccgttgggccgcgccgcgccgccatgtcgggccccggaccgcgggagccgccgccggaggcaggcgcggcaggcggcgaggcggccgtcgagggcgcgggcggcggggacgcggcgctgggcgagccggggctgagcttcacgacc

SEQ ID NO: 6821 - DNA, 532 bp, Homo sapiens
  MAP TO AP000539.1; EXPRESSED IN PLACENTA, SIGNAL = 2.2; EXPRESSED IN HELA, SIGNAL =   2; EXPRESSED IN ADULT LIVER, SIGNAL = 1.5; EXPRESSED IN BONE MARROW, SIGNAL = 1.2; EXPRESSED IN LUNG, SIGNAL = 1.4; EXPRESSED IN FETAL LIVER, SIGNAL = 1.3; SWISSPROT HIT: P04275, EVALUE 5.70e-01; NT HIT: AL163202.2, EVALUE 8.00e-77; EST_HUMAN HIT: BF929482.1, EVALUE 2.00e-19
tgagggtctgaaagcttgtccctcacataggattccagaacactgctgcaggtttctgagcttttgtccctcacattggattccacaacaatgctccgagggtttgaatgattgtccttcacaaaggattccagaaatctgctgctgggttctgcttgtttgtacctcacaaggcaatccagagcactgcttctggtttctgagggtttgtccttcaaataggataccaccacactgctacgacagtctgaatgtttgtccgtgacaaatgaatccagaacactgttgcagggttccgagtgtttgtccctcacgtaggattccagaacacagctgcggatttcggagtgtttgtccctcacatgggactcaaaaacactgctgctgctcggttcacagttgtcccttacatatgattgctgaacactgctatgaggttctgaatgcttgtccctcacaaaggattccagaacactgctgctgggttctgagtgtttgacactcacatagcattccagaacactgctgctgg

SEQ ID NO: 6822 - DNA, 524 bp, Homo sapiens
  MAP TO AC007663.28; EXPRESSED IN PLACENTA, SIGNAL = 3.6; EXPRESSED IN BRAIN, SIGNAL = 4.2; EXPRESSED IN HELA, SIGNAL = 2.3; EXPRESSED IN BONE MARROW, SIGNAL = 4.3; EXPRESSED IN HEART, SIGNAL = 2.9; EXPRESSED IN ADULT LIVER, SIGNAL = 2.3; SWISSPROT HIT: Q9Y3E5, EVALUE 3.70e+00; NT HIT: AF012918.1, EVALUE 5.00e-07; EST_HUMAN HIT: BE742694.1, EVALUE 1.90e-01
tgggcccatgctgttccctcccacctgccacgggtgaacctgacaggagtggggatggagcctggcatcccgagggaacctcctggagtaatcactccacatgctcgcggtaaatactgggcccttcttcccctcccagtaattgaacttatttacttttaactaagattaaatgttctctgcgagctcaagatactgactgccctgtcaggctcagtccacgctctgctcttcctgcctctggggaccaaccccaggcagggagggaccaggcagccctggagaagcacagaaattgtttttccaggaaactctgggtggataatccacttacatcatcaccactgtcaccatgagcatggccataaccaccatcatggtcagctccaccagcatcaccaccaccaccaccaccatcaccatcactgccaccaccaccgccaccatgactaccaccaccatcaccaccaccaccaccatcactaccaccaccaccatcactaccaccaccaccaccacgatca

SEQ ID NO: 6823 - DNA, 586 bp, Homo sapiens
  MAP TO AC010680.2; EXPRESSED IN LUNG, SIGNAL = 1.4; EXPRESSED IN ADULT LIVER, SIGNAL = 1.4; EXPRESSED IN HELA, SIGNAL = 1.8; EXPRESSED IN BRAIN, SIGNAL = 1.3; SWISSPROT HIT: Q62234, EVALUE 4.00e-13; NT HIT: gi16157781, EVALUE 0.00e+00; EST_HUMAN HIT: AV702185.1, EVALUE 0.00e+00
tcccttggaagatggcggctcaccaattaagtcctatatacttgaaaagagagaaaccagccgacttttgtggacagtggtttctgaagatattcagtcttgcaggcatgtggcaaccaaacttatccaaggaaatgagtacatcttccgggtctcagctgtaaaccactatggcaaaggagaacctgtacagtctgaacctgtcaaaatggtagacagatttggtatgtagagcatgtgagggaattgacatggaaacatttatagcagagtttaggaaatcatggatttctaataaatttgcttccttttcaggtccccctggccctcctgaaaaaccagaggtatcaaatgtcactaagaacactgccactgtcagctggaaaaggccagtggatgatggtggcagcgaaattacaggatatcatgtagaaaggagagaaaagaaaagcctgcgatgggtgagagcaataaaaacaccagtttccgatctcaggtgcaaagtaacaggactgcaagaaggaagcacctacgaattccgtgtcagtgcagaaaacagagcaggaattggtccacccagtgaggc

SEQ ID NO: 6824 - DNA, 507 bp, Homo sapiens
  MAP TO AC008471.6; EXPRESSED IN PLACENTA, SIGNAL =  26; EXPRESSED IN BONE MARROW, SIGNAL =  11; EXPRESSED IN LUNG, SIGNAL = 8.1; EXPRESSED IN HEART, SIGNAL =  23; EXPRESSED IN FETAL LIVER, SIGNAL =  11; EXPRESSED IN ADULT LIVER, SIGNAL =  18; EXPRESSED IN BRAIN, SIGNAL =  15; EXPRESSED IN HELA, SIGNAL = 3.8; SWISSPROT HIT: O94826, EVALUE 9.30e-01; EST_HUMAN HIT: BI553396.1, EVALUE 1.00e-11
gcccttgctcctgcccacccccagctgcaggttcttccagagccgggcctggaaggaggaggacgccgccggcggctctggctcgcccgccgcggcagcccggggctccatcctccaccccctgctcctcctctcccctcctcctcctcctcctcctcctgcttctcctccctcttcggctgcacctcctcccgggtccccgcggcgctggcggtggcggcggcggcggcggcgggcgcagcagcagaaaccgggagtgcccagcgacttcaggccagctcgggggaaagaagcggccgccgccgccgaggctctctggcctcgggactccggcgctgcctcttcctcccgcacctgctggggtgggctggagccgtaaccgaatcccggccgcggcgcctgcaaagtttttccctcgaagctccgcggctccagtccactggcgtcccccaggccgcgccctggctccctcttctctctgaccgagctcgggaagctgcacgcacc

SEQ ID NO: 6825 - DNA, 534 bp, Homo sapiens
  MAP TO AL031388.1; EXPRESSED IN BRAIN, SIGNAL = 1.5; EXPRESSED IN HELA, SIGNAL = 1.5; EXPRESSED IN ADULT LIVER, SIGNAL = 1.6; EXPRESSED IN LUNG, SIGNAL = 1.4; NT HIT: AB008681.1, EVALUE 0.00e+00; SWISSPROT HIT: P10262, EVALUE 2.00e-10; EST_HUMAN HIT: AA699301.1, EVALUE 1.00e-104
tgctccgggcaccctcagtcctattgttgaatcatctggttgtgggctcctggcccagagaacctttgtcttctggggcagtgcgccttctagtgattacttcagcatagtgggcaagggcaagggggcagcttgtttcttgttggacaatcttttttaaagtatccttgccaaccacactgataacaagccacaccagttgattggcctgctccattttctatcctctctgaaccagcaaggtttgtttgtctgagggctatgacttaggctgcagcctttctctgatctcgcttttcctttttggcctgttcctcttggtccctattatagaacaccgaggttgccagttttaataattcctccagattttgttcagggcccagtgcttgcttttggagctttttcctgatatctgtggctgattgggtaataaacttatcttttaggctcaattgaccctcaagggagtcaggtgatacgggagtgtatttttctaaggccttccatagccactcgaggaaggcagaagga

SEQ ID NO: 6826 - DNA, 600 bp, Homo sapiens
  MAP TO AC002404.1; EXPRESSED IN ADULT LIVER, SIGNAL = 1.8; EXPRESSED IN PLACENTA, SIGNAL = 2.1; EXPRESSED IN BRAIN, SIGNAL = 1.8; EXPRESSED IN HELA, SIGNAL = 5.7; EXPRESSED IN LUNG, SIGNAL =   2; EXPRESSED IN HEART, SIGNAL =   2; EXPRESSED IN BONE MARROW, SIGNAL =   2; EXPRESSED IN FETAL LIVER, SIGNAL = 1.6; NT HIT: gi15311881, EVALUE 0.00e+00; SWISSPROT HIT: P17010, EVALUE 1.00e-124; EST_HUMAN HIT: AW501537.1, EVALUE 0.00e+00
cgtgtgaatggaaataacgtgccgtttaaagcctgaggcatctgtagtgctatactcacagtactcacactgatacactttcctgccactgtgtgtcttcatatgctttttaagctcactctgttgcctaaatccctttctacatctcttgcacctaaatggaagatcctttgtgtgaactgagagaatatggcgacttagaacaaatggatctgcaatcttaaagtcacaatgtctacactggtgcatttttttgcccttgtgggcagccacgtgtttcttgagttctgaaggcctgtgaaagcctttatcacacatgtcacacttatgggggtagtctttcgtgtgaactgaaattatgtgtcgtttcaaatcacttgagttcgaactcttgtggtcgcaatgcaaacactggtgtgttttgctttcttggtggataagagcatgttgctgcacctctttggtatccgagaaagtcagaagacaaatgtcacacttgaatggcatctctttactatgcttagttttgacatgcgttttcaagttagaagagtctgcagacctatattcgcagtactggcattggtacggcttctcccc

SEQ ID NO: 6827 - DNA, 509 bp, Homo sapiens
  MAP TO AL117339.3; EXPRESSED IN ADULT LIVER, SIGNAL = 3.4; EXPRESSED IN PLACENTA, SIGNAL = 2.4; EXPRESSED IN HELA, SIGNAL = 3.8; EXPRESSED IN BRAIN, SIGNAL = 3.3; EXPRESSED IN HEART, SIGNAL = 5.5; EXPRESSED IN LUNG, SIGNAL = 5.2; EXPRESSED IN BONE MARROW, SIGNAL = 6.5; NT HIT: gi15299301, EVALUE 0.00e+00; SWISSPROT HIT: P29295, EVALUE 3.20e-01; EST_HUMAN HIT: BF033054.1, EVALUE 0.00e+00
cccgtgtgccagagtgccaggtcaccacatactattatgttgggtttgcatatttgatgatgtgtcactaccaggatgccatccgggtctttgccaacatcctcctctacatccagaggaccaagagcatgttccagaggaccacatacaagtatgagatgattaacaagcagaatgagcagatgcatgcactgctggccattgccctcacgatgtaccccatgagtattgatgagagcattcacctccagcggtgggataaatacagcaacaagatgctgtgcatgcagaaaggtgacccagaagtctatgaagaacttttcagttacttctgccccaagttcctgtcgcctgtagtgcccaactacgataatgtgcaccccaactaccacaaagagcccttcctgcagcagccgaaggtgttttctgatgaagtacagcagcaggcccagctttcaaccatccgcagcttcctcaagctctacaccaccatgcctgtggccaagctg

SEQ ID NO: 6828 - DNA, 525 bp, Homo sapiens
  MAP TO AC004142.1; EXPRESSED IN PLACENTA, SIGNAL = 2.2; EXPRESSED IN BRAIN, SIGNAL = 2.1; EXPRESSED IN ADULT LIVER, SIGNAL = 2.7; EXPRESSED IN HELA, SIGNAL = 0.94; EXPRESSED IN LUNG, SIGNAL = 2.1; EXPRESSED IN HEART, SIGNAL =   2; EXPRESSED IN BONE MARROW, SIGNAL = 2.1; EXPRESSED IN FETAL LIVER, SIGNAL = 2.1; NT HIT: gi14751033, EVALUE 0.00e+00; SWISSPROT HIT: O75325, EVALUE 1.00e-41; EST_HUMAN HIT: AA449162.1, EVALUE 0.00e+00
gttttccagtccaaccaaggcgttatctggtatttctgtgaggtttataccagctataaccaggctgcgaagattgataagaggcttaaagttcatgtctttgattctgataattggattttccccaatcatcagaatctctagatttggaagagcatcaaaccacttactgttgatcatctgcaatctatttgaattgagatgaagtcgaagaagattatgtaggccaataaaggctccaggtgaaattgtagaaagcaagttgtgattaatatagagttcttgtaagttgctcagttcggacagacatttttcaggcagttcagtaagtttgttttcctctaggtacacagaaaggagctgaggcatcttttttacattaatattggtgactgaagataaattgttttgagataaatccaggccagtaaggtttactggaaagtctgtggagtattcaatttttgcaatattgttagtctgtaggagaagaatctgtgtgttagctggcaatctggctgggaa

SEQ ID NO: 6829 - DNA, 518 bp, Homo sapiens
  MAP TO AL049870.3; EXPRESSED IN PLACENTA, SIGNAL = 3.1; EXPRESSED IN ADULT LIVER, SIGNAL = 1.9; EXPRESSED IN HELA, SIGNAL = 2.2; EXPRESSED IN HEART, SIGNAL = 2.2; EXPRESSED IN LUNG, SIGNAL = 2.1; EXPRESSED IN FETAL LIVER, SIGNAL = 1.9; EST_HUMAN HIT: BE833556.1, EVALUE 1.00e-100; NT HIT: AB007883.1, EVALUE 0.00e+00; SWISSPROT HIT: Q00752, EVALUE 1.60e+00
tccctagcccgaaagcttggtgatcaggagacagaagaagaatctgagacagctttctccgcacttcaacaaattggggagcgacttggccaagacaggtttcaatcttacatttctcgtctgccctctgccctgaggagacactacaatcgccgcctggagtcccagtttggaagtcaggttccttattatttggaacttgaagcctctggatttcctgaagatccccttccctgtgcagtgactctttccaacagcaatcttaaatttgggattattcctcaggagctgcattcacgattattggatcaggaagactataagaaccggacccaggccgtcgaagaactaaagcaggtgctgggaaaatttaaccctagttctactcctcattctagtcttgttggcttcattagtttgctatataatttgttagacgattctaacttcaaagtggtgcatggcacacttgaagtcctgcatttactggttattcgccttggagagcaggtacagca

SEQ ID NO: 6830 - DNA, 582 bp, Homo sapiens
  MAP TO AC006115.1; EXPRESSED IN ADULT LIVER, SIGNAL = 1.4; EXPRESSED IN HELA, SIGNAL = 2.1; EXPRESSED IN LUNG, SIGNAL = 1.2; SWISSPROT HIT: P52742, EVALUE 3.00e-09; EST_HUMAN HIT: AA065303.1, EVALUE 0.00e+00; NT HIT: gi14768850, EVALUE 0.00e+00
ggggccaagctgcgaatgacagaccattcatagtttctgcttccagagggcttctccctatcatgaatcttctggtgctcagtgaggtcagagctatgagcaaagcactccccacactcctgacattcatagagcatccctcgagggcgaaatgtttgttcaccaaaaggcagagagtgaattacagaggtctcattgctcctatgctcaatgtatttctttttagcacgagccttctggtattcacggacatttgagctgggaacagagaattcgccatccttcttaaactcaccagatccctctccaggaacacttttctgaggtttggcacggaatacactctgtatgacagagtcttcatagttgcgattcttactgcccccttcacaagggttctctctggcaggaatcttctgtcgcttatcattaaggtctgagatataaatggaggattctcccttctcattagattccaccaattcatttccattgtgacttcttggaggtttggaagccactaagctatggataacagacctactgtattcccttccttcagaggtgttccctccagcacga

SEQ ID NO: 6831 - DNA, 520 bp, Homo sapiens
  MAP TO AP001669.1; EXPRESSED IN BONE MARROW, SIGNAL = 4.3; EXPRESSED IN ADULT LIVER, SIGNAL =   4; EXPRESSED IN LUNG, SIGNAL = 3.4; EXPRESSED IN HEART, SIGNAL = 3.3; SWISSPROT HIT: P21414, EVALUE 8.00e-07; EST_HUMAN HIT: BI767970.1, EVALUE 0.00e+00; NT HIT: AL163246.2, EVALUE 0.00e+00
ttgcacccttcatcccagcctctcttcactttctcttggaccgaccctgacacccatcaggctcagcaaatgacctgggctgtactgatgcaagtcttcacagatggcccctattatttcagtcaagcccaaatttcttcctcatctgttacctctcttgacatcataaaaacacatgtgctctccctgctgaccatgtccggctaatctcccaaaccccaatcccttctaaaacacaacaactcctttccttcctaggcatggttagtgtggtcagaattcttacacaagagccgggaccacaccctgtagcctttctgcccaaacaacttgaccttactcttttagcctagccctcatgtctgcgtgcagtggctgccactgctttaatacttttagaggccctaaaaatcacaaactatgctcaactcactctctacagttctcataacttccaaaatctattctcttcctcacacctgatgcatatactttctgctccccggctccttcagccgta

SEQ ID NO: 6832 - DNA, 544 bp, Homo sapiens
  MAP TO AL022101.1; EXPRESSED IN ADULT LIVER, SIGNAL = 2.1; EXPRESSED IN BRAIN, SIGNAL = 1.9; EXPRESSED IN HELA, SIGNAL = 2.5; EXPRESSED IN BONE MARROW, SIGNAL = 2.3; EXPRESSED IN LUNG, SIGNAL = 2.2; EXPRESSED IN HEART, SIGNAL = 2.5; NT HIT: gi15208634, EVALUE 3.30e-02; SWISSPROT HIT: O60813, EVALUE 7.00e-31; EST_HUMAN HIT: AI991777.1, EVALUE 7.60e-01
cccatacctgggccacttgaggaatcttcagaagctcgttctctcccacatggatgtctctcgctacgtttccccagagcagaagaaggagattgttacccagttcaccactcagttcctcaagctgcgctgcctccaaaagctttatatgaactctgtttctttcctcgaaggccacctggaccagctgctcaggtgagggagggtggtgagctttctctgcagaccacagcagagcctgttacagtaaacactagtgggcatctactgtgagccagcctatgaggatgtaacagtgaaggggacactagaatgtccatgcattgtcctgttggcggccctgtcctgaaatgggtatcatgcaaccctcccaatagagtcagagggatcagtcaggggagatgctatagagaggctgccatgctaggaagctagctactggggggttcagatctagtgagggtgcctttctgaattcttcctgaggatgtgtgtctaagttaagatgatgaaaaataggccaggggcgttggctcatgcctgt

SEQ ID NO: 6833 - DNA, 526 bp, Homo sapiens
  MAP TO AF129756.1; EXPRESSED IN ADULT LIVER, SIGNAL = 1.6; EXPRESSED IN BRAIN, SIGNAL = 4.3; EXPRESSED IN HEART, SIGNAL = 3.7; EXPRESSED IN LUNG, SIGNAL = 2.9; EXPRESSED IN BONE MARROW, SIGNAL = 3.1; EXPRESSED IN HELA, SIGNAL = 3.1; EST_HUMAN HIT: AW651754.1, EVALUE 0.00e+00; SWISSPROT HIT: P48634, EVALUE 5.00e-42; NT HIT: gi14782330, EVALUE 0.00e+00
tttgtcccctcggcgctcactggtgaagtcactgctctctgatgcagtctcccattcctcattggcttggtctgagttctggtttgacagatcaggagacttggcagctgcccggcgaggtgctggggccactgtgactgttgtgagggcctcctcaggtgcaggagcggaggctggaagggttagggagggcttgccctcagacccccttgcggcattctcccgttcctgcttcagcctccggaaacgaggcggtttatcctgctgctgagccctcccatgtcgcctccttcggggtcgctccccatcttccatgcccacattgctacctccattgctgcctccgcgcgccacaggggacagaggccctgggatcaacttctctttcaaaggctccttacttggtggcaaagggcctgtgggaggtttcttgggagccagagacttggctggagggctccagcctgggcaaacttgaggagggggcctccctcctcctcggccccggcgagatggcacccctctg

SEQ ID NO: 6834 - DNA, 511 bp, Homo sapiens
  MAP TO AL139412.2; EXPRESSED IN ADULT LIVER, SIGNAL = 1.3; EXPRESSED IN BONE MARROW, SIGNAL = 1.1; EXPRESSED IN BRAIN, SIGNAL = 1.2; EXPRESSED IN HELA, SIGNAL =   2; SWISSPROT HIT: P03266, EVALUE 1.10e-01; EST_HUMAN HIT: BE561360.1, EVALUE 0.00e+00
tgcagacctgcatcaaccctggtctttgaggcttcaactcctgaaaatcaatcaattgagccctacctttaccagacctttagtctctcttcttctgtttctttttggctttctggacagtgctgactccagctctttccttcttgggatgctgctgcctcttcctcttacctctgctgcttgagccagtgtgtgctctgctctctgcttccctagccccgccatccttctcatcccttacatccaagatgtcctcctcctcttgatgctgctgtcttttcttcttgcttttcctgcttcttccatcactgcatgctctgctctctgcttccctggttccaccacctaaaagtttcctcacctctatcttctaggttcaagtcctcctcctcctgttgctgcctcttctttcttcggctgcatgggtcagcatatgccctgctctctacctcctctgtcctgacactgcctgcagcctccttgccttttcctccttcctccaagaccccca

SEQ ID NO: 6835 - DNA, 541 bp, Homo sapiens
  MAP TO AL034450.1; EXPRESSED IN BRAIN, SIGNAL = 1.3; EXPRESSED IN ADULT LIVER, SIGNAL = 1.6; EXPRESSED IN PLACENTA, SIGNAL = 1.6; EXPRESSED IN HELA, SIGNAL =   2; EXPRESSED IN LUNG, SIGNAL = 1.6; EXPRESSED IN FETAL LIVER, SIGNAL = 1.5; EST_HUMAN HIT: BG941261.1, EVALUE 1.00e-73; NT HIT: gi12719155, EVALUE 8.00e-74; SWISSPROT HIT: P40618, EVALUE 6.00e-22
cattgtgaccttgaatcaggcaatgtgttttagatatgacaccaaaagcacaagcaacaaaagaaaaaaagataaattgcacttcaaaattaaaagcttctgtgtatcaaaggacactatcaagagagtgaaaagataacccacatggggggggggaatgttttcaaatcatatatctgataagggcctagtatctagaatatataaagaacgtgaaggcaacctaattttaagacaccccaaagactggagtagatatttctacaaagaatatatgcaaaaggtcaataactacatgagaggatgctcaaaattattagtcattaggataatacaaatagaaacacatgagatggactagggaacaatacagtcaggatggctgaaggtgaccacaagaaaccaaagggcaagatgtctgcttatgccttctttgcgcagacatgcagagaagaacataagaagaaaaacccagaggtccctgtcaattttgtagaattttccaagaagtgctctgagaagcggaagaccatgtctggga

SEQ ID NO: 6836 - DNA, 556 bp, Homo sapiens
  MAP TO AL035682.16; EXPRESSED IN HEART, SIGNAL = 1.9; EXPRESSED IN LUNG, SIGNAL = 1.3; EXPRESSED IN ADULT LIVER, SIGNAL = 1.3; EXPRESSED IN PLACENTA, SIGNAL = 1.9; EXPRESSED IN HELA, SIGNAL = 0.68; EXPRESSED IN BONE MARROW, SIGNAL = 1.3; NT HIT: gi14759898, EVALUE 2.10e+00; SWISSPROT HIT: O60610, EVALUE 9.20e-02
tctggaagctggcctggaccctgtaggtgcaggttctagagctctttggggcatctgaaggggagaaatgggagccagctagtcccagccaccagagggagactaaggctatttcaagatagacacttccagcagccaggacccatgcaggtccctgtctgagcttgggacccctgcccatttggtagtgctggttacacgcactggaatggggggctagaaaattcccaggaagacattccaagtgcagggctatggtggggtgaagtgggtccctaaaacacagggccgggggcaggtatcccgtttccctggggttaaagggtgggaggaggttcgaaccatattaagacattaaaaatagcagctacttccaaacctcttaggtgctttagctacaggagggcaaaagctgttttaaggaggaacttggctagaaggttctagtacttatgtttgtgggtttgaaggtataaggtgcattttttttctttagccttgatattttgcaagatgctcaaataaaaatgatggcttttgccttccaagtggctgg

SEQ ID NO: 6837 - DNA, 510 bp, Homo sapiens
  MAP TO AP000529.1; EXPRESSED IN BRAIN, SIGNAL = 8.8; EXPRESSED IN LUNG, SIGNAL =  18; EXPRESSED IN HEART, SIGNAL =  18; EXPRESSED IN ADULT LIVER, SIGNAL =   6; EXPRESSED IN PLACENTA, SIGNAL = 6.8; EST_HUMAN HIT: AV716601.1, EVALUE 5.00e-76; NT HIT: AY014272.1, EVALUE 1.00e-102; SWISSPROT HIT: Q25381, EVALUE 3.00e-18
gcaatgccatcacctcccctgtgtgaattagggagaggactgggccattctccttagagagaagtggggtggcttttagaagggcaaggggcttcctgaaacaatgcatctcacaatatttggaatgactattgaaaagaaaaacaatgtacgatcaaagtcctcagccacattgtagaactttgggggaagctcactccaaccaactgttctcgccttcaccattccagtttttaaatcctgagtcaagccaataaaaaacaaaacaaaaaatgaaataagaaaacaattaaagccataccaatctcatgtggctttctgcgaagtttggttttgtcaagaaagggtgtaatgcaactaagtcagcgtccacctagaagcatttgcggtggacaatggaggggcctgactcatactcctgcttgctgatccacatctgctggaaggtggacagcgaggccaggatggagccaccgacccacacggagtacttgcgcttgggaggagcaa

SEQ ID NO: 6838 - DNA, 507 bp, Homo sapiens
  MAP TO AC011551.3; EXPRESSED IN LUNG, SIGNAL = 7.7; EXPRESSED IN HEART, SIGNAL =  20; EXPRESSED IN PLACENTA, SIGNAL = 6.9; EXPRESSED IN BRAIN, SIGNAL =  15; EXPRESSED IN ADULT LIVER, SIGNAL =  12; EXPRESSED IN HELA, SIGNAL =  20; EXPRESSED IN BONE MARROW, SIGNAL =  20; EST_HUMAN HIT: AW675797.1, EVALUE 1.00e-110; NT HIT: X01111.1, EVALUE 1.00e-117; SWISSPROT HIT: P04406, EVALUE 4.00e-15
tggtttggctgtgtccccaccgaaatctcatcttggattgtagctcccacaattcccacgtgttgtgggagggacatggtgagaggtaattgaatcatgggggcaggtctttcttgtgctgttctcgtgatagtgaataagtctcacgagatctgatggtttttttgttcttttttttggctgagcatagaggactttattgatggtacatgacaaggtggggctccctaggcccctccctcttcgggggatcggcatggaaactgtgaggaggggagattcgcagtgtggtgggggactgagtgtggcagggactccccagcagtgaggacctctctgttcctctcatgctctctctggagctggtggtctgggggtcttactccttggaggccatgtgggccatgaggtccaccatactgttgctgtagccaaattcatcgtcataccaggaaatgagcttcacaaagtggttgttgagggcaatgccagccccagcattgaagg

SEQ ID NO: 6839 - DNA, 503 bp, Homo sapiens
  MAP TO AC007059.1; EXPRESSED IN ADULT LIVER, SIGNAL = 1.9; EXPRESSED IN HELA, SIGNAL = 3.5; EXPRESSED IN LUNG, SIGNAL = 2.2; EXPRESSED IN HEART, SIGNAL =   2; EXPRESSED IN BRAIN, SIGNAL = 1.9; SWISSPROT HIT: P33485, EVALUE 1.20e+00; EST_HUMAN HIT: AW976415.1, EVALUE 5.00e-42; NT HIT: AB012265.1, EVALUE 4.00e-14
cgtgggcacctcccatcaggtgatcccctgtctatccaagatgcttccaactaccactgagaaagctaggccacaggaaccctggttaccttcaccgcccctacccacaggcccagagaaagccaagagctgcccctcagtggcgagcatgaccctggcaggctcatcagccgcagtgaggctttcaggggaagatcagcaaagtaaagtgggaggcacgatccacatccaaggcggcccaaaaggagatgcagaggcttgaccaatactctggcctggctggcccaggacatgggagctgtagtccccaccgcccccacccaccctgggccctgtccctgggctacagcccaacctgaggtcccgaccctcccagcgccagaacctccctcggctcttgggacccacactcactgaggttcaagggcccctcatcctcagactgaggccactgtgcctttggggaggccggccgggggctcagggacagctgggggctcttg

SEQ ID NO: 6840 - DNA, 509 bp, Homo sapiens
  MAP TO L44140.1; EXPRESSED IN BRAIN, SIGNAL = 0.92; EXPRESSED IN HELA, SIGNAL = 0.92; EXPRESSED IN BONE MARROW, SIGNAL =   1; EXPRESSED IN LUNG, SIGNAL = 0.96; EXPRESSED IN ADULT LIVER, SIGNAL = 1.3; NT HIT: L44140.1, EVALUE 0.00e+00; SWISSPROT HIT: P20134, EVALUE 4.20e-01; EST_HUMAN HIT: BI907596.1, EVALUE 2.00e-72
tgcttctttctggcccccaggttgcctgtgtgtgtgtgggggggtagatctaaactggtggttggagcatctccgatgggcgacccatcctccagggacacaaagagcccagagccccagacaatgggacgcacgagctccaacccacacttcagaaccaacgggcctctgaaggccagagggccctctctaaacagctgtggggggagagcccgggcctcctcctcctcggggacggggcgcagggccaggagcctgcccagtgcccgaccccccaggcccactcccaccgcgagcacagccgcggaggcgcggctgcggaggatgtgagttcagcctgggcgccggccagccggggcgcagcgggcgggggcgcgtacggttcgcacgcccggccggccagccagccagcccgcgcgcctttgttctgcaggcccgcgtggagcagagcagccggaggcctcgggagttgcgctgcggcccggaagggggtggtttggaggggtccg

SEQ ID NO: 6841 - DNA, 500 bp, Homo sapiens
  MAP TO AF205588.1; EXPRESSED IN ADULT LIVER, SIGNAL = 2.1; EXPRESSED IN BRAIN, SIGNAL = 1.8; EXPRESSED IN HELA, SIGNAL = 1.5; EXPRESSED IN BONE MARROW, SIGNAL = 1.7; EXPRESSED IN LUNG, SIGNAL = 1.7; EXPRESSED IN FETAL LIVER, SIGNAL = 1.9; NT HIT: Y14784.1, EVALUE 3.00e-02; SWISSPROT HIT: Q06730, EVALUE 5.00e-04; EST_HUMAN HIT: N20488.1, EVALUE 1.00e-79
aaacagggtctgtgcccaaattgaaagttttgcttcctctatctccattttctacacttactgttttgttgttgtggaatagaagctcccaaaaatggtcatcttcattttcctggctgctctctaacacgtcatcaactttccatttcctttctagaaatgagaaaaataaccacatcttatgaaccttaatacatttctgatggaatcagacttttacacaaatgcactatcatacagtcaattcttttgttttaaattcagtttcctggtgtgaactgagttcaagtgtacattttctttaccctccaaggtttaggtggaaaacataaaacatgcttcagtggaaacagggagaagaaattggcaatgatatttaacactttataaatataaccttcaaaactgaaaagaaaaggtgaaataaaattcacagcacagggaaccagagtggctgattcagaaatagaaaaactcggagaaaatggggtgaacccaac

SEQ ID NO: 6842 - DNA, 512 bp, Homo sapiens
  MAP TO AC008283.3; EXPRESSED IN PLACENTA, SIGNAL = 2.4; EXPRESSED IN HELA, SIGNAL = 3.8; EXPRESSED IN ADULT LIVER, SIGNAL = 2.9; EXPRESSED IN BONE MARROW, SIGNAL = 3.4; EXPRESSED IN HEART, SIGNAL = 3.3; EXPRESSED IN LUNG, SIGNAL = 3.2; EST_HUMAN HIT: AW861372.1, EVALUE 1.20e-02; NT HIT: U53930.1, EVALUE 8.00e-03; SWISSPROT HIT: Q60688, EVALUE 1.20e+00
tggccagcttcaccaggctcaggctctaattttgtcacctgtacccctccagccccgccccctgccccagatatttttgtagaggagagcttacaaggaaagacctggaacctcagagggtaaatttccagcaaatcctatcagtgtggcataacagtgacttctccaccttggtgggccatgaccatggcctctacaagatgttaacctcagcccaggggaactgggggattaggacctctgccttgggcactctatctcaaccctagaggcagttgttattacacattatataatattatatcggatattcataaatcctttagagttctctgtacttctagccaatccctcattactccaatccctactgtagataattttttattgaaaaataaattttccttgttcaaaatgctgtattttttctctcttctgattgaacccagactgacacaaaggtagatgagagaagtgattagttaccactgccaatatgacagcagcaatcc

SEQ ID NO: 6843 - DNA, 598 bp, Homo sapiens
  MAP TO AC007326.28; EXPRESSED IN PLACENTA, SIGNAL = 1.9; EXPRESSED IN LUNG, SIGNAL = 1.7; EXPRESSED IN BONE MARROW, SIGNAL = 1.6; EXPRESSED IN FETAL LIVER, SIGNAL = 1.6; EXPRESSED IN ADULT LIVER, SIGNAL = 1.7; EXPRESSED IN BRAIN, SIGNAL = 1.3; EXPRESSED IN HELA, SIGNAL = 1.4; SWISSPROT HIT: P10264, EVALUE 1.00e-94; EST_HUMAN HIT: AA218808.1, EVALUE 0.00e+00; NT HIT: Y10390.1, EVALUE 0.00e+00
agggcgccataccctcagccgcccactaggagacttaatcctacggcaccacctagtagacagggtagtgaattacatgaaattattgataaatcaagaaaggaaggagatactgaggcatggcaattcccagtaacgttagaaccgatgccacctggagaaggagcccaagagggagagcctcccacagttgaggccagatacaagtctttttcgataaaaatgctaaaagatatgaaagagggagtaaaacagtatggacccaactccccttatatgaggacattattagattccattgcttatggacatagactcattccttatgattgggagattctggcaaaatcgtctctctcaccctctcaatttttacaatttaagacttggtggattgatggggtacaagaacaggtccgaagaaatagggctgccaatcctccagttaacatagatgcagatcaactattaggaataggtcaaaattggagtactattagtcaacaagcattaatgcaaaatgaggccattgagcaagttagagctatctgccttagagcctgggaaaaaatccaagacccaggaagtgcctgcccct

SEQ ID NO: 6844 - DNA, 597 bp, Homo sapiens
  MAP TO AC011538.5; EXPRESSED IN ADULT LIVER, SIGNAL = 1.2; EXPRESSED IN BONE MARROW, SIGNAL = 0.95; EXPRESSED IN LUNG, SIGNAL = 1.2; EXPRESSED IN FETAL LIVER, SIGNAL = 0.98; EXPRESSED IN BRAIN, SIGNAL = 0.84; NT HIT: gi4758513, EVALUE 1.00e-110; SWISSPROT HIT: O75437, EVALUE 3.00e-36; EST_HUMAN HIT: BI761470.1, EVALUE 1.00e-110
gccagaaatggcaatgattgtgccggtattttacctttcttttaaaacagaaaccaagagttggcaatttacttgtaaagacactatggtatagtgggaaacaggaaaagatgtattgagtaaatttaacagacttttctttttcttctttgtgtttttttgcattgtgctcacctgggacactgcacacacttaaatcatttatgaattttccacagatgtattttggtctgaatgtttttgttacatttatgtctatgaaagaattagagcctgtggtattttgcaatgctatcttgtctatgtagtttgtataattttataggtaagatttttaaactatattcatgtgagtctagtaagtggagtaatttatttatttttatttttttttcaggtatgtgtcctcattttgctcaagacctttggccagagcagggcatggaagattcttttcaaaaagcaatactgagaagatatggaaaatatggacatgagaatttacagttaagaaaaggctgtaaaagtgtggatgagtataaggtgaacaaagaaggttataatggacttaaccagtgtttcacaactgcccagagc

SEQ ID NO: 6845 - DNA, 520 bp, Homo sapiens
  MAP TO AL009182.12; EXPRESSED IN HEART, SIGNAL = 1.6; EXPRESSED IN FETAL LIVER, SIGNAL = 1.2; EXPRESSED IN ADULT LIVER, SIGNAL = 1.2; EXPRESSED IN PLACENTA, SIGNAL = 1.7; EXPRESSED IN HELA, SIGNAL = 1.5; NT HIT: gi14736714, EVALUE 0.00e+00; SWISSPROT HIT: O43896, EVALUE 4.20e-01; EST_HUMAN HIT: BI091142.1, EVALUE 0.00e+00
ccagcacctgccggaagacctgactgagaaactcgtcacttaccagcgcagtgtcctggctctgcgcagggcgcatgactatgaggtagctcagatggggaatgcagatgagacgcccatttgtttagaggtgccatcacgggtaactgttgataaccagggcgaaaagcctgtcttggtcaagacaccaggcagggaaaaactgaaaatcacagcaatgcttggtgtcttggctgatgggaggaagttaccaccgtacatcattttgaggggaacatatatccccccggggaagtttcccagtgggatggaaattcgctgccaccggtatgggtggatgactgaagacttgatgcaggactggttggaagtggtgtggagacggaggacaggagcagtgcccaagcagcgagggatgctgatcttgaatggcttccggggccatgccacagattccgtgaagaactccatggaaagcatgaacactgacatggtgatcatcccagggggtctgacctca

SEQ ID NO: 6846 - DNA, 503 bp, Homo sapiens
  MAP TO Z97055.1; EXPRESSED IN ADULT LIVER, SIGNAL = 2.9; EXPRESSED IN PLACENTA, SIGNAL = 4.6; EXPRESSED IN BRAIN, SIGNAL =   4; EXPRESSED IN HELA, SIGNAL = 2.4; EXPRESSED IN BONE MARROW, SIGNAL = 3.6; EXPRESSED IN LUNG, SIGNAL = 2.7; EXPRESSED IN HEART, SIGNAL = 2.9; EXPRESSED IN FETAL LIVER, SIGNAL = 2.6; NT HIT: AL163246.2, EVALUE 2.00e-58; SWISSPROT HIT: Q10059, EVALUE 4.60e+00; EST_HUMAN HIT: AI183641.1, EVALUE 2.00e-81
gtggcattttgcccctcccctaaagatctatggaattttgaactagagagagatgatttaaggtatctggtgaaagaaatttctaaacagcaaagtgttcaagaggaagcagggcataaaagtttggaaaatttgcagcctaatgatgtgatagaaaaaccccattttctggggagaaattcaagctggctacagaaatttgcaaaagtaacaaggagccaaatgttagtcatcaagacaatggggaaaatgtctccaggacatgtcagagaccttcctggcagtccctcccatcacaggtccggaggcctaggagggaaaaatggtttcctgggccaggttcagggcccccctgctgtgtgcagccttaggacttggtgccctgagtcctagccactccagctgtggctaaaaggggccaatgtacagctcatgccattgcttcagagagtgcaagccccaagccttggcagcttccacatggtgttgggcctgctggtgca

SEQ ID NO: 6847 - DNA, 565 bp, Homo sapiens
  MAP TO AF109907.1; EXPRESSED IN HEART, SIGNAL = 1.9; EXPRESSED IN BRAIN, SIGNAL = 1.4; EXPRESSED IN LUNG, SIGNAL = 4.2; EXPRESSED IN BONE MARROW, SIGNAL =   2; EXPRESSED IN HELA, SIGNAL = 1.1; EXPRESSED IN ADULT LIVER, SIGNAL = 1.9; EST_HUMAN HIT: AL541223.1, EVALUE 0.00e+00; NT HIT: gi14749713, EVALUE 0.00e+00; SWISSPROT HIT: P49757, EVALUE 4.00e-92
tgctgaggccaacctgccatcatctacaccattgaaagctgcagaaccgttgaggtgctgagcaggaggcttaaagaagggactggtggtagcactgcttgcctcgtagtgagggaatgtctgctgcctgaccaggctgggtgactgatggggatgggcagcctgagggtggcctgcagtgccaaatacgttggccaccatctgggagggagtgatgcccaccacaggcacattaggggctggatagggcattccattggccacaggataggactgggcagggacaaaggctggttgcagggctgggaccacacccactggcacaggctgagaggtgaggaatgcattcccttggaaaggtgatgctggctgggagatggcagtgggtggaggaggctggagaactggctgcagaggagcagctgaggcctggggctgctgagcccggacgctcttagacacctcttctaaccatcggtcggcctcagagggagtacgtctatgaccggcctggaagagacctggagaggcagcaccagaagattgaccccactcggtccctgga

SEQ ID NO: 6848 - DNA, 506 bp, Homo sapiens
  MAP TO AL163204.2; EXPRESSED IN ADULT LIVER, SIGNAL = 1.4; EXPRESSED IN BRAIN, SIGNAL = 1.6; EXPRESSED IN BONE MARROW, SIGNAL = 1.3; EST_HUMAN HIT: AL558516.1, EVALUE 0.00e+00; NT HIT: AL163204.2, EVALUE 0.00e+00; SWISSPROT HIT: P17221, EVALUE 7.00e-26
acctggacgtggtgcggagcctgctgcgccgcggggcctcggtgaactgcaccacgcgcaccaactccacgcccctccgcgccgcctgcttcgagggcctcctggaggtggtgcgctacctggtcggcgagcaccaggccaacctggaggtggccaaccggcacggccacatgtgcctcatgatctcgtgctacaagggccaccgtgagatcgcccgctacctgctggagcagggcgcccaggtgaactggcgcagcgccaagggcaacacggccctgcacaactgtgccgagaccagcagcctggagatcctgcagctgctgctggggtgcaaggccagcatggaacgtgatagctacggcatgaccccgttgctcccggccagcgtgacgggccacaccaacatcgtggagtacctcatccaggagcagcccggccaggagcagctcataggggtagaggctcagcttaggctgccccaagaaggctcctccaccagccagggg

SEQ ID NO: 6849 - DNA, 500 bp, Homo sapiens
  MAP TO AC005618.1; EXPRESSED IN ADULT LIVER, SIGNAL = 1.3; EXPRESSED IN BONE MARROW, SIGNAL = 2.2; EXPRESSED IN LUNG, SIGNAL = 1.4; EXPRESSED IN HELA, SIGNAL = 0.99; EST_HUMAN HIT: AL538057.1, EVALUE 2.00e-41; NT HIT: gi14861871, EVALUE 0.00e+00; SWISSPROT HIT: P32331, EVALUE 4.00e-04
ggaagcagtcggtgaggcccttgtacaggtcagggaacgtctgcatcttcacttttattgtgtcgaagggctgcccagtcagtacacacgctgtcccccctgcggcccccgctgtgaggtcgatggcggcttggatgccaggaccggacttcatgttcgctcactcgtctgagggtcccagtggaaggcgactaactccccagagcgtgagaccggcttttcacgtccagccgcagcgagcgcggggaatggagttgggggtggtggggtggctctaccgcctgttctgggctctcaccccagtgcgggggaagccgctcaaccctacgctccgccgcgggccgccccctccccgcgcactaaaataaccccctgctgccggcccagcgcgcggctcactagcgttcctgcggctcctggcgcactggccgggcccccagccgcctccagcctggagccgccatccctgcacccgcaggcgggggacgcggaccgaataa

SEQ ID NO: 6850 - DNA, 516 bp, Homo sapiens
  MAP TO AP001760.1; EXPRESSED IN HEART, SIGNAL = 1.7; EXPRESSED IN BONE MARROW, SIGNAL = 1.9; EXPRESSED IN LUNG, SIGNAL = 1.7; EXPRESSED IN ADULT LIVER, SIGNAL = 2.1; EXPRESSED IN BRAIN, SIGNAL = 1.7; EXPRESSED IN HELA, SIGNAL = 1.1; SWISSPROT HIT: O95613, EVALUE 8.00e-21; EST_HUMAN HIT: BF814273.1, EVALUE 1.00e-36; NT HIT: gi5174478, EVALUE 5.00e-78
gagggggcaggagcctctggtggagtgattttctgaagagggggcaggagcctctggtggagtgattttctggagagggggcgggcaggggacatctctgaatcattttctggagagggacagactgggaacatctctgaacccaggactcaacaccatttccgaaaaaagtatgtcatctccgcagtctgggttttttgttacttgatgaactaacaaaaaaatgttgtccctacatgtggctaatagggtgcatttcaaaaggtagaattgctgggctaaagtatataaacaaatgtggacaggaaaaccatgtagacacttttcctcttgattcagtgtctcccatcgtatgtgtttgctgtctaggagctgcgggcgtctttggagacacagcgtgctcagagcagtcgactctgcgtggcactgaaacacgagcagacggccaaggacaacctgcagaaggagctgcgtatcgagcactcacgctgcgaggccttgctggctcaggagcgg

SEQ ID NO: 6851 - DNA, 530 bp, Homo sapiens
  MAP TO AC006445.10; EXPRESSED IN HELA, SIGNAL = 0.85; EXPRESSED IN ADULT LIVER, SIGNAL = 1.2; EXPRESSED IN BRAIN, SIGNAL = 1.3; EXPRESSED IN HEART, SIGNAL = 1.2; EXPRESSED IN LUNG, SIGNAL = 1.1; EXPRESSED IN BONE MARROW, SIGNAL = 1.3; EXPRESSED IN FETAL LIVER, SIGNAL = 1.3; NT HIT: AF009802.1, EVALUE 0.00e+00; SWISSPROT HIT: P78367, EVALUE 3.00e-07
aggcgcgtgaacccaagcagagagacggaaatgcagtctagaatcccaatgctcaacgctgagagccgggagggctttcgcggatgctcgggtcgagtgccccaagttactgaggggagcctggggcccagagagggtggggagctggtctcgacaacacagcgttgacacagcggctgagtctgccgccctccccagaagaggcctagatgggatacccagtggggcaagagtctaagactggtctcccgggcccagggcctcccagacctccgctccgcttgagtgggatcaaagtgtatttccgccccactcccgtgacccctgcagttgaggcccggcctcacctcgtctgtggcgctgacagtctcttgtttctgttcccaccggggtccgcaggcgaccgcagcccaaggaccgaggacgacggtgttggccccagaggtgcacacgtgtccgcgctgtgcagcggggccggcggcgggggcggcagcgggccggcaggcgtcgcggaggaggaggaggagccg

SEQ ID NO: 6852 - DNA, 517 bp, Homo sapiens
  MAP TO AC004520.1; EXPRESSED IN BRAIN, SIGNAL = 1.1; EXPRESSED IN HELA, SIGNAL = 0.84; EXPRESSED IN ADULT LIVER, SIGNAL = 1.2; EXPRESSED IN LUNG, SIGNAL =   1; NT HIT: gi14751645, EVALUE 0.00e+00; SWISSPROT HIT: Q61985, EVALUE 2.00e-22; EST_HUMAN HIT: BI761565.1, EVALUE 0.00e+00
tgtggctcccccagattgcccacaagtgtgatcttgaagtcctaaacatttgtccatgtaagcttcaaaacagcgttaactgagttattcaagtagcagtacttaaagatacaattcttgaagcagtttcaatggtttctgatccaaataatcagtttctgaacattactacttcacataatagagtccatcttcagtttcttctcactttctctttcccttttgggtttcctttttgtggcctgaggccaccagttctttgggtactatcaagatacttccatcatgggtacactggagagcatagtggttgggattgactggcctaccttggtcatctcttaatctactaaaaatatcatgataaaggtcatgcagtttctgtttcattatgttaatagctttgttacattgtgcttgctctctcttaagagtttccttctttgcttgcaagttacatacatcatcttctaaattcaaaattatgtccaatttgcgtttacgacagttctgcgca

SEQ ID NO: 6853 - DNA, 500 bp, Homo sapiens
  MAP TO AC010609.5; EXPRESSED IN FETAL LIVER, SIGNAL = 2.5; EXPRESSED IN PLACENTA, SIGNAL = 2.5; EXPRESSED IN BRAIN, SIGNAL = 3.1; EXPRESSED IN ADULT LIVER, SIGNAL = 3.6; EXPRESSED IN HELA, SIGNAL = 6.1; EXPRESSED IN LUNG, SIGNAL = 3.7; EXPRESSED IN BONE MARROW, SIGNAL = 3.7; NT HIT: AF415236.1, EVALUE 1.90e+00; SWISSPROT HIT: P48966, EVALUE 2.70e+00; EST_HUMAN HIT: BF980230.1, EVALUE 0.00e+00
cgcaagagctccacccacagctccaccaaaaaggagtcgagaacaactcaggaactggggaagaaccaatctgcatctagcacaggagctttacaaaagaaagccagtaagatcagctcttttttaaggagcctcagggccactcctggttcaaaaacaagggtcacatcacatgacagagaggtagatatcgtggctaagatggtggagaagcaaaacatagaggccaaagtggagaaagcccagggtggccaggagctggagatgatcagtggcactatgacatccgagaagacggagatgatcgtctttgaaaccaaatccatttaaagaggagccagggctacaaccgcccagggatctggaagtatccctagaggagcccatcccagctttctttactgcagttcaaataataaaggaaatcgtacaactccaaaagaaatacaatctcctgcttgaatttttctgcccatagcctggtggtgacctcacagtgg

SEQ ID NO: 6854 - DNA, 501 bp, Homo sapiens
  MAP TO AC002347.1; EXPRESSED IN LUNG, SIGNAL = 1.4; EXPRESSED IN BONE MARROW, SIGNAL = 1.6; EXPRESSED IN FETAL LIVER, SIGNAL = 1.8; EXPRESSED IN ADULT LIVER, SIGNAL = 1.5; EXPRESSED IN BRAIN, SIGNAL = 1.4; EXPRESSED IN HELA, SIGNAL =   2; NT HIT: gi14771658, EVALUE 1.00e-103; SWISSPROT HIT: P11055, EVALUE 3.00e-17; EST_HUMAN HIT: AA195800.1, EVALUE 1.00e-48
ggaggccacactgcagcacgaagccatggtggccgcgctgaggaagaagcatgcggatagtgtggccgagcttggggagcagattgacaacctgcagcgggtcaagcagaagctggagaaggagaagagcgagttcaagctggagatcgatgacctctccagcagcatggagagtgtgtcgaaatctaaggtgctgcgcggggtgggggtggctcaaggctttccatcagacacactccgtggtcattgaaacctgactttgctgactgactttgctcccctttctgaatccttcaggcaaatctggaaaaaatctgccgaaccctggaggatcagttaagtgaggccaggggcaagaatgaggaaattcagaggagcctgagcgagctgaccacacagaagtctcgtttgcagaccgaggctggtaagccacgtgcagaaaacccgtggggccaaaacctcctggcacccaatgggcgtagctggccaaaaccaagggca

SEQ ID NO: 6855 - DNA, 511 bp, Homo sapiens
  MAP TO AL160231.1; EXPRESSED IN ADULT LIVER, SIGNAL = 1.5; EXPRESSED IN PLACENTA, SIGNAL = 1.5; EXPRESSED IN BRAIN, SIGNAL = 1.2; EXPRESSED IN HELA, SIGNAL = 1.8; EXPRESSED IN LUNG, SIGNAL = 1.5; NT HIT: gi14211924, EVALUE 0.00e+00; SWISSPROT HIT: P02465, EVALUE 4.70e+00
caaggcggggagtgtcgagctccctcacactctggaccttaccttctggcgtcttcgcccgggaggctgcagggggaggcggacccagccggccacaggggcaggttcgcggcgctgtgaggcggggctgggcgtgcgccgccgccgccgccagattcgtctactccagtgaatcggcacgggagaaagccccgcccccggcgcccgctcccactcctgattggccgggccagcccggggaggcccggcgggaccccggcccgcgtctcagctataaagatagccccggcatgacagccgcggcgaagctcttctagttcatctgctggccggctctcagtccccgtggcgccccctttcctcttgtcccagagcgctctcgactccaccatgccaaggggattcctggtgaagcgaactaaacggacaggcggcttgtaccgagttcgccttgcggagcgtgtcttccctctgctggggccccagggggcgccgcccttcttggaggagg

SEQ ID NO: 6856 - DNA, 504 bp, Homo sapiens
  MAP TO AL049870.3; EXPRESSED IN ADULT LIVER, SIGNAL = 2.1; EXPRESSED IN BRAIN, SIGNAL = 1.8; EXPRESSED IN HELA, SIGNAL = 1.1; EXPRESSED IN BONE MARROW, SIGNAL = 1.5; EXPRESSED IN LUNG, SIGNAL = 1.8; EXPRESSED IN HEART, SIGNAL = 1.6; EXPRESSED IN FETAL LIVER, SIGNAL = 1.6; NT HIT: AB007883.1, EVALUE 1.00e-78; SWISSPROT HIT: P55200, EVALUE 3.10e-01; EST_HUMAN HIT: BI552093.1, EVALUE 2.00e-87
gtcaagaggtccgcgctgggtacatcaccatggaagcaatcggtttggtcacgtggtgcccttggttacgcccggtggcagctgtggggtctagggctcagacgggggccattttgccagaggctgcctcccggagttgggggcggcctggcggcaggctgaagctgttcttttgcctcttctgcagcttggggcttggagaggatctggaagtctgggctccatcgagccctttggagacggcaatggtttcttccaaccaccaccacctgacaaccctgcatggcggctgccccctccgcgctgcttctgctgccgccctttccagtcctctctacctatcggctccagagccgcagtcgtccttccgccccagagaccgatgatagtcgagttgggggcattatgagaggagagaaaaactactacttccgtggagctgcgggggaccacggttcctgccccactacaacttcgcctctggcctcggccctcttgatgccc

SEQ ID NO: 6857 - DNA, 537 bp, Homo sapiens
  MAP TO AL132988.3; EXPRESSED IN ADULT LIVER, SIGNAL = 1.9; EXPRESSED IN HELA, SIGNAL = 0.5; EXPRESSED IN LUNG, SIGNAL = 1.5; EXPRESSED IN FETAL LIVER, SIGNAL = 2.1; NT HIT: gi5729892, EVALUE 0.00e+00; SWISSPROT HIT: Q13023, EVALUE 1.00e-101; EST_HUMAN HIT: AL118891.1, EVALUE 0.00e+00
cccaacagcccttctgctgccagccagtcttatgagtgtttacacaaggtggggaatgggaaccttgaaaacacagtcaaatttcacattaaagaaatttcttccagcctgggaaggcttaacgactgctataaagagaaatctcgacttaaaaagccacacaagacctcagaagaggtgcctccatgccgaacacctaaacgggggactggttcaggcaaacaagctaaaaatacaaagagctcagcagtgccaaatggagagctttcttatacttccaaggccatagaggggccacaaacaaattctgcttccacatcctcacttgagccttgtaatcagagaagttggaatgccaaattgcaattgcagtcagaaacatccagttcaccagcttttactcagagcagtgaatcctctgttggctcagacaacatcatgtctccggtgccacttctttcaaaacacaaaagcaaaaaaggtcaagcctcctctccaagtcacgtcactaggaatggtgaggttgtggaggcctgg

SEQ ID NO: 6858 - DNA, 504 bp, Homo sapiens
  MAP TO AP001709.1; EXPRESSED IN ADULT LIVER, SIGNAL = 1.4; EXPRESSED IN BRAIN, SIGNAL = 1.1; EXPRESSED IN HELA, SIGNAL = 0.96; EXPRESSED IN BONE MARROW, SIGNAL = 1.2; EXPRESSED IN LUNG, SIGNAL = 1.2; EXPRESSED IN HEART, SIGNAL = 1.3; NT HIT: AF345297.1, EVALUE 2.00e-09; SWISSPROT HIT: P47750, EVALUE 2.10e+00; EST_HUMAN HIT: BI561140.1, EVALUE 1.00e-05
tgcaccaattacgtggccctcctgtgctttttcagaaatccacaatacaaagacagagaagatgatgtaaaaatttacaatggaaaattaatcagaataaaatcttctgtcttcagtgatgtgatggaactactcagtctccatccactgcaaacagcttcttgtatgttcattcagatagttagtggaccatagttaatctttacttagatgtgaagataatgggtaggggagatttcaactggacttgatcttggagaggtcatcattaaggcaaggatcatctgtggtgatgattagcagcaagaggaatagcatcttctgtagcaaaatggtcgacagccccagcagccagagctgtatttacagccgtagggagagccgaatccatatccagagccatatccacagccatagccagaggcagagccatatccacagccatagccacagccagttccatatccagagccatattgacagccggagccatatctacagcca

SEQ ID NO: 6859 - DNA, 500 bp, Homo sapiens
  MAP TO AL109823.6; EXPRESSED IN LUNG, SIGNAL = 1.8; EXPRESSED IN FETAL LIVER, SIGNAL = 1.9; EXPRESSED IN ADULT LIVER, SIGNAL = 1.9; EXPRESSED IN HELA, SIGNAL = 1.7; EXPRESSED IN PLACENTA, SIGNAL =   2; NT HIT: gi16173897, EVALUE 0.00e+00; EST_HUMAN HIT: AU132144.1, EVALUE 0.00e+00; SWISSPROT HIT: P02774, EVALUE 1.60e+00
tgccttgtgcagtggctggcacatagaccccaggtaaatgtctgttgaatgaatgaatgcaagttcacttcatacttgctttgaacttgacatttttactgaacagtttccttcctccagcctgcaggatgtttcctcaatgaggggaaggctgctgcacaatggcagtttttgatactcctgaggaggcctttggtgtcttacgtccagtctgtgttcagctcacaaagacccagacagtggagaatgtggagcatctgcagacacgactacaagctgtgagtgacagtgcccttcaggaacttcagcagtacatcctcttccctctgcgatttaccctgaagaccccaggtcccaaaagagagcgtttgatccaaagtgtggtggaatgcctcacatttgtcctttcttcaacatgtgtgaaagaacaggagcttctccaggaactcttttcagaactctctgcttgtctgtattcacccagctcccaaaaacctgcg

SEQ ID NO: 6860 - DNA, 521 bp, Homo sapiens
  MAP TO AC012532.3; EXPRESSED IN PLACENTA, SIGNAL = 1.4; EXPRESSED IN ADULT LIVER, SIGNAL = 1.8; EXPRESSED IN HELA, SIGNAL = 0.46; EXPRESSED IN BONE MARROW, SIGNAL = 1.7; EXPRESSED IN LUNG, SIGNAL = 1.8; EXPRESSED IN HEART, SIGNAL = 1.6; EXPRESSED IN FETAL LIVER, SIGNAL = 1.8; NT HIT: X63678.1, EVALUE 3.00e-24; SWISSPROT HIT: Q01685, EVALUE 5.00e-23; EST_HUMAN HIT: BG714759.1, EVALUE 0.00e+00
gcccgtggcttgttcctctgctgcagggacagcaacactgtgctgaagagtgagaaacacgatggatgcttctgctgttccctcgaacacaagccccagcaggaagaacatccccacgcaggagacgatgtccgcatgattctgcaggatgaattcctggctgagaacgggggggttcttggtgctcttcttacggagccccatggtggcgcttcccggatactcaccggcgagccgcagctgcctccccctggctgctcctcacagcgccgccgccacggtagcagctccgggggctccacttcccatcccgaagtcagtcccgggtcgcagcggccgcccagaaaaaaaataaatcaaaggcgagggccgagctgagctgagcatgcgcaccagggggacggcggaggcagggaaggaaatcgagcgccgcgcccctacccggcgccaggcccggggttgcgagcggtgatcttcaacgttgatcgtcgcatcttcaaactcgctgccaccgccaagat

SEQ ID NO: 6861 - DNA, 516 bp, Homo sapiens
  MAP TO AC002054.5; EXPRESSED IN PLACENTA, SIGNAL = 3.8; EXPRESSED IN BONE MARROW, SIGNAL = 9.4; EXPRESSED IN LUNG, SIGNAL = 3.3; EXPRESSED IN ADULT LIVER, SIGNAL = 3.3; EXPRESSED IN BRAIN, SIGNAL = 6.6; EXPRESSED IN HELA, SIGNAL = 3.8; SWISSPROT HIT: P52591, EVALUE 1.00e-07; EST_HUMAN HIT: AL045185.1, EVALUE 0.00e+00; NT HIT: gi14777543, EVALUE 0.00e+00
tgcgtggcagcaggggaaacttgtgtgtactgggcctagaggcctcggatgtggaggagtcattcctgagggcgagtgtctgccctggtgctatatctgctgccttttcacactgggtgtgacctgaagagacagcctgaggcctgtcctcactcactgtctttgaggaactgagggtcagctggcagtgggatgaggctggccccctcctccgctttagccccggcaagcctcccgtggagctgtaggagctggagatggcatttcggttggtgcaggagctcgtccaggaggtctgggatgtctggttatatctgatttctgacctctgggcatggaggtctgtctgcagaggcccgggcccgggcacaaagggagagaggcctccattgtcccgcaggggccgaaatgcagacggtgcatccccggtgacctcggggacccttctctgatcaccaggattctcttggactctagggtccttgtcctgctcaggcatccctgccccgctctcct

SEQ ID NO: 6862 - DNA, 510 bp, Homo sapiens
  MAP TO AC007059.1; EXPRESSED IN PLACENTA, SIGNAL = 1.7; EXPRESSED IN ADULT LIVER, SIGNAL = 2.2; EXPRESSED IN BRAIN, SIGNAL = 1.8; EXPRESSED IN HELA, SIGNAL = 1.1; EXPRESSED IN LUNG, SIGNAL = 2.1; EXPRESSED IN HEART, SIGNAL = 2.5; EXPRESSED IN FETAL LIVER, SIGNAL = 1.9; SWISSPROT HIT: Q01458, EVALUE 3.20e-01; EST_HUMAN HIT: AA864631.1, EVALUE 6.00e-23; NT HIT: gi15642775, EVALUE 8.00e-03
caaaccaggcaccgcacagctggcagtccagctctctgcccccgtcactatctaaagctgcggagacaaaacacagggggggttcacggccgccaccttggccggccttgggggcctgaggtaggagggtctggtgtgatttttggctgctcaggcagttggggggtccaagactcaggccgcagatttcttttgaagtttgggaagcaggacatcctgtttcctgcctagccctttggcatcgaggggagtgtagagagcttaaggactttgggtagacaggcagtgaccaaattctaggtaatcagatactcccagaccctctcccctaggatccctgctatgggagctatttgggggcgatggtggctgctgggctcacgcagccaagggcacacctgctcaaggccctgcccctggaagcacggcagactcagtggaagcaacttcaagggaacataaggtgccaaatggggggctccattgggcagggggtgagaccctggggtc

SEQ ID NO: 6863 - DNA, 502 bp, Homo sapiens
  MAP TO AL035362.1; EXPRESSED IN FETAL LIVER, SIGNAL = 1.1; EXPRESSED IN ADULT LIVER, SIGNAL = 1.4; EXPRESSED IN HELA, SIGNAL = 1.8; EXPRESSED IN PLACENTA, SIGNAL = 1.9; NT HIT: AJ271791.1, EVALUE 0.00e+00; SWISSPROT HIT: O88935, EVALUE 6.00e-02; EST_HUMAN HIT: BE869510.1, EVALUE 0.00e+00
aaaggcccgctggagaagcggccctatcttggcccggctctgctcctgactccccgagacagggccagtggcacacaaggggccagtgaggacaactctggtggaggaggcaagaagccaaagatggaggagctgggcctggcctcccagcccccggagggcaggccctgccagccccagacaagggcacagaaacagccaggccacaccaactacagcagctattccaagcggaagcgcctcactcggggccgggccaagaacaccacctcttcaccctgtaaggggcgtgccaagcgacgacgacagcagcaggtgctgcccctggatcccgcagagcctgaaatccgcctcaagtacatttcctcttgcaagcggctgaggtcagacagccggacccccgccttctcacccttcgtgcgggtggagaagcgagacgcgttcaccaccatatgcactgttgtcaactcccctggagatgcgcccaagccccacaggaagc

SEQ ID NO: 6864 - DNA, 532 bp, Homo sapiens
  MAP TO AP000356.1; EXPRESSED IN HELA, SIGNAL =   2; EXPRESSED IN ADULT LIVER, SIGNAL = 1.8; EXPRESSED IN PLACENTA, SIGNAL = 1.7; EXPRESSED IN BRAIN, SIGNAL = 1.8; EXPRESSED IN LUNG, SIGNAL = 1.8; EXPRESSED IN FETAL LIVER, SIGNAL = 1.8; NT HIT: AF111168.2, EVALUE 6.00e-10; EST_HUMAN HIT: AL079785.2, EVALUE 0.00e+00; SWISSPROT HIT: P39188, EVALUE 1.00e-11
tgccacgtgctgttctgcccaatctggtgtctgcaggtgaggaaaggactgccgctggcccgtttctgagtgttcagcacctaagggtgacagcactgtctgtccctaccctccgggtcctgtttgaagatcaaacccatgctcacaggacaatttttttttcttttagagacagggtctcactttgtcacccaagctggagtgcagtggtgcgattatagctcaatgcagcctccaattcccggactcaagggaccttcctgcctcagcctgccaagtagcttggactatagctgtgtgttttattattattttgtagacatggggtctggctatgttgtccaggctattctcaaaattcccggcctcaagcaatcctcccgcctcagcctctcaaaggttgggattacaggtgtgaggcaaggcacccagctcagccacagagccctattgcatctctcttactaggagcaagagctgactgccccctcatccccattccagagtgttggggctgtgttgagccgaggcc

SEQ ID NO: 6865 - DNA, 555 bp, Homo sapiens
  MAP TO AC010422.6; EXPRESSED IN FETAL LIVER, SIGNAL = 1.4; EXPRESSED IN BRAIN, SIGNAL = 1.6; EXPRESSED IN ADULT LIVER, SIGNAL = 1.3; EXPRESSED IN PLACENTA, SIGNAL = 1.4; EXPRESSED IN HELA, SIGNAL = 1.8; EXPRESSED IN LUNG, SIGNAL = 1.6; EXPRESSED IN BONE MARROW, SIGNAL = 1.6; NT HIT: AF006199.1, EVALUE 0.00e+00; SWISSPROT HIT: Q05481, EVALUE 3.00e-30; EST_HUMAN HIT: BG620524.1, EVALUE 0.00e+00
tgcagcacgtttacaccagcaccataaacacttaaataatgtgctgcactatggtgttactactgctactaaattgcggttgatagaaatgttttaggtgttatataatcttatggggctaccaacctatatggtccattgctgactgaaacatgattatgtggtacctgactatacatgaatcatcttgtatctcgctttctatattacttacattgacaggatttctctcttcagtgggaattttcacaactttgaaagcatctgttagaattgaaaactttctcctatttctcacatttatagagtttctatcgattgtgcattctcatatgtttttttaaggatgtggacacactgaaggcttttccacattgcttacattcaagaggtttctcataattgtgaattcttgtatgtctttgaaaggaactgtgaagactaaaggccttcccacattctttacatttatagggtttctctccagtatgcattctcatgtgtccttgaaagcttgtgggataaataaaggccttcccgcattccttacattca

SEQ ID NO: 6866 - DNA, 526 bp, Homo sapiens
  MAP TO AC023066.2; EXPRESSED IN LUNG, SIGNAL = 4.5; EXPRESSED IN HEART, SIGNAL =  22; EXPRESSED IN BONE MARROW, SIGNAL =  17; EXPRESSED IN BRAIN, SIGNAL =  15; EXPRESSED IN PLACENTA, SIGNAL = 6.2; EXPRESSED IN HELA, SIGNAL =  22; EXPRESSED IN ADULT LIVER, SIGNAL = 7.9; NT HIT: AF017079.1, EVALUE 1.00e-123; SWISSPROT HIT: P04406, EVALUE 5.00e-29; EST_HUMAN HIT: BF525710.1, EVALUE 1.00e-115
ctgtggatggcccctctgggaaactgtggtgtgatggctatggggctctccagaacatcatccctgcatctatctactggtgctgccaaggctgtgggcaaggtcatccccaagtcgaacaggaagctcaatggcgtggcctttcatgtccccactgccaacatgttagtcatgaacctgacctgctctctggagaaaccagccaaatatgatgacatcaaggtggtaaagcagcatcagagggggccctcaagggcatctggggctacaatgagcaccagattgtctcctccaactttaacagtgacaccaactcttccaccttcagtgctggggctggcattgccctaatgaccactttgtcaagctcatttcccagcatgacaatgaatttggctacagcaacagggtggtgggtttcatggtccacatggcctccaaagagtaagatcccctggaccaccagccccagcaagagcatgagaggaagagagaagtgttcaattgttggggagtccctgccaca

SEQ ID NO: 6867 - DNA, 513 bp, Homo sapiens
  MAP TO AC027307.3; EXPRESSED IN ADULT LIVER, SIGNAL = 1.7; EXPRESSED IN PLACENTA, SIGNAL = 2.5; EXPRESSED IN HELA, SIGNAL = 2.2; EXPRESSED IN FETAL LIVER, SIGNAL = 2.1; NT HIT: gi14149961, EVALUE 2.00e-15; SWISSPROT HIT: Q24306, EVALUE 2.80e-02; EST_HUMAN HIT: AI283040.1, EVALUE 1.00e-88
cgctgagcgctggaaaagtcgtgttttttgttttgcttttttaaagatcaccctggaggggaggggtgtctaaaaataagaaaactaaaaaaagtgcaagcggaccttttctctccggtttattgtaacctgaccactcaatactgtcgttgaagggctgaggcgccgccgggctgcggggtctccgtctccacgcctgaggcggcagttaaagctcatctgtaaacactggccgccgcccacccccctgccccctcggcctccgcccctcgccccctccccgtccctctcccaccccgggtcccgccccgtctcccgcgcccacccctggcccccgcagatggccccggccacgtggtggtccgcgctctaggaaaagatatgaatggcctgggtggccggcgtgcggcaggcgggacactcgggctcgctcttgccgcagatgcggacggcgcagtccatgcagaagaggttgtggccgcaggggaccagcgcagccatcacctcgccctc

SEQ ID NO: 6868 - DNA, 522 bp, Homo sapiens
  MAP TO AC010253.2; EXPRESSED IN ADULT LIVER, SIGNAL = 2.5; EXPRESSED IN HELA, SIGNAL = 1.6; EXPRESSED IN BONE MARROW, SIGNAL = 1.9; EXPRESSED IN LUNG, SIGNAL = 1.9; EXPRESSED IN FETAL LIVER, SIGNAL = 2.4; NT HIT: gi5031952, EVALUE 1.00e-75; SWISSPROT HIT: Q92685, EVALUE 1.00e-42; EST_HUMAN HIT: AL555582.1, EVALUE 5.00e-73
aggaagggcagccccagcaccacctgaaggccaacacagatgcccagcttggggaaggccccacggcagccaaactgtgtgaggagaagaaacagtaacccaggggcgaacagcagcactttcatcttcacagaggctgccaggctggaacaccagcagccccagccccagcgcgggaccagcaggaggctgataccgagggcactgggtcataggagagccacagcacaaaggtgcagtggacacagtaagaggcgtggcacatgaaaaataagataaagggaggtaccttgtaggtctggaggtagatcaagaagacaagcagcaaggtggccaggcagagcacagcaaagatgttctggacatgtgaatgtcagtgcctcggccaggggcatagaacagccccataaagatggacacaaaaccagctgggtacacaagtggcccactgtcacaggccactgtcatagacagctgggtctagtcataggtaccgctgatgacgccttccacctgggccat

SEQ ID NO: 6869 - DNA, 500 bp, Homo sapiens
  MAP TO AC024167.1; EXPRESSED IN ADULT LIVER, SIGNAL = 1.5; EXPRESSED IN PLACENTA, SIGNAL = 1.5; EXPRESSED IN HELA, SIGNAL = 2.7; EXPRESSED IN LUNG, SIGNAL = 1.8; EXPRESSED IN HEART, SIGNAL = 2.4; EXPRESSED IN FETAL LIVER, SIGNAL = 2.8; EXPRESSED IN BRAIN, SIGNAL = 2.4; NT HIT: gi14734735, EVALUE 0.00e+00; SWISSPROT HIT: Q9Z351, EVALUE 4.60e+00; EST_HUMAN HIT: BF725066.1, EVALUE 0.00e+00
accaaaaatgccgccttcgcagtggacatctctgatcaagaaaccagtacagcccttgctgcagtaatggggtctatgtttgccgtcattagccttgcgtccattgctgtgtactttgccaaaagatttaagagaaaaaactaccaccactcattaaaaaagtatatgcaaaaaacctcttcaatcccactaaatgagctgtacccaccactcattaacctctgggaaggtgacagcgagaaagacaaagatggttctgcagacaccaagccaacccaggtcgacacatccagaagctattacatgtggtaactcagaggatattttgcttctggtagtaaggagcacaaagacgtttttgctttattctgcaaaagtgaacaagttgaagacttttgtatttttgactttgctagtttgtggcagagtggagaggacgggtggatatttcaaatttttttagtatagcgtatcgcaagggtttgacacggctgccagcg

SEQ ID NO: 6870 - DNA, 513 bp, Homo sapiens
  MAP TO L31948.1; EXPRESSED IN PLACENTA, SIGNAL = 1.8; EXPRESSED IN BRAIN, SIGNAL = 1.3; EXPRESSED IN ADULT LIVER, SIGNAL = 1.3; EXPRESSED IN LUNG, SIGNAL = 1.4; NT HIT: gi13629957, EVALUE 3.00e-76; EST_HUMAN HIT: BG769583.1, EVALUE 2.00e-72; SWISSPROT HIT: Q03751, EVALUE 2.10e+00
tcaaagggtgggcagtgccaggcctgcatacagagcactgagtgtaaaagcagacatggaccctgacctccaggagcttccaattttcttgaagagacaaatcagctggcatttcagtccagtgtgatctgctcttggtgagcacagacctagggagttggggcagcttcccagaagaactgcagtccaggctgagggcagagaaatgaggggaatggcgaggaattggggagcaggggggagctcagtagagagccaagggcgggaggtgagaagtccgtgttgggccaggagctaccctccggtggccacagccgaagtcgaggatgcctttggaactcatccccacttctctctttctgtatgtagccgtccaagaacaagtcacctccaagtgtagccggatcaaggcaagccccccatctagcaagcacttgatgccacccagaactgggcttcttcagaacaatctgagtccaggaatgatcccactcaccaggcaccagagctgcg

SEQ ID NO: 6871 - DNA, 520 bp, Homo sapiens
  MAP TO AP000552.1; EXPRESSED IN LUNG, SIGNAL = 1.8; EXPRESSED IN FETAL LIVER, SIGNAL = 1.8; EXPRESSED IN ADULT LIVER, SIGNAL =   2; EXPRESSED IN PLACENTA, SIGNAL = 1.7; EXPRESSED IN HELA, SIGNAL = 1.9; EXPRESSED IN BRAIN, SIGNAL = 1.8; EXPRESSED IN HEART, SIGNAL = 2.3; EXPRESSED IN BONE MARROW, SIGNAL = 2.2; SWISSPROT HIT: P18899, EVALUE 4.00e-05; EST_HUMAN HIT: AL110383.1, EVALUE 4.00e-61; NT HIT: gi14756466, EVALUE 6.00e-87
tcctccttggcgatgccctgggcggcgtcctctttggcgatgccctgggcggcgtcctcgttggcgatgccctgggcggcgtcctccttggcgatgccctgggcggcgtcctcgttggcgatgccctgggcggcgtcctcgttggcgatgccgtggacggcgtcctccttggcgatgccctgggcggcgtcctcgttggcgatgccctgggcggcgtcctcgctggcgatgccgtgggcggcgtcctcgctggcgattccgtgggcggcgtcctcgctggcgatgccgtgggcggcgtcctcgttggcgatgccgtgggcggcgtcctcgttggcgatgcccttgtcggcggcctcgttagcgatgtcgtgtacagtatcctcgttagcgatgtcgtgtgtggcgtcctcgttagtgatgtcgtgtacggtgtcctcatggggagctagaaaaacacagagttaaggtcagtgccctggtggtggagactgtgaatcacccaggggcttgcttggtgtga

SEQ ID NO: 6872 - DNA, 514 bp, Homo sapiens
  MAP TO AL121778.2; EXPRESSED IN BRAIN, SIGNAL = 1.8; EXPRESSED IN ADULT LIVER, SIGNAL = 6.8; EXPRESSED IN PLACENTA, SIGNAL = 5.5; EXPRESSED IN BONE MARROW, SIGNAL =  11; EXPRESSED IN LUNG, SIGNAL = 8.2; EXPRESSED IN HEART, SIGNAL = 6.4; NT HIT: gi14771208, EVALUE 0.00e+00; SWISSPROT HIT: P15880, EVALUE 9.00e-95; EST_HUMAN HIT: BG505255.1, EVALUE 0.00e+00
cagaagcagacccgtgctggccagcgcaccaggttcaaggtgtttgttgctatcggggactacaatggccacgtcggtctgggtgttaagtgctccaaggaggtggccaccgccatccgtggggccatcatcctggccaagctctccattgtccccgtgtgcagaggctactggggcaacaagatcggcaagccccacaccgtcccttgcaaggtgacaggccgctgcggctctgtgctggtgcgcctcatccctgcacccaggggcactggcattgtctccgcacctgtgcctaagaagctgctcatgatggctggtatcgatgactgctacacctcagcccggggctgcactgccaccctgggcaacttcgccaaggccacctttgatgccatttctaagacctacagctacctgccccccgacctctggaaggagactgtatttaccaagtctccctatgaggaattcactgaccacctcatcaagacccacaccagagtctccgcgcagc

SEQ ID NO: 6873 - DNA, 515 bp, Homo sapiens
  MAP TO AC006137.1; EXPRESSED IN ADULT LIVER, SIGNAL = 1.8; EXPRESSED IN BRAIN, SIGNAL = 1.1; EXPRESSED IN HELA, SIGNAL = 1.7; EXPRESSED IN HEART, SIGNAL = 1.2; EXPRESSED IN LUNG, SIGNAL = 1.2; EXPRESSED IN FETAL LIVER, SIGNAL = 1.6; NT HIT: AF314088.1, EVALUE 7.00e-31; SWISSPROT HIT: P23275, EVALUE 3.00e-21; EST_HUMAN HIT: AI763023.1, EVALUE 0.00e+00
tgcgcgtggagttgtgaggggtaggttttccttccctaaacctgagtatatagaggatttagggattttccctcaagaactaaacatttcctcacgggaggaaaacatatcccccattggactccttaggacaaatcttgcagattatcatacaaaaatgaacagcctgaagtctaaactgactcactaaggggtatttccatccttgggttctggcttaatactttctcccctccccaactactcactgcccagcctggcctctccccagactccgcagcagcctcctcgctgcccccttcactttcttattcctgagggtgtagatgagcgggttgagagcaggtgtgaccacggtgtagaagagcgatacgaacttgccccgtgcctggttgtagcgctgcgcgggctgcaggtaggtgtagatggccgagccgtagaacaggcagacggctgtcaggtgggacccacacgtgcccaccgccctcctccggcctccgctgaaccgcatgcaa

SEQ ID NO: 6874 - DNA, 581 bp, Homo sapiens
  MAP TO AC007014.1; EXPRESSED IN BONE MARROW, SIGNAL = 1.3; EXPRESSED IN LUNG, SIGNAL = 1.4; EXPRESSED IN HEART, SIGNAL = 1.6; EXPRESSED IN FETAL LIVER, SIGNAL = 1.2; EXPRESSED IN ADULT LIVER, SIGNAL = 1.5; EXPRESSED IN BRAIN, SIGNAL = 1.5; NT HIT: gi14781591, EVALUE 0.00e+00; EST_HUMAN HIT: BI255539.1, EVALUE 0.00e+00; SWISSPROT HIT: P18124, EVALUE 3.00e-11
cgcagcatttgtagattctggggggtgacttttacaaagacaccactaaaaattttctttaggcaaagtcttgcaatggttctctgcaccagtaaactcacgccatcaatcctttcgatgcgtacaacaaaggccaaggaatgtttatctggcaattccacggcatgaggtttcacttctagtcgtctgagatgcaccttgtcaggtttctgctgccagtaatcatgtaggaatgattccagtagcttaaacctgagcccttttcctttcttctgctccttctttgccaaaagttcctgctttgcctgggtggctttgagtgcctgataagccttcctctttttcaggagattttctggaaccaaagggatttttctttgctcttcctccgccatctttctagtggtgcagctactgatcatgcgcaaccccaccacatgggaaagacagcacgcgcgctgtttacttgaccatagagacgtctgttctagctcacgctggaggacccagtcagcgttcacttagccatagtgagccattgaggtcctgctaacccccattcctgccaaaagttgcaccgc

SEQ ID NO: 6875 - DNA, 502 bp, Homo sapiens
  MAP TO AC012578.5; EXPRESSED IN BRAIN, SIGNAL = 2.4; EXPRESSED IN ADULT LIVER, SIGNAL = 2.8; EXPRESSED IN PLACENTA, SIGNAL = 1.9; EXPRESSED IN LUNG, SIGNAL = 2.6; EXPRESSED IN BONE MARROW, SIGNAL = 2.4; EXPRESSED IN FETAL LIVER, SIGNAL = 2.2; SWISSPROT HIT: Q02496, EVALUE 6.00e+00; NT HIT: AP000060.1, EVALUE 5.00e-04; EST_HUMAN HIT: AW905903.1, EVALUE 1.00e-30
cgagccagctgccccactgaaaagatgaatgagttacggacatgagcaaagaacccaagatacacgtcttgattacaaaactgatcacaggcacattcattacaatattgatcacttatgaatagtgttctttctcattttttaaacaggaaagggaaccccttcccgtggtctctaatatttaaatttgacctgagcgcaactatcttccgggtcaatattcaggagctgtcgggctgtgctcaggcatcttcctgctccctggctgagtgcatttccgtctttgccctcctcaccccacccctcctcacccccagcacctgacttggactctgtcctccttgcccagcccccctctccgtgctgtgttttctcagtggcattgcagggctatgtttctggacctccgagcccctgacagacatttcctcaagggctccggagtctccactccagacaggcatttcctcaaggcctccggagtctcccctccggacaggca

SEQ ID NO: 6876 - DNA, 501 bp, Homo sapiens
  MAP TO AL135960.1; EXPRESSED IN ADULT LIVER, SIGNAL = 2.6; EXPRESSED IN PLACENTA, SIGNAL = 4.4; EXPRESSED IN BRAIN, SIGNAL = 2.5; EXPRESSED IN HELA, SIGNAL = 2.2; EXPRESSED IN BONE MARROW, SIGNAL = 3.1; EXPRESSED IN LUNG, SIGNAL = 2.3; EXPRESSED IN HEART, SIGNAL = 2.8; EXPRESSED IN FETAL LIVER, SIGNAL = 2.3; SWISSPROT HIT: Q64751, EVALUE 2.70e+00; NT HIT: gi16158242, EVALUE 0.00e+00; EST_HUMAN HIT: BI254337.1, EVALUE 0.00e+00
tgtgttggcatgcatcagcccagaagcagtgatctctggattaaactgcatgtcatttgctaatgttggcatgagcggcttaagccccaatggtgtggatttgagcatggaggcaaatgctatagctctgaaatatttaaatgaaaatcagctgtcacaactgtctgtcactcgatcgaaccaaaataattgtgacccattcagccttctccatattaatacagacagaagcacagtggggcttagtttaatttcaccaaacaacatgtcatttgcaaccaaaaaatatatgaagagatatggactcctacaaagcagtgacaatagtgaagatgaagaggaacctcccgacaatgcagatagcaagagtgaatatttattgaatcagaaccttaggtccatacctgaacagcttggtggtcagaaagagccttctaagaatgaccatgaaataattaattgttctaactgtgaatctgtggggaccaacgcagatacgcc

SEQ ID NO: 6877 - DNA, 500 bp, Homo sapiens
  MAP TO AC000384.1; EXPRESSED IN ADULT LIVER, SIGNAL = 1.4; EXPRESSED IN BRAIN, SIGNAL = 1.4; EXPRESSED IN HELA, SIGNAL = 2.6; EXPRESSED IN LUNG, SIGNAL = 1.6; EXPRESSED IN HEART, SIGNAL = 1.8; EXPRESSED IN FETAL LIVER, SIGNAL = 1.9; EST_HUMAN HIT: BG028677.1, EVALUE 2.00e-50; SWISSPROT HIT: P24821, EVALUE 4.60e+00; NT HIT: U30456.1, EVALUE 4.70e-01
gacttccggctggcaggcacgggactttgtagtgacccggaggaaccgcaggaaccagctgctatcatcgtcaacctgctgcgcaaatacatgctgcctcaggtgggtggccctttaccccaggttatcactgctgcccgttgactcgccccctaggtcctgggttactttaactcctggtcccttcacttcccagtggtgcgaccctgagcaagtcagtaacttccccagccttctgttcctttctttttgagttgctctgatcaaatggggtactgcatataatattagcacagcggcctggatcacagcaggtgttcagtaattgctagttataactgttatcctcatcaatgtcttcatccttggacactccgtcttcaggggtcccctgggaatagaagcagtcaacaggacactaaggtctttcttaactctcaaccatgctcttcccaggccagcattctggtgaccactcggccctctgccattggccgtat

SEQ ID NO: 6878 - DNA, 502 bp, Homo sapiens
  MAP TO AB003151.1; EXPRESSED IN ADULT LIVER, SIGNAL =  13; EXPRESSED IN HELA, SIGNAL =  29; EXPRESSED IN BONE MARROW, SIGNAL =  14; EXPRESSED IN HEART, SIGNAL =   6; EXPRESSED IN LUNG, SIGNAL =  12; EXPRESSED IN PLACENTA, SIGNAL = 6.3; EXPRESSED IN BRAIN, SIGNAL = 6.9; NT HIT: gi14778998, EVALUE 0.00e+00; EST_HUMAN HIT: BG989027.1, EVALUE 0.00e+00; SWISSPROT HIT: O16797, EVALUE 4.00e-40
catgccccaatccaggccaccttgcacaggcctcggtgggtcttgtggggcagcttcttggtgtgccaacaactggtgacccctttgtagcctttgcccttggtcaccccgatgatgtcgatcatctcgtccagcccaaacgcttggttcacaggtacctgctgctgtagcccctcctgggctcagtccagcttctcagccatggtgcctccgttcacttggatctccatcagctgggccttcttctggcgcagaggaagtaggcgcgtctgggtgtgggcagcgaggcgggtgacttggcagtgcttcctcatgctgctgaagtcttctccagctgcttcttgccatcctcatcctgccatttcttgcagtacttggtaaaggccttcttcctagatttatgccggttgttagagaaacaccttttgcactcatcgttgatgtgctcagcaaagatggccttgaaggtccggaggcctcaaggggtttccacgtagcccgc

SEQ ID NO: 6879 - DNA, 524 bp, Homo sapiens
  MAP TO AC004204.1; EXPRESSED IN PLACENTA, SIGNAL = 2.5; EXPRESSED IN ADULT LIVER, SIGNAL = 2.5; EXPRESSED IN HEART, SIGNAL = 2.3; EXPRESSED IN FETAL LIVER, SIGNAL = 2.3; EXPRESSED IN LUNG, SIGNAL = 2.3; EXPRESSED IN BONE MARROW, SIGNAL = 2.6; EXPRESSED IN HELA, SIGNAL = 5.6; NT HIT: gi14785296, EVALUE 0.00e+00; EST_HUMAN HIT: BG565542.1, EVALUE 0.00e+00; SWISSPROT HIT: P40818, EVALUE 1.00e-65
ggcactggctgaatgatgggtgaaacatcagatttagaagcagcaactgattcaactggaattgatatattcagtggtcctgtcctctcattttgatcattatcacttatttgatcacttatcaattctatgtcttcatccacttttataggtggaggtggcatctcggcagcaggtttagaaggaattgattcttccaatgagggataagtaaaatccaatgagatagacaactcttcattctggtgttgtgggggtggagtgaccttagcatttgttgtatactgggaatagcaaaggaaccagtttttatagcctccctctaaaaccaaaggcccaaggcccattgcacaggacagttttactttcccacttgaaaagtgcatctttcagatgccagagtgttgttccaatctgtaaatcttttgcagaactaaaccagtcaagaagtaccatatactccacattccccctcttcttccatgtatctatagaatcatctgggaggtgtgcttcaatccagc

SEQ ID NO: 6880 - DNA, 520 bp, Homo sapiens
  MAP TO AC026805.3; EXPRESSED IN ADULT LIVER, SIGNAL = 1.3; EXPRESSED IN BRAIN, SIGNAL = 1.7; EXPRESSED IN HELA, SIGNAL = 1.8; EXPRESSED IN LUNG, SIGNAL = 1.2; NT HIT: Z80130.1, EVALUE 0.00e+00; EST_HUMAN HIT: AL157564.1, EVALUE 2.00e-47; SWISSPROT HIT: O00555, EVALUE 3.00e-20
agggcatcccaggcagagggaacagcataggcaatggccctgaggcaggaacatgcctgatgtgaaggaggcctgtgtgactagaatcgaatagtaagtgtgaggaggtgaaggcaaggaggtgacaagcagattacacagggccttctgggtcaggggggaggacttgggcttttgcccctagccaggtgggagccatggagggttcttgagcagaggaggctgggacctgactcagatgctcacagactcctagcattcagtggggagtagagggtggagagcaggagtgggaggctgagatgtgggttggttcgcctgggtcatccatccaagctacagtgcctagcaatgctctaagtcctgtgaccatgccactgcaggaaagagcaacagaagaatcaaaagccagccaagtccgtgtgggagcagcggaccagtgagatgcgaaagcagaacttgctggccagccgggaggccctgtataacgaaatggacccggacgagcgctggaaggctg

SEQ ID NO: 6881 - DNA, 518 bp, Homo sapiens
  MAP TO AL022157.1; EXPRESSED IN HELA, SIGNAL = 1.1; EXPRESSED IN ADULT LIVER, SIGNAL = 1.2; EXPRESSED IN LUNG, SIGNAL = 1.2; NT HIT: gi15309599, EVALUE 0.00e+00; EST_HUMAN HIT: BG983570.1, EVALUE 0.00e+00; SWISSPROT HIT: Q99865, EVALUE 1.00e-03
agcagctgggacgctcagggaaggagggcagtgggtgccggtcaaggcctctttgcaaggggattggaagtggacgccagtggtagcaaggggttccgggagggcagtgggctctgagctaggaggaggtggcccagccacttctgcagagttcctaaccccagacagctctactgcaccaccccagcccttccccacagcccaaaggaacttaagagggagagcactgcgggcatgcagccaggatttccagcattgcttccaggctcctaggggaaacttaggcactagcgcagactacatccagacatggctatagggaaaagtttgccttgtggcacactgggtgtgtctctctatcctctctcctcccccagcaggcatgaagacccccaacgcacaggaagccgaagggcaacaaaccagggcagctgcaggacgggccactgggtctgcaaacatgacaaagaaaaaagtctcccaaaagaagcagagaggccgaccttcatcccagcccc

SEQ ID NO: 6882 - DNA, 584 bp, Homo sapiens
  MAP TO AP001054.1; EXPRESSED IN LUNG, SIGNAL = 1.4; EXPRESSED IN FETAL LIVER, SIGNAL = 1.2; EXPRESSED IN BRAIN, SIGNAL = 1.2; EXPRESSED IN HELA, SIGNAL = 2.2; EXPRESSED IN ADULT LIVER, SIGNAL = 1.5; EXPRESSED IN BONE MARROW, SIGNAL = 1.3; NT HIT: AB042297.1, EVALUE 6.00e-07; EST_HUMAN HIT: AA634659.1, EVALUE 6.00e-14; SWISSPROT HIT: Q00725, EVALUE 2.50e+00
ccctccctccgggtctctgctgagccctccaggcgctcaggtctgccgtctggttgcaggtgttttatagagtgcagctttacgctcccactccagtcatctccacgttggtgtccgtctgtgtgtcctctctgcctttaagttctgcctctgtgtgacacagtttcacagtttctgtgaccaaaacacaggtttagtcgcttgctgctggcagagtccaattaacaagagcacgtcgggtataaagaaagtgactttattccaaagctagcttaggggaagaggtaaagtgagggtaccactttgcttttggagcagaaagtgggaacttttaaaggtggggggatgtgtggcacacaggggaggaggctggcaggtgggggtccgcataactcgtttcgctgccttatctaccgggtggtcgagttggcatcttccccggcagaactgtgttggggtgttgtgggtattgtgggtattgtgggggttgtgttgtgggtgttgtgggggttgtgggtgttgtgttgtgggtgttgtaggagttgtgagtgttgtgggggttgtgggggttgtaggggttgcgg

SEQ ID NO: 6883 - DNA, 560 bp, Homo sapiens
  MAP TO AL133153.2; EXPRESSED IN LUNG, SIGNAL = 1.8; EXPRESSED IN HEART, SIGNAL = 1.8; EXPRESSED IN BONE MARROW, SIGNAL = 1.8; EXPRESSED IN FETAL LIVER, SIGNAL = 2.1; EXPRESSED IN PLACENTA, SIGNAL = 2.1; EXPRESSED IN BRAIN, SIGNAL = 1.8; EXPRESSED IN ADULT LIVER, SIGNAL = 2.6; EXPRESSED IN HELA, SIGNAL = 2.8; EST_HUMAN HIT: AU132599.1, EVALUE 1.00e-104; SWISSPROT HIT: P21916, EVALUE 1.60e-01; NT HIT: gi8923637, EVALUE 1.00e-105
tgccagtgcaagtttttcacgacgaagaggtgaaggtaaagatgatgccacaagttctgcaatttcttcaaggcgacttaattcacaagatggcaattctaagcctggcgatgacatatcatcaaaacgctcctcttcagattcatccacaaggtcctgagtgatgtccacggaagggtcctttccttgaacctatgaaaaaaaatttaattgctgacaaaatagataacaggtgaccagcaaacctaaatgctactctaagatgaatactagaaatgttgtaagaaacctataatggtcattttcaagacaaaactgcctacttttctacattacatttctccaaatatgtatactttcaattttaaggaagttagtcaaagttcaaaaacagaatgagcttccctataaagtatgaggtctgctggcaagaacaactttctaggacaggctaaactaagtgagactgttacgaaacagccctctgcagacccacaacatagaagcctgatgctaaaacagccactaacatctcatatccctggccctcttttccagca

SEQ ID NO: 6884 - DNA, 511 bp, Homo sapiens
  MAP TO AC004175.1; EXPRESSED IN BRAIN, SIGNAL = 1.8; EXPRESSED IN HELA, SIGNAL = 3.3; EXPRESSED IN LUNG, SIGNAL = 1.9; EXPRESSED IN ADULT LIVER, SIGNAL = 1.6; EST_HUMAN HIT: AI311336.1, EVALUE 2.00e-04; SWISSPROT HIT: Q91857, EVALUE 4.80e-02; NT HIT: AB023486.1, EVALUE 2.00e-03
ccagaatgggtgaatgcgcagagacagaaagcagatggtggttgccaagagctgggagggagaaagggatgtaactgctaagggcatccttatggggcatgaaaatgttttggaactagatagagttgggggttgcgcaatattgtgaagaggcaaagtgaggcagaactgtgcactctaaattggttaatttatgttatgtgaatttcacctcagataaaaattaagtggggagggtgggctctcgcctcagaatcagagcaaatacttcaatcccaatgcaaaggctacttggctattttggctgcaccaaactgagcacttccaacagcgctggctccctgaatcccaggatccagcctgttgtatctactccttggggagcctggctcatgacccaacttggaaatgacattcccaagaccacaaatgacatttccaagtaccaggatgtctctatgcccagtgctggggccacaccagatgccgaggcctctccaccccaggaggg

SEQ ID NO: 6885 - DNA, 536 bp, Homo sapiens
  MAP TO AL121944.10; EXPRESSED IN HEART, SIGNAL = 1.8; EXPRESSED IN LUNG, SIGNAL = 2.1; EXPRESSED IN BONE MARROW, SIGNAL = 2.6; EXPRESSED IN FETAL LIVER, SIGNAL = 2.6; EXPRESSED IN ADULT LIVER, SIGNAL = 2.3; EXPRESSED IN BRAIN, SIGNAL = 2.2; EXPRESSED IN HELA, SIGNAL =   3; SWISSPROT HIT: Q9Y3N9, EVALUE 1.00e-25; EST_HUMAN HIT: BE940436.1, EVALUE 6.00e-17; NT HIT: U52111.2, EVALUE 2.00e-12
tgggacatgtggctcccacctcacagtggtttccctgttctacggcacagctatctatgcttacctccagcccggcaacaactactctcaggatcagggcaagttcatctctctcttctacaccatcattacacccatgatcaaccccctcatatatacactgaggaacaaggatgtgaaaggagcacttaagaaggtgctctggaagaactacgactccagatgacttggagagaaagacattgcagtggaggaactttgaatgccagagcccttaagatgtatgcgttctccatgtgtcatccaaaatttcccctgcaactctccaggaaatttctttacataaatctctaaggaaaacaagtaattaaaatctaagttcatgaatttatttcaccctccagagatgttgatttcatattccagtggcgtgattatagctcactgcagcctcaaactccagggctgaaaaaggatcctcccacctcagcctccagagtagctgggactacaggtgaccatcaccacgcctggct

SEQ ID NO: 6886 - DNA, 527 bp, Homo sapiens
  MAP TO AL138688.11; EXPRESSED IN ADULT LIVER, SIGNAL = 2.4; EXPRESSED IN BRAIN, SIGNAL = 2.2; EXPRESSED IN HELA, SIGNAL = 4.1; EXPRESSED IN BONE MARROW, SIGNAL = 2.1; EXPRESSED IN LUNG, SIGNAL =   2; EXPRESSED IN HEART, SIGNAL = 1.8; EXPRESSED IN FETAL LIVER, SIGNAL =   2; NT HIT: AJ007676.1, EVALUE 0.00e+00; SWISSPROT HIT: P06110, EVALUE 3.70e+00; EST_HUMAN HIT: BG723323.1, EVALUE 1.00e-121
ggtgggggaggttgtacaggttcgataaaaacaacatcatcatcatcttccactgacgagttctgaaacttattagatctagacactaaaggattagctggaccactaaatgagtttcctacattcgtgagactagttgccatggccgtactccctaataaaacaggagtctgatcagtcaattctaatcctcccactgaacttgtgtccatgccaaagaacctgttaggaagatagaaaaaagaattaaaatgtcagtatgactttttatgttactctaactgaaaccattgatttaaagggtacttttattttatttttattctaaatgaagtgattcttgtctaacattcaggaaaatatgtgatatccattcattaatcatttcatatagtttacatgttaacttttgcaggataacaaggaaggcaattatccaatttttattggataattaatcatatgcaatatattcatggtaatcatatgcaatatattcctaccaccaccaccacctcctttcaggg

SEQ ID NO: 6887 - DNA, 528 bp, Homo sapiens
  MAP TO AC020647.9; EXPRESSED IN HELA, SIGNAL =  14; EXPRESSED IN ADULT LIVER, SIGNAL =   4; EXPRESSED IN PLACENTA, SIGNAL = 8.2; EXPRESSED IN LUNG, SIGNAL = 3.3; NT HIT: gi4504918, EVALUE 0.00e+00; SWISSPROT HIT: P05787, EVALUE 2.00e-26; EST_HUMAN HIT: BE515195.1, EVALUE 0.00e+00
cgggtgggctgagggctagggctgagtctcaggtgggtctcctgttccctgtgctcccctgcacagtggcctctctcatgggctctggggcagctgcaggggggagtagggtgggaggggctgccatggcagttcactcaggcaggacgtcagaggactcagacacaagcttcccatcgcgggtctcgatcttcacaaccatagccctggtggagctggtatggctgaagtagctggagcctgcaacagagccaaagctagagctcaggccatagctgaggaggggggcttgtgaggcccccataggccgagctcagccctcctgcgtagccactggtggtctttgagtagatactcatgttctgcatcctagactcttgccagctctcttcaccctccagcagcttcttgtaggtggcagtcttgatgtccagggccagcttgacattcatcagctcctggtatacacgcagctgctgtgccatgtcctgcttggcccactgcagggcggcctccagctccaacagc

SEQ ID NO: 6888 - DNA, 531 bp, Homo sapiens
  MAP TO AL021392.5; EXPRESSED IN ADULT LIVER, SIGNAL = 1.9; EXPRESSED IN HELA, SIGNAL = 0.63; EXPRESSED IN BONE MARROW, SIGNAL = 1.8; EXPRESSED IN PLACENTA, SIGNAL = 1.8; EXPRESSED IN BRAIN, SIGNAL = 1.8; SWISSPROT HIT: P13983, EVALUE 1.50e-01; EST_HUMAN HIT: BE185569.1, EVALUE 1.20e-02; NT HIT: Y16341.1, EVALUE 3.20e-02
gacacaccgccagggatgggcccgggctacgcctccagcctgcgcctgcaccggggtaggggtgccctccacggccacatgggcagcccccgcactgcactgaagagtgctccactgtacaccagggtgacttcatctcagtgacatctgcaaagagccatttccaagtaaggtcgggtccacaggtacgaggtggacatgaattttgggggaggacactattacccagcacacgcccaacttacagatgcaggaaccaaggcccgtctacacactgagcatagctccaggctgcacctcaggccagacccgggtctcccgacaccgcccacctgcgtctcacctgcaccttccgtcctgcgtgctgcagccgcgcatccccaaccagacggcccctgccctccccacttctagctgcccatccccaccccctccacggtccctggaggaagcccagctcctcagcctgcagcccagccgctctccccaggaccagcccctccacctgcacctacaggcccacccctggca

SEQ ID NO: 6889 - DNA, 515 bp, Homo sapiens
  MAP TO K02402.1; EXPRESSED IN HELA, SIGNAL = 4.2; EXPRESSED IN BONE MARROW, SIGNAL =   2; EXPRESSED IN LUNG, SIGNAL = 1.8; EXPRESSED IN HEART, SIGNAL = 1.7; EXPRESSED IN PLACENTA, SIGNAL = 1.4; EXPRESSED IN ADULT LIVER, SIGNAL = 3.2; SWISSPROT HIT: P00740, EVALUE 3.00e-20; EST_HUMAN HIT: T28608.1, EVALUE 2.00e-53; NT HIT: K02053.1, EVALUE 0.00e+00
tctctggtgcttggcacaacctgtagcaggtcctcagaaaacaaacatttgaattaatggccaaatgagtttgtgctcaaaaaaggggtgaggatacttgaaatttggaaaatctaggataattcatgactagtggattcattatcaccaatgaaaggcttataacagcatgagtgaacagaaccatctctatgatagtcctgaatggctttttggtctgaaaaatatgcattggctctcattacatttaaccaaaattatcacaatataagaatgagatctttaacattgccaattaggtcagtggtcccaagtagtcacttagaaaatctgtgtatgtgaaatactgtttgtgacttaaaatgaaatttatttttaataggtgaacataatattgaggagacagaacatacagagcaaaagcgaaatgtgattcgaattattcctcaccacaactacaatgcagctattaataagtacaaccatgacattgcccttctggaactggacgaacc

SEQ ID NO: 6890 - DNA, 501 bp, Homo sapiens
  MAP TO AL133551.4; EXPRESSED IN BONE MARROW, SIGNAL = 1.4; EXPRESSED IN ADULT LIVER, SIGNAL = 1.5; EXPRESSED IN BRAIN, SIGNAL = 1.1; EXPRESSED IN HELA, SIGNAL =   3; NT HIT: gi13775598, EVALUE 0.00e+00; SWISSPROT HIT: P06700, EVALUE 2.00e-05; EST_HUMAN HIT: AA461259.1, EVALUE 0.00e+00
gaaagtctgggaagattgctcaggggtaaccaggtgataggagcagaacttgagcgttttataaaagacacttaactgcccatctgcttgcttgatgaaatgtaatggcttggttaagtatttagtgcatgggtcttttttgggaatttggagctcaagcccttgttggatttttgcataatgtatctgttgtggttttattagcttacttcctcctccctttttctaactcttatttttcaccctattttaggttccataccccatgaagtgcctcagatattaattaatagagaacctttgcctcatctgcattttgatgtagagcttcttggagactgtgatgtcataattaatgaattgtgtcataggttaggtggtgaatatgccaaactttgctgtaaccctgtaaagctttcagaaattactgaaaaacctccacgaacacaaaaagaattggcttatttgtcagagttgccacccacacctcttcatgtttca

SEQ ID NO: 6891 - DNA, 584 bp, Homo sapiens
  MAP TO AB023048.1; EXPRESSED IN HELA, SIGNAL = 1.7; EXPRESSED IN ADULT LIVER, SIGNAL = 1.2; EXPRESSED IN FETAL LIVER, SIGNAL = 1.2; EXPRESSED IN BONE MARROW, SIGNAL = 1.1; EXPRESSED IN LUNG, SIGNAL = 1.1; NT HIT: AF168055.1, EVALUE 1.40e-01; SWISSPROT HIT: P39605, EVALUE 7.40e+00; EST_HUMAN HIT: AA584104.1, EVALUE 2.00e-04
cgtgtggtgttgcagtggcgtttttgctcatggatttctgtagatttagggagctctggaggtctttgtcctgaatgcagaacaatgtgatcaaaagggatactataaacaaggcctggagtgaggggaaatatgtgatcggatgttgagagttccccagttttctgatattcttggaatgtagtagcacctgtggagggagagaggcaaataagaaacttcccccatgttcttctccaactcccccttcccacctccttctctaggggatctctttgttccccctgatatgactccccagccagtctcctctgaatactatgatatctattccccattctcacctccagcccctaggctcaggctgtgccttcagcaagcatgccacctcatccccttccacatctcctcaactctccatctcaaggccttctggctttaaggcatcttttctgatccgtctaagcagataaaatccagcttcatttcagtgcttgaaaaggtctttattcaccattctgtcctgttaccttcaacttcacgttacagttgtttgcgtgcctgccgacctccactccctgcca

SEQ ID NO: 6892 - DNA, 500 bp, Homo sapiens
  MAP TO AC005005.1; EXPRESSED IN LUNG, SIGNAL = 2.4; EXPRESSED IN ADULT LIVER, SIGNAL = 2.5; EXPRESSED IN BRAIN, SIGNAL = 2.2; EXPRESSED IN HELA, SIGNAL = 0.76; EXPRESSED IN BONE MARROW, SIGNAL = 1.9; EST_HUMAN HIT: BE707252.1, EVALUE 2.00e-75; NT HIT: gi14778298, EVALUE 5.00e-78
ggctgcggtgtcgcttggacttgccaggactggggctgcgggacttgggtgcaaggagctccagtgtgctgtcatcctctccctctgagctggtgcctgagctgtctgtgctgctgctggccaactccgaggaaggcagcgagatctgggggaaatgctggtcactggggcgccctgctccccaacccagccactgaggcctgacctcccgaggtctgcctctctcgttggcagatcttgggaggtcaggttatttgtctgaactcaaggagcagaatgtagaggctgtggcatttgacaaaagtctttaggcacccccagcccagcagtctggcctacttacctggaagggttcagtgatgccgatgaggatgctgtggttgtgactatagtagcccaggatgaagtctccatggcccttgggcagtgattcctcactgaatgttacctggtaggcccaggggtataagcctaagttgggggtcagggaggccacctga

SEQ ID NO: 6893 - DNA, 509 bp, Homo sapiens
  MAP TO Z68868.1; EXPRESSED IN HELA, SIGNAL = 1.1; EXPRESSED IN ADULT LIVER, SIGNAL = 1.3; EXPRESSED IN BRAIN, SIGNAL = 1.1; EXPRESSED IN BONE MARROW, SIGNAL = 0.93; SWISSPROT HIT: P52742, EVALUE 2.00e-49; EST_HUMAN HIT: BF347790.1, EVALUE 0.00e+00; NT HIT: U09413.1, EVALUE 0.00e+00
tcggccagagctcccgtctcatcgaacaccagaggattcacaccaaggaaaagccctatcggtgcaatgagtgtgggaaatccttcagccacagctccttgctcagccagcatgaaaggacgcacactggggaaaagtcccatgggtgtcacgattgcggaaagtcctttaggcagagcacccacctcactcagcaccggaggatccacacaggagagaagccatatgtgtgcagggactgtggaaaggcccttacacacagctcctcccttaccaagcaccagagaattcacactggataaacccactccacatgtgctggggacatgggaagaccttaagccatagctcatccttttctagatttgactcaatcatacacatgagaaacgtatattcatacaaaagccttttcacacagcactcccctcagacaccctcagagagttcacactgatgggaaatgaccatgggaccaccaagctctaggtcatccatccctgcatcca

SEQ ID NO: 6894 - DNA, 508 bp, Homo sapiens
  MAP TO AC002039.1; EXPRESSED IN HEART, SIGNAL = 1.7; EXPRESSED IN BONE MARROW, SIGNAL = 1.4; EXPRESSED IN LUNG, SIGNAL = 1.4; EXPRESSED IN FETAL LIVER, SIGNAL = 1.4; EXPRESSED IN BRAIN, SIGNAL = 2.7; EXPRESSED IN HELA, SIGNAL = 0.48; EXPRESSED IN ADULT LIVER, SIGNAL = 1.3; NT HIT: gi14774787, EVALUE 0.00e+00; SWISSPROT HIT: P98161, EVALUE 6.00e-21; EST_HUMAN HIT: BF852695.1, EVALUE 8.00e-13
aggcccctcccacgtccttgccacctctgacctccgacctccgacctccaacctccgacctctgcagtgcccttgcccctctcccagtgggagaagctctcgcctgggcccttggcacgagctgtgcctcctcttcctctctcccagcacagccgctccttcctgtctgccaggtcttggcctgtgtcctctccccgtgtgtccccctgtctgcaactgtcctgcctgtccttgtcacgagcactgtggggaggctccctgaggtgtggctgacgaagcggggagccctgcgtgtccaccctcatccgtcgtgcaggggtccacgggccatgaccgtgaggacgtgatgcagccctgcctccctctccacaggtcaccctccacggccaggatgtcctcatgctccctggtgacctcgttggcttgcagcacgacgctggccctggcgccctcccgcactgctcgccggctcccggccaccctggtccccaggccccgtacctctccg

SEQ ID NO: 6895 - DNA, 507 bp, Homo sapiens
  MAP TO D86996.1; EXPRESSED IN BONE MARROW, SIGNAL = 1.2; EXPRESSED IN LUNG, SIGNAL = 1.2; EXPRESSED IN ADULT LIVER, SIGNAL = 1.2; EXPRESSED IN BRAIN, SIGNAL = 1.2; NT HIT: gi14777637, EVALUE 0.00e+00; EST_HUMAN HIT: BG910301.1, EVALUE 0.00e+00; SWISSPROT HIT: O95985, EVALUE 2.00e-22
ggccaccttccacttggggcccgaggtggggtccagcaccagcaccccgctctcacattccacgcactggccgatgcccagcatgctcagcgagtgctggcaggaggggtgcgtacactcgttgcagcccatgcctggcgggagaagggagccctgtaaaggcacgcccactgtgcccacctgccctctgctgcctgctcccaatgcctcaagctcctggatccctcgtcccagcagaaggaactcttcttggccttgctcttggggacagccttgctcatgtttcggctcctggctgccattacccctgttttctgcttacctgaaacctcctcaactttcaaggcccctcgctggcgccatcccagtgggtttcagctgactccatcccccctttgctttgctgccagcttgttactggtaatgccacatgaccctcatgtcactgggccacatgggaccaccctgtcagctactctggcggcagcaggagggcagggatggggt

SEQ ID NO: 6896 - DNA, 502 bp, Homo sapiens
  MAP TO AC011489.3; EXPRESSED IN ADULT LIVER, SIGNAL = 2.1; EXPRESSED IN PLACENTA, SIGNAL = 1.4; EXPRESSED IN HELA, SIGNAL = 3.3; EXPRESSED IN LUNG, SIGNAL = 2.3; NT HIT: gi11967932, EVALUE 2.00e-18; EST_HUMAN HIT: BI262390.1, EVALUE 0.00e+00; SWISSPROT HIT: Q15928, EVALUE 9.00e-14
aagggcacatggcagtgggggcactcgaagcgggtgctgccaggcgtcatgccgtgcatgcggcggtggcggttgagcttactgctctgggcgcaggcgtagttgcagaactcacaggtgtaggggcgctccccggtgtgtgagcgccggtgcaccgtcaggttgctgctgttggtaaaatgcttcccgcagaactcacagctgcccccgggcccgcggctcttgccccctgacttgggcatctttttgggtgatgccttctggctgtttgcagggtcagttctttgttccgtggtgatggctccccaagtgtctccaccagggccggcttgagccccactgccaggagccccgggttcctggacacctgctgtggcggcggctccagccccctcaccaccgctgcatggaagggtgctggtgggggcagcagcatggacagccggctccggaggggctgcagaggcctgctcctggctggtgtcggccatgagggggctct

SEQ ID NO: 6897 - DNA, 500 bp, Homo sapiens
  MAP TO AP000354.1; EXPRESSED IN LUNG, SIGNAL = 1.2; EXPRESSED IN HEART, SIGNAL = 1.2; EXPRESSED IN FETAL LIVER, SIGNAL = 1.3; EXPRESSED IN HELA, SIGNAL = 2.2; EXPRESSED IN ADULT LIVER, SIGNAL = 1.5; EXPRESSED IN PLACENTA, SIGNAL = 2.3; NT HIT: gi14772279, EVALUE 7.40e+00; SWISSPROT HIT: P48899, EVALUE 3.50e+00
tctgtgtccctcacattggctcccctttgccaactagataaagtccaaacgccttaccctggagtttgcctgcgtgactctcgcttgcctgagctggcccctctggcctacctttgaaggcttacctcactctgctcttcccctcccactgaacatcaccacagtgtcctagatttctttgggggtatactaagcactcagttgggaacactctttttcttctaagctctcctttgcctgcataaagactattaattatccttctaatctcaactttgctgtcatttcctgaggaggcctttcctgttctcccctcaagaccaggtcacattgcctgctgtgttcccagaacccctggtacttgttttttcttagcatccctcactcgtaatgactttttgaatgcttgcttctactctagaccccaagttccatgagagcaagtttcctgtctgctttctttttttctctgacctttgcaccaagccaagtgcctggca

SEQ ID NO: 6898 - DNA, 505 bp, Homo sapiens
  MAP TO AC005412.5; EXPRESSED IN BRAIN, SIGNAL = 2.4; EXPRESSED IN HELA, SIGNAL = 0.8; EXPRESSED IN ADULT LIVER, SIGNAL = 1.6; EXPRESSED IN BONE MARROW, SIGNAL = 1.8; EXPRESSED IN HEART, SIGNAL = 1.7; EXPRESSED IN LUNG, SIGNAL = 1.6; EST_HUMAN HIT: AA776190.1, EVALUE 0.00e+00; NT HIT: AB026497.1, EVALUE 0.00e+00; SWISSPROT HIT: P34735, EVALUE 4.70e-02
tgtcagcggcagagcttcggagcctggaggagatgagcctgcgacgtggcttcttcaacctgaaccgctcctccaagcgtgaatccaagacgcgcctggaaatctccaaccccatccccatcaaggtggccagcggctctgacctgcacctgactgacattgactccgatagtaaccggggcagcgtcatcctggactcgggccacctaagtacagccagctccagcgatgacctcaagggtgaggagggtagcttccgtggctcggtgctgcagcgggcagccaagttcggctcactggccaagcagaactcacagatgattgtcaagcgcttttccttctcccagcgtagccgggatgagagcgcctcagaaacctcgacgccctcagagcactctgccgccccctcgccacaggtggaggtgaggactctagagggacagctggtgcagcatcctggcccaggcatccctcgaccagggcaccgatcccgagcccctgagct

SEQ ID NO: 6899 - DNA, 514 bp, Homo sapiens
  MAP TO AC008981.4; EXPRESSED IN HELA, SIGNAL = 8.5; EXPRESSED IN ADULT LIVER, SIGNAL = 6.5; EXPRESSED IN BONE MARROW, SIGNAL =  14; EXPRESSED IN LUNG, SIGNAL = 5.3; EXPRESSED IN HEART, SIGNAL = 7.6; EXPRESSED IN PLACENTA, SIGNAL = 5.6; EXPRESSED IN BRAIN, SIGNAL = 7.1; EST_HUMAN HIT: BG697749.1, EVALUE 0.00e+00; NT HIT: gi14768073, EVALUE 0.00e+00; SWISSPROT HIT: P08865, EVALUE 1.00e-86
tggcctgagcagtgggagctgcagaccagtcttccatggcaggctgagcgctccagtcttcagtagggaattgctgaataggcacagagggcacctgcacaccttcagaccagtctgcaacctcaggctgagtagcagtgaactcaggagcgggagcagtccattcaccctgaaattcctccttggtcactgccttctcagcagcagcctgctcttctttttcaatctcttcaggatctctgtagaagtacagatcaggcatgacctcccatgggtgttcacgggaaatggtgccacgcatgcgcagaacttcccgagccagcatccaccacatcaaacccactgagtgagctcccttgttgttgcatgggatggcaatgtccacatagcgcagaggagaatctgtgttacacagcgcaatggtaggtaggttaacataagatgcctccgtgagaggctggtggtcagccctggggtcagtaaccacaagaagccgtggctcccagaaggctgc

SEQ ID NO: 6900 - DNA, 505 bp, Homo sapiens
  MAP TO AC002326.1; EXPRESSED IN HELA, SIGNAL = 1.6; EXPRESSED IN ADULT LIVER, SIGNAL = 2.2; EXPRESSED IN LUNG, SIGNAL =   2; EXPRESSED IN HEART, SIGNAL = 1.7; EXPRESSED IN FETAL LIVER, SIGNAL = 1.5; EST_HUMAN HIT: AI903352.1, EVALUE 1.00e-130; NT HIT: gi4506792, EVALUE 0.00e+00; SWISSPROT HIT: P54253, EVALUE 3.00e-85
ggtccacccgagcccctcagactacagcagtcgtgatccttcgggggtccgggcctctgtgatggtcctgcccaacagcaacacgcccgcagctgacctggaggtgcaacaggccactcatcgtgaagcctccccttctaccctcaacgacaaaagtggcctgcatttagggaagcctggccaccggtcctacgcgctctcaccccacacggtcattcagaccacacacagtgcttcagagccactcccggtgggactgccagccacggccttctacgcagggactcaaccccctgtcatcggctacctgagcggccagcagcaagcaatcacctacgccggcagcctgccccagcacctggtgatccccggcacacagcccctgctcatcccggtcggcagcactgacatggaagcgtcgggggcagccccggccatagtcacgtcatccccccagtttgctgcagtgcctcacacgttcgtcaccaccgcccttcccaagagc

SEQ ID NO: 6901 - DNA, 502 bp, Homo sapiens
  MAP TO AL136528.9; EXPRESSED IN BRAIN, SIGNAL = 1.6; EXPRESSED IN ADULT LIVER, SIGNAL = 2.1; EXPRESSED IN HELA, SIGNAL = 1.3; EXPRESSED IN BONE MARROW, SIGNAL = 1.6; EXPRESSED IN FETAL LIVER, SIGNAL = 1.5; EXPRESSED IN LUNG, SIGNAL =   2; EXPRESSED IN HEART, SIGNAL = 1.6; NT HIT: AF137254.1, EVALUE 1.90e+00; SWISSPROT HIT: P08393, EVALUE 7.00e-01
accccatgtccggggctcagcggggccgctgggtccccttccgaaggcgcgaccccatttcgggggttagtggggccgctgagtccacttgcgaaggcgccaccccacgtgagggtgctgtggagcatgggagacgtccctgcctcttgcattttaacgtgaaaaggcaagcttgcgcccattagacgaggttcagtgagtcatcaaaagcggctcacccctaggcctgcagcggaacactgccgcgctttcagagcccttctcttcctcgtagcaatgccctccccacctgagggcacctttgccccacgtcttgcgtgaatcacatcctcactgttcttgagtctcactgtacagatgtgtctaaacaccacattgcttgctgtgcagtgtaaagttgatttataggggcttgtactttgcagtctctgctgttgctgttccccgtcactgcttttagactcctccgtgttgacaggcatcgctgggccttcccttcctc

SEQ ID NO: 6902 - DNA, 502 bp, Homo sapiens
  MAP TO AC006070.1; EXPRESSED IN LUNG, SIGNAL = 1.2; EXPRESSED IN FETAL LIVER, SIGNAL = 1.3; EXPRESSED IN HELA, SIGNAL = 0.72; EXPRESSED IN ADULT LIVER, SIGNAL = 1.6; EXPRESSED IN BONE MARROW, SIGNAL = 1.1; EST_HUMAN HIT: BE250684.1, EVALUE 2.00e-69; NT HIT: gi14210533, EVALUE 0.00e+00; SWISSPROT HIT: Q9UGL9, EVALUE 1.60e+00
ggaggaagctgcagcaagaggcacacaagaggttgttcaagaagagctgacctgaagaatcctaacacaccaggggaaggaaataatgcttttctccatgttgacaaatttaagcagaaaaacaaacttgcctaatttgataattgcctgctcatcagaacaaacaatgacaaggaaagagtgctgcatccgatgacatcagccctgagcagggtataaaagaggatctggggcaaggagacttccaagccttccaaaccctccttcctggaaacccacccagaacctccaccctctgacaccatggtcaactcctgttgtggctctgtgtgctctgaccagggctgtggcctagagaactgctgccgtcccagctactgccagaccacctgctgcaggaccacctgctgccgccccagctgctgtgtgtccagctgctgcagaccccagtgctgccagaccacctgctgcaggaccacctgctgccaccccagctgctgtg

SEQ ID NO: 6903 - DNA, 531 bp, Homo sapiens
  MAP TO AP000510.1; EXPRESSED IN LUNG, SIGNAL = 2.7; EXPRESSED IN ADULT LIVER, SIGNAL = 2.8; EXPRESSED IN HELA, SIGNAL = 4.8; EXPRESSED IN BRAIN, SIGNAL = 2.6; EXPRESSED IN HEART, SIGNAL = 2.9; EXPRESSED IN FETAL LIVER, SIGNAL = 3.2; EST_HUMAN HIT: AA922374.1, EVALUE 7.40e-01; NT HIT: AF245204.1, EVALUE 0.00e+00; SWISSPROT HIT: O14640, EVALUE 1.40e+00
tctgctgtcccccaccccactaccaggataaagggctggctgtcttggggctgagggagatcgggtgctgagcaggatgcagggccgcgtggcagggagctgcgctcctctgggcctgctcctggtctgtcttcatctcccaggtatggaggccgtgatgcccttgggcaggagggactggaggtcccccaggaaacaggaattaaggaaaggggtaaaggcaggagggtacacatttaggtccctgagggaaaaggaagaataggcataggggaagcaaagggaactggggactcggggactggagaccactggttgctttatcttccctttccctcaggcctctttgcccggagcatcggtgttgtggaggagaaagtttcccaaaacttggggaccaacttgcctcagctcggacaaccttcctccactggcccctctaactctgaacatccgcagcccgctctggaccctaggtctaatgacttggcaagggttcctctgaagctcagcgtgcctgcatcagatggc

SEQ ID NO: 6904 - DNA, 501 bp, Homo sapiens
  MAP TO AL136105.2; EXPRESSED IN ADULT LIVER, SIGNAL = 2.4; EXPRESSED IN HELA, SIGNAL = 7.7; EXPRESSED IN BONE MARROW, SIGNAL = 2.6; EXPRESSED IN HEART, SIGNAL = 2.5; EXPRESSED IN LUNG, SIGNAL = 2.2; EXPRESSED IN BRAIN, SIGNAL = 2.4; SWISSPROT HIT: P06733, EVALUE 5.00e-14; EST_HUMAN HIT: BE904884.1, EVALUE 0.00e+00; NT HIT: X15277.1, EVALUE 0.00e+00
gctggcagttttgtggaggggtagcttgtttcggtggtggatctctgtttatttttgcacatctgttataatttaatattcaaatctggaattaagaaaacatattttctagtatcctctaagggccaaagtcctacaatcggaatggattcatgccacgttgaagataaaattatcctctctctgaaatacggtaaagatttaaataggtcctgagactgttgatagccccagacatacccacagcattatatgtaacatctctcctgatcagtgccattcccacggtttcaaagaaaacagctacaaggaatgcttacctgagtgtctgcagcaccctccacttctctcctaggcaatgagacccagtggctagaaattcaccatgtctattctcaagatccatgccagggagctctttgactctcgtgggaatcccactgttgaggttgatctcttcacctcagaaggtctcttcagagctgctgtgcccagtggtgc

SEQ ID NO: 6905 - DNA, 571 bp, Homo sapiens
  MAP TO AC004174.1; EXPRESSED IN LUNG, SIGNAL = 1.2; EXPRESSED IN ADULT LIVER, SIGNAL = 1.4; EXPRESSED IN HELA, SIGNAL = 1.2; EXPRESSED IN PLACENTA, SIGNAL = 1.6; EXPRESSED IN BRAIN, SIGNAL = 1.3; EXPRESSED IN BONE MARROW, SIGNAL = 1.3; SWISSPROT HIT: Q9GZK7, EVALUE 4.00e-42; EST_HUMAN HIT: AA033831.1, EVALUE 1.00e-52; NT HIT: AJ302623.1, EVALUE 0.00e+00
ggggcaagcaggagaagggctttctccacatgctcctcccacctagctgtagtgaccacattctatggaacgctcatgatcttttatgttgcaccctctgctgtccattcccagctcctctccaaggtcttctccctgctctacactgtggtcacccctctcttcaatcctgtgatctataccatgaggaacaaggaggtgcatcaggcacttcggaagattctctgtatcaaacaaactgaaacacttgattgaaggagagtaatgaagatgttattttggacttcggacacctccattggggactcttccaggatgggttggagaggagtaactttgtcttattcgaccattctctttgaactcttctgcagttatactaaaaatgaaaatgatagggcaacaattttttaacttttattttaagttcaagggtacatgtgcaggtttgttacataggtaaacttgtgtcatgggggtttactgtacagattatttcatcacccaggtattaagcctagtactcattaatcatttttcctgatcttctccctcctcccaacctccaccc

SEQ ID NO: 6906 - DNA, 509 bp, Homo sapiens
  MAP TO AC008985.5; EXPRESSED IN BONE MARROW, SIGNAL = 2.8; EXPRESSED IN LUNG, SIGNAL = 2.4; EXPRESSED IN HELA, SIGNAL = 2.7; EXPRESSED IN ADULT LIVER, SIGNAL = 2.2; EXPRESSED IN PLACENTA, SIGNAL = 1.4; EXPRESSED IN HEART, SIGNAL = 2.3; EXPRESSED IN FETAL LIVER, SIGNAL = 2.2; NT HIT: gi11425304, EVALUE 0.00e+00; SWISSPROT HIT: P39188, EVALUE 2.00e-11; EST_HUMAN HIT: BI518681.1, EVALUE 4.00e-58
cccctgtcgcaggagagcccaggatgtcatcttccaggaagtctaggtccacactgggggccggctggttgggctctgggttcaggtggttgccggaagcttcttgcacatggagctgcaggccgggaaaggtgggaaggaaagagctgaggttagcaaggggctacgcttaggccacagctgccgcaaagaatgctgaggtgacagggcagccacgttcaagaaagaacattccctcctggcatggtggttcacgcttgtaatctcagcactttgggaggctgaggtaggaggatggatggcttgagccaaagagtttgagaccagcctgggcaacgcagtgagaaaaaaattttaaaaaagaaaaattagtcaggggtggcagcatgtgcctgtggtcttagctacttgggaggctgaggtgagaggatcactggagcccaggagtttgaggctgcagagtggagctacgagcacttcactacactccagcctcggtgacagggcaa

SEQ ID NO: 6907 - DNA, 500 bp, Homo sapiens
  MAP TO AL132795.12; EXPRESSED IN HELA, SIGNAL = 2.1; EXPRESSED IN PLACENTA, SIGNAL = 1.5; EXPRESSED IN BRAIN, SIGNAL = 1.3; EXPRESSED IN ADULT LIVER, SIGNAL = 1.6; EXPRESSED IN FETAL LIVER, SIGNAL = 1.7; EXPRESSED IN HEART, SIGNAL = 1.5; EXPRESSED IN LUNG, SIGNAL = 1.7; EXPRESSED IN BONE MARROW, SIGNAL = 1.5; SWISSPROT HIT: Q01656, EVALUE 3.00e-12; EST_HUMAN HIT: BF742161.1, EVALUE 1.00e-05; NT HIT: U73123.1, EVALUE 7.40e+00
tgtttccccaggcagaaaacgctcttccaaatgtaatggagtcagctttttattttgaacaagctggagttggtttgggcacagatgagacataccgcatatttcttgccctcaagcagcttactgatacccacccaatccaaagatgccgcttctggggaaagatcttgggtctggaaatgaattatattgtagctgaagtggaatttcgtgagggggaagatgaagaggaagtggaagaggaagatgtagctgaagagagggacaatggagaaagtgaagctcatgaagatgaggaagatgaattaccaaagtccttttacaaggccccacaggctataccaaaagaagaaagtagaacaggtgccaacaaatatgtctattttgtttgcaatgaaccaggaagaccatgggtgaagttaccaccagttatacctgcacaaattgttattgcaagaaaaatcaagaaatttttcactgggcgattggatgctcccatc

SEQ ID NO: 6908 - DNA, 512 bp, Homo sapiens
  MAP TO AC002070.1; EXPRESSED IN LUNG, SIGNAL = 1.1; EXPRESSED IN HELA, SIGNAL = 0.79; EXPRESSED IN ADULT LIVER, SIGNAL = 1.2; EXPRESSED IN BRAIN, SIGNAL = 0.91; EXPRESSED IN BONE MARROW, SIGNAL = 1.2; EXPRESSED IN FETAL LIVER, SIGNAL = 1.1; SWISSPROT HIT: P41479, EVALUE 3.60e+00
tcaccaccatcctcaccatcaccatcatcatcaccatcatcatcaccaccatcatcaccatcatcaccatcaccatcattatcaccatcatcatcaccagcatcatcatcatcaccatcgtcctcaccaccatcatcatcatcaccatcatcctcaccaccatcatcatcatcaccatcatcatcatcaccatcatcatcatcacattgtgttggacacatccttatccctccctaatatttcagtcattaatgagccctatcccactccatcccatcccactgtccccctacctctctttgattggtattatgattataatattccagctggcagcctaagcttgatgttcttaaagcatctccttgcaaaaataggccttgcaatttctcatgatgtctcttcagtacacttgcacttctgcccatctctcccatggacaagacttctgaaaccaattggaatagaaccagtgggctttcacttgcatctgaatcgtctgggggtggggg

SEQ ID NO: 6909 - DNA, 504 bp, Homo sapiens
  MAP TO AL136109.1; EXPRESSED IN ADULT LIVER, SIGNAL = 3.5; EXPRESSED IN HELA, SIGNAL = 5.2; EXPRESSED IN PLACENTA, SIGNAL = 3.1; EXPRESSED IN BRAIN, SIGNAL = 3.6; EXPRESSED IN FETAL LIVER, SIGNAL = 4.3; NT HIT: gi14738233, EVALUE 4.00e-97; SWISSPROT HIT: Q9P2Y4, EVALUE 1.60e+00; EST_HUMAN HIT: AU131162.1, EVALUE 6.00e-97
tgcccagcaacatttgaaacaggtgttgggttatcaaatcatgtcagggggcatcttcacagagcaggattaagctatgaagcccgtcatgttgtatcaccagaacaaatagccacaagtgacaaaatgcagcatttcaaaagaactggcacaggaacacctgttaaacgagttagaaaaggtaagttctccatggggatgatttgggctgataggtctgtgttctaattctgaagatttaaaagttttttttgaatttagtctttattagaatcataattttatgtttcagaattaactcattttagggtggtcagtttatataagaaagtctgatattactcttaaaaatttttttctagctatagagaagtctgaaaccacttctgaacacacttgtcagctctgtggtggttggtttgatactaaaattggattatcaaatcatgttagaggccacttgaaaagacttggaaagacgaaatgggatgctcacaaatctcc

SEQ ID NO: 6910 - DNA, 596 bp, Homo sapiens
  MAP TO AC002404.1; EXPRESSED IN HELA, SIGNAL = 4.2; EXPRESSED IN ADULT LIVER, SIGNAL = 1.4; EXPRESSED IN BONE MARROW, SIGNAL = 1.4; EXPRESSED IN LUNG, SIGNAL = 1.5; EST_HUMAN HIT: AL042461.1, EVALUE 0.00e+00; NT HIT: AF045780.1, EVALUE 0.00e+00; SWISSPROT HIT: P17010, EVALUE 3.00e-51
cacccgtcaagacgtgttctggcatagacattgaggctgaagtaatgtcagaagctaaaacatcatctgggactgtgcaatgtgctaaagaaacttcttcagttacatctgagtccagcacttgctcaggaatgatgaccgtttcagacacatctgcttcttccatgatatctgggcactgaacatcttctataacaacgtcctcaataacatcttggattacaactgaatctgggtcatcaggaacaaagttatgcacagttatgtctgaatccacaacatctgaaacaaaaacagtttcttgtacttccacaacaatttgatcaccatccatgtgtgtaccatcagctccttaaaaaaaaaattaaaatgacaaatttcaggtaagtatgcatgactacaattaacgtaaatgttacttaatttctactgggaaaacagattagctcctcagttttcttaaacattaagatagattaaagaaataaagagggaatctatttttgaatcacatgtttttaacccaagaacttttgtaatcatctcaaatcaatagatttttaaaaattaggagaacaaagcaattgaggcagtca

SEQ ID NO: 6911 - DNA, 501 bp, Homo sapiens
  MAP TO AL356017.1; EXPRESSED IN PLACENTA, SIGNAL = 1.7; EXPRESSED IN BRAIN, SIGNAL = 1.6; EXPRESSED IN ADULT LIVER, SIGNAL = 1.5; EXPRESSED IN HELA, SIGNAL = 1.8; EXPRESSED IN LUNG, SIGNAL = 1.4; SWISSPROT HIT: P34529, EVALUE 1.00e-14; EST_HUMAN HIT: AU145205.1, EVALUE 0.00e+00; NT HIT: gi14748176, EVALUE 0.00e+00
ggagcagctgtgcttggccggtgtagcaatttctgagcatgatacgttctcatcctctgagattatccaacactgcaaaccactttcaggcacactgaataattaactgctcaaaataaaaaaatcatctcttacctttttgcttctcatatatgaaaggcggccctcatgcgcatcagggtaagtgcaaaatagatatgtggtgatggcatgctttaaaaaggagtcgccaagcatttcaagccgctccaggttaaatccatcactagcgtttgacagagtcaaagcctgaagaataagtccaggattggggccaagagtccttgaggagtacccaatagaagggctctgctcagaatccatcctgcccttgagcacttgaatagtgtctgtcgtaccaggcattacggccatcacaggacttccatctgaggtagatttgttagcatttccatcaaggtatttattactcaggagagtacattcatcgctgggctgggg

SEQ ID NO: 6912 - DNA, 532 bp, Homo sapiens
  MAP TO AC012478.1; EXPRESSED IN ADULT LIVER, SIGNAL = 4.5; EXPRESSED IN PLACENTA, SIGNAL = 5.3; EXPRESSED IN BRAIN, SIGNAL = 5.4; EXPRESSED IN BONE MARROW, SIGNAL = 5.9; EXPRESSED IN LUNG, SIGNAL = 3.3; EXPRESSED IN HEART, SIGNAL = 7.3; SWISSPROT HIT: P17317, EVALUE 4.00e-03; EST_HUMAN HIT: BE410416.1, EVALUE 6.00e-54; NT HIT: gi14753295, EVALUE 2.00e-56
tgtctgtggatgcggcccacaggaaactgtagcccagctctctgtgagcgagatactgccttagccttggccttcccactgtcctttccagctttgcctccggccatgttctcggcgccgactccgcctccgcctccgccccgccgcgcgccctcccgctgccgacccgcgccgccgccgccgctctccttcacctcactttaaaagaaaagacagaagccattaaaaaatgagaaagctgagacttaaggagagatttgagaagttttcccatggtccctcagggttgtctgactttaaatacacccttttaaccaccgcccttggctgccccggccgcctcacgaacgtaagcagagctctctctgggttgaaggaagctagagaatttacattccctgtatttcccaagttttatatactgagcaaaaaaatatgttcctataaactcttgaacattacaccacatgactgcgaaaaaaatgattgtcttgtaaatactggacaagaggcaccgaagtgttgtccctga

SEQ ID NO: 6913 - DNA, 530 bp, Homo sapiens
  MAP TO AC008701.5; EXPRESSED IN ADULT LIVER, SIGNAL = 2.5; EXPRESSED IN BRAIN, SIGNAL =   2; EXPRESSED IN HELA, SIGNAL = 0.86; EXPRESSED IN BONE MARROW, SIGNAL = 2.2; EXPRESSED IN LUNG, SIGNAL = 2.5; SWISSPROT HIT: P06399, EVALUE 8.60e-02; EST_HUMAN HIT: AU134159.1, EVALUE 6.00e-26
ccgtggtgacccgggttgagatttaatctagggccagaggggggcaagacaattgtgctgttggctactagagagaagagctggaaatcactaagccttcccgggctgacacacccacccagaccggatggcccaggagtgcggcgaggaggcaggggcaaaggacgcggctccaggcaggggaacccgggcatcccttccgcgcttgcacgaagatgctgcaagtggcgacacgcgcgaatccagggtctgggctaggaagtcgcgctacgctcagtggaggatgaccctttcctcctccttgtcccccagccccgtgcaaagtgagctggagaaagttgtgcccgggccatggcggccagggctggagaaaggaacgaaggcaaggagggaagtgacccggggcccccttaccttgtccttggggccgaggttctgcaacacctctttgccggtggcgctccggatctctaccccggcgggggcgggggaggcgggcgcgggctccctgctctcttcccggccttggc

SEQ ID NO: 6914 - DNA, 502 bp, Homo sapiens
  MAP TO AC002401.1; EXPRESSED IN LUNG, SIGNAL =   2; EXPRESSED IN FETAL LIVER, SIGNAL = 1.9; EXPRESSED IN ADULT LIVER, SIGNAL = 1.6; EXPRESSED IN HELA, SIGNAL =   2; EXPRESSED IN PLACENTA, SIGNAL = 1.6; EXPRESSED IN HEART, SIGNAL = 2.8; SWISSPROT HIT: O35274, EVALUE 1.00e-28; NT HIT: gi14773216, EVALUE 0.00e+00; EST_HUMAN HIT: BF877211.1, EVALUE 6.00e-97
accgtggcaactgcagccagccccgcgcccgaggagccaaaggcccaagcggccccggagaaggaggcggcggcggtagcgccgccagagaggggggtgggcaatggccgggccccggacgtggcccctgaggaggtagatgaatccaagaaggaggacttctcggaggcggacttggtggacgtgagcgcctacagtgggctcggggaggactctgcgggcagtgccctggaggaggacgacgaagacgacgaggaggatggggagcccccctacgagcccgagtcggggtgcgtggagatcccggggctgtcggaggaggaggacccagccccgagccggaagatccatttcagcacggcgcccatccaagtaagtgagcccccccgccctgcccccgcgccgcccctgccacgtgcacgcggccgcccccgctcgccagccagccagccgggtttggcaggctgagtcagcccctgccacccagcccccttcccagaag

SEQ ID NO: 6915 - DNA, 516 bp, Homo sapiens
  MAP TO AC011802.4; EXPRESSED IN HEART, SIGNAL = 1.7; EXPRESSED IN ADULT LIVER, SIGNAL = 1.7; EXPRESSED IN PLACENTA, SIGNAL = 2.3; EXPRESSED IN BONE MARROW, SIGNAL = 2.5; EXPRESSED IN FETAL LIVER, SIGNAL = 1.3; EXPRESSED IN LUNG, SIGNAL = 2.2; EXPRESSED IN HELA, SIGNAL =   2; EXPRESSED IN BRAIN, SIGNAL = 0.95; SWISSPROT HIT: P16383, EVALUE 1.30e-02; NT HIT: gi4758689, EVALUE 0.00e+00; EST_HUMAN HIT: BE301317.1, EVALUE 0.00e+00
tgcgatgagtccaatgcctctccctgttggtcactcttttcttcatcgggctctttcatatctaagggttcattttgagtgtctactgtacttggacctgtcgcttcctgacagttgccctcagttcctgctggagaaccaggaacttctgtcttgattggtttctcgtcccttaatcctgtttcttcaccctcttcttcgttgtgatccctacctacttctgtactgtgcgctggaacctccttgggctcagctgcttcctggttggtgaattctttctctaaactatgccctgtgcttgtctctaactcttgggggacctctaccatacatttgtcatcatgataaactgtgtcatcactatgccctaaaggacacgaggccactgtgcctgcctgctcttcaacctgagtcactgctgcctctcccacattctctgtgtggttcccaccatctaagtcactccaacagttggatggctcaaggggagttctggtcctgtcatctggtgcaccc

SEQ ID NO: 6916 - DNA, 508 bp, Homo sapiens
  MAP TO AL050348.19; EXPRESSED IN HEART, SIGNAL =   5; EXPRESSED IN BONE MARROW, SIGNAL = 4.3; EXPRESSED IN LUNG, SIGNAL = 4.7; EXPRESSED IN ADULT LIVER, SIGNAL = 4.9; EXPRESSED IN BRAIN, SIGNAL = 3.9; EXPRESSED IN HELA, SIGNAL = 0.52; NT HIT: gi15553098, EVALUE 0.00e+00; EST_HUMAN HIT: AL521241.1, EVALUE 0.00e+00; SWISSPROT HIT: O84883, EVALUE 2.10e+00
gaggccttgccagcttgggggcccaccaacaagggaacattgccccaacctgtgccacagccccccggctgtttataggctggagaggctgtgtcagacttccctgtactacacaagggcaaccccagccaaagctcaccctgagcctagctcaacagaagtttccttgatctgcttcacattctcttttggaacttctaggggctcccagcaccctctgcagcctcccagctattctgttctcatcaggtccttcccctgccttctggggcaacccctctcctcacagtggccttaaatctaggcaagggttagtccagcacctccttgatgagcaattctttgagactggggggtggtgtgggggtaaggcctgcctcctgcagggcttggagccgagcctctgattgacgtttgtccaggcccaggcgccaggagagccggacatgggcctccagaaagggtgccagcaaagggtggaggctcttgtccccaagcagctgcaggg

SEQ ID NO: 6917 - DNA, 525 bp, Homo sapiens
  MAP TO AC004126.1; EXPRESSED IN ADULT LIVER, SIGNAL = 1.5; EXPRESSED IN BRAIN, SIGNAL = 1.2; EXPRESSED IN HELA, SIGNAL = 1.4; EXPRESSED IN BONE MARROW, SIGNAL = 1.2; EXPRESSED IN LUNG, SIGNAL =   1; EXPRESSED IN FETAL LIVER, SIGNAL = 1.4; SWISSPROT HIT: Q9Z2J6, EVALUE 8.00e-09; NT HIT: AF144308.1, EVALUE 0.00e+00; EST_HUMAN HIT: AW026991.1, EVALUE 0.00e+00
tcacctgccccgacatgctgcgcaagctgcggcgctcgctgcgcacggtgctggagagcgtgctggtggacgacagcgagctgggtggcgcgggaagcagccgccgccgccgcacctcctccaccgcccgctcggcctcccctttagctctctgcagccgcccggaggaaccgcggggccccgcgcgtctcctcggctggctgctgggcagctgcgcagcgtccccgcagacgggccccctgaaccgggcgctgagcagcacctcgagttagaacccggcccacgtagggcggcactcacacgcgaaagtatcaccagggtgccgcggttcaattcgatatccggactcctgccgcagtgatcaaagtccgaggggcgggacccaggcacctgcattttaaagcgccccgggagactctgaatctttttcagaaacagtgagttaaagcagtgcttctcaaaccttgatgtgcctgtgaatcacctaggggtcttgttaagtgcagtctgatccaggaggccggg

SEQ ID NO: 6918 - DNA, 508 bp, Homo sapiens
  MAP TO AL138691.2; EXPRESSED IN ADULT LIVER, SIGNAL = 3.2; EXPRESSED IN HELA, SIGNAL =   1; SWISSPROT HIT: Q04893, EVALUE 6.00e-06; EST_HUMAN HIT: AL603231.1, EVALUE 5.00e-05; NT HIT: Y10196.1, EVALUE 1.20e-01
tgggcgcttccttgaccaccgcagcattactcccagtgggcacttccgtgacccttgcagcattactcccagtgggcacttccgtgaccaccgcagcattactcccagtgggcgcttccgtgaccaccgcagcgttactcccagtaggcgcttccgtgaccaccgcagcattgctcccagtgggcacttctgtgaccaccgcagcgttactcacagtaggcaggataccgaaatagcgtaagtgtctgtcaacactgagggtgccagggataagaaaccctggtctatatacacaatggaacagtatttagctttagaaaaggaggttgtgccatttgccacaacctgaatagacctgggggacatgatgctcagcaaagtaagccagagacagaaaagtaatgcgtgatctcacttatatgtggaacccttaaaaaattacagttcaaatattcagagatagagaatacaacagtggtttccaatgccagggcggacggggagaagt

SEQ ID NO: 6919 - DNA, 503 bp, Homo sapiens
  MAP TO AP000885.1; EXPRESSED IN BRAIN, SIGNAL = 1.1; EXPRESSED IN ADULT LIVER, SIGNAL = 1.4; EXPRESSED IN HELA, SIGNAL = 2.6; EXPRESSED IN BONE MARROW, SIGNAL = 1.1; EXPRESSED IN LUNG, SIGNAL = 1.2; EXPRESSED IN FETAL LIVER, SIGNAL = 1.3; SWISSPROT HIT: P08131, EVALUE 3.60e-02; NT HIT: AL163252.2, EVALUE 0.00e+00; EST_HUMAN HIT: H55746.1, EVALUE 0.00e+00
ggcaaggcctgggcacgtagtaagcagtggaagaaccgcaagaggtttcaagattgccggtctcacagtggaccggctggcagctggttggttcaccgcaggtctcttggcagttgtctgtgacccaggtatggtcttgagagctagtgggtaagtagaggacatctccacagctcacgctggtagggcagaggtcgatggaggtgagaggaatatggcgggaggttctgagagatcctgagttggagtttcccgagcagtagttggggcaagacatagtgaggttgtgagagcaggctgaagttgaggcaaagaagtgagtgtctgaagtttgttctgcccttccttagcttgaccctttatttatccctagaaggtggtgcttctgcgtgcagactcttcctcttgttgtatgaagatgcatcagaactctttattatagccaaggaagtgaggcttccaccctccataaaactggatgctccttgcaatgccatccattg

SEQ ID NO: 6920 - DNA, 503 bp, Homo sapiens
  MAP TO AC002550.1; EXPRESSED IN ADULT LIVER, SIGNAL =   2; EXPRESSED IN BRAIN, SIGNAL = 1.9; EXPRESSED IN HEART, SIGNAL = 2.6; EXPRESSED IN BONE MARROW, SIGNAL = 1.5; EXPRESSED IN LUNG, SIGNAL = 1.3; EXPRESSED IN HELA, SIGNAL = 1.3; SWISSPROT HIT: P27864, EVALUE 8.10e-02; NT HIT: gi12963566, EVALUE 1.00e-10; EST_HUMAN HIT: BF002510.1, EVALUE 0.00e+00
ccccacagccttctcggtccaggacccttggttctgtgaggccagggaggccagggatgttggggacacttgctcagtggggaagaaggatgaggaacaggcagccttggggcagaaacggaagcggaagagccccagagaacacaatgggaaggtgaagaagaaaaaaaaaatccaccaggagggagatgccctcccaggccactccaagccctccaggtccatggagagcagccctaggaaaggaagtaaaaagaagccagtcaaagttgaggctccggaatacatccccataagtgatgaccctaaggcctccgcaaagaaaaagatgaagtccaaaaagaaggtagagcagccagtcatcgaggagccagctctgaaaaggaagaaaaagaagaagaggaaagagagtggggtagcaggagacccttggaaggaggtagtttttccttcagaaatggactttgccgtgggagaattaagggtggggtttgggaggggtg

SEQ ID NO: 6921 - DNA, 584 bp, Homo sapiens
  MAP TO AC010328.4; EXPRESSED IN PLACENTA, SIGNAL = 3.6; EXPRESSED IN ADULT LIVER, SIGNAL =   3; EXPRESSED IN BRAIN, SIGNAL = 3.1; EXPRESSED IN HELA, SIGNAL = 2.7; EXPRESSED IN FETAL LIVER, SIGNAL = 3.9; EXPRESSED IN LUNG, SIGNAL =   3; EXPRESSED IN HEART, SIGNAL = 3.3; SWISSPROT HIT: P51522, EVALUE 2.00e-57; NT HIT: gi14754683, EVALUE 0.00e+00; EST_HUMAN HIT: BF890741.1, EVALUE 0.00e+00
tccggagtgattcatgccttgcaaaccatacgagagttcatactggagagaaaccttacaagtgtaataaatgtgcgaaggtttttaatcaaaaaggaatccttgcacaacatcagagagttcatactggagagaaaccttacaagtgtaatgaatgtggcaaggtttttaatcaaaaagcaagccttgcaaaacatcagagagttcatactgcagagaaaccttacaagtgtaatgagtgtggcaaagcctttactggacagtcaacacttattcaccatcaagcaatccatgggtgtagggaaactttacaaatgtaatgattgtcacaaagtcttcagtaatgctacaaccattgcaaatcattacagaatccatattgaagagagatctacaagtgtaataaatgtggcaaatttttcagacgtcattcataacttgtagttcatcagtgaactcatactggagagaaaccttacaaatatcatgactgtgacaaggtcttcagtcaagcttcatcctatgcaaaacatagaattcatacaggagagaaacctcacaagtgtgatgattgtggcaaagcc

SEQ ID NO: 6922 - DNA, 500 bp, Homo sapiens
  MAP TO AL031055.1; EXPRESSED IN HELA, SIGNAL = 0.64; EXPRESSED IN ADULT LIVER, SIGNAL = 2.2; EXPRESSED IN LUNG, SIGNAL = 1.5; EXPRESSED IN HEART, SIGNAL = 1.7; EXPRESSED IN FETAL LIVER, SIGNAL = 1.7; EXPRESSED IN BRAIN, SIGNAL = 2.5; SWISSPROT HIT: Q11116, EVALUE 2.00e-04; NT HIT: AF248053.1, EVALUE 1.00e-53; EST_HUMAN HIT: AL449471.1, EVALUE 2.00e-50
tggatggatggatggatggatggatggttggagtggatggatagatggatagatggatcagtgaatggttgaatgggtggttgaacagatggagtagatggatggaggatgaatggatggatggttgaattgatggagtggatggatggacagatggaaggatggatggatggatggatggatggatggatggatggatggttgaattgatggagtggatggatggacggatggatggatggatggatggatggatggtttgaatggatggttgaatagatggagtagatggatggataaatgaaggtgttgacagatggagggaaggttgaatggatggatggtatgacaaggaaccattctaactctgtccctctcacttttgttttttaggccactccccacctgtcctgcctttgtgtgcctctgtgtctttgctgggtggcctgacctttggttatgaactggcagtcatatcaggtgccctgctgccactgcag

SEQ ID NO: 6923 - DNA, 509 bp, Homo sapiens
  MAP TO D86994.1; EXPRESSED IN BONE MARROW, SIGNAL =  13; EXPRESSED IN LUNG, SIGNAL = 3.2; EXPRESSED IN HEART, SIGNAL = 1.6; EXPRESSED IN HELA, SIGNAL = 1.5; EXPRESSED IN ADULT LIVER, SIGNAL = 1.5; EXPRESSED IN PLACENTA, SIGNAL = 1.5; EXPRESSED IN BRAIN, SIGNAL = 1.1; SWISSPROT HIT: P01717, EVALUE 5.00e-12; NT HIT: gi14777673, EVALUE 2.00e-59; EST_HUMAN HIT: AW405991.1, EVALUE 2.00e-59
tcctgttgcctgtgctgccctcacagctggtttgagtgacatctctccaggaggaatcgcagaggatgtaaatttgcataaacgccaaacactgactgcccccaaaagctggagagggaataagagaggcctggggagcccagctgtgctgtaggctcaggaggcagagctctgaatgtctcaccatggcctggatccctctcctgctccccctcctcattctctgcacaggtgctgcccctaggctcagtctccacagaccccaagttgagcctgacctgaatcctgagcaaagccctgccactgcctctgggggggattcctggcaatgcgtcctttgtcctcaagccccctctcctgtcttttcttgcagtctctgtggcctcctatgagctgacacagccatcctcagtgtcagtgtctccgggacagacagccaggatcacctgctcaggagatgtactggcaaaaaaatatgctcggtggttccagcagaagccaggccaggc

SEQ ID NO: 6924 - DNA, 571 bp, Homo sapiens
  MAP TO AC025588.1; EXPRESSED IN ADULT LIVER, SIGNAL = 1.7; EXPRESSED IN PLACENTA, SIGNAL =   2; EXPRESSED IN HELA, SIGNAL = 0.94; EXPRESSED IN BONE MARROW, SIGNAL = 1.7; EXPRESSED IN LUNG, SIGNAL = 1.7; EXPRESSED IN FETAL LIVER, SIGNAL = 1.9; SWISSPROT HIT: O88553, EVALUE 9.50e-02; NT HIT: AF365931.1, EVALUE 0.00e+00; EST_HUMAN HIT: AA815227.1, EVALUE 3.20e+00
ggcatgcctcctcaggtgactttgaaggcgtgactttgaactgaataactttctacaggcattacatttcagttgttgtcctacaaatttggatggattattgccaactaattttctgtatccattatcatcgtgagaattattttgtacatagtgttgcaaggaagatacatcatctatgcccagtggaagtattttcttagatccgtcacattctacacctttctgcgtagtcagcgtttccttattgattgatgggacttctcttgcgagactctctttcacatcctttggcttccaaatctgccctccaatgtccccatttttttctaaaatggaatacaaaaaaatgtcctgtgtaaaacgttccactcacatgcttgaaataaaatgccataaacaatctattgtggtgattattctggcttcaaacctaatgtctacgagaaaccaaagttaatataagctctgttagagttctatgtgagctaatgttacatgaagctatcacatatctgtctgtaaaggactgagcaacgtagacctagtgcacagggagcaggtgagagcc

SEQ ID NO: 6925 - DNA, 527 bp, Homo sapiens
  MAP TO AC019162.3; EXPRESSED IN ADULT LIVER, SIGNAL = 2.1; EXPRESSED IN PLACENTA, SIGNAL = 2.3; EXPRESSED IN HELA, SIGNAL =   4; EXPRESSED IN BONE MARROW, SIGNAL = 5.5; SWISSPROT HIT: P32375, EVALUE 1.70e+00; NT HIT: gi16172300, EVALUE 0.00e+00; EST_HUMAN HIT: BI760239.1, EVALUE 0.00e+00
ctgccacaccaccacaggggacagctgctatctggggtcagcagaccagctcacacactacgcaaggtttctatagatctaagacataaaattcttcatcacaaaacaagtcccactcattttcagagtctgtcagtttgtcgtccccacctgcagcctaaagcataagcaacatctcacccagctcaaaggtgacagcctcttcttcatcgtcaaaggggttgctgttcgctccttcctcaaagaattcccagaagtggttcctttgttggcctgggtttctgcttgatgttcccacttgctgtctctgtggctcctctctacggccatcagggtacatatgcttgtaaaaacagttctctccaaatgggcagctcccacgtccttcatcaaaatacttgcatgccttgttgctcattgcctccttgtatttctgaatgagtttctgcttctcttctttctcctccacccagtactcacttggaatgacaaagttagatgtgattcggcattgtgggcaggacttg

SEQ ID NO: 6926 - DNA, 505 bp, Homo sapiens
  MAP TO M63544.1; EXPRESSED IN BONE MARROW, SIGNAL = 0.97; EXPRESSED IN LUNG, SIGNAL =   1; EXPRESSED IN HELA, SIGNAL = 0.81; EXPRESSED IN ADULT LIVER, SIGNAL = 1.3; EXPRESSED IN BRAIN, SIGNAL =   1; SWISSPROT HIT: P80146, EVALUE 7.00e-01; NT HIT: gi14729294, EVALUE 5.00e-78; EST_HUMAN HIT: AL536645.1, EVALUE 0.00e+00
gagtgcacgtggcccagcagcaggacgtgcacctgactgtgacggagtctcggcagcatgagctctcgccagactcgaacttgcccgtgcagctcctcaccatccgtgtggccagcaccaaccctgctgtgcaggcctttgacatctggtaagagtgtggtgcctgtggggctgcggagggcacatggcaggccagagccaggctctggcgccacgacccctgggaggtgctgggtgtagctggtgtggactccaacactcctgggcttgtgtgacaccaggcaaggtgtccacaagacaccagtcactgagccctcccgcatagccctccctcgggtccccctgcactcttggcctccccttccactccctggagccacctcccccagattcgtggggagcactcaggacagtgcagccctcaggctggacagctgccttgctcctaggtccgccccgtgcccaggctgggctgtctggcactgggtccgtgggctctggcctt

SEQ ID NO: 6927 - DNA, 598 bp, Homo sapiens
  MAP TO AL049557.19; EXPRESSED IN ADULT LIVER, SIGNAL = 3.6; EXPRESSED IN PLACENTA, SIGNAL = 4.9; SWISSPROT HIT: Q9UHI6, EVALUE 4.00e-99; NT HIT: gi15299376, EVALUE 0.00e+00; EST_HUMAN HIT: BG680801.1, EVALUE 0.00e+00
gggctgtgacaggcaatccgaagagcaaatgaagaattctgttcagactcccgttgaaaactccaccaacagtcagcaccaggtcaaagaagctttacctgtgtcactcccccagattccttgtctgtcttcctttaaaatccatcagccatacacgttgacttttgctgaattggtagaggattatgaacattatattaaagaggggttagagaaacctgtggaaatcatcaggcactacacaggccctggggatcagactgtgaatcctcaaaatggttttgtgagaaataaagttattgaacagagagtccctgtgttggcaagtagtagccaatctggagactctgagagtgacagtgattcttacagctcaagaacctcttcccagagcaaaggaaataagtcatacttggaaggctcttctgataatcagctgaaagactctgaatctacgcctgtggatgatcgtatttctttggaacaaccaccaaatggaagtgacacccccaatccagagaaatatcaagaatcacctggaatccagatgaagacaagacttaaagagggggctagccagagagctaagcagagccgg

SEQ ID NO: 6928 - DNA, 510 bp, Homo sapiens
  MAP TO AL163303.2; EXPRESSED IN ADULT LIVER, SIGNAL = 1.4; EXPRESSED IN BRAIN, SIGNAL = 1.6; EXPRESSED IN HELA, SIGNAL = 1.7; EXPRESSED IN BONE MARROW, SIGNAL = 1.9; EXPRESSED IN LUNG, SIGNAL = 1.6; EXPRESSED IN HEART, SIGNAL = 1.5; EXPRESSED IN FETAL LIVER, SIGNAL = 1.6; SWISSPROT HIT: Q00130, EVALUE 4.80e-02; NT HIT: AL163303.2, EVALUE 0.00e+00; EST_HUMAN HIT: Z47311.1, EVALUE 7.00e-32
acggtggtgtcagcatcgccgtgtcagtccattgacgtagcgcacacggtggtgtcagcatcgccgtgtcagtccattgacgtagcgcacacggtggtgtcagcatcgccgtgtcagtccattgacgtagcgcacacggtggtgtcagcatcgccgtgtcagtccactgacgtagcgccacatggtggtgtcagcatcgccgtgtcagtccactgacgtagcgcacacggtgttgtgtcagcatcgccgtgtcagtccactgacgtagcgcacacggtgttgtgtcagcatcgccgtgtcagtccactgacgtagcgcacacggtgttgtgtcagcatcgccgtgtcagtccactgacgtagcgcacacggtgttgtgtcagcatcgccgtgtcagtccactgacgtagcgcacacggtgttgtgtcagcatcgccgtgtcagtccattgacgtagcgcacacggtgttgtcagcatcgctgtgtcagtccattgacgtagcgcacacgg

SEQ ID NO: 6929 - DNA, 502 bp, Homo sapiens
  MAP TO AC015897.3; EXPRESSED IN ADULT LIVER, SIGNAL = 1.2; EXPRESSED IN BRAIN, SIGNAL = 1.1; EXPRESSED IN HELA, SIGNAL = 1.4; EXPRESSED IN BONE MARROW, SIGNAL =   1; NT HIT: AJ271735.1, EVALUE 1.00e-57; EST_HUMAN HIT: BF961819.1, EVALUE 9.00e-56
tgatggtctgccactgtctcgcattatctccaaatctgaccgtccagatgcaggaaaacaagctcagggctcccactgattctatattattgtcagttgtataattacttcattatatattacaatgtaataataatggaaataacgtgcacaataaatgtaatgcacttgaatcatcccaaaaccatccccactcaaccccagtccatggaaaagttgtcttccatgaaaccactccctggtataaaaaagattggggaccactgagtagactatatgggaaaaggatatcaggtctatattaaactatgttttaaaatttttagtattattaattgctaacataatttttacaattaaaccaattgctttacagaacaacaacaatgtcatcacttttattttttgtagatatgaaaactgcttcatcaacctcatccagaagtcacccttattctagtgacagtgaggatgaatctgcagtgggggacagggaagccca

SEQ ID NO: 6930 - DNA, 531 bp, Homo sapiens
  MAP TO AC009336.2; EXPRESSED IN LUNG, SIGNAL =   2; EXPRESSED IN BONE MARROW, SIGNAL =   2; EXPRESSED IN FETAL LIVER, SIGNAL = 2.4; EXPRESSED IN ADULT LIVER, SIGNAL = 2.1; EXPRESSED IN BRAIN, SIGNAL = 1.9; EXPRESSED IN HELA, SIGNAL = 1.9; SWISSPROT HIT: Q03828, EVALUE 3.00e-18; EST_HUMAN HIT: BG489979.1, EVALUE 4.80e-02; NT HIT: S34322.1, EVALUE 1.00e-41
gaggctcggacttcggctgcagcgcggcggcgccgcgttccgagagcggcttcctgccctactcggccgcggtgcttagtaagacggccgtgagcccgccggaccagagggacgaggctccgctcaccagataactacgtcgccaccgccagggggccgcgcccgcctctctgagtgtgcccgggagtcccctgtgcgccccctgagccctccgcgcgttgcccgctgctgccgctgccgccagggggcgccccggggcgcgggaggccgaagggaacctgctccgaattgggggagaaggagcaggcgcaaaagcctggcgggcatccccctaaattatttctatttttgtatttgccacccagccgtctgcccttctctctcttttctggctcccgggacccactttccacctctgtcctgagcgcttggtttcccaaagaccaacccctcgccccctaagctagtcctggctgtgcactctcaggtccgggttgcttggctgaacggcgtggcccgaagcaacggaga

SEQ ID NO: 6931 - DNA, 569 bp, Homo sapiens
  MAP TO AF205588.1; EXPRESSED IN BRAIN, SIGNAL = 2.2; EXPRESSED IN HELA, SIGNAL = 2.6; EXPRESSED IN ADULT LIVER, SIGNAL = 1.9; EXPRESSED IN HEART, SIGNAL = 1.9; EXPRESSED IN FETAL LIVER, SIGNAL = 2.5; EXPRESSED IN LUNG, SIGNAL = 2.3; SWISSPROT HIT: Q06730, EVALUE 4.00e-44; NT HIT: AJ245588.1, EVALUE 0.00e+00; EST_HUMAN HIT: AW610214.1, EVALUE 4.00e-21
tcaggggaagctttgtgcgagaagtcagtacttaatgtaactcagagaacacacagaggagaggaagtctgtggatgtgagccatgtgtaaaaccattctatgaaaagtcaaagctaaccaaacatcaaagaatccatacaggggagaaaccctatgaatgtaataaatgtgaaaaatgcttttctaggaaatctctcctcactctacatcagagagtccacacaggagagaaaccctatgtaaggaatgtgggaaatgcttttctaggaattcacacctcataatacatcagagaactcacacaggagagcaaccctgtgaatgcaaggaatgtagaaaaagcttctatcataagtcatatcttacagtacatcagagaattcacacaggggagaaaccctatgaatgtaatcaatgtggaaaaaccttcataagcaactctgttctcacaatacatcgtaaaacatatacaggtgagaaaccctatgaatgtaatgaatgtgggaaatctttctctaggagttcatatcttacaatacatcagagaactcacccaggcgagaaaccc

SEQ ID NO: 6932 - DNA, 512 bp, Homo sapiens
  MAP TO AP000053.1; EXPRESSED IN ADULT LIVER, SIGNAL = 2.1; EXPRESSED IN PLACENTA, SIGNAL = 1.9; EXPRESSED IN BRAIN, SIGNAL = 2.3; EXPRESSED IN HELA, SIGNAL = 5.2; EXPRESSED IN BONE MARROW, SIGNAL = 2.4; EXPRESSED IN LUNG, SIGNAL = 2.4; NT HIT: gi14729215, EVALUE 4.90e-01; EST_HUMAN HIT: AW750272.1, EVALUE 0.00e+00; SWISSPROT HIT: P74192, EVALUE 1.60e+00
cccagttctcgcagcaccccatgtgaggtcgctgttgaagtatctttggctgcagtggtgtggaattcatctcaacagagttgacggtaaagaccagacatgtagcagcctcactgcttgttggaggaaccacccttaagaaaatttcccaagatagtagttttcccatctccgtactttgctagttaatgttctccacttgcttgcgtttatcctttcaattcctttgctaattaaattgctgaaaagtatacattggtaagaatagccactgtcaatggactgcaaacaaaactcgtttctgttattgatgataaaccatttcagagaagaccaggctgagtctaaagggttcagataattacaaggggaaggcagagagagtagttcatggccacaggacttggccacctctgggcaacacataatgcttgctaagctaatgactgtagggatatagaactggccctcagcctctctgtcttcctttggcctctgctcttcctgctgcc

SEQ ID NO: 6933 - DNA, 513 bp, Homo sapiens
  MAP TO AP000512.1; EXPRESSED IN BONE MARROW, SIGNAL = 3.8; EXPRESSED IN LUNG, SIGNAL = 2.8; EXPRESSED IN ADULT LIVER, SIGNAL = 1.7; EXPRESSED IN PLACENTA, SIGNAL =   2; EXPRESSED IN BRAIN, SIGNAL = 2.1; EXPRESSED IN HELA, SIGNAL =   2; SWISSPROT HIT: P10667, EVALUE 6.00e-05; NT HIT: gi15304463, EVALUE 0.00e+00; EST_HUMAN HIT: BF984680.1, EVALUE 0.00e+00
aacagttgtgcccgcagcccctgagctccagcctcccacctccacagaccaacctgtcacccctgagcccacatctcgggccactaggggcaggacaaataggtcctctgtcaagacccctgaatcaattgtccctatagcccctgagcttcagccttccacctccagaaaccagcttgtcacccctgagcccacatctcgggccactaggtgcaggacaaataggtcctctgtcaagacccctgagccagttgtccccacagcccctgagccccatcctaccacctccacagaccagcctgtcacccccaagctcacatctagggccactaggagaaagacaaataggtcctctgtcaagactcccaaaccagttgaaccagcagcctctgatcttgagccttttacccccacagaccagtccgtcacccctgaggccatagctcagggtggtcagagcaaaacactgaggtcttccacagtaagagctatgccggttcctaccacccctga

SEQ ID NO: 6934 - DNA, 525 bp, Homo sapiens
  MAP TO AL078594.14; EXPRESSED IN BRAIN, SIGNAL = 1.3; EXPRESSED IN HELA, SIGNAL = 0.87; EXPRESSED IN ADULT LIVER, SIGNAL = 1.6; EXPRESSED IN PLACENTA, SIGNAL = 1.8; EXPRESSED IN LUNG, SIGNAL = 1.4; EXPRESSED IN HEART, SIGNAL = 2.2; EXPRESSED IN BONE MARROW, SIGNAL = 1.6; EXPRESSED IN FETAL LIVER, SIGNAL = 1.6; NT HIT: gi14759019, EVALUE 1.00e-116; EST_HUMAN HIT: BE795886.1, EVALUE 1.00e-116; SWISSPROT HIT: Q9Y5J3, EVALUE 3.00e-20
tggaagtgtttgaaacgcggatgttcttaatttttttccccactgtgatatttagctgcaagaacaactgtagcatattgcattgccagagttgtcacacatgtgagtggcaaagtatactttcttaacttctgcaaaaaattaaaaccataaatagctggcaatatttccagaaaggattatcgttccacttcagtcttctgaaggacagagtggaacatcagtgggtggttattgttgactataccattttctcacccctacctcccgcccatctctctcctgttccctactttgctcaaacccacttttaggctactttgacgcacacgctcttgccatggacttcatgagcataggattccgagagtgcctaacagaagttgcgcggtacctgagctccgtggaaggcctggactcctcggatccgctgcgggtgcggcttgtgtctcatctcagcacttgcgccacccagcgggaggcggcggccatgacatcctccatggcccaccaccatcatccgct

SEQ ID NO: 6935 - DNA, 501 bp, Homo sapiens
  MAP TO AC008895.4; EXPRESSED IN BONE MARROW, SIGNAL = 5.9; EXPRESSED IN FETAL LIVER, SIGNAL = 5.8; EXPRESSED IN ADULT LIVER, SIGNAL = 5.7; EXPRESSED IN PLACENTA, SIGNAL = 6.2; EXPRESSED IN HELA, SIGNAL = 3.7; EXPRESSED IN LUNG, SIGNAL = 5.7; EXPRESSED IN HEART, SIGNAL = 6.5; NT HIT: gi14758744, EVALUE 2.00e-68; EST_HUMAN HIT: AW250269.1, EVALUE 3.00e-68
ggggcccatccggaagaaagaggaggatcaggcatcccagggttataaaggggacaatgctgtcattccatacgaaacagacgaagacccgcggaggaggaatattcttcgcagcctaaggaggaacactaaggtaagacaccagtctaggattagtcatagtgttttgtacagcgtctcggtgagggttgattgatgatgatttttcaaggacaacctattctggtaaaaaaaaaactgccctgtgtgtgtatttgacttaacataaaaaagcagtgcctcaattagctaccattattggcagctctcaagtagttaggactttggatagatagtctgagttgttgttgcctaaaacaatagttaattaattagcaaaatgaggagataatgcagaacttgtcagtgtcttgacaagtggccaagcgcagtgacaatacacttgctctcccttcactgaaacaccagaactcaaaactgcttgccgcagtctctcactgc

SEQ ID NO: 6936 - DNA, 567 bp, Homo sapiens
  MAP TO AC022027.2; EXPRESSED IN PLACENTA, SIGNAL = 2.1; EXPRESSED IN ADULT LIVER, SIGNAL = 1.9; EXPRESSED IN HELA, SIGNAL =   3; EXPRESSED IN BONE MARROW, SIGNAL = 2.2; EXPRESSED IN LUNG, SIGNAL =   2; EXPRESSED IN HEART, SIGNAL =   2; EXPRESSED IN FETAL LIVER, SIGNAL = 1.9; SWISSPROT HIT: O15375, EVALUE 3.00e-04; NT HIT: gi13242704, EVALUE 1.40e-01; EST_HUMAN HIT: AA301375.1, EVALUE 1.00e-116
tgaaggtggaaaccctccgatgtcaaagagtaagatagcaatgaaaagggctgaaaatactttgtttttaaaaagagccacagtttcaccacagtagtttttatataactgccacttcctcttggcaagctgtttgcaaaaatatgtctgttctgcaactttctttttgtacgtttcaggctcttttgtgtgtgtcactgtggggtttttatgaagtaggctgtcttgtttccagtcaccattggctaacgtgatcctgcatttttcctcactactgtagctcttgtcaagaatgtttatgttttcttccagattctttcctttttcattgtaaatggagtatttatctggtagatcttctggagctatttttttaggcaaaggacaatcagaagattggaggggtctcatcagactgccacaggctaatatatttaaagctaaagcacccacaatcagcaagcatccatccagtccatagaactcaaccagcatcctctgcagagcagcatatatgaaaaggccaacgcttgaacctaaaaagggaatgggaactgttcaacctcg

SEQ ID NO: 6937 - DNA, 500 bp, Homo sapiens
  MAP TO AC005366.1; EXPRESSED IN ADULT LIVER, SIGNAL = 1.5; EXPRESSED IN HELA, SIGNAL = 1.5; EXPRESSED IN LUNG, SIGNAL = 1.5; EXPRESSED IN HEART, SIGNAL = 1.6; EXPRESSED IN FETAL LIVER, SIGNAL = 1.2; SWISSPROT HIT: gi13124222, EVALUE 3.50e+00; NT HIT: AF052684.1, EVALUE 0.00e+00
taggaggctggctgcaggggtggatctgtgactgcctcctcccgggacccccgacacccgcggaaatcgcccgaaattcaccggaagctcgaaggaggccccggccttttttgagtgtaggggtgggggtcggtcccacctcccctcgcccacagtcgccaccacccccggtgctcggagccccatcccttaatcggccactctggtttcgcgcaaacggtccaatgatcccgagaatcgggtggagcgcagccagcgaccaagccggccggagaggagtggatgcaagttcaatcccttatgaggacgggcggcttctccagtgccgcccccaggggtcgcccggggcggcgccgagcccctcacctggctccgctcccgcagcgtattagagcgggaccggatggcgtcaggctccagcgccagagctgtgggctgctgaacgctgaggggtcttagaaaagtgaagtcactgccgtccgaggccggtgaaaagcacg

SEQ ID NO: 6938 - DNA, 564 bp, Homo sapiens
  MAP TO AF036405.1; EXPRESSED IN ADULT LIVER, SIGNAL = 2.1; EXPRESSED IN HELA, SIGNAL = 4.3; EXPRESSED IN BRAIN, SIGNAL = 1.8; EXPRESSED IN FETAL LIVER, SIGNAL = 2.3; EXPRESSED IN LUNG, SIGNAL = 2.1; EXPRESSED IN BONE MARROW, SIGNAL = 2.2; SWISSPROT HIT: Q03164, EVALUE 2.00e-05; NT HIT: AF036405.1, EVALUE 0.00e+00; EST_HUMAN HIT: AW978326.1, EVALUE 1.00e-103
tggtggctaggatatggcgaggaagttcagatgttttttctttacaattcctttgaattcagaaaaaaccttcttgctcatctaaaattgtaagaaaatcagttttgtggattaattgttcaactgaaaactttttattatctttttgtatcaaaaaagtaattaaatgttctttcaggtggaatgttatttgctgacttctttgaggcaaattttgggtgaaaagaaactaagcacaattaagatgtttgattgactcattagactcaagttgaactcagtacaaaatggccagtgctaagttatattcagcttagttaaaacctaaactacacagctaaatatatgctcttcatggtttaatttctatacacagttaaaactagtcctcgaaaacctcgtgggagacctagaagtggctctgaccgaaattcagctatcctctcagatccatctgtgttttcccctctaaataaatcagagaccaaatctggagataagatcaagaagaaagattctaaaagtatagaaaagaagagaggaagacctcccaccttccctgga

SEQ ID NO: 6939 - DNA, 500 bp, Homo sapiens
  MAP TO AL133338.2; EXPRESSED IN HELA, SIGNAL = 4.7; EXPRESSED IN BRAIN, SIGNAL = 3.9; EXPRESSED IN ADULT LIVER, SIGNAL = 4.1; EXPRESSED IN BONE MARROW, SIGNAL = 5.7; EXPRESSED IN FETAL LIVER, SIGNAL = 4.6; EXPRESSED IN LUNG, SIGNAL = 4.7; SWISSPROT HIT: P39188, EVALUE 7.00e-18; NT HIT: AF288742.1, EVALUE 1.00e-23; EST_HUMAN HIT: BG718109.1, EVALUE 8.00e-44
gtgacacaatcatggctcgctgcagccccaaccttccaggctcaagcaatccttccacctcagcctcctgagtagctgggactacaggtgcacaccaccatacctggctaatttttaaaaatttttgtagagatggttctcaccatattgcccaggctggtcttgaactcctagactcaagtgatcttcctgccttgaccttccagagtgtggggattatatggagccattacacctggtctattgctatgatttgactgttagatttactcaggagaatatttgtggtaattttttggaagatcgtaacttgaaccatgattcaattgagctaatactgtttcttttgtctttgaatagttggaactgataatgggagagaagcaattgaaagtggggctgcatttctcttcatgacatttcacttgaaggactctgttggtcacaaggaaacaaaggctatcaaacagatgtttggcccctttccttcatcatctgcc

SEQ ID NO: 6940 - DNA, 507 bp, Homo sapiens
  MAP TO AC004131.1; EXPRESSED IN ADULT LIVER, SIGNAL = 1.3; EXPRESSED IN PLACENTA, SIGNAL = 2.3; EXPRESSED IN HELA, SIGNAL = 0.6; EST_HUMAN HIT: BI490326.1, EVALUE 0.00e+00; SWISSPROT HIT: Q14416, EVALUE 9.00e-04; NT HIT: gi14777379, EVALUE 0.00e+00
catgggctcgtaggcgcaggctggccttgtgtcacgcagcacggtgagcaccagccactccacagcgatgatgacttgcaccagcatcaggcacagcgccaggcccaccagctgccagcccgcggggcccgtgccatgccgcaccagcctccgcacgcgccatgcctggctcagcaggcaggagaagcagagcgcaaagaggacgccccagaggaagcggcggacagagcagatggtctcgtcctcctggatgatgaaggcaaacgtcagcccaaagaggcccagggtccccaggaggaacagaaagtggaggcccacagggctcttcttctccttctccttgatgaagggcagccgcaccaggaggatgagcatcaggagcagtgtgatcagggcgcccgccccggccaccgcctccaccacaatgccccagatggcgtccaggtcgcacagggacacgtactgagggaggaggtccagcccacagcctcgggatgtgctggcgtt

SEQ ID NO: 6941 - DNA, 501 bp, Homo sapiens
  MAP TO Z82192.1; EXPRESSED IN BRAIN, SIGNAL = 3.2; EXPRESSED IN ADULT LIVER, SIGNAL = 3.6; EXPRESSED IN PLACENTA, SIGNAL =   3; EXPRESSED IN HELA, SIGNAL = 7.5; EXPRESSED IN BONE MARROW, SIGNAL = 3.7; EXPRESSED IN LUNG, SIGNAL =   3; EXPRESSED IN HEART, SIGNAL = 3.4; EXPRESSED IN FETAL LIVER, SIGNAL = 3.7; EST_HUMAN HIT: BI761027.1, EVALUE 0.00e+00; SWISSPROT HIT: P08125, EVALUE 1.20e+00
agcaggtctgcagggtgggggttggctgagtgggagctgcagggccctgccagcctcctcctaggcaaggggcagagccctgtgtcccctgagacctcctgcttctctaccctgcatgactggtatggccaggagatcgtggagctgcggcagtgttggcagaagagggcccaggggagccactcaaaatgtgaggaacaggataggccctaagtctgggccctttgagtcaggaaaccagggccagttctttttcaggagttaaatgtttacccatttccaaggttgcgttttgggaggggacatgggttctctccttcctgctatttaggcattctccaggttcgagatccacccgtgtgtctggaagggactgcgggaccattccttccatcctctttatttcctgaggtccagagaaggaaggagacttagcagccacagagcaagaccccaatctcctgactgcactggcctgactgccccctcccaggggatgtt

SEQ ID NO: 6942 - DNA, 500 bp, Homo sapiens
  MAP TO AJ009613.3; EXPRESSED IN PLACENTA, SIGNAL =  11; EXPRESSED IN HELA, SIGNAL =  20; EXPRESSED IN BRAIN, SIGNAL = 8.1; EXPRESSED IN HEART, SIGNAL = 5.7; EXPRESSED IN LUNG, SIGNAL =  16; EXPRESSED IN ADULT LIVER, SIGNAL = 5.3; EST_HUMAN HIT: BE736096.1, EVALUE 1.00e-125; SWISSPROT HIT: P53506, EVALUE 7.00e-26; NT HIT: gi11038618, EVALUE 1.00e-124
ggtggatgatggaggggcctgactcatcttactcctgcttgctgatccacatctgctggaaggtagacagtgaggccaggatggaactgccgatccacactgagtacctgtgcttggggcggggcacaatgatcttgatcttcgtggtgctgggcaccagggcagtgatctccttctgcatcctgtcaggatgccccagtacatggtggtgccgccagacagcacgtgttggcatataagtctttgcagatgtccacatcacacttcatgatggagttgaaggtggtcttgtggatgctgcaacattccatgcccaggaaggaaggctggaacagtgcctccagacactggaactgcttgttgccaatggcgatgacctggccatgggcacctcacagctattctccagggaggaggaggatgcggcggtggccatctcctgctcgaagggcaacacagcttctccttgtcatgcatgatctcccactcggccgtggtga

SEQ ID NO: 6943 - DNA, 512 bp, Homo sapiens
  MAP TO AF038458.1; EXPRESSED IN BRAIN, SIGNAL = 1.8; EXPRESSED IN ADULT LIVER, SIGNAL = 1.4; EXPRESSED IN HELA, SIGNAL = 3.2; EXPRESSED IN BONE MARROW, SIGNAL = 1.7; EXPRESSED IN LUNG, SIGNAL = 1.7; EXPRESSED IN HEART, SIGNAL = 1.5; SWISSPROT HIT: Q9Y7B6, EVALUE 3.60e+00; NT HIT: gi13375645, EVALUE 6.00e-59; EST_HUMAN HIT: AA251267.1, EVALUE 1.00e-118
actgagcacggggccacagctgctcttgtccagtggccggatcagcggcctatcccgggcatccgcatgtaccagatccagtacaacagctcggctgatgacatcctcgtctacaggtgcagggtccaggcactggggtagcttgggtgggggagtgaggcaaggggagggttgagggtacacctactaataccctacaccgaagcacaactgataagtgatgctggaaggttccaaaagaaatcagagagcaaaagtaaaagaaatcaggcagcaaggataacaagactctggcagaaagggtcaatgaaatctgacagcagtgataaaaagaagtcagacaagaaggacgaagtaaatgagacagcaaatgttaaaatatatcaggctacagggctaaaaaagatcaagcaataaggataaacgaaatcaggctgcatgagtaaaaagaaattaggcagcaagaataaatagtagtagcaaacataaaaaggaaaccaggcagcgggagg

SEQ ID NO: 6944 - DNA, 538 bp, Homo sapiens
  MAP TO AC007463.3; EXPRESSED IN ADULT LIVER, SIGNAL = 1.6; EXPRESSED IN HEART, SIGNAL = 1.2; EXPRESSED IN LUNG, SIGNAL = 1.5; EXPRESSED IN HELA, SIGNAL =   3; EXPRESSED IN BRAIN, SIGNAL = 1.3; EST_HUMAN HIT: AW577558.1, EVALUE 3.00e+00
tgcctgaagaccatctgcatcagctacctgcttagctggaatgggagacgtttgactcccttcccagacacaatgaagcagaatccacctagtgggctcagagctctccattgttaatcagaaccccctgttgatttcatgtattaggctttgggaatttcatgtctatctgagaaatattattacatatacctgaaaattggtatttagcttgcaaactgctataacggtaatatatgaatatgacatctgtttacattttctacattttgtggataggaactgttaacttctaacttcccccaaaagggcaccaaaacaacccattgatatagtaaagctgagtttactgcttgctgcagcaaggaatccactaaaccattatgacagcatctaaatagcatctgaggggagttctatggttttggcgagggttgagtttctgttttaagataagtcttttcatgctattaggaatgggctaattgggattatgtaaagcgcatgcattatagtttgggaccagtgggtgcagcaa

SEQ ID NO: 6945 - DNA, 505 bp, Homo sapiens
  MAP TO AC009288.12; EXPRESSED IN LUNG, SIGNAL = 1.2; EXPRESSED IN HEART, SIGNAL = 1.5; EXPRESSED IN BRAIN, SIGNAL = 1.1; EXPRESSED IN HELA, SIGNAL = 0.91; EXPRESSED IN ADULT LIVER, SIGNAL = 1.2; EXPRESSED IN BONE MARROW, SIGNAL = 0.75; EST_HUMAN HIT: BE531263.1, EVALUE 1.00e-124; SWISSPROT HIT: Q15059, EVALUE 4.70e-02; NT HIT: gi11427757, EVALUE 0.00e+00
ggatggcctcctcaatgccgtcgtcgctgctggagtcggacgcctcgggcgcctgtatggcgctcgtgactcgctttcccctccttgcggtgctggcgttccttttaatcccacttttattctgtactgcttctgaagggcggtgggggttgctggctttgtgctgccctccttctcctgcgtggtcgtggtcgtgaccttggacctgaggcttctgggctgcacgtttgtctttgctaaccgggggaggtctgcagaaggcgaactccttctggacgtccatcaggccctgccggtgcaccacctttgtagccggctcttggtgggatttcgagagtgacttcgccgaattttcatgtgtgtctggtttcttctccactgacccatcacatttttgggtctcatgctgtcttttctcgttcagaaactgttctatttctgccctgatgctctgctcaaaggagtctgctctgctcatgctgactggggaggcagagccctggtc

SEQ ID NO: 6946 - DNA, 509 bp, Homo sapiens
  MAP TO AC005362.1; EXPRESSED IN PLACENTA, SIGNAL = 2.4; EXPRESSED IN ADULT LIVER, SIGNAL = 1.9; EXPRESSED IN HELA, SIGNAL = 0.62; EXPRESSED IN LUNG, SIGNAL = 1.4; EXPRESSED IN HEART, SIGNAL = 2.3; EXPRESSED IN BONE MARROW, SIGNAL = 1.7; EST_HUMAN HIT: AL522513.1, EVALUE 0.00e+00; SWISSPROT HIT: Q15697, EVALUE 5.00e-57; NT HIT: gi14777793, EVALUE 0.00e+00
cttggtcaccagcccacccgctcagcaaagaaaccctacaaatgtgatgactgtgggaaaagcttcacgtggaattcagagctgaagagacacaagagagtccacacaggagagagaccctacacgtgcggagagtgtggaaactgctttgggcggcagtcaaccctgaagctgcaccagaggatccacactggagagaagccataccagtgtggccagtgtgggaaaagctttcgccagagctcaaaccttcaccagcatcaccgacttcaccatggggactaaaaggagcactccatgctttagattcacacggaaggtgtttgtgtttctcctcccccttacttgcatgtaaatcacaaaaactgtgtgacttacaaggaaagcacgaggcccttgaggaatgatgatgcacattctgctgtgaggaggcccagaaaaggccaaccagggcccaaccgtgcatgatgacagggtgaagagaaggcaggtctgggcactggggcaaa

SEQ ID NO: 6947 - DNA, 520 bp, Homo sapiens
  MAP TO AC013593.3; EXPRESSED IN HELA, SIGNAL = 2.7; EXPRESSED IN ADULT LIVER, SIGNAL = 1.9; EXPRESSED IN PLACENTA, SIGNAL = 1.8; EXPRESSED IN LUNG, SIGNAL = 1.7; EXPRESSED IN FETAL LIVER, SIGNAL = 1.7; EST_HUMAN HIT: AI027705.1, EVALUE 0.00e+00; SWISSPROT HIT: Q92212, EVALUE 1.40e-01; NT HIT: gi15300858, EVALUE 2.00e+00
tccccacagccaaccaccagtgccagttcatattggtgagactcagcaaccaacttggtttgcaaagtgaccccatcagacaggaaggacattgccttcctaacagcaaatgagaaacgagggagccttggacttttttttttttcttttaatgtttcatagcatgacatccaggtgggtcctgacctctgtcaataccaccttcctgaggttagttccatttcctactctgcacctgattcctgcagctcccaccttcagtgagaggaggctacagttctgaaggaaaaggcttggcattgaagctatggtcttcctgggccagattcaggagggaatggaagagaacattcctttcaggacaggtggccaaaggataggagacagagtggttcagcagggggggtaggttgcacaagggtggggcaaagggcacctcctgaaagatgggaagtgggaatggggatctggcctggggctgctgtggagccagctgcagtgcaggttgcaggggagcagg

SEQ ID NO: 6948 - DNA, 528 bp, Homo sapiens
  MAP TO AC006273.1; EXPRESSED IN HEART, SIGNAL = 2.1; EXPRESSED IN BONE MARROW, SIGNAL =   3; EXPRESSED IN ADULT LIVER, SIGNAL = 1.8; EXPRESSED IN PLACENTA, SIGNAL = 2.8; NT HIT: gi16163419, EVALUE 1.00e-94; EST_HUMAN HIT: BG684713.1, EVALUE 2.00e-94; SWISSPROT HIT: P26599, EVALUE 5.00e-52
catgcaccctcctggggctcagggttggtctccgtagcaggcagggctctagggggatagcagggaccttcctctgtgggctcctgcgagttggtgcctgcatctcatggcacccccttttcagcaaacggaaatgacagcaagaagttcaaaggtgacagccgaagtgcaggcgtcccctctagagtgatccacatccggaagctccccatcgacgtcacggagggggaagtcatctccctggggctgccctttgggaaggtcaccaacctcctgatgctgaaggggaaaaaccaggtacctgagccgcgtttctccggggtgctcacaccgtgcaggcggggacgaggagggcccagcgctcactgcctccccaacaggccttcatcgagatgaacacggaggaggctgccaacaccatggtgaactactacacctcggtgacccctgtgctgcgcggccagcccatctacatccagttctccaaccacaaggagctgaagaccgacagctctcccaaccaggcgg

SEQ ID NO: 6949 - DNA, 500 bp, Homo sapiens
  MAP TO AC006137.1; EXPRESSED IN FETAL LIVER, SIGNAL = 8.1; EXPRESSED IN ADULT LIVER, SIGNAL = 8.1; EXPRESSED IN PLACENTA, SIGNAL =  15; EXPRESSED IN HELA, SIGNAL = 4.7; EXPRESSED IN HEART, SIGNAL =  10; EXPRESSED IN LUNG, SIGNAL =   8; EXPRESSED IN BONE MARROW, SIGNAL = 9.5; SWISSPROT HIT: P35410, EVALUE 4.00e-06; NT HIT: Y19213.1, EVALUE 2.00e-03
gagggatgggggcaagcaggagagggtaccctgcagtggaggatatgggatggatggatcacttgcaggagactcattcctctccttgactttgctctgtgagattcccaccaatcttgggaggcccagcaggaccctcttgggaagcccagcaggtcagaaggcaaccctgactctccttcctaggcctggtaagttaccaacctttgtctttgcagggtgtgcccaggcagccaaggcagcccaccatggcccagtttctctcagtgttctctgggaagctggattgggacaacaggacagagaccccaggacaagtgaacatgagtcatacgggaggcgagtggttggtgggcaaacaggtggttttcatcctgacagtgctggtggccttctgtgggctggtgggcaatggtgtggtgtgctggcttttctgcttccaggtcaggagcagcccctacatgacctatgtccttaacctggccgctgctgatatggtc

SEQ ID NO: 6950 - DNA, 500 bp, Homo sapiens
  MAP TO AC009533.9; EXPRESSED IN LUNG, SIGNAL = 1.9; EXPRESSED IN HEART, SIGNAL =   2; EXPRESSED IN PLACENTA, SIGNAL = 2.3; EXPRESSED IN ADULT LIVER, SIGNAL = 1.8; SWISSPROT HIT: P10262, EVALUE 1.00e-27; NT HIT: M32788.1, EVALUE 1.00e-108; EST_HUMAN HIT: BF058289.1, EVALUE 2.00e-41
tcctcccgctgaggaggcacaagtccctccgggcgataagcactcaggcccattcttagtttatgtccgcttctctacttctgacctgtacaactggaagactcataacccccccttttctgaaatgccccaggtcttgacctcactgatggagtccatgctccggactcaccggcccacctgggaggactgtcaacagctccttttaaccctttccacctctgaagagaaggaacgtacccgaagagaggccagaaaatatttccttacatcagacggtagaccagaggaggaagctcataacctcctagaggaggttttccctctacccggcctaattaggatccaaactcctcaggcaggaagagagctttagatgattttcaccagtatctccttgcgggtatcaaaggagctgctcgaaaacccataaatttgtctaagacatttgaagttgtccagggacctgatgagccaccgggggcgtttttggaacgcct

SEQ ID NO: 6951 - DNA, 583 bp, Homo sapiens
  MAP TO AC004081.1; EXPRESSED IN ADULT LIVER, SIGNAL = 2.6; EXPRESSED IN HELA, SIGNAL =   5; EXPRESSED IN BRAIN, SIGNAL = 2.7; EXPRESSED IN HEART, SIGNAL = 2.3; EXPRESSED IN BONE MARROW, SIGNAL = 2.9; EXPRESSED IN LUNG, SIGNAL = 2.9; SWISSPROT HIT: P54102, EVALUE 4.00e-65; NT HIT: gi4504510, EVALUE 0.00e+00; EST_HUMAN HIT: BE886627.1, EVALUE 0.00e+00
ccctggcactccacgcacacagactgaatttgctgaacctttccaggtcctatctgatgaattcttatttgcattccagtacctcggcaattgggacagtactctactcctcctttcttacctcctctatcttcacatttgtcacaaattgcattcttttgcagagccagttttcttgttgcactattatataagtcttctagggttactgagagctgatgtacaacatttttacctctcctttctctgtgcatccttcctcctcctccaaaaaaacatatcaaagatgtccatgggggagccaaaaccgccacctgctccatcctctttaattgtctgttctcctcctttgtcatataattaattcccttttctttgcatcagagagaacttcatatgcttgagaaatctgtttaacttctccccttcatttggattcttatcaggatggtacctcaaggccagtttcctataagcctttttcaattcttcctgagtagcattgattgggtttgacccccaaaacatcatagtaagtggtttctttcaccatccaccatcttctgccggtgagcaggctgag

SEQ ID NO: 6952 - DNA, 524 bp, Homo sapiens
  MAP TO AL121907.2; EXPRESSED IN HELA, SIGNAL = 0.85; EXPRESSED IN BRAIN, SIGNAL = 1.8; EXPRESSED IN ADULT LIVER, SIGNAL = 2.2; EXPRESSED IN FETAL LIVER, SIGNAL = 1.9; EXPRESSED IN BONE MARROW, SIGNAL = 2.3; EXPRESSED IN LUNG, SIGNAL = 2.7; NT HIT: gi14769955, EVALUE 0.00e+00; EST_HUMAN HIT: BF062450.1, EVALUE 0.00e+00; SWISSPROT HIT: P20186, EVALUE 3.90e-01
ggccgtgcttctgagctgggcctggaccagatgtcctctggcctcagtctcacctgctccttctgtcgcaggcttcgaaccgtggccaacagttccagtggactgcgtggacccgtgagctcaggagcctcagacgcctccctggagagccaagctggtgttcgaggtggcgcctccagggtccaccctgctgcccaacagccccgcggccaccagagggccgtccctggcccggctgtgtgccctggtggacctgtgtctgggctgctcccgctgcacccagcggctcaatgaaagcacctacgtcctccgtagggtggagcatgactgctcccgcgagatcctgctggcccgctttaagcaggccaccaagagcaaggtctggcgcgtggtgggctgccggcccaccttcccaaggcccctgtgctaccaagtctgccactactacagccctgggctcggctgccggcgccaccgaaaccggtgcacctttgcccgcagtcgcgaggaggccctggtctgga

SEQ ID NO: 6953 - DNA, 501 bp, Homo sapiens
  MAP TO AC020709.2; EXPRESSED IN ADULT LIVER, SIGNAL = 3.8; EXPRESSED IN PLACENTA, SIGNAL =   4; EXPRESSED IN HELA, SIGNAL = 1.3; EXPRESSED IN HEART, SIGNAL = 3.9; EXPRESSED IN BONE MARROW, SIGNAL = 3.1; EXPRESSED IN FETAL LIVER, SIGNAL = 1.5; EST_HUMAN HIT: BF955875.1, EVALUE 1.80e-01; SWISSPROT HIT: Q9UMN6, EVALUE 1.20e-02
cagctctgtggcggtgctgggctgctgggtacggcaggggtggtgctggcagctctgtggcggtgctgggctgctgggctgctgggctgcagagctgggctggcgccacttggggcgggtgcggccggcataggagagggccgggtgtgtgctgaggggaccattccagaatccccgtaggccccggggctggcctcagaagctgtcaccacggctctgcttggctgcccatgcatgctggcagccaaggggaaggagagtcgcgcagttcccgttcctgccaggcacccctcgacagcacccccaaggcctatgagcctggcagcccttcctcctttttccatgcccttcatttcttttctggagccgaccctcgcacctgcagtgtcaggacattgcttctctggcccagagccctgtggtaatcgagaaggctgggctcccagtttccccaaatgcaggtggggaggtggggccggagcagggccagggcagagggtt

SEQ ID NO: 6954 - DNA, 507 bp, Homo sapiens
  MAP TO AC005622.1; EXPRESSED IN BRAIN, SIGNAL = 3.3; EXPRESSED IN ADULT LIVER, SIGNAL = 4.4; EXPRESSED IN HELA, SIGNAL =   3; EXPRESSED IN HEART, SIGNAL = 3.7; EXPRESSED IN BONE MARROW, SIGNAL = 3.8; EXPRESSED IN FETAL LIVER, SIGNAL = 3.5; NT HIT: gi11426204, EVALUE 4.00e-88; EST_HUMAN HIT: AI372028.1, EVALUE 1.00e-51; SWISSPROT HIT: Q9UPW0, EVALUE 1.70e+00
gcagccggaggtcagcttggaagtggccagtgacaatggcgtggaaaaggggggctccggggagggaggtggggaggaagccccactctcaacctgcaggaagctcggcctccttcttaagtacattctggacagctggaagaaacacgactcagaagagaaataaagagtgcagccccgcccccctgcctcacccacaaactaagtcttaacaaaatccaaattaccaacaaaaaaggccgatgtggtgaatgtgagggctgcagttgcctggggggtgggtgtggagggagcctgtgtccctggcaggcaggggagccggcgtcctgggcagggcaaaggagggggcactggggaggggaggagggaggcaggtgggcccagggccaacaggggtgtagtgaaaggggacaggagtgccctggagagggaggttggagacatggatggtgggcccagggttccctggtggtgtctttctccctggtccccaagtggccaggagga

SEQ ID NO: 6955 - DNA, 526 bp, Homo sapiens
  MAP TO AL035460.13; EXPRESSED IN LUNG, SIGNAL = 1.6; EXPRESSED IN ADULT LIVER, SIGNAL = 1.5; EXPRESSED IN HELA, SIGNAL = 1.3; EXPRESSED IN BRAIN, SIGNAL = 1.6; SWISSPROT HIT: Q9Z5I9, EVALUE 3.30e-01; NT HIT: U82671.3, EVALUE 2.00e+00; EST_HUMAN HIT: AI828062.1, EVALUE 1.00e-127
tgggaggaatggcaaggccagtggtacccaggtagaagttctcagtgagtctgaagctgagacagctgagtggctatgagaaaaagatgctgtcagttgccaagggggccccacgggtatcatcacatccatatgggcgctatcagtggcttggtcaagctctgcccctggctaagcaattttcaccaatggctaagccatctgtcttgccccctcttctcaaagcccccagcccctcacaccaggaacctgcagcattgacttgaggaaggagtccggggtcaggccagtctacctgttagggactaggggtctgggccctgccaaggcagggagccctgatcccattgccctccctctccccgtggggtctcaggccctaggccagggctcaacagacacaggcagtgggatggggttgcccttctattgatccaaatcctgagtgtcgcctgggtgagtcatggaggtgaggaggcccacaaggctcagcagtgtggagaagagcagcaggaaggaggccgtg

SEQ ID NO: 6956 - DNA, 503 bp, Homo sapiens
  MAP TO AC004865.1; EXPRESSED IN LUNG, SIGNAL = 0.92; EXPRESSED IN BONE MARROW, SIGNAL = 0.87; EXPRESSED IN HELA, SIGNAL = 0.45; EXPRESSED IN ADULT LIVER, SIGNAL = 1.4; SWISSPROT HIT: P36789, EVALUE 9.20e-01; NT HIT: AB020882.1, EVALUE 0.00e+00; EST_HUMAN HIT: BI032975.1, EVALUE 1.00e-101
ttggggagaggtgtgtggcgtgtagtgtgtgtgtattggggggagcgtttgagtgggaggttactgtgttgtgtgtgtgtgcgtgtgtgtgtactgtgatgtgagtgcacatatggtgtgtggtatggtgcttgtgtggagggagggagagagagggaggttgggccgcacactactccctggagtgctggctacagtatcagcttgtgtggacatgcagcttcgctgtctccccattattctcctcccccttgcctcccagctccagcactggctccccccatactgggccccctctgtgggtcactgcaccctcacctgcagcaggtagtggataacagcccctatggcctccttcatgacgctcacgagctgcaccttctgtggctccttaagcagtgactgctcacagcgagtgcattcctggatccccaactccatgagggcatagcaggcggtcaccacatcctctttcacctccgtgcccgtctcctccagtgcca

SEQ ID NO: 6957 - DNA, 582 bp, Homo sapiens
  MAP TO AC002553.1; EXPRESSED IN LUNG, SIGNAL = 1.7; EXPRESSED IN ADULT LIVER, SIGNAL = 1.6; EXPRESSED IN BRAIN, SIGNAL = 1.6; EXPRESSED IN BONE MARROW, SIGNAL = 1.3; EXPRESSED IN HEART, SIGNAL = 1.7; EXPRESSED IN FETAL LIVER, SIGNAL = 1.3; SWISSPROT HIT: O75376, EVALUE 8.00e-44; NT HIT: gi14776475, EVALUE 0.00e+00; EST_HUMAN HIT: AL037492.2, EVALUE 0.00e+00
cccccacccgctaccaaagctgactctgtggacgttgaagtgagggtgccagaaaaccatgcatctaaagttgaaggtgataataccaaagaaagagacttggatagagccagtgagaaggtggaacctagagatgaagatttggtggtagctcagcaaataaatgcccaaaggcccgagccccagtcagacaatgattccagtgccacgtgcagcgctgatgaggatgtggatggagagccagagaggcagaggtgaggctcgttccataagtcctccccgtgcttactctgctggttggtgactgaatcacagggtggtgctggctgcagacatgtctcctatgtaaatattggcacgttataggtagtctgtacaattttaatattgggctgatactgttctgtttaaataaccacaaactattgtatgatcattttaatgaaacagattatacatttctcctatatctgtcttgttacgtgtattctgtatgatagcataacagggaatttcaactaataaagttgtgaataaaccacagataactgttgtgcctgaggagggcagcagtgggatgtg

SEQ ID NO: 6958 - DNA, 507 bp, Homo sapiens
  MAP TO AC009963.2; EXPRESSED IN PLACENTA, SIGNAL = 4.7; EXPRESSED IN BRAIN, SIGNAL = 3.4; EXPRESSED IN ADULT LIVER, SIGNAL = 2.1; EXPRESSED IN HELA, SIGNAL = 4.9; EXPRESSED IN LUNG, SIGNAL = 2.7; EXPRESSED IN BONE MARROW, SIGNAL = 2.2; EST_HUMAN HIT: AU143272.1, EVALUE 0.00e+00; SWISSPROT HIT: P49792, EVALUE 2.00e-76; NT HIT: gi14720742, EVALUE 0.00e+00
gggcccagtgttttcaggattgggttttattgttgtgtctgaggcaccggccgcacctgtacctgaacccttattttcttcctcagtgacttttgtttgatcatttgtcaaaaatgttttgaaatctttcagtccactcttcatttcttcagctctctgtattaacttggcagctctgccagtatctacaagtttatggggagtttgaagtggtatgtctaacagaagctgctggcattcctcaaatttctgcttgaattcttcagccagctctggtgttttaaattttgctgctaaccgctctagtttggcatcaccatcagagaaatcactggctgaccacatccatgctctatctgatccagacaggggcttcaggttcattgtagtcgttatccaatgattagcacacacttttagtacttgttctcttcgcatcagcattcttggtttgccattgacctcgtttttgagaatttttaagttccccaagcccctttctttcca

SEQ ID NO: 6959 - DNA, 503 bp, Homo sapiens
  MAP TO AC010644.6; EXPRESSED IN HELA, SIGNAL =   4; EXPRESSED IN ADULT LIVER, SIGNAL = 2.4; EXPRESSED IN PLACENTA, SIGNAL = 1.7; EXPRESSED IN LUNG, SIGNAL =   2; EXPRESSED IN BONE MARROW, SIGNAL = 2.2; EXPRESSED IN FETAL LIVER, SIGNAL = 1.9; EST_HUMAN HIT: AW958666.1, EVALUE 0.00e+00; SWISSPROT HIT: P51617, EVALUE 7.00e-01; NT HIT: gi13236546, EVALUE 0.00e+00
gaggaggcggaggagcagggcgcggggtccccagggcagccagcccacctggcccggcccatctgcggagcgtccagtggagatgacgatgactccgacgaggacaaggagggcagcagggacggcgactggcccagcagcgtggagttctacgcctcgggggtggcctggtctgccttccacagctgacccccggcctgcagaacatctgtccccaagccagctccactgcccaggcccccaagagggcagctccagaagctgcccagggctccgggaccccatcccatggtggcaggtgcagcggtggggagtggctctttctggactcccagtgcctttttgctggacactgtgtccttatggcttcactgcaggtaatgcctttcccttcaggaagccccagaacacccacaggtcttggtaacaaacgccaccttacactctgcaggctgcagcggcagctccagatggcctcctgagctggacgaccccaggtctcc

SEQ ID NO: 6960 - DNA, 506 bp, Homo sapiens
  MAP TO AP001725.1; EXPRESSED IN BONE MARROW, SIGNAL = 2.1; EXPRESSED IN FETAL LIVER, SIGNAL = 1.5; EXPRESSED IN ADULT LIVER, SIGNAL = 1.5; EXPRESSED IN PLACENTA, SIGNAL = 1.6; EXPRESSED IN BRAIN, SIGNAL = 1.8; EXPRESSED IN HELA, SIGNAL = 2.7; SWISSPROT HIT: Q9Y3R5, EVALUE 3.00e-79; NT HIT: gi14780345, EVALUE 0.00e+00
cctgccacacggacagcgagaacacgtcctccttctcctccccttcccacgacctgcaggagctgagcaacgaagagaactgctgtgcacccatccccatggggggcagggcgtaccccaagcgctcggccctgctggcggccttccagtcagaaagcttcaaggctggggccaagttaagcctggtgcgggtggactcggacaagacgcaggcttctgagtcgttctccagcgacgaggaggcggacttggagctccaggccctcaccacatccaggctgctaaagcagcagcgggaaaggcaggaggccgtcgaggccttgttcaagcacatcctgctctacctgcagccctacgactctcggcgggtcctctatgccttctcggtgctggaggctgtgctcaaaaccaaccctaaggaattcatcgaggctgtgtccaggactagcatggataccagctccaccgcgcacctcaacctcatctccaacctcctcgctcgccac

SEQ ID NO: 6961 - DNA, 539 bp, Homo sapiens
  MAP TO Z68289.1; EXPRESSED IN PLACENTA, SIGNAL = 1.7; EXPRESSED IN HELA, SIGNAL =   2; EXPRESSED IN ADULT LIVER, SIGNAL = 1.2; EXPRESSED IN BONE MARROW, SIGNAL = 1.5; EXPRESSED IN LUNG, SIGNAL = 1.4; EXPRESSED IN HEART, SIGNAL = 1.5; EXPRESSED IN FETAL LIVER, SIGNAL = 1.4; NT HIT: AB008681.1, EVALUE 0.00e+00; EST_HUMAN HIT: AV730914.1, EVALUE 0.00e+00; SWISSPROT HIT: P03330, EVALUE 5.10e-02
tgcttccttctgggtgggggagattagaggaggcttatcattaataggaaggggagctgtagaaaggctagtatatggaggtaagctgagaggttctgctgtgggatgtaaattgcatgctttgcatagttgtggattctccttcaatgaaaagaaagcttgggcataaggtatttcactccatttgccctccctgttacagaaaaggtcaagctgcaggatagtattgtaatttatacttccctcaggtggccatttttccccatcagacagagaatattggggacaggccatagtgcagaaaaaacatgagctacttctttgtcagggtttgcaggtcaaattggtcccaatggcttaggatacatttcaagtgtgagcctgttgatacctgagtgtttcccatctgaaagacaaaactgcccatggttttgggttgtttgttccccccacagcccaagaacctgcaacggtacctggaccctgctgatcggaatagttgggctcactgacacagcagcagatccccctcttgccca

SEQ ID NO: 6962 - DNA, 514 bp, Homo sapiens
  MAP TO AC025249.2; EXPRESSED IN ADULT LIVER, SIGNAL = 2.1; EXPRESSED IN LUNG, SIGNAL = 1.7; EXPRESSED IN HELA, SIGNAL = 1.8; EXPRESSED IN BRAIN, SIGNAL = 1.6; EXPRESSED IN PLACENTA, SIGNAL = 2.1; EXPRESSED IN FETAL LIVER, SIGNAL = 1.7; EXPRESSED IN BONE MARROW, SIGNAL = 2.1; EXPRESSED IN HEART, SIGNAL = 2.3; SWISSPROT HIT: Q9H344, EVALUE 4.00e-44; NT HIT: AF071080.3, EVALUE 5.00e-04; EST_HUMAN HIT: AW235635.1, EVALUE 1.00e-82
gggctctgaagcgtgtgtggccacatggaaaagtcgaaggatgcgctgtcgaatctcctttgtcttcactccatagacaattgggttgagcacaggaggaaccagcagatagatattggccaagatgacgggcagcggagagtcacgccgcttgctaaagcgatgcaccatggacaatccaatgaaaggtacatagaatatgaacacagcacacacatgagagacgcaagtgccaaatgccttggcctgggcttcacgtgtcaagcccaacacagtcttaagaataagcagatatgagaaggagatgagaagtgagtccaggccaatggcggagatgatgacgataaggccatagacgacattgacccggatatcatcacaggccagcttcatgacatcttggtgtaggcagtaggaatgggaaaggatattggagcggcagaagggcagctgcttgatgaagacaggaaggggtgccatcagtgcagccccccgcaccacagcagccacacca

SEQ ID NO: 6963 - DNA, 546 bp, Homo sapiens
  MAP TO AC009079.4; EXPRESSED IN ADULT LIVER, SIGNAL = 1.2; EXPRESSED IN HELA, SIGNAL = 1.9; EXPRESSED IN BONE MARROW, SIGNAL = 1.2; EXPRESSED IN FETAL LIVER, SIGNAL = 1.4; EXPRESSED IN LUNG, SIGNAL = 1.2; SWISSPROT HIT: O43313, EVALUE 1.00e-100; NT HIT: gi14774581, EVALUE 0.00e+00; EST_HUMAN HIT: BF308835.1, EVALUE 0.00e+00
tcagggctctgccacaggggctgtgcacttaatgcccttgtcagtaggaaccctgatcctcggcctagattcagaggcttgctctcttaaggagagcctacctcttttcaaaattgctaatcctattgctggtgagccaataagtactggtgttcaagtgaactttggtaaaagtccatctaatcctttacaagaactagggaacacgtgtcaaaagaatagcatttcttcaatcaacgtgcagacagatctgtcttatgcctcacaaaactttataccttctgcacagtgggccactgctgattcctctgtgtcgtcttgttctcaaactgatttgtcgtttgattctcaagtgtctcttcccattagtgttcacactcagacatttttgcccagctctaaggtaacttcatctatagctgctcagactgatgcatttatggacacctgtttccagtcaggtggggtctccagagaaactcaaaccagtgggatagaaagtccaacggatgaccatgtacagatggaccaagctggaatgtgcgg

SEQ ID NO: 6964 - DNA, 569 bp, Homo sapiens
  MAP TO AC004889.1; EXPRESSED IN HELA, SIGNAL = 1.3; EXPRESSED IN ADULT LIVER, SIGNAL = 1.5; EXPRESSED IN LUNG, SIGNAL = 1.2; EXPRESSED IN HEART, SIGNAL = 1.2; EXPRESSED IN BONE MARROW, SIGNAL = 1.1; SWISSPROT HIT: O15320, EVALUE 4.00e-47; NT HIT: gi14757718, EVALUE 0.00e+00; EST_HUMAN HIT: BI761502.1, EVALUE 0.00e+00
caggggaggtggtgggggacaacatgggcctgtgaggcctgtgggtgcccgcgttccccagctccccccgcagcccgctccacagtggtccgctccggttggttgtcacgtgcgcattcgggttccagacccaaggctgcgtgttctccaccgcttgttgtggccagtgttactgcggtgaccgccagagcagcctcgacgctatggaggagcctggtgctacccctcagccctacctggggctggtcctggaggagctacgcagagttgtggcagcactacctgagagtatgagaccagatgagaatccttatggttttccatcggaactggtggtatgtgcagctgttattggattttttgttgttctcctttttttgtggagaagttttagatcggttaggagtcggctttacgtgggaagagagcaaaaacttggtgcaacgctttctggactaattgaagaaaaatgtaaactacttgaaaagtttagccttattcaaaaagagtatgaaggctatgaagtagagtcatctttagaggatgccagctttgagaaggcggcagca

SEQ ID NO: 6965 - DNA, 502 bp, Homo sapiens
  MAP TO AP000323.1; EXPRESSED IN LUNG, SIGNAL = 1.4; EXPRESSED IN HEART, SIGNAL = 1.3; EXPRESSED IN BONE MARROW, SIGNAL = 1.2; EXPRESSED IN FETAL LIVER, SIGNAL = 1.2; EXPRESSED IN PLACENTA, SIGNAL = 1.4; EXPRESSED IN HELA, SIGNAL =   1; EXPRESSED IN ADULT LIVER, SIGNAL = 1.3; EXPRESSED IN BRAIN, SIGNAL = 0.95; NT HIT: AL114645.1, EVALUE 1.20e-01; SWISSPROT HIT: P11311, EVALUE 5.30e-01
acggtgcccacattccctgctctgtccagatggtgcccacattccctgctccatctggacggtgcccacattccctcctctgtctagacagtgcccacattccctgctccgtccggacggtgcccacattccctgctctgtctggacggtgctcacattccctgctctgtctagacagtgcccacattccctgctccatccagacggtgcccatactccctgctctgtctagatggtgtccacattccctgctccgtctagactgtgcccatattcgctgctggctgcaaatgcgaggagttgacagcagcctcccctttacaaggcaggaggtgccactgttcgccattgtctccacctagggcttcacttgctttctatctgcagacatcagagggacccacatctctctgttctgacacgctgtgtgttgatggcagagtttaattatccacatgcaatcttactttccttattcccaagtccgtggggctgcctcatc

SEQ ID NO: 6966 - DNA, 543 bp, Homo sapiens
  MAP TO AL121919.19; EXPRESSED IN LUNG, SIGNAL = 1.9; EXPRESSED IN HELA, SIGNAL = 0.9; EXPRESSED IN ADULT LIVER, SIGNAL = 2.1; EXPRESSED IN BONE MARROW, SIGNAL = 1.4; EXPRESSED IN FETAL LIVER, SIGNAL = 1.9; SWISSPROT HIT: O00268, EVALUE 1.00e-02
tgtgctggtgccaggggatgatggtggcaaacctgccatggacctgtgcagatggcatgttaaataagagacaggattcagacagatctgggtccaaatcccgctttgccacatgtcagcttgcatgacaagttacttcgctgtctgagcctcagctttcccttttggatgagagtaccttcctctcgcttgggatgagagtacattccttaggggattgtcaggcttccgttgggtgatgaagtgcttggtgcagggtaggcaagatttactgcatgaggagagaggagaggtgcccatggtaaagtttggttgttgtctgcaggttttccagcattgtgggccatccagatgatgcggaatggaggttccagaacccacctgccctgcccctcctgcgagggaccagccagctcccactcctggccctccaggggccccaggtggccaggcctcacctcacctgaccctgggccctgtccttctgccgccagagcagggcctggccccccccactgtgttcctgaaggccctgcccatccc

SEQ ID NO: 6967 - DNA, 500 bp, Homo sapiens
  MAP TO Z73420.1; EXPRESSED IN LUNG, SIGNAL = 3.6; EXPRESSED IN HEART, SIGNAL = 4.4; EXPRESSED IN BONE MARROW, SIGNAL = 4.2; EXPRESSED IN ADULT LIVER, SIGNAL = 3.6; EXPRESSED IN PLACENTA, SIGNAL = 4.1; EXPRESSED IN BRAIN, SIGNAL = 3.2; EXPRESSED IN HELA, SIGNAL = 2.9; SWISSPROT HIT: Q06666, EVALUE 5.30e-01; NT HIT: AB052729.1, EVALUE 8.00e-03; EST_HUMAN HIT: BI829995.1, EVALUE 2.00e-65
ctgccttgagcgctggctcccaggggcaggggctgtggggatgacagaccctggttcttgaacttggaggtgtccaaggaactgtaggccgctttccaggggtccaagtcctgttggccctccttgtcattcagatgggccctggtgaaagtggttgtacctgagcaggacaaagagaaacagagggggagggagagagacacgcagacaagggcagaaagtagagggtggggagggggcagagatgggggtgaggaggggaaacggacagacaaagagccccagagctccacagccagagaaggggagagggacggagaggaagcgcaggaaccagaggcatgggtgggaaattaggagacacaatgggagaagagaggccagcctgcgtgcctcccacgggcagggttagtccacattgcctggggcaacaagggctgccgcctaagcctgtcccgccttgaggcctagctgtgtgaccgcaagcaagggacttggcc

SEQ ID NO: 6968 - DNA, 538 bp, Homo sapiens
  MAP TO AL035668.15; EXPRESSED IN ADULT LIVER, SIGNAL = 1.8; EXPRESSED IN HELA, SIGNAL = 1.3; EXPRESSED IN HEART, SIGNAL =   2; EXPRESSED IN FETAL LIVER, SIGNAL = 1.4; SWISSPROT HIT: P12643, EVALUE 1.00e-108; NT HIT: gi11421640, EVALUE 0.00e+00; EST_HUMAN HIT: AW339267.1, EVALUE 0.00e+00
tgcacagggacacgccaaccatggattcgtggtggaagtggcccacttggaggagaaacaaggtgtctccaagagacatgttaggataagcaggtctttgcaccaagatgaacacagctggtcacagataaggccattgctagtaacttttggccatgatggaaaagggcatcctctccacaaaagagaaaaacgtcaagccaaacacaaacagcggaaacgccttaagtccagctgtaagagacaccctttgtacgtggacttcagtgacgtggggtggaatgactggattgtggctcccccggggtatcacgccttttactgccacggagaatgcccttttcctctggctgatcatctgaactccactaatcatgccattgttcagacgttggtcaactctgttaactctaagattcctaaggcatgctgtgtcccgacagaactcagtgctatctcgatgctgtaccttgacgagaatgaaaaggttgtattaaagaactatcaggacatggttgtggagggttgtgggtgtcgc

SEQ ID NO: 6969 - DNA, 574 bp, Homo sapiens
  MAP TO AL133227.7; EXPRESSED IN ADULT LIVER, SIGNAL = 2.1; EXPRESSED IN BRAIN, SIGNAL = 1.6; EXPRESSED IN HELA, SIGNAL = 1.4; EXPRESSED IN BONE MARROW, SIGNAL = 1.7; EXPRESSED IN LUNG, SIGNAL = 1.7; EXPRESSED IN HEART, SIGNAL =   2; EXPRESSED IN FETAL LIVER, SIGNAL =   2; SWISSPROT HIT: P52742, EVALUE 2.00e-57; NT HIT: gi14768089, EVALUE 4.00e-08; EST_HUMAN HIT: AL568291.1, EVALUE 5.00e-05
gcgcacggatcttgctcgccaccaacaaatccataccggaaagaagtcttttatttgcagtagttgtaaaaagacctttgtccgtctgtcagatctaacacaacataaaggaactcatacgggagagagaccttaccaatgtacgacttgtgaaaaagcctttaaatatcggtcaaactttactaaacatcagaaaactcattctatagggaggccctttgcatgtaatgaatgtggaaagacctatcgccttaactgggaacttaaccaacataaaaaaattcatactggagagaaaccctatgaatgtggtgaatgtggaaagcgttttaacaataattcaaatcttaataaacacaagaaaatccatacaggagagaaacactttgtatgtaatcaatgtggaaaagcttttagcttaaactcaaagctttctcgacatcagagaactcacaataaaaaggaaaactcctctaaaagcgtctcaaatcttaacaaacatcagaaaactcatgctggagagaagccctttccatgtaatgaatgtaagaaagcctttgcccagcgcatggat

SEQ ID NO: 6970 - DNA, 549 bp, Homo sapiens
  MAP TO AL133316.2; EXPRESSED IN ADULT LIVER, SIGNAL = 1.6; EXPRESSED IN HELA, SIGNAL = 2.4; EXPRESSED IN BONE MARROW, SIGNAL = 1.5; EXPRESSED IN LUNG, SIGNAL = 1.6; SWISSPROT HIT: P51513, EVALUE 6.00e-49; NT HIT: gi14746410, EVALUE 0.00e+00; EST_HUMAN HIT: BE612586.1, EVALUE 5.00e-76
cagtcaggggcttgggtgcagctttcccagaaacctgatgggatcaacttgcaagagagggttgtcactgtgagtggagaacctgaacaaaaccgaaaagctgttgaacttatcatccagaagatacaagaggatccacaaagtggcagctgtctcaatatcagttatgccaatgtgacaggtccagtggcaaattccaatccaaccggatctccttatgcaaacactgctgaagtgttaccaactgctgcagcagctgcagggctattaggacatgctaaccttgctggcgttgcagcctttccagcagttttatctggcttcacaggcaatgacctggtggccatcacctctgcacttaatacattagccagctatggatataatctcaacactttaggtttaggtctcagtcaagcagcagcaacaggggctttggctgcagcagctgccagtgccaacccagcagcagcagcagccaatttattggccacctatgccagtgaagcctcagccagtggcagcacagctggtggtacggcggggaca

SEQ ID NO: 6971 - DNA, 564 bp, Homo sapiens
  MAP TO AC010203.13; EXPRESSED IN ADULT LIVER, SIGNAL = 1.4; EXPRESSED IN HELA, SIGNAL = 2.6; SWISSPROT HIT: P02845, EVALUE 2.40e+00; NT HIT: gi14754105, EVALUE 0.00e+00; EST_HUMAN HIT: BI094480.1, EVALUE 0.00e+00
tgccacggatgtttgggctgtgtacttttctcaattttggatagattatgaagggatgaaaagtggaaaaggacggccaataagttttgtagactcattccctctttccatttggatttgtcaaccaacaagatatgcagagtcacaaaaagagccgcagacttgtaatcaggtatctctaaatacatcacaaagtgaatctagtgatctggctggccgattgaagcggaagaagctcttgaaggagtattatagtacagagtctgagcctttgacaaatggtggtcagaagccttcttcatcagatacatttttcagattttccccttcctcgtcagaggcagatattcatctcctagttcatgttcataaacatgtcagtatgcagattaatcactaccagtatctgcttctacttttcctgcatgagtcacttatcctgctttcagagaacttaaggaaagatgtagaagctgtaactggcagtcctgctagtcagacatccatttgtattggaattttacttagaagtgcagaactggctcttttgctccatccagtgga

SEQ ID NO: 6972 - DNA, 500 bp, Homo sapiens
  MAP TO AC005618.1; EXPRESSED IN LUNG, SIGNAL = 1.4; EXPRESSED IN HEART, SIGNAL = 2.2; EXPRESSED IN BONE MARROW, SIGNAL = 1.1; EXPRESSED IN FETAL LIVER, SIGNAL = 1.1; EXPRESSED IN ADULT LIVER, SIGNAL = 1.5; EXPRESSED IN BRAIN, SIGNAL = 2.2; EXPRESSED IN HELA, SIGNAL = 0.97; NT HIT: gi14724436, EVALUE 0.00e+00; EST_HUMAN HIT: BI087139.1, EVALUE 1.00e-130; SWISSPROT HIT: Q9UN66, EVALUE 2.00e-43
gcgagccttcgaccacgagcagctgcgtgccttcgagctcactctgcaggcccgcgaccagggctcgcctacgctcagcgccaacgtgagcctgcgcgtgttggtggacgaccgcaacgacaatgcaccgctggtgctgtacccagctctggggcccgaaggctctgcgctcttcgatatggtgccgcgctctgcagagcctggctacctggtgaccaaggtggtggcggtggacgcagactcgggatacaacgcctggctgtcctaccacattgtgcaggccagcgagcccgggctgttcagcctgggcctgcgcacgggtgaggtgcgcacggcgcgtaccttgggcgacagggaggccgcccgccagcgcctgctggtcactgtgcgtgatggaggacagcagcctctttcagccaccgtcatgctgcacctaatcttcgcagatagcttgcaagagatacaacctgaccttagcgaccgccccactccctctgacc

SEQ ID NO: 6973 - DNA, 519 bp, Homo sapiens
  MAP TO AL121747.19; EXPRESSED IN BONE MARROW, SIGNAL = 1.4; EXPRESSED IN LUNG, SIGNAL = 1.3; EXPRESSED IN FETAL LIVER, SIGNAL = 1.1; EXPRESSED IN HELA, SIGNAL = 2.2; EXPRESSED IN ADULT LIVER, SIGNAL = 1.6; EXPRESSED IN BRAIN, SIGNAL = 1.8; EXPRESSED IN HEART, SIGNAL = 1.4; SWISSPROT HIT: O15370, EVALUE 3.00e-25; NT HIT: gi13654113, EVALUE 0.00e+00; EST_HUMAN HIT: AI805407.1, EVALUE 0.00e+00
gactgcagcgccctggatcgcgacccggacctgcagcctccctcgggcacgtcgcacttcgagttcccggactactgcacccccgaggttaccgagatgatcgcgggggactggcgcccgtctagcatcgcagacctggttttcacctactgagcccaccgtcagcggggcgcgcacgcccccaaaccagctgtttacatacaggaatcaggtattggggcccctcggaggccgaggctggcaccccatctcccgcgcagcctgccccctcctggacgtgcccatcccccctcagatccagacatgcccctcccccgcagacacaccccaaggcagcccaacccccaccccttccccgacacccaagcccctccccacgtcgccccctcctgcacagccaccagcagccagccccctccgatacacctcccgtcctctcctacagacctgcacccctccccccttttgcacacgcccctcctcgtggccggaggacccgccccctcctttgctccggaa

SEQ ID NO: 6974 - DNA, 524 bp, Homo sapiens
  MAP TO AC000066.1; EXPRESSED IN HELA, SIGNAL = 0.87; EXPRESSED IN ADULT LIVER, SIGNAL = 1.4; EXPRESSED IN BRAIN, SIGNAL = 1.1; EXPRESSED IN HEART, SIGNAL = 1.6; EXPRESSED IN LUNG, SIGNAL = 1.3; EXPRESSED IN BONE MARROW, SIGNAL = 1.3; SWISSPROT HIT: Q99996, EVALUE 3.00e-39; NT HIT: AJ010770.1, EVALUE 0.00e+00; EST_HUMAN HIT: BG402933.1, EVALUE 0.00e+00
ttgaggggcaggaccaacatttactttttgtagaattttttaaaagagaaacttctgtcagtcttttggtaatgagatgaagcagtataatttgccagaagctaaaaatgccattcttacattttcattttttttcctaaaggaacaagataaaaaagtagaaaactcaaataaagaagaaatacaggaaaaggagacaatcattgaagaattaaacacaaaaataatagaagaagaaaagaaaactcttgagctaaaggataaattaacaactgctgataaattactaggagaattacaagaacagattgtgcaaaagaaccaagaaataaaaaacatgaaattagagctgactaattctaagcaaaaagaaagacagtcttctgaagaaataaaacagttaatggggacagtcgaagaacttcagaagagaaatcataaagacagccagttcgaaactgatatagtacaacgaatggaacaagaaacacaaagaaagttagaacaactccgggcagagctgg

SEQ ID NO: 6975 - DNA, 508 bp, Homo sapiens
  MAP TO AL009172.1; EXPRESSED IN BONE MARROW, SIGNAL = 1.6; EXPRESSED IN PLACENTA, SIGNAL = 1.9; EXPRESSED IN BRAIN, SIGNAL = 1.4; EXPRESSED IN HELA, SIGNAL = 1.1; EXPRESSED IN ADULT LIVER, SIGNAL = 1.6; EXPRESSED IN HEART, SIGNAL = 1.7; EXPRESSED IN FETAL LIVER, SIGNAL = 1.4; SWISSPROT HIT: P12980, EVALUE 6.20e-02; NT HIT: M55301.1, EVALUE 0.00e+00
cccctatctcgcgcctcgcgtggtgcggtccggctgggccggcggcggcgcggacgcgaccaaggtggccgggaaggggagtttgcgggggaccggcgagtgacgtcagcgcgccttcagtgctgaggcggcggtggcgcgcgccgccaggcgggggcgaaggcactgtccgcggtgctgaagctggcagtgcgcacgcgcctcgccgcatcctgtttcccctccccctctctgataggggatgcgcaatttggggaatgggggttgggtgcttgtccagtgggtcggggtcggtcgtcaggtaggcacccccaccccgcctcatcctggtcctaaaacccacttgcactcatacgcagggccctctgcagatactcggtttgtagtgttgatattcaactcagaaggcattttttggggggaggggggcactggaagcacactcagagacacgaaagtagagaaataaccccctcacagaggggggtgaggtcacacgcagtgcccg

SEQ ID NO: 6976 - DNA, 540 bp, Homo sapiens
  MAP TO AC005263.1; EXPRESSED IN BRAIN, SIGNAL = 1.4; EXPRESSED IN ADULT LIVER, SIGNAL = 1.5; EXPRESSED IN HELA, SIGNAL = 2.6; EXPRESSED IN BONE MARROW, SIGNAL = 1.7; EXPRESSED IN FETAL LIVER, SIGNAL = 1.5; SWISSPROT HIT: P79295, EVALUE 2.00e-22; EST_HUMAN HIT: AI589611.1, EVALUE 0.00e+00; NT HIT: K03474.1, EVALUE 0.00e+00
aagatgcaggtccgtggggccgccctggcgcgcccaccctgctgcgtgcccaccgcctacgcgggcaagctgctcatcagcctgtcggaggagcgcatcagcgcgcaccacgtgcccaacatggtggccaccgagtgtggctgccggtgacccctgcgccgcgcggactcctgccccgagggtccggacgcgccccagctcgcgccccttcccatatttattcggaccccaagcatcgccccaataaagaccagcaagcaaccggctggggtgtccgtgcgtgttagggggcccgtgggacctcccttgccgtctctcctcgcgcacggcccgggtccgccctgtagcgctcgctgtctctcccctgcctgaagcgccccaccaccgtctttcaggccccggacttggtgccgggtccaggcgtaaaggagcaggtgactctgcggccgcagcactcgctttatttcgccagagtcgcggggcgtccagaaggggcccctggactccggcgcggggccggctcagtcccgccccttgcct

SEQ ID NO: 6977 - DNA, 538 bp, Homo sapiens
  MAP TO AL034344.19; EXPRESSED IN LUNG, SIGNAL = 4.3; EXPRESSED IN FETAL LIVER, SIGNAL = 5.3; EXPRESSED IN ADULT LIVER, SIGNAL = 3.6; EXPRESSED IN HELA, SIGNAL =  10; EXPRESSED IN HEART, SIGNAL = 6.8; SWISSPROT HIT: Q12948, EVALUE 6.00e-35; EST_HUMAN HIT: BF940303.1, EVALUE 1.00e-100; NT HIT: AF048693.1, EVALUE 1.00e-113
ctgcacctcaaggagccgcccccgcccggccgccagcccccgcccgcgccgccggagcaggccgacggcaacgcgcccggtccgcagccgccgcccgtgcgcatccaggacatcaagaccgagaacggtacgtgcccctcgccgccccagcccctgtccccggccgccgccctgggcagcggcagcgccgccgcggtgcccaagatcgagagccccgacagcagcagcagcagcctgtccagcgggagcagccccccgggcagcctgccgtcggcgcggccgctcagcctggacggtgcggattccgcgccgccgccgcccgcgccctccgccccgccgccgcaccatagccagggcttcagcgtggacaacatcatgacgtcgctgcgggggtcgccgcagagcgcggccgcggagctcagctccggccttctggcctcggcggccgcgtcctcgcgcgcggggatcgcacccccgctggcgctcggcgcctactcgcccggccagagctccctctacagctccccctgcagccaga

SEQ ID NO: 6978 - DNA, 501 bp, Homo sapiens
  MAP TO AP000533.1; EXPRESSED IN ADULT LIVER, SIGNAL = 1.2; EXPRESSED IN BRAIN, SIGNAL = 1.6; EXPRESSED IN HELA, SIGNAL = 0.64; EXPRESSED IN HEART, SIGNAL = 1.4; EXPRESSED IN LUNG, SIGNAL = 1.1; EXPRESSED IN FETAL LIVER, SIGNAL = 0.99; EST_HUMAN HIT: BG683267.1, EVALUE 0.00e+00; SWISSPROT HIT: Q14694, EVALUE 1.00e-73; NT HIT: gi14775392, EVALUE 0.00e+00
ctggccggtggcctatgtggaagctaagtattcccctcccgctatatctcccctggtttctgaaaagcaggttgaagtcaaagaagggcttgttccagtttcaggggatcctgtagccaggcattggttgctttcccgacaatgtaccacctgatgaagttcattcctctgtattccaaagtgcaaaggccctgtacgtcaacacccaaggtagacagctttgtttggctaatgaatgaatttactaatatgccagtacctccaaaacccggacaagctcttggagataaaatcgtgagggatattcgccctggagctgcctttgagcccacgtatatttagactcctgacagttaacaagtcaagcctgtctgaaaaggatcgacaagaagatgctgaggaatacttaggcttcattctaaatggacttcatgaggaaatgttgaacctaaagaagcttctctcaccaaataatgaaaaacgtgcgatttccaatggccc

SEQ ID NO: 6979 - DNA, 515 bp, Homo sapiens
  MAP TO AC015805.3; EXPRESSED IN ADULT LIVER, SIGNAL = 1.5; EXPRESSED IN FETAL LIVER, SIGNAL = 1.6; EXPRESSED IN HEART, SIGNAL = 1.7; EXPRESSED IN BONE MARROW, SIGNAL = 1.4; EXPRESSED IN PLACENTA, SIGNAL = 2.4; SWISSPROT HIT: P46056, EVALUE 1.20e+00; NT HIT: AF095703.1, EVALUE 8.00e-03; EST_HUMAN HIT: BF800461.1, EVALUE 1.00e-33
aggcccaggagggaccaccctgaaccacagcatcagcagccagactgtcagtgggtctgtcgggaccacccagaccacaggaagcaataccgtcagtgttcagctacctcagccccagcagcaatacaaccatcccaacactgccacggttgcacctttcctgtacaggtaggagctgccacccacctgtgctgcctgggacattgggtaaaagttcctttatagtggattccgggtctgtaagggcagaagctagactgtgctccaggaatacttaagtcagtagctaagaaaccacgtgatgaactcctaagagaagcagacacaatgtgctccagggagcagttcatacagcacaggttggggaaggaacagagaaagctgaagaagggaagtaaaatgtgagctgatcccaggatgcataggaaagtggggaccccaggccttgtagcagcagcttccctgagcagaaagcatgaaggcctaaatatgagggtgggggcggtttggtgtca

SEQ ID NO: 6980 - DNA, 536 bp, Homo sapiens
  MAP TO AF146191.1; EXPRESSED IN ADULT LIVER, SIGNAL = 1.5; EXPRESSED IN HELA, SIGNAL = 0.41; SWISSPROT HIT: P02461, EVALUE 5.10e-02; EST_HUMAN HIT: AA883831.1, EVALUE 1.00e-17; NT HIT: AY028079.1, EVALUE 0.00e+00
ggcgggtgcttgcagattcctccagggccacctgcaggccccggcgctggccccgtgagctcggcccctcccgcgtcccccgcgcccacccacggggccagcgagatccgcagccgtctcaggcttcccctgtcaccccggccctgcgaagcgggtgtgcgccccttagttctccgagcccgccgggagccacctcctcccctgcccctggagggggccacgcccgcagaacgctgggcagagacgaaggaaccgggaaacgtccctttctccacactgaccttcgggtctgctgggtcctctccactccctcccaccctgcccgcgctggtccctggggcccgcagtttcagcaaagttccctgccgcgccgggaagccgtcctgttgcccactctcacccttcctccttttccggcccattctctctccccactgggtctccgacacgaccctctctcctcccggctgtccccgagcccctctctgcttccccagctcagccccctctctgacggcttctccctcccaccccca

SEQ ID NO: 6981 - DNA, 527 bp, Homo sapiens
  MAP TO AL158091.7; EXPRESSED IN BRAIN, SIGNAL = 1.8; EXPRESSED IN HELA, SIGNAL =   1; EXPRESSED IN ADULT LIVER, SIGNAL = 1.5; EXPRESSED IN PLACENTA, SIGNAL =   2; EXPRESSED IN LUNG, SIGNAL = 1.7; EXPRESSED IN HEART, SIGNAL = 2.3; EXPRESSED IN BONE MARROW, SIGNAL = 1.6; SWISSPROT HIT: P36583, EVALUE 1.90e-01; NT HIT: gi14732499, EVALUE 5.00e-01
gcgtcactgcctccgcacagcacgcggccgtgaggcctggacacactggggcagctgagcccccgtaacgagtgaaaggcttacttgagtctcggctgctgaacggccaccccgacgtcggcaggaaggacggcaccggggagctggcccggctgtcatcttccacctgctgtgtgatgtgccggacggtctctttgtttttccgattcttccttcggcccgtgggctgccaggcatcaccagcactctgctctgagaaagagttctgtactgcaccgtccttggcagaaggcagctcgctccctccgtactgagacggtgaaacctgctcttccttgatgcgcagaggcccgtagcccacgtctccaggccatagaggctgtgaagaaacatcatcagggccatcggccttgggctcctgatcctctttcccgtagctgctccctccgtcgtgacagctggcgatggccgagtctccggaagaattggcaggactcgttcgccgtgccagccacggggagatgctc

SEQ ID NO: 6982 - DNA, 502 bp, Homo sapiens
  MAP TO AP001712.1; EXPRESSED IN HEART, SIGNAL = 2.8; EXPRESSED IN BONE MARROW, SIGNAL = 2.8; EXPRESSED IN FETAL LIVER, SIGNAL = 2.3; EXPRESSED IN ADULT LIVER, SIGNAL = 2.5; EXPRESSED IN PLACENTA, SIGNAL = 3.1; EXPRESSED IN BRAIN, SIGNAL = 2.7; EXPRESSED IN HELA, SIGNAL = 1.8; EST_HUMAN HIT: BI200001.1, EVALUE 0.00e+00; SWISSPROT HIT: P57058, EVALUE 2.00e-35; NT HIT: gi14780177, EVALUE 0.00e+00
atggccccatgcagcctctggggagccccaattgtgtgaaaagccgaggccggttccctatgatgggcatcggacagatgttaaggaagcgccatcagagtctgcagccatctgcagataggcccctggaggccagcctgcccccactgcagcccctagcccctgtgaaccttgcctttgacatggccgatggggtcaagacccagtgctaacttgggccagcggggtttggggtatctctagaaaacagcaactgaacagagctccacacatctgtcagggtgtgagcactccaaggcctcgcgtggagcatccttagtcccacctgtagctgaatccacagacccaaagcctgcacaacccaacctcgcttagggacccccagagatgctggaatcgctaggagggttggctccaggggcagccaattcctatcattcagatcttccttcctcccaagtactcaccaaccccttccacttcccacttcccccaggcttgg

SEQ ID NO: 6983 - DNA, 553 bp, Homo sapiens
  MAP TO AC005908.1; EXPRESSED IN ADULT LIVER, SIGNAL = 8.6; EXPRESSED IN PLACENTA, SIGNAL = 8.3; EXPRESSED IN HELA, SIGNAL = 5.7; EXPRESSED IN HEART, SIGNAL = 9.4; EXPRESSED IN BONE MARROW, SIGNAL =  11; EXPRESSED IN LUNG, SIGNAL =  10; NT HIT: U60822.1, EVALUE 3.00e-24; EST_HUMAN HIT: BE420422.1, EVALUE 2.00e-44; SWISSPROT HIT: Q9UGL9, EVALUE 1.40e+00
tggaaattttgcagcctgacaatgcaataaaaaagaaaaatcaattttctgggaaaaaattcaagtccactacagaaatctgcataagtaacgaggagccaaatgttaatcaacaagacaatgaggaaaatgtctccagggcaatgtcagagaccttcacagcagcccctcccatcacaggccaagaggccaaggagggaaaaatggttttgtgggccaagttcagggccccctgctgtgtgtagccccagaaccttgtcccctgaatcccagctgctccatccttggctaaaaggggccaaagtacagctcaagccattgcttcaaaaggtgcaagtcccaagacttggcagcttccaggtggtgttgctcctgtgggtacgtggaagacaagaatggaagtttgggaacctctgcttagatttcagaaatgtatggaaatcctgaatgtccaggcagaagtctgctgcaggggtggagccctcatcaagaacctctgctagggcagtacagaaggaaaatagggggttgcagcccccacacagagtcccca

SEQ ID NO: 6984 - DNA, 530 bp, Homo sapiens
  MAP TO AF196971.1; EXPRESSED IN LUNG, SIGNAL =   1; EXPRESSED IN BONE MARROW, SIGNAL = 1.2; EXPRESSED IN ADULT LIVER, SIGNAL =   3; EXPRESSED IN BRAIN, SIGNAL = 1.2; EXPRESSED IN HELA, SIGNAL = 0.55; SWISSPROT HIT: Q9UBN7, EVALUE 4.00e-22; NT HIT: gi14760227, EVALUE 3.00e-67; EST_HUMAN HIT: AL045483.1, EVALUE 4.00e-67
agggggcaccgagctgatccaaactcctctagcctcgagcacagaccaccagacccccccaacctcacctgtgcagggaactacaccccagatatctcccagtacactgattgggagtctcaggaccttggagctaggcagcgaatctcaggtaaggctcaccacacccaggtaggggcaagaaggggcaagaatcgggcttctctgatacatctcttacttctgcgtgtccagggggcctcagaatctcaggccccaggagaggagaacctactaggagaggcagctggaggtcaggacatggctgattcgatgctgatgcagggatctaggggcctcactgatcaggtgagctcagggagaggctgggactgtggcttccttctcttgccaatttgtgtctccaggtaggagcatgtgatgaataaacatataatggggagatggggtcttcagcttacctagtttcacccacccactccaggccatattttatgctgtgacaccactgccctggtgtccccatttgg

SEQ ID NO: 6985 - DNA, 500 bp, Homo sapiens
  MAP TO AC002039.1; EXPRESSED IN BONE MARROW, SIGNAL = 1.9; EXPRESSED IN FETAL LIVER, SIGNAL = 1.9; EXPRESSED IN PLACENTA, SIGNAL =   3; EXPRESSED IN ADULT LIVER, SIGNAL = 1.9; EXPRESSED IN HELA, SIGNAL = 3.7; EST_HUMAN HIT: AI125162.1, EVALUE 5.00e-51; SWISSPROT HIT: P98161, EVALUE 8.00e-89; NT HIT: gi14776854, EVALUE 0.00e+00
cggtgaccgtccaggtgctggcctgccgggagccggaggtggacgtggtcctgcccctgcaggtgctgatgcgacgatcacagcgcaactgcctggatgcctacgttgacctgcgcgactgtgtcacctaccagactgagtaccgctgggaggtgtaccgcaccgccagctgccagcggccggggtgcccggcgcgtgtggccctgcccggcgtggacgtgagccggcctcagctggtgctgccgcggctggcgctgcctgtggggcactactgctttgtgtttgtcgtgtcatttggggacacgccactggcacggagcatccaggccaatgtgacggtggcccccgagcgcctggtgcccatcactgagggtggctcctaccgcgtgtggtcagacacacaggacctggtgctggatgggagcgagtcctacgaccccaacctggaggacggcgaccagacgccgctcagtttccagtgggcctgtgtggcttcgaca

SEQ ID NO: 6986 - DNA, 515 bp, Homo sapiens
  MAP TO AC009487.3; EXPRESSED IN HELA, SIGNAL = 3.5; EXPRESSED IN ADULT LIVER, SIGNAL =   2; EXPRESSED IN PLACENTA, SIGNAL = 2.1; EXPRESSED IN BRAIN, SIGNAL = 3.8; EXPRESSED IN LUNG, SIGNAL = 2.1; EXPRESSED IN FETAL LIVER, SIGNAL = 2.6; EST_HUMAN HIT: H10108.1, EVALUE 0.00e+00; SWISSPROT HIT: Q16650, EVALUE 5.00e-15; NT HIT: gi11429971, EVALUE 0.00e+00
cgcccgtgtccgagagttcgtccccgctcaagagcgaggtgctggcccagcgggactgcgagaagaactgcgccaaggacattagcggctactatggcttctactcgcacagctaggccgcccctgcccgcccggccccgccgcggcccggacccccagccagcccctcacagctcttccccagctccgcctccccacactcctccttgcgcacccactcattttatttgaccctcgatggccgtctgcagcgaataagtgcaggtctccgagcgtgattttaaccttttttgcacagcagtctctgcaattagctcaccgaccttcaactttgctgtaaaccttttggttttcctacttactcttcttctgtggagttatcctcctacaattcccctccccctcgtctttctcttacctcctacttctctttcttgtaatgaaactcttcacctttaggagacctgggcagtcctgtcaggcagcagcgattccgacccgccaagtctcggcct

SEQ ID NO: 6987 - DNA, 501 bp, Homo sapiens
  MAP TO AF024533.1; EXPRESSED IN LUNG, SIGNAL = 1.7; EXPRESSED IN BONE MARROW, SIGNAL = 2.4; EXPRESSED IN ADULT LIVER, SIGNAL = 1.6; EXPRESSED IN BRAIN, SIGNAL = 1.7; EXPRESSED IN HELA, SIGNAL =   2; SWISSPROT HIT: P23962, EVALUE 3.00e-06; NT HIT: AF041003.1, EVALUE 6.00e-19; EST_HUMAN HIT: AA953588.1, EVALUE 2.00e-07
ggatgcggaggaaggctgggccggctctgctgcatggagaaacaggggtgagagtgtggcagggcggcccccttcagctggggacatgcttctcatcctaacttgacctactgcaaagtgtgggttatttgggagaaccacactgtgtatttccccagcatggcccctgtcagtgaaacattcaggcatcttgtctcaaccaaggaccagggcctgacactacagcttgatgacctggtggcctttggtatacacacagatgtagagggtaataaagggggtgtcagtgaaagtgctccccgacctgccctcctggggctcctttccccgagaatttttttttttttttttttttttttttttagcgacaggatctcgctgttgtccaggctggagcgcagtggcacgatcacggctcactgtacccaccctccacctccctggctcaagcaatcctcccagctcagcctcccaagtagctgggaccacaggtgcatgcca

SEQ ID NO: 6988 - DNA, 524 bp, Homo sapiens
  MAP TO AC010615.5; EXPRESSED IN HELA, SIGNAL = 0.56; EXPRESSED IN ADULT LIVER, SIGNAL = 1.2; EXPRESSED IN HEART, SIGNAL = 1.3; EXPRESSED IN BRAIN, SIGNAL = 1.1; EXPRESSED IN FETAL LIVER, SIGNAL = 1.5; EXPRESSED IN LUNG, SIGNAL = 1.3; EST_HUMAN HIT: AW302149.1, EVALUE 0.00e+00; SWISSPROT HIT: Q06805, EVALUE 1.90e-01; NT HIT: gi4507086, EVALUE 7.80e+00
cagctcctgcgccttctggcgcgtcttttgcagctcctgccgcaggttctgcgagtccgccgagccaccgacggtcagcaccaggtggtggtagcacgcagtcgtcttgttgagcccgtccagcagcgccttgcactcctccctcgccatcgcggtgggctccggctgggcccggccgcccgcgcccgttagcctccccctcagcgcggcaggatgtggctaacccccatcccggccttgggccgcgcggcacgaacgctcttcatggtccgtgactcgctcggcgctaccgccaacgtccacggagcccgcccgggaccctcgacgtgcgcctctgcggacggggcgcgcagagggagccccgttagcggtcccccgctccctcgtccatcctccccaggcgcactccgagtcacacgtcgtgtctctgcaccgccctggcctccacggtggctccctgcgaagctgagggtgcggtccccatcctccgtgggtgccaactccggggcaagcaggctgcagag

SEQ ID NO: 6989 - DNA, 507 bp, Homo sapiens
  MAP TO AC021260.4; EXPRESSED IN ADULT LIVER, SIGNAL = 1.3; EXPRESSED IN BONE MARROW, SIGNAL = 1.3; EXPRESSED IN FETAL LIVER, SIGNAL = 1.4; EXPRESSED IN HELA, SIGNAL =   2; SWISSPROT HIT: P36632, EVALUE 4.80e-02; EST_HUMAN HIT: BF795066.1, EVALUE 2.00e-38; NT HIT: AF303378.1, EVALUE 1.90e+00
tgaatgagggcacgtttcaggtccatgacttactgccacctctgcctttcctgaactccccaaacagctaaacgttctttataaagggcttcaatgctctgaaataggtgctcccaggtggctgttataactcatttcaacctggccgaacaggcatgaataagcctctttattgttggttttatcttcccttcagtgcttgggaatacagaatgatctctaaaagtttacgctttattaacttcatgagccaccagaaaaattccttcagtatcatcaggataatttagcagaggtaccttcagagtcctgatatgattctcagcctcactcttttctttcttaaagtgcttcataagctcctggatattctgttcgtgttttgttttcacactctgcaatgatgatgtgagatctttcagctccctctggtgcacatctcgttccagctttaactgtgtgatgattgtagctgtttcttcatccctggattttgcctgtgcagtg

SEQ ID NO: 6990 - DNA, 506 bp, Homo sapiens
  MAP TO AP001717.1; EXPRESSED IN ADULT LIVER, SIGNAL = 4.5; EXPRESSED IN PLACENTA, SIGNAL = 5.2; EXPRESSED IN BRAIN, SIGNAL = 2.1; EXPRESSED IN HELA, SIGNAL = 6.5; EXPRESSED IN HEART, SIGNAL =   3; EXPRESSED IN LUNG, SIGNAL = 3.8; EXPRESSED IN BONE MARROW, SIGNAL = 7.6; SWISSPROT HIT: P46782, EVALUE 8.00e-34; EST_HUMAN HIT: BE621484.1, EVALUE 1.00e-103; NT HIT: gi16162724, EVALUE 1.00e-100
tttgaaaggggcgggggttgcatgtaccatttttgttttcattctgctagtaaaatagtcacttgactacaccaaattgcaaagaaggctggaaaatggggtttcagtactaaggaaggaaaactagatattaggggacaattagaagtttccaaatctcatcactttttttgggggggtgggggaggcatcccaaagggcagactggtttattaggcagcagccaggaaaatcagcggttggacttgtccccacactccagctcatccttcttgttgatggcataggagctggaggaggccttggtggcattgatgagctcatccgccaggcactcagcaatggtcttgatgttccagaaggcagcctcacgagtgcctgtgcacagcagccagacgacctgattcacacagtgcagtggggacatgtccacagcctgttgtctcacagtccctgctcgcccaatgcatgtggagtcctcccagggaccactgttgatgatggcg

SEQ ID NO: 6991 - DNA, 587 bp, Homo sapiens
  MAP TO AL031387.4; EXPRESSED IN PLACENTA, SIGNAL = 1.4; EXPRESSED IN BRAIN, SIGNAL = 1.3; EXPRESSED IN ADULT LIVER, SIGNAL = 1.6; EXPRESSED IN HEART, SIGNAL = 1.7; EXPRESSED IN BONE MARROW, SIGNAL = 1.4; EXPRESSED IN LUNG, SIGNAL = 1.3; EXPRESSED IN FETAL LIVER, SIGNAL = 1.7; NT HIT: gi4504218, EVALUE 1.00e-125; SWISSPROT HIT: P51841, EVALUE 3.00e-37; EST_HUMAN HIT: W78949.1, EVALUE 8.30e-01
cactcccttctcccatccgggtgcttgtaactgtcatgaaatatttccagtgggctcatgctggagtcatttcctcagatgaagacatttgggtgcatacagccaatcgagtcgcaagtgctcttcggagccacggcttacctgtaggggtcgtcctgaccacaggacaagacagccaaagcatgcggaaagccctccagaggattcaccaggcagacagaattcgcagtgagtgctttctcccgctgaaatttaaacgtgacttcagggaaagagattacaatctccaaaaggtttcctaccctcacaccctagggtagcacatcccttcccatttctttacacatttgccctttttcactcacacacaggtcccaagactgccctgcttcaacagagcctattttatgaactgaataacagtacaaagaactctgtgcttcatatgcctgtgaatgctagtgcctgctcttagcgcctgagtgaagaatggtgtcaagagcactgtagccatacatcctttctttctgcccttaggaccttggtagcttcgaaagtgccaaaatggtatggggaggcgcgggtct

SEQ ID NO: 6992 - DNA, 503 bp, Homo sapiens
  MAP TO AC010525.4; EXPRESSED IN ADULT LIVER, SIGNAL = 1.7; EXPRESSED IN HELA, SIGNAL = 1.2; EXPRESSED IN PLACENTA, SIGNAL = 2.5; EXPRESSED IN LUNG, SIGNAL = 1.4; EXPRESSED IN HEART, SIGNAL = 1.8; EXPRESSED IN BONE MARROW, SIGNAL = 2.1; NT HIT: AE001100.1, EVALUE 1.20e-01; SWISSPROT HIT: P25777, EVALUE 5.00e-03; EST_HUMAN HIT: AA772158.1, EVALUE 1.10e-02
gtgcaccctgctgtccgtgcaccctgctgtccgtgcagctgttagaggacctgcatgccgtattgagtcggggcaggggccgcattcctgggtgtactgttcgttcagggtggtcaaggtcaagaggtggcagtgagcaggtgagtgagcgaggtggtggggccagggctgagtggcaggccttggagggctgcctgggtcttagaacgaccgcttattttgagccagatgggagggaagcaatactgagaggcctccagggtggtcacgcctggcagatggaaatgaccccacatagtgaggttgggggtgggtgcggaggcacagcaggtacttcccctggccctggcttccctgctgagccctgcagggcaggatgtggatcagcaggagggcagagagggtgctgtggacaggagggcttgccgggagctggcagggttggtcttgccaaagcgatgccacagccaggtttgtcaggaccaaggctggctctgcagggc

SEQ ID NO: 6993 - DNA, 595 bp, Homo sapiens
  MAP TO AC004821.2; EXPRESSED IN ADULT LIVER, SIGNAL = 1.2; EXPRESSED IN BRAIN, SIGNAL = 1.4; EXPRESSED IN BONE MARROW, SIGNAL = 0.9; EXPRESSED IN HEART, SIGNAL = 1.2; EST_HUMAN HIT: BG703535.1, EVALUE 1.00e-79; SWISSPROT HIT: Q10010, EVALUE 2.00e-03; NT HIT: gi14735729, EVALUE 5.00e-35
ggacccagtgccctcccctctctgtgccatgtgggttgggtagggggtgaagggtcatccactcacatattccttcacgttttttgtcttcacggccttgtaggaagaataggctgggtacagggtgccaaagatgagcctagggaggcaggcatggttactgggcctctcagccaagggcagtggcctctccctcccagctccgcatcagcccctgggtaagtaatgggaagagagacagaactccccgctggactgatgaactcaggtcaggggttaaggtcaaagcagcatggaacatgcccagccaggtagggtgatgccccctccccgctccactgttcagtttttctctagccccggaggcagggaaaggcccagaggccagagggtccaatgtagttccttgcgccatgatccttggttacacacaaatatgtcatggagactgggagtcaggtcactgccacagggtgtcttccttcttgacctcatgcccattcacacccatctgcccttaccctccacctccctcagagccaggctctgcgagggaacctgacaccacctaacagggcaccctacctggcaggca

SEQ ID NO: 6994 - DNA, 543 bp, Homo sapiens
  MAP TO AL031186.8; EXPRESSED IN LUNG, SIGNAL = 1.4; EXPRESSED IN HEART, SIGNAL = 1.6; EXPRESSED IN BONE MARROW, SIGNAL = 1.7; EXPRESSED IN FETAL LIVER, SIGNAL =   1; EXPRESSED IN HELA, SIGNAL = 0.97; EXPRESSED IN ADULT LIVER, SIGNAL = 1.3; EST_HUMAN HIT: BF984066.1, EVALUE 0.00e+00; SWISSPROT HIT: P15595, EVALUE 3.40e-01; NT HIT: Y07848.1, EVALUE 0.00e+00
cagaagccagggcgagcagggctgaggcatgcaggaatctcagcgtgcccaggtggcactcctgctgccagcccacagtgggcaggagcagcaggctcaggagcaggcctggcagggccgtgtggcccagggcatgggtcagcagccggtgcactgggagagagaaggggcttatgtgccaggttagtggccccaacatccaaggctgtcccaggtgtgccaggttgaaggttacgctacaccagggccacctgctgagcccacctcccctccccaggagccagtcttcccacagccagcacttaatcattggtggaagggaccaaggacttccaaacactgtggctacgcctctgtggtattaaacagaatacactggacgtgccactcagtcttttcactgacaacccgctacagagcactcactatgtcccagacaccatgaaggtactctgcttctgtatttactaaatcatacctggctgagagcatgaaatggcctgcttcaatcctggagctaccccattccctcaagctgtgtga

SEQ ID NO: 6995 - DNA, 520 bp, Homo sapiens
  MAP TO AL161722.2; EXPRESSED IN ADULT LIVER, SIGNAL = 1.3; EXPRESSED IN BRAIN, SIGNAL = 1.3; EXPRESSED IN HELA, SIGNAL = 2.3; EXPRESSED IN BONE MARROW, SIGNAL = 1.8; EXPRESSED IN LUNG, SIGNAL = 1.2; EXPRESSED IN HEART, SIGNAL = 1.4; EXPRESSED IN FETAL LIVER, SIGNAL = 1.2; NT HIT: M77481.1, EVALUE 2.00e+00; EST_HUMAN HIT: BF222026.1, EVALUE 1.80e-01; SWISSPROT HIT: P06564, EVALUE 4.80e+00
ttggtcttgggggcacagccccacattaccacaggggaagtggcacaggccctatcaggtgccaagttactggcacttctggccatcaactgatgacattaccctcctcagaacaaaaggagctgtactgagcccaactacaagtgtctactgtgaacctgaaaaattctcacgttgggttggctggctgcaccctgagaattctcacttcatccttcaggttcttggtagacccagaaaacacaatatcagatctgtgaggctctataacactgctgtcaggagaagtctataggcagtggcttccatcagagctaccgcagttgagtttaccagctgaggacatttacaccctttctctctcccttaggcagtgattcttcattgcctgccctcctgtccacactcctgcctactgccacccacaagggtcatcatgtctcaggatcaggagagtccacgatgcacacatgatcagcaccttcagaccttcagtgagacccagagcctggaggttgca

SEQ ID NO: 6996 - DNA, 548 bp, Homo sapiens
  MAP TO AL121997.7; EXPRESSED IN LUNG, SIGNAL =   1; EXPRESSED IN HEART, SIGNAL = 1.3; EXPRESSED IN BONE MARROW, SIGNAL = 1.5; EXPRESSED IN FETAL LIVER, SIGNAL = 1.2; EXPRESSED IN HELA, SIGNAL = 1.1; EXPRESSED IN ADULT LIVER, SIGNAL = 1.2; EXPRESSED IN BRAIN, SIGNAL = 1.1; SWISSPROT HIT: Q99698, EVALUE 5.00e-30; NT HIT: gi15298936, EVALUE 7.00e-99; EST_HUMAN HIT: AI275101.1, EVALUE 1.00e-98
tggcctccttccagcgaagccacagcactattgcaagccttgggctagcttttccttcacagaacggatctgcagctgttggccgttggccaagtcttgttgatagaaacactgatgattgggaaaactttgcctattctcttggttatgagccaaattacaaccgaactgcaagtgctcacaggtacttatgtgtttttgtacactcctcccacctttattttactattctttaaagactctctacccctctggaaacgtcttcattatgccacttataatacaacaaacagaaaagtttatttctttatatacataataataacaaacagaaagatatatttttccttattttaagactagataatattgaattccatatttaaccaaaatctaaaccataagtagcacttaaaaaatatatattgtggtttaattccttatagttattaaggaaaattcttcaggacagagaaacgataggatttatctagagctttgactcatgagaatgattctgtccacttggtgctcatgtgaaggtggga

SEQ ID NO: 6997 - DNA, 531 bp, Homo sapiens
  MAP TO AC005630.1; EXPRESSED IN HEART, SIGNAL = 3.1; EXPRESSED IN BONE MARROW, SIGNAL = 2.7; EXPRESSED IN LUNG, SIGNAL = 2.8; EXPRESSED IN FETAL LIVER, SIGNAL = 2.6; EXPRESSED IN ADULT LIVER, SIGNAL = 2.4; EXPRESSED IN BRAIN, SIGNAL = 2.6; EXPRESSED IN HELA, SIGNAL = 1.6; EST_HUMAN HIT: BF924611.1, EVALUE 6.00e-97; SWISSPROT HIT: Q00657, EVALUE 8.00e-39; NT HIT: gi16161051, EVALUE 0.00e+00
aggcaggggctgtgggaagccttgctgacgcacaacatggtggctggctgcagactggaggaggtggaggagtatgaggacaatgcctatggccattatgaagctttctccaccctggctcccgaggcttggctgtccgtggagctagctgagccatgcgtgcctgagccagggctacctcctgtctttgccaatttcatccagctgctatcagtgcagtggtggtgaccgagggtggcacagcctggcttgagtggtggcatgtgcagcccatgctggcactgatggaggctgaactgcgtaaatcccaggtgctgttcagcgtgacctgaggggcacactacagcgagctcgagctggatgtcctgggtgcccaggcatgaaaaatgttcacccttctggacgtggtgaactgcaaggcccgcttcattcacgatggccctgaggacacctctgaccagctggtgctggaggtgtcagtgatggcttgggtgcctatgccctcatgcctgcggaggggccaaacagacc

SEQ ID NO: 6998 - DNA, 524 bp, Homo sapiens
  MAP TO L39891.1; EXPRESSED IN HELA, SIGNAL =   3; EXPRESSED IN ADULT LIVER, SIGNAL = 1.7; EXPRESSED IN BRAIN, SIGNAL =  12; EXPRESSED IN BONE MARROW, SIGNAL = 3.9; EXPRESSED IN LUNG, SIGNAL = 4.4; EST_HUMAN HIT: BF528554.1, EVALUE 1.00e-88; SWISSPROT HIT: P98161, EVALUE 1.00e-39; NT HIT: L43610.1, EVALUE 0.00e+00
cctgctggtggctgagctgcagcgtggcttctttgacaagcacatctggctctccatatgggaccggccgcctcgtagccgtttcactcgcatccagagggccacctgctgcgttctcctcatctgcctcttcctgggcgccaacgccgtgtggtacggggctgttggcgactctgcctacaggtgggtgccgtaggggtcggggcagcctcttcctgcccagcccttcctgcccctcagcctcacctgtgtggcctcctctcctccacacagcacggggcatgtgtccaggctgagcccgctgagcgtcgacacagtcgctgttggcctggtgtccagcgtggttgtctatcccgtctacctggccatcctttttctcttccggatgtcccggagcaaggtgggctggggctggggacccgggagtactgggaatggagcctgggcctcggcaccatgcctagggccgccactttccagtgctgcagccagagggaaaggcgtccaccaaaggctgctcggga

SEQ ID NO: 6999 - DNA, 521 bp, Homo sapiens
  MAP TO AL359400.1; EXPRESSED IN ADULT LIVER, SIGNAL =   2; EXPRESSED IN HELA, SIGNAL = 3.8; EXPRESSED IN PLACENTA, SIGNAL = 2.2; EXPRESSED IN BRAIN, SIGNAL = 2.2; EXPRESSED IN HEART, SIGNAL = 2.2; EXPRESSED IN BONE MARROW, SIGNAL = 2.1; EXPRESSED IN LUNG, SIGNAL =   2; EXPRESSED IN FETAL LIVER, SIGNAL = 1.5; EST_HUMAN HIT: BF953661.1, EVALUE 0.00e+00; SWISSPROT HIT: P03356, EVALUE 9.00e-08; NT HIT: X57147.1, EVALUE 0.00e+00
cctgatttggactgggtgggcattttttgcttttccaaattgtccttccaatgcccagacttcagggtttattccctcttcaggtaggggacaacaaatgggtaacttgttccccatattcatgtagataatagctccagctttggctaatgtatccctctctaataagggtgtgggactttcaggcataacaagaaaggcatgtgaaaagagaaagtctcccaattacgactgaggagttgggagaaatacctggttacaggctgtcccaggattcctcagatggtaatggaccttgaggacagtcgtccaggacaggagattaacaatgagaaggctgcgccagtgtctaggaggaagtcaatttcctggccctcaatggttaaaggtacctggggctgagtgagggtgatgacatgagctggcgcttgttccgggcaccctcagtcctgttgttggatcatctggttgggggcctctgacccagagaacctttgttctctggggcagtgcaccttcca

SEQ ID NO: 7000 - DNA, 532 bp, Homo sapiens
  MAP TO AC008272.1; EXPRESSED IN HELA, SIGNAL = 1.2; EXPRESSED IN ADULT LIVER, SIGNAL = 1.4; EXPRESSED IN BRAIN, SIGNAL = 1.3; EXPRESSED IN HEART, SIGNAL = 1.6; EXPRESSED IN LUNG, SIGNAL = 1.4; EXPRESSED IN BONE MARROW, SIGNAL = 1.3; EXPRESSED IN FETAL LIVER, SIGNAL = 1.4; EST_HUMAN HIT: BF369415.1, EVALUE 0.00e+00; NT HIT: gi15296247, EVALUE 4.00e-23
accgctaccccgggaaacccccacaacaatttcaacatatactccacacctaccgaaatattgaaggaagtgacagatttccactggaaactattctctgacccatttatattatttcccctactcatcaatttactgaatttactttactttaggctcttaacaatggctaagaagaaacaacctacttcagaaattcaagggactatctgaaattgtcaaaacagttactaaagggataaaaacttcagaaatattgtttacaatataagcattatgagagtaagtgttacaaagctgaaaagatggaactagtaaccctcgtttcagtgctactgccacgagacagttagcactcaaaaggtgaactggtaaccacgtcaacagcaatggagtaacaataagagatagccaatggaactggaaaaagagagaatacagagcagagcgaacagcacgttaaaaatgcttaccagtttgaagtcttgaatgctacagatgaaatacggtgtgtttggcctccgactcgcga

SEQ ID NO: 7001 - DNA, 526 bp, Homo sapiens
  MAP TO AC004080.1; EXPRESSED IN HELA, SIGNAL = 3.4; EXPRESSED IN ADULT LIVER, SIGNAL = 1.9; EXPRESSED IN BRAIN, SIGNAL = 1.5; EXPRESSED IN BONE MARROW, SIGNAL = 1.4; EXPRESSED IN FETAL LIVER, SIGNAL = 1.8; EXPRESSED IN LUNG, SIGNAL = 1.8; NT HIT: U82827.1, EVALUE 0.00e+00; SWISSPROT HIT: P31271, EVALUE 3.00e-23; EST_HUMAN HIT: AA160421.1, EVALUE 8.00e-41
cctttctgggtgcccgtcccaatactcgaagcttctacactgaagccatttttgagagaatgaatagggaggggcaatttggggagctgttttctggtcaatttctcatccttaaattggtgtcaggggctggggagggcggggcgcagagggagagggaagctagccgaggtctccacaagccacccctcacccagggagagccagggaccagctcaactcgaggcagtgcaggcagacccagccagccatgctcgggctcccaggggtgcagagccgctagggcagaccaggaagagaacagaaacgcacccgggatcgcccgggtgcgagcggagaagaagctggagcagagccggaagaccagggctgggaataggtcgtcatttaccgggcagagtggacttccagaggtggggaggctgcgcctgctctttggggcagtacatttggccgttccagccgttgggcagcgcccagggctggtagctttccatgggaagacccaagggttcgtggcgcgact

SEQ ID NO: 7002 - DNA, 529 bp, Homo sapiens
  MAP TO AL157393.1; EXPRESSED IN PLACENTA, SIGNAL = 1.6; EXPRESSED IN BRAIN, SIGNAL = 1.2; EXPRESSED IN HELA, SIGNAL = 0.93; EXPRESSED IN ADULT LIVER, SIGNAL = 1.3; EXPRESSED IN BONE MARROW, SIGNAL = 1.3; EXPRESSED IN LUNG, SIGNAL = 1.3; EXPRESSED IN FETAL LIVER, SIGNAL = 1.3; EST_HUMAN HIT: AW271332.1, EVALUE 4.00e-92; SWISSPROT HIT: O75154, EVALUE 6.50e-02
gcgttcacccacaggagggggcccccgcccaccgcgcccagatcccctggctcatagcccggggggtgcgcggtggcctgggcctggccgggcggggccgaggaggggcccaggtcgtcgcagtaggtggccatgtccagccgcgcccgggcctgggccagcggtgccgcaccgaaactcactggcgacccatccagcttggccgccagcagcgcccgggtgcgaccagcccggcccagccctccgccctttaaacaccgtcggggccagagcccatggagagtgacggtggcgagcccctcccctggcagccctggaggagcgaaatccttgtcctcgccctggtgtcagttttccgccccgcccaggcctgacacgtcctggaccggacgcccctctgattcccccttcctcctttgtgcgatccgtcccgagtccacagtcgctcgcggtcttggttgcagggaccctaagtccgtagcctcgtctggcttcacgggccccgcagccccgactgccctggaccgta

SEQ ID NO: 7003 - DNA, 508 bp, Homo sapiens
  MAP TO AC008567.3; EXPRESSED IN ADULT LIVER, SIGNAL = 2.8; EXPRESSED IN BRAIN, SIGNAL = 2.3; EXPRESSED IN HELA, SIGNAL = 5.3; EXPRESSED IN HEART, SIGNAL = 1.5; EXPRESSED IN BONE MARROW, SIGNAL = 2.5; EXPRESSED IN LUNG, SIGNAL = 2.8; SWISSPROT HIT: Q13360, EVALUE 1.00e-60; EST_HUMAN HIT: BF973948.1, EVALUE 0.00e+00; NT HIT: gi13129115, EVALUE 0.00e+00
tgcgaacccacactggggagaaaccatatgaatgtaaggaatgtgggaaagccttcaattattccaactcatttcagatacatggaagaactcacactggagagaaaccctatgtatgtaaggaatgtgggaaagccttcactcagtactcgggccttagtatgcatgtacgatctcacagtggagacaagccctatgaatgtaaggaatgtgggaaatccttccttacatcctcacgccttattcaacatataagaactcacactggagagaagccttttgtatgtgttgaatgtgggaaagcctttgcagtttcctcaaatcttagtggacatttgagaactcacactgaagagaaggcctgtgagtgtaagatatgtgggaaagtatttgggtatccctcatgtcttaataatcacatgcgaacgcacagtgcccagaaaccatacacctgtaaggaatgtgggaaggcttttaactattccacccaccttaaaattcacatgcg

SEQ ID NO: 7004 - DNA, 547 bp, Homo sapiens
  MAP TO AL078591.18; EXPRESSED IN ADULT LIVER, SIGNAL = 1.4; EXPRESSED IN BRAIN, SIGNAL = 1.3; EXPRESSED IN HELA, SIGNAL = 1.5; EXPRESSED IN BONE MARROW, SIGNAL = 1.3; EXPRESSED IN LUNG, SIGNAL = 1.6; NT HIT: gi14755993, EVALUE 3.00e-79; SWISSPROT HIT: P09144, EVALUE 3.90e+00; EST_HUMAN HIT: BI870260.1, EVALUE 5.00e-79
tcccgtctgcaccacgagagtctccttgtaatgttaaatattcttccaaaagtaaatttgatgccattacaaagcagccaagcagtacttcttacaacttcacttcttcgatttcctggtatgaaagttcaccaaaacctcaaatacaagcgtaagtaatggaacgtaatagtacctgctgctaaatatatacatatatatatacacacacacacacatacacacacacacacacacacacacacacacacacacatatatatataaaatcatagatagtgctaaaggattgagtgtctattttgttgtctggtttctgtaatacaaaagtgcttctttgatgactatccgaaatggagaaatgaacataatatacccttggccagacagacctatagttgctgaatgatcgtgctgttctgctgttctataggatagacattcctgatacagattttccaatggtagttttgtgttagaagtatggaataactgagcttaaaacccttttttcatcagtccctcatttctcctccattaacttcca

SEQ ID NO: 7005 - DNA, 500 bp, Homo sapiens
  MAP TO AJ003147.1; EXPRESSED IN ADULT LIVER, SIGNAL = 1.3; EXPRESSED IN HELA, SIGNAL = 1.4; EXPRESSED IN BONE MARROW, SIGNAL = 1.3; EXPRESSED IN LUNG, SIGNAL = 1.3; EXPRESSED IN HEART, SIGNAL = 1.6; NT HIT: gi14777849, EVALUE 0.00e+00; EST_HUMAN HIT: BI064016.1, EVALUE 0.00e+00; SWISSPROT HIT: P30754, EVALUE 1.30e-02
catcgcgcatcagagcctgcacgccaagatggcccagcccgtggggtgagcagctggcttggccggaaacccgggggaggcccagccacggcacatcctgctttgttcaccactgggactctccttccatctgtggccacctcccgggctgtccgaggaccccaggtacctcacactcggaactcgcctgccctgcttggctctgaagacctgcccagcgctcaaagggaacggaagccttcccctcccgcccccgatcttgtcctctttcccccttctgcgcctagcgttcctcttcccctctagtttcctggagccccaacacattcctggcagggacagcagggtggcaaggactcaggtctaggtcccttcccagaagcccccgagcctcatttgactgtgtggctctttggcccccaccctgtggggtgggtccatgggtcaggcctctgccctaccaacctgtgcctttcagtgggcgtggaggactggccttg

SEQ ID NO: 7006 - DNA, 514 bp, Homo sapiens
  MAP TO AC005069.2; EXPRESSED IN BONE MARROW, SIGNAL = 1.4; EXPRESSED IN LUNG, SIGNAL = 1.5; EXPRESSED IN HEART, SIGNAL = 1.6; EXPRESSED IN FETAL LIVER, SIGNAL = 1.5; EXPRESSED IN ADULT LIVER, SIGNAL = 1.3; EXPRESSED IN BRAIN, SIGNAL = 1.6; EXPRESSED IN HELA, SIGNAL = 2.3; EST_HUMAN HIT: AL044675.1, EVALUE 0.00e+00; NT HIT: gi14755656, EVALUE 0.00e+00; SWISSPROT HIT: Q17308, EVALUE 3.00e-03
tgttccaccgcagtccgacctaagtaattcattaggaactccatcagtgcctccaaaagctccagttcagaaattcagctgccaggtcgagggatgtactcgaacctataattcttcacagagtattgggaaacacatgaagacagcacaccctgaccaatatgctgcatttaaaatgcagcgcaaaagtaaaaaaggtcagaaagctaacaacttaaatacaccaaataatggaaagtttgtttattttttgccatcaccggtgaacagctcaaatccattttttacatcacagaccaaagccaatgggaatcctgcttgttcggcccagttgcagcatgtctcgccacccatttttccagctcatttagcaagtgtgtcaactccattgttgtcctcaatggaaagtgtcataaatccaaatataacttctcaggataaaaatgaacaaggtggtatgttatgttcccaaatggaaaatttacctagtactgccttgccagcacaaatggaa

SEQ ID NO: 7007 - DNA, 500 bp, Homo sapiens
  MAP TO AP001730.1; EXPRESSED IN ADULT LIVER, SIGNAL = 4.1; EXPRESSED IN PLACENTA, SIGNAL = 5.1; EXPRESSED IN BRAIN, SIGNAL = 7.6; EXPRESSED IN HELA, SIGNAL = 4.2; EXPRESSED IN LUNG, SIGNAL = 4.9; EXPRESSED IN BONE MARROW, SIGNAL =   6; EXPRESSED IN HEART, SIGNAL = 4.4; EXPRESSED IN FETAL LIVER, SIGNAL = 3.6; EST_HUMAN HIT: BE420422.1, EVALUE 1.00e-111; NT HIT: AL163210.2, EVALUE 1.00e-97; SWISSPROT HIT: P18128, EVALUE 1.10e-01
tccccatgctgtgtgcagcctagggatttggtgccctgcatcccagccgctccagctgtggctgaaaggggccaatgtagagctcaggctgtggcttccgtggatgcaagccccaagccttggcagtgtggtgttgagcctgcaggtgcacagaagtcaagaactgaggtttggacacctctgcctagatttcacaggatgtatggaaatgcctggatgtccaggcagaattttgctgcaggggcaggaccctcatggaaaacctctactagggcagtgcagaagggaaatgtggggttgaagcccccacacagagtccctactggggcaccaccttgtgcagctgtgagaagagggccaccatcttccagaccccagaatggtagatccactgacaggttgcactgtgcacctggaaaaactacagacattcaacaccagcatgaaagcagctgggagggaggctgtaccctgcagagccacaggggcagagctgtcca

SEQ ID NO: 7008 - DNA, 536 bp, Homo sapiens
  MAP TO AL132639.2; EXPRESSED IN BRAIN, SIGNAL =   8; EXPRESSED IN HELA, SIGNAL =  11; EXPRESSED IN ADULT LIVER, SIGNAL = 6.3; EXPRESSED IN BONE MARROW, SIGNAL =  10; EXPRESSED IN FETAL LIVER, SIGNAL = 8.9; EXPRESSED IN LUNG, SIGNAL = 7.4; EXPRESSED IN HEART, SIGNAL = 6.7; NT HIT: gi14572198, EVALUE 1.00e-04; SWISSPROT HIT: P23959, EVALUE 5.10e-02; EST_HUMAN HIT: BG433358.1, EVALUE 9.00e-50
tgggaggctgaggagggaggattgtttgaatcctggagttcaagcaagctgtgagctctgctccagcctgggagcagagcaagaccctgtctctaaaaacaaacaaagaaacaaaaaaccataatgtaaaaggtttttcatttaggtttacataattagccttgaagtcagttgtgatacaagtgtttgagtttttgctctgctgttgagctagtcatgtgtcttgggaatatcacaatcatccattttaaatgactcagggagaaacaaggagctctagtacattcatgttaatcatatatatattttttccttttaggaatctgactttctttgtcttcttggagtaagttacacatttgacaatgaagatagtgaattaaacggtgattatggtgaaaatatatatccttatgaagaagataaagatgaaaaatctagtatatatgaaagtgattttcagatagaacctggattttatgcaacttatgaaagtactttgtttgaagaccaagttccagcattagaggctcctg

SEQ ID NO: 7009 - DNA, 508 bp, Homo sapiens
  MAP TO AL135960.1; EXPRESSED IN LUNG, SIGNAL = 2.1; EXPRESSED IN ADULT LIVER, SIGNAL =   2; EXPRESSED IN PLACENTA, SIGNAL = 2.8; EXPRESSED IN HELA, SIGNAL = 1.3; EXPRESSED IN HEART, SIGNAL = 2.6; EXPRESSED IN BONE MARROW, SIGNAL = 4.2; EST_HUMAN HIT: R08058.1, EVALUE 1.00e-121; NT HIT: AJ131016.1, EVALUE 0.00e+00; SWISSPROT HIT: P17542, EVALUE 2.00e-16
agctccctggatggggcagccagcccggacagctacacggaggagcccgcgcccaaacacacggcccgcagcctccatcctgccatgctgcctgccgccgatggagccggccctcggtgatgggtctgggccaccaggatcagccaggagggcgttcttaggctgctgggatggtgggcttcagggcaggtggggtgagaattgggcggctctgaagcaaggcggtggacttgaactttcctggatgtctgaactttgggaagcctttactgaccctggggctggcttttctgtttcctgtaccagtaggagatcagaaaaatggagcaaagtggtaggtactttttgtgaagacggcacggtcttccctcttccctcagtcccaaatccttcccaagtaagaggctggagttgtcactgcttttggcctggagtttgggatccctgtctttcctaagacctggggttgtcagctctcatctgaggcatccagcagtctctgccttgc

SEQ ID NO: 7010 - DNA, 521 bp, Homo sapiens
  MAP TO AL138976.3; EXPRESSED IN LUNG, SIGNAL = 1.2; EXPRESSED IN ADULT LIVER, SIGNAL = 1.5; EXPRESSED IN HELA, SIGNAL = 1.5; EXPRESSED IN BRAIN, SIGNAL = 1.4; EXPRESSED IN BONE MARROW, SIGNAL = 1.3; EST_HUMAN HIT: AW170192.1, EVALUE 5.00e-36; SWISSPROT HIT: P17964, EVALUE 6.30e+00
cagtggagttggagccgccccgggcgggattaagccgggtggaagcaagtccaggagacgcccgcccctcccccgcgccacgggactcgccagccccgccacgccctgacccctcgtctctcctcccctcccctcctcctcttttctcctctcttgccctcccccatcccctccctcctctcccctccctgcccctgcccggacagtccccgtacgccgttccctgcgctcccaggccccttccccttcctccttcccctccccttcctccctctcctcccctccccgccgcgtcccggacactgcgggctggtcccgcgccccgccagggctgccggggtgtgctgctggggagcgtgacgtgggcaggaccacgctggacacgcagttcgcgtgcggccgctccccgagcagtgcgcggcgtgggcggaggagcggctccgcgaggagatcgaggcaaacgcggcgcccgcgctgctggaaatcgtggacgcggcggacgccgagcacctggtcacgct

SEQ ID NO: 7011 - DNA, 592 bp, Homo sapiens
  MAP TO AC010150.2; EXPRESSED IN PLACENTA, SIGNAL = 2.4; EXPRESSED IN BRAIN, SIGNAL = 2.3; EXPRESSED IN HEART, SIGNAL = 2.7; EXPRESSED IN BONE MARROW, SIGNAL = 2.7; EXPRESSED IN FETAL LIVER, SIGNAL = 3.2; EXPRESSED IN HELA, SIGNAL = 2.2; EXPRESSED IN ADULT LIVER, SIGNAL = 2.4; EXPRESSED IN LUNG, SIGNAL = 2.4; EST_HUMAN HIT: BF885429.1, EVALUE 4.00e-15; NT HIT: gi14730709, EVALUE 1.00e-112; SWISSPROT HIT: P37353, EVALUE 1.10e+00
tgggtggctggcttgcttgcttttctcttctttctcaaacataaatacactttttaaaaatgcaaataccatagaaaactttgtatcataataagcacttgtaatagtggcattaggagggagttgagataggaaaagaggtgtggggatttggggtgagagtggaagcagtcgtctttggcaccaatagaaaaagtggatgcaaggaccctagagacaaactagtattgctgtctccaaggtttggcctctcggccatagaccacccatgtttgtcacaggtactgtagtgttcatctgtttttaaaatgtgagggctaatgaagttttgttattcttacaaatgaaaactaagctctgttgtttttttcccctctacttctttcagatcccggtctccagaatctcccccatgccgtttcatccatcgcaggtctctcccagggctcgttttccagtctccatcactagtcctaacagaacaggagccagaactcttgcagacatcaaagcaaaagcccaactggtcaaagcacagagggcagcagctgccgctgccgccgcagctgctgcagccgcctcagttggaggg

SEQ ID NO: 7012 - DNA, 519 bp, Homo sapiens
  MAP TO AL049849.1; EXPRESSED IN ADULT LIVER, SIGNAL = 8.5; EXPRESSED IN PLACENTA, SIGNAL =  14; EXPRESSED IN HELA, SIGNAL =  12; EXPRESSED IN LUNG, SIGNAL =  10; EXPRESSED IN HEART, SIGNAL = 8.6; EXPRESSED IN FETAL LIVER, SIGNAL =   9; EST_HUMAN HIT: AI373043.1, EVALUE 1.20e-02; NT HIT: AL163201.2, EVALUE 1.00e-127
ccaccaccaccaccaccaccactaccaccatcactaccaccacgaccaccaccaccaccaccactaccactaccactaccaccaccaccatcaccactaccaccaccaccactaccaccaccaccactaccaccaccaccaccactaccactatcaccaccaccaccatcaccactaccaccaccaccaccagcatcaccaccaccaccaccatcaccaccatcaccaccaccaccaccaccaccaccaccaccgctaccaccaccaccacactgcactgatccaccactagccaatgacttctttagagatcttgtctttgggtatttccagatactgtcctatacagtaacagatacattaaaaataatagttttaaaaatttattaatcacagctggaaaatacagtgaacctactgactacactggaaactggtaaagaaaggtaaacaagcaaacatttattctgcctttcccatatgaacagttacactgggcaaccaagtaagaggtgatgg

SEQ ID NO: 7013 - DNA, 514 bp, Homo sapiens
  MAP TO AF134726.1; EXPRESSED IN ADULT LIVER, SIGNAL =  11; EXPRESSED IN BRAIN, SIGNAL = 9.6; EXPRESSED IN HELA, SIGNAL = 3.6; EXPRESSED IN BONE MARROW, SIGNAL =  31; EXPRESSED IN LUNG, SIGNAL = 1e+02; EXPRESSED IN HEART, SIGNAL =  17; NT HIT: M59828.1, EVALUE 0.00e+00; SWISSPROT HIT: Q27965, EVALUE 3.00e-76; EST_HUMAN HIT: BI712613.1, EVALUE 0.00e+00
tctgcgtctgcttggtggggatggtggagttgcgcttgatcagggcagtcatcacgcctccggccgtctccagccccagcgacaggggagccacgtccagcagcagcaggtcctgcacgttctcggacttgtcccccatcaggatggccgcctgcaccgccgccccgtaggccacagcctcgtcggggttgatgctcttgttcaggtcgcgcccgttgaagaagtcctgcagcagcttctgcaccttggggatgcgggtggagcccccgaccaggaccaggtcgtgaatctgggccttgtccagcttggcgtcgcgcagagccttctccacgggctccagggtgcttcggaacaggtcggagcacagctcctcgaacctcgccctggtgatggacgtgtagaagtcgatgccctcaaacagggagtcgatctccaggctggcctgggtgctggacgacagggtcctcttggccctctcgcaggcggtgcgcagccgcctcacggctcgcttgtt

SEQ ID NO: 7014 - DNA, 558 bp, Homo sapiens
  MAP TO AC002472.3; EXPRESSED IN HEART, SIGNAL = 1.7; EXPRESSED IN BONE MARROW, SIGNAL = 2.3; EXPRESSED IN FETAL LIVER, SIGNAL = 1.6; EXPRESSED IN LUNG, SIGNAL = 1.9; EXPRESSED IN ADULT LIVER, SIGNAL = 1.8; EST_HUMAN HIT: BE736922.1, EVALUE 2.00e-01; NT HIT: AF199371.1, EVALUE 2.00e-03; SWISSPROT HIT: P03338, EVALUE 2.10e-01
tggaagggatggctgcagggaggagccccacccccacacagggtaggagacttgtgcggccatgaggcgggaacttctgtgtggggtggcagccactgcctcaaatccctgctgtgccaggccccctgcccggcccagacagaacaagtactctcatgcatgacatcagggcagtgtggcagtgccagctcctcactcagtgtccctcctgggtggggagaggacacagatatcccagatgccaccatcactgcatcgttaggagtttctatgatgctgaagttttgggaaaccagcatatgctacttttgtgatcagaaaaagagagcaaagccaactttctaaaataaggaggaaaaggcctttggcctgggcaagaaccagggctgggcctgagcctgggcaccgcccacccgcccaccaactcagctccgcagggcaactcctggctgaggatcctcatccaagctactctggtagccacggggctccacccagtggccctcacctccatctgtccatcctcctctttccccatccccctcccaagaaaccccc

SEQ ID NO: 7015 - DNA, 501 bp, Homo sapiens
  MAP TO AC013648.3; EXPRESSED IN ADULT LIVER, SIGNAL = 1.7; EXPRESSED IN HELA, SIGNAL = 7.6; EXPRESSED IN HEART, SIGNAL = 3.3; EXPRESSED IN BONE MARROW, SIGNAL = 1.6; EXPRESSED IN FETAL LIVER, SIGNAL = 1.4; EST_HUMAN HIT: BF764206.1, EVALUE 0.00e+00; SWISSPROT HIT: gi1351900, EVALUE 2.00e-15
ggagggggacctgtccctggccgacaaggatgtgactgccaaagacagcaagttcaaaatgcccaagttcaagatgccgtcgttcggggtgtctgccccaggcaagtccattgaggtcttggtggatgtgtctgcgccgaaggtggaggccgacgtgagcctcccctccatgcagggggacctgaagaacactgacatcagcattgagcccccctctgcccaactggaggtccaggctggccaggtggacgtgaagctcccagagggccacgttctcgagggagctggcctcaaagggcacctgcccaagttgcagatgcccagtttcaagatgcccaaagtagatcacaagggcccccagatagacatcaagggccccaagctggacctgaaaggcccgaagacggacgtgacggcccccgacgtggaggtgtctcagcccggcatggaggtggatgtcgaggccccaggagccaagttggatggtgcacggctggaggg

SEQ ID NO: 7016 - DNA, 527 bp, Homo sapiens
  MAP TO AC007567.1; EXPRESSED IN LUNG, SIGNAL = 1.8; EXPRESSED IN HEART, SIGNAL = 2.3; EXPRESSED IN ADULT LIVER, SIGNAL = 1.9; EXPRESSED IN BRAIN, SIGNAL = 2.1; EXPRESSED IN HELA, SIGNAL = 3.7; EXPRESSED IN BONE MARROW, SIGNAL = 2.1; EXPRESSED IN FETAL LIVER, SIGNAL = 1.7; EST_HUMAN HIT: BF858786.1, EVALUE 1.90e-01
cacaggggccaggtgagcagtaaaagaagctatggagataaactctgtctaggctaatcagaatttacctaggctccaatccctcaaaagcagagaaagaaaatcccaataaaataaagtcctggattccatttcaaattcagaatgagaaccatcccctgaggatttgatccccaaaaaaatccttctaaggatgtatatattccttaactaataatccctaaaccctgcaattcaggagtggaagttgtattttcctaactcaaagggatccaggatatgcctgatgaggggttcctttaagtgagaatcttttgcctatgagggccttgcagaatgttttgagcagcttcccaaaaatgtgaggaatgcctcaaggctggctacacaaagcgctctccttggtcctgagacctgtctttggttgagctcagactctgttccccagccagtgaactgaacccctccaccttagccctgccctgctttatttactctgcctaaacccgcctcctctccacccccat

SEQ ID NO: 7017 - DNA, 505 bp, Homo sapiens
  MAP TO AC020709.2; EXPRESSED IN FETAL LIVER, SIGNAL = 1.3; EXPRESSED IN HELA, SIGNAL = 1.3; EXPRESSED IN ADULT LIVER, SIGNAL = 1.3; EXPRESSED IN BRAIN, SIGNAL = 1.2; EXPRESSED IN LUNG, SIGNAL = 1.2; EXPRESSED IN BONE MARROW, SIGNAL = 1.2; SWISSPROT HIT: P41479, EVALUE 3.00e-03; NT HIT: U35323.1, EVALUE 7.50e+00; EST_HUMAN HIT: BE567651.1, EVALUE 7.10e-01
ttgtcaaatggcccccaggcccccaactctcactccaccgggccccgctggcctctctgacctcccctaaggctcctggagcagacccgagacatgctgccacccctgagtgtggctggtcgtctcggcctgggctcgggactttggtagttgcatctggctgctctgcaggctccggcaacggaaacctgcagctccagcccccactgccgccccgctgctcgccccttattcagctccacgcaggggaagctgtctcactcatggcagcccccccaagccccccacctccgagagacccttgcctgttccccacctctgccctgagccgcactcccccacccctgcctttcccgtggatggggacccgcatcccctctcccttcacagctgagtgacccacatcccctctcccctcgcagctgagtgaccggtgtcccccgctccttgcacatgtggagctcccagctgcagcatctcggggggaggcatgggcagagccagc

SEQ ID NO: 7018 - DNA, 513 bp, Homo sapiens
  MAP TO AL117187.3; EXPRESSED IN LUNG, SIGNAL = 2.6; EXPRESSED IN FETAL LIVER, SIGNAL =   2; EXPRESSED IN HELA, SIGNAL = 2.1; EXPRESSED IN BRAIN, SIGNAL = 2.5; EXPRESSED IN PLACENTA, SIGNAL = 3.2; EXPRESSED IN ADULT LIVER, SIGNAL =   3; EXPRESSED IN BONE MARROW, SIGNAL = 2.6; EXPRESSED IN HEART, SIGNAL = 2.8; NT HIT: AB033014.1, EVALUE 1.00e-111; EST_HUMAN HIT: AI394664.1, EVALUE 1.00e-110; SWISSPROT HIT: Q61412, EVALUE 5.50e-01
agggaggaggaggccgatggctctcagagcagctccagttcctcggtgccaggagagagcctccccagtgccagcgaccaggtgctgtatctcagcaggggtggtgtgggtaccacaccagcctcagaacccgctccactggccccccatgaggaccaccagcaaagggagaccaaagagaatgaccccatggacagccatcaggtactcaaccgtgggatttgggaaccctgggtcctgcctgggaaacttgatagttctttgtctgaagctcagcttcttgctccataaaatagcgatgagggggcttcccttgggactactatggtgcaaaattcaaagaggcacctactgtgaggctcgggcaaatgcagggttggcacctgagagtgagcacctcctgaaatcctgcacacgggcacctcactggctttcccccagtcctggccctactcacaggtatgctctgaggatcaagtgaggtcacctttgagggtccagcagaggaggggc

SEQ ID NO: 7019 - DNA, 543 bp, Homo sapiens
  MAP TO AP001621.1; EXPRESSED IN ADULT LIVER, SIGNAL =   2; EXPRESSED IN PLACENTA, SIGNAL = 2.1; EXPRESSED IN HELA, SIGNAL = 1.5; EXPRESSED IN BRAIN, SIGNAL = 1.6; EXPRESSED IN HEART, SIGNAL = 1.9; EXPRESSED IN FETAL LIVER, SIGNAL = 1.9; EXPRESSED IN LUNG, SIGNAL = 1.8; EXPRESSED IN BONE MARROW, SIGNAL =   2; NT HIT: gi14733436, EVALUE 2.00e+00; EST_HUMAN HIT: BE378289.1, EVALUE 3.00e+00; SWISSPROT HIT: P03193, EVALUE 2.30e+00
cgcagcaaccacatccctgggttctcttgtttgttctctttcactggatttgagcctcttgcgtgtctgaaattgttctgcagacctgcaggctccggggcacatgtgtgcaaaggtggtgccctggaggccctgtaaatagctcagaaagtgaggctggtcttcttcagagactgagtgattgcgaagtgcaggacaaatgagtctatgtgggggccacagcacggatgtccaccctcccatctggatttcccaagaatgggagacatcttttccctcccttcccgtttctgggaggacaggggcagatggacaggcgagtaagacaggtggcagggagccagcagccctaggagctggtgctggggaggcccaggtgagatccctgtggctcagaagaggacctctgcatgtggaagggacgcccgcaatgcccagtgacacctctctctattgtggagggtgacggagtctgctgaggtagccacataagcacctaaaccagaagtgagtatctaaaacggccttgcatgccataagtca

SEQ ID NO: 7020 - DNA, 517 bp, Homo sapiens
  MAP TO AL138842.2; EXPRESSED IN ADULT LIVER, SIGNAL = 1.7; EXPRESSED IN HELA, SIGNAL = 0.79; NT HIT: gi14754614, EVALUE 8.00e-03; EST_HUMAN HIT: BF826947.1, EVALUE 0.00e+00; SWISSPROT HIT: Q9JVA0, EVALUE 1.60e+00
tcggagagggcggacctgaggagtttcagaagggaaacttttccctctcctaggaagttgccacgattaagtagagagggggttaagtagggatgaggtaatactggaacataaataggagaagggatcaaggattgagggccatagtagtcctgcatctctacttggatcagatctctaactatgtatgaggtctgattggggggaagatgcactgaacccaaaatgaactgttttccctcttgtcctcacagctcaccatcatatttaagaacatgcaggaatgcattgatcagaaggtgtatcaggctgaggtggataatcttcctgtagcctttgaagatggttctatcaatggaggtgaccgacctgggggatccagtttgtcgattcaaactgctaaccctgggaaccatgtggagatccaagctgcctacattggcacaactataatcattcggcagacagctgggcagctctccttctccatcaaggtagcagaggatgtggccatggc

SEQ ID NO: 7021 - DNA, 556 bp, Homo sapiens
  MAP TO AL121883.13; EXPRESSED IN BONE MARROW, SIGNAL = 1.6; EXPRESSED IN FETAL LIVER, SIGNAL = 1.5; EXPRESSED IN ADULT LIVER, SIGNAL = 1.4; EXPRESSED IN HELA, SIGNAL = 1.4; SWISSPROT HIT: Q9Y5X2, EVALUE 1.80e+00; NT HIT: gi14757950, EVALUE 0.00e+00; EST_HUMAN HIT: BE388739.1, EVALUE 0.00e+00
gggtggggtggtggaacgtgaggttggagagtctttaagcggggaaaatttccaaacttagcttccgggtggaagaaaggaatcagtgatctagatatcaagccccgagtctctgccagtatctctgtatttttgtacgtttgtttgttttgttgttgtttcagtctgtttgcgttcaaagacacaaaaaggagcctgaaatctgaaatgcatcctttattcctaggtcgagctgcctcagagccggcccgcagtagctgcagactccgcccgcgacgtgtgcgcgcttctctgggccagagcgagcctgttttgtgctcgggttaagagatttgtcccagctataccatgggccgcactcgggaagctggctgcgtggccgctggtgtggttatcggggctggtgcctgctactgtgtatacagactggcttggggaagagacgagaacgagaaaatctgggacgaagacgaggagtctacggacacctcagagattggggttgagactgtgaaaggagctaaaactaacgctggggcagggtctggggccaaac

SEQ ID NO: 7022 - DNA, 526 bp, Homo sapiens
  MAP TO AC005754.1; EXPRESSED IN ADULT LIVER, SIGNAL = 1.4; EXPRESSED IN FETAL LIVER, SIGNAL = 1.2; EXPRESSED IN LUNG, SIGNAL = 1.2; EXPRESSED IN HELA, SIGNAL = 2.4; SWISSPROT HIT: Q9Y5E3, EVALUE 6.00e-66; NT HIT: gi16171257, EVALUE 0.00e+00; EST_HUMAN HIT: BI850895.1, EVALUE 4.00e-30
ttgacgtcggagacccgcagggttatgttgtactcggttttcagcctgggtgtccccaagtctgtgacagtaatggtgatgttgtactcggccctgctctctctgtctagcgctccttctgttaacaaagtgtagaaattttctaaggtaggttttagaaggaaagggagatggtcttggatggaacacatcatttttccattgttcccggagtccggatccgaaattccgaaaacagcgaccactgtttctggggagttttctaggatatcactgataagtaaggacatagtaagttccggtgcgttgtcgtttatatccattacctctatggctacggtgcattttcctgaaagacccccaccgtctgaggcctcaacttccatgtgataagattgaatttcctcaaaatccaacgcctttttaaatctaatttctcccgtgattgagtttatttcaaaggcctgaatgatttgattggagtattgaaaaaatgaataggagagctccccgtgggtcccagcat

SEQ ID NO: 7023 - DNA, 569 bp, Homo sapiens
  MAP TO AL157377.1; EXPRESSED IN ADULT LIVER, SIGNAL = 2.1; EXPRESSED IN HELA, SIGNAL = 1.2; EXPRESSED IN PLACENTA, SIGNAL = 2.4; EXPRESSED IN BRAIN, SIGNAL = 1.6; EXPRESSED IN HEART, SIGNAL = 2.3; EXPRESSED IN LUNG, SIGNAL = 1.9; EXPRESSED IN BONE MARROW, SIGNAL =   2; NT HIT: gi14757718, EVALUE 0.00e+00; EST_HUMAN HIT: BI761502.1, EVALUE 0.00e+00; SWISSPROT HIT: O15320, EVALUE 1.00e-45
tgctgccgccttctcaaagctggcatcctctaaagatgactctacttcatagccttcatactctttttgaataaggctaaacttttcaagtagtttacatttttcttcaattagtccagaaagcgttgcaccaagtttttgctctcttcccacataaagccgactcctaaccgatctaaaacttctccacaaaaaaaggagaacaacaaaaaatccaataacagctgcacataccaccagttccgatggaaaaccataaggattctcatctggtctcatactctcaggtagtgctgccacaactctgcctagctcctccaggaccagccccaggtagggctgaggggtagcaccaggctcctccatagcgtcgaggctgctctggcggtcaccgcagtaacactggccacaacaagcggtggagaacacgcagccttgggtctggaacccgaatgcgcacgtgacaaccaaccggagcggaccactgtggagcgggctgcggggggagctggggaacgcgggcacccacaggcctcacaggcccatgttgtcccccaccacctcccctg

SEQ ID NO: 7024 - DNA, 507 bp, Homo sapiens
  MAP TO AF009663.1; EXPRESSED IN ADULT LIVER, SIGNAL = 1.5; EXPRESSED IN BRAIN, SIGNAL = 1.4; EXPRESSED IN HELA, SIGNAL = 1.8; EXPRESSED IN HEART, SIGNAL = 1.5; EXPRESSED IN LUNG, SIGNAL = 1.4; NT HIT: U66060.1, EVALUE 0.00e+00; EST_HUMAN HIT: BI824046.1, EVALUE 0.00e+00; SWISSPROT HIT: P02457, EVALUE 8.00e+00
ttctgccctcctcccccacccaagactcagggatgccctgggcagagatctctgcgccaggaaccttggaacccacagtggccccaagtggcctggacagtatgagccttgctctgtgccaggtgcctctgcaggcatctcagccaggcctggactggtcccaggtcctcagatgtctcctttgttgctttctctggtctatccttggagctttccttttggggtggggccagggctttcccagctcctacttttctactcattatcctgagtccgaggcccccaggataaaacaggatttgcatttcagatccatctagactcccgtctctccctggtgaccctgttgcttcctctctctaatgtttcccccagcccccaccctcatgttttctctcctgtggcccacctttcccatctgggcagtcaccctccaaggcgttgctgggtctctcctccccccacctcctcgcccctctctactgcagccatgaggggagcccctgt

SEQ ID NO: 7025 - DNA, 524 bp, Homo sapiens
  MAP TO AL132708.3; EXPRESSED IN LUNG, SIGNAL = 6.2; EXPRESSED IN ADULT LIVER, SIGNAL =  39; EXPRESSED IN HELA, SIGNAL = 0.95; EXPRESSED IN BONE MARROW, SIGNAL = 1.8; NT HIT: K02212.1, EVALUE 0.00e+00; EST_HUMAN HIT: AV658834.1, EVALUE 0.00e+00; SWISSPROT HIT: P01009, EVALUE 4.00e-21
tgctgtccagagcctgggtgcaggacctagatgtaggattctggttctgctacttcctcagtgacattgaatagctgacctaatctctctggctttggtttcttcatctgtaaaagaaggatattagcattagcacctcacgggattgttacaagaaagcaatgaattaacacatgtgagcacggagaacagtgcttggcatatggtaagcactacgtacattttgctattcttctgattctttcagtgttactgatgtcggcaagtacttggcacaggctggtttaataatccctaggcacttccacgtggtgtcaatccctgatcactgggagtcatcatgtgccttgactcggggcctggcccccccatctctgtcttgcaggacaatgccgtcttctgtctcgtggggcatcctcctgctggcaggcctgtgctgcctggtccctgtctccctggctgaggatccccagggagatgctgcccagaagacagatacatcccaccatgatcaggatcaccca

SEQ ID NO: 7026 - DNA, 500 bp, Homo sapiens
  MAP TO AC006126.1; EXPRESSED IN BRAIN, SIGNAL = 2.5; EXPRESSED IN ADULT LIVER, SIGNAL = 2.4; EXPRESSED IN HELA, SIGNAL = 1.9; EXPRESSED IN FETAL LIVER, SIGNAL = 2.4; EXPRESSED IN LUNG, SIGNAL = 2.6; EXPRESSED IN HEART, SIGNAL = 2.6; EXPRESSED IN BONE MARROW, SIGNAL = 2.9; SWISSPROT HIT: Q03169, EVALUE 5.00e-04; NT HIT: AF421382.1, EVALUE 1.20e-01; EST_HUMAN HIT: F08223.1, EVALUE 7.00e-01
gaagggtggacagcgaggcgatctagagtgtaagtgttgacagagcgctgaggtttttggaccacagtggtgccggagctcttattctaggactgcaagcgtccatggtactaaggtgctggaaccggaagcctcggtagcagtgagagtctaggattgtaactgtcagcggtgctgacgactggatgggttaatggtgttaaagtgctaggactgtagggtcagctgtcccaaggtccttaaggtctgaagaagccagtgctagggggtagggctgagggtttcacgtgaccttgggcaactgagtccagcttacctggggtagacctgattgtgccagtgcagcagcgcgtagcggtcggccagcggcagcctgcgacgggcggaggcccccagccactcggccagggccccgtggtagccgcgcaggtagacgccgaaggcgcccaggccggcggggtaggcgggcgccaggcggccccgcaccacggccatatcct

SEQ ID NO: 7027 - DNA, 571 bp, Homo sapiens
  MAP TO AP001725.1; EXPRESSED IN HELA, SIGNAL = 1.4; EXPRESSED IN BONE MARROW, SIGNAL =   2; EXPRESSED IN LUNG, SIGNAL =   2; EXPRESSED IN ADULT LIVER, SIGNAL = 1.6; EXPRESSED IN PLACENTA, SIGNAL = 1.7; EXPRESSED IN BRAIN, SIGNAL = 1.3; SWISSPROT HIT: Q14149, EVALUE 1.00e-106; NT HIT: gi14780353, EVALUE 0.00e+00; EST_HUMAN HIT: BG288981.1, EVALUE 0.00e+00
tcatcccgatgcgaccagggaaatactgcagctacccagactgaagtaccaagtttagttgttaaaaaagaagaaactgttgaagacgagatagacgtaagaaatgatgcagtgattctgccctcctgtgtagaagctgaagcaaagatacatgaaacccaggaaaccaccgataaatctgcagatgatgcaggctgccaattacaagaactgagaaaccagctactccttgtcactgaggaaaaagagaattataaaagacagtgtcatatgtttactgatcaaatcaaagtgttacaacagaggatactagaaatgaatgacaagtatgttaagaaagaaacttgccatcagtccactgaaaccgatgctgtatttttacttgaaagtattaatggcaaatctgaaagtccagaccatatggtatctcagtatcagcaagctttggaagaaatagaaaggctgaaaaaacaatgtagtgctttgcaacatgtaaaggctgaatgcagccagtgttccaataatgagagtaaaagtgaaatggatgagatggctgtgcagcttgacgatg

SEQ ID NO: 7028 - DNA, 514 bp, Homo sapiens
  MAP TO AC005670.1; EXPRESSED IN ADULT LIVER, SIGNAL = 1.6; EXPRESSED IN PLACENTA, SIGNAL = 1.8; EXPRESSED IN HELA, SIGNAL = 1.5; SWISSPROT HIT: O60309, EVALUE 2.00e-12; NT HIT: gi15314635, EVALUE 0.00e+00; EST_HUMAN HIT: BF056814.1, EVALUE 0.00e+00
cagaaggcctccacaagcaccaacatatgtgagctctgtacctgcggagatgagatgttgtcatgtattgatctcaacccagagcagaggctccgcaagtgcctgtgccagagcccaacacccacaatggcaccttcaccatcttgtaagaatcacctttcctcaattgccctctgtgtcctgcctgacatggcagccttttcctggaggccttcctgggccttctttatctccccaagccatatggacaactgactttctgctttcacctttgcttgtcaactctcccttctcctcattctcctttaatgttaggccccttctccagtcttttccttttactctggtcttttactcgttttcgtatccatttttatttagccccatcacatcattgcttaaccgctgctctcctcccatttttgcttcaccctctttacagcagcctgtccctctcccgatctcagtgatgatgctctaagtggttaagagttgattccagagccaggctgcc

SEQ ID NO: 7029 - DNA, 505 bp, Homo sapiens
  MAP TO AC012313.5; EXPRESSED IN ADULT LIVER, SIGNAL = 1.3; EXPRESSED IN HELA, SIGNAL = 0.31; EXPRESSED IN PLACENTA, SIGNAL = 1.4; EXPRESSED IN LUNG, SIGNAL = 1.2; EST_HUMAN HIT: BI520241.1, EVALUE 8.00e-84; SWISSPROT HIT: P55492, EVALUE 4.10e-01; NT HIT: gi16162715, EVALUE 3.00e-73
ctgagatggggaggcacccggttgtcgctgcaggctttttacactgtggcaggcatcggcaactgggaagacgctagtagtcatcccaggtggggtatctgggaaagctcgtggccattctccagaaacatctctatcctctgtcaaactccaggaacctaaacgcagagaaacggtggttgcctggggcatcctggttaggagaggaccagggcaggctgagtggacaggcaagggggagcccaggagccgggacaaaagcttagggaaaaagaagaggtgaggctggctctgcaggaggggctggggtttggaggaagcatctgccctgacaggtgtggcactgactgcagtggggactcccatgatcaaggcggcagcccccagacacccaggatgtgaagctgaggaaaacagcagctgctgcgtgccacccacgtctccacactggctgttccaccccctccctttccatagctcactcccttctcccctggtgccccgt

SEQ ID NO: 7030 - DNA, 518 bp, Homo sapiens
  MAP TO AL356805.2; EXPRESSED IN ADULT LIVER, SIGNAL = 2.1; EXPRESSED IN PLACENTA, SIGNAL = 1.9; EXPRESSED IN BRAIN, SIGNAL = 1.9; EXPRESSED IN HELA, SIGNAL = 0.67; EXPRESSED IN LUNG, SIGNAL = 2.6; EXPRESSED IN BONE MARROW, SIGNAL = 1.8; EXPRESSED IN HEART, SIGNAL = 3.3; EXPRESSED IN FETAL LIVER, SIGNAL = 1.2; NT HIT: gi4885136, EVALUE 0.00e+00; EST_HUMAN HIT: BE676347.1, EVALUE 0.00e+00; SWISSPROT HIT: O00409, EVALUE 2.00e-67
actggcaggcgcttggttggagagtcctcgatggccataaatatgaggcagctgaaggagtaggggggtttgcagttggggttctgcctggcatcgtagggcatgtcagagtgggcaggggatgggggggtgtcatcgtccaggtcctggacggggctgacactcctgaggaccgactccccaaagctcttcagcaagttcttgctctcgtgcagccagttcaggttggtcagctcttcatcttccatggccccctcttctaatcggatgtcaggcagagaaaagtcgaggtcatcgtcttcctgaagggccttggagaaaccgctgcccccgtaacactgactcagtccactggagacactaattcctgagctttctggcttcttactgggaggcatgactggacccatttacgtgaaggctcctagtaaagacatcacaaagaaatgatgagctggcgaggcccaaaacagaaaggcagactgtacccctctgatcctgttgcctccctctgccgc

SEQ ID NO: 7031 - DNA, 506 bp, Homo sapiens
  MAP TO AC006111.2; EXPRESSED IN HEART, SIGNAL = 2.6; EXPRESSED IN BONE MARROW, SIGNAL = 3.4; EXPRESSED IN LUNG, SIGNAL = 3.2; EXPRESSED IN ADULT LIVER, SIGNAL =   2; EXPRESSED IN PLACENTA, SIGNAL = 2.6; EXPRESSED IN HELA, SIGNAL = 2.4; EXPRESSED IN BRAIN, SIGNAL = 2.6; NT HIT: gi14778073, EVALUE 0.00e+00; EST_HUMAN HIT: AW630062.1, EVALUE 9.00e-90; SWISSPROT HIT: Q92793, EVALUE 2.00e-40
atgccggcactcccttgctgctgctgctgttgctgctgttgttgctgctgctgttgctgctgctgctgcagcagctgcctccgtaacatttctcggtactgtggattcatactcgccatgttggggttgtgtcctgggttcatgatgttcaaggcctggccctgggggttcaggcctcccatcgcctgctgctgtggaggcacaccgggccgcggcacgccagcctgcatggcattcaggttctgcaggctgggctgctggtgcatgccaggctggggttgcatgccgggctgggactggaggccaggctggggctgcatgccgggctgattggccacgtacttggctgtgcgctgtttgatgaaagctgccattagctgcgggtttgatttgagaatgttcagcacctgctgttgctgctgaggggagctgggcgacttcagggtccgcagcaggtcttgcagagcgctgggtgagatgctcctgggtggctgcacgctgggcat

SEQ ID NO: 7032 - DNA, 567 bp, Homo sapiens
  MAP TO Z49250.1; EXPRESSED IN LUNG, SIGNAL = 1.2; EXPRESSED IN BONE MARROW, SIGNAL = 1.3; EXPRESSED IN FETAL LIVER, SIGNAL = 1.6; EXPRESSED IN ADULT LIVER, SIGNAL = 1.5; EXPRESSED IN HELA, SIGNAL = 1.2; NT HIT: gi14724355, EVALUE 0.00e+00; EST_HUMAN HIT: AU143060.1, EVALUE 0.00e+00
ctgttgcggttttctgagaactagcctaattgtttctgtttctctttatcatcatcaaacattgcagctacgactacctgtcatttatcccgctctcggatatcatgtgatatttgtctgtgtcttctttttaaaaacactgtcgtcatatttgtggtctaatacttgttttcttcccccctaggaggaatcattatagattctaaaaatatattttcccttctctgtggacttggtataaaacgtagctttttttctgcttggatttattttctaaaaatcaacaccgtaaacccatatcagatacaacaaaattggggtagttaaaaccatgagttgtggaaatgagtttgtggaaacattaaaaaaaattggttatcccaaagctgataatcttaatggagaagactttgactggttgtttgagggcgttgaagatgaatcgtttctgaagtggttttgtgggaatgtgaatgaacagaacgtgttgtctgaaagagaattggaagcttttagcattcttcagaaatcaggcaagcctattctagaaggggcggcattggatga

SEQ ID NO: 7033 - DNA, 521 bp, Homo sapiens
  MAP TO AL022238.1; EXPRESSED IN ADULT LIVER, SIGNAL = 1.7; EXPRESSED IN LUNG, SIGNAL = 1.8; EXPRESSED IN HEART, SIGNAL =   2; EXPRESSED IN PLACENTA, SIGNAL = 1.6; EXPRESSED IN HELA, SIGNAL = 1.7; NT HIT: AF285148.1, EVALUE 5.00e-01; SWISSPROT HIT: O59953, EVALUE 4.80e+00; EST_HUMAN HIT: BE940132.1, EVALUE 3.00e-71
tcagccatgctcacgcccaggccagccttagagtatctcaggatctcactctacataaaactgtggttgattcaaaataccagaaaagaggtttctcttcctaagaaccagaacatgaaggcaaagcatatgggagaagtggttcttcctcacaatacaccaggctcaagatctgcccctcctataaagggaagtataacagagtgaaaactcttttaaaggtgcaattccaaagtaaaggaaaattcagtggcaccctttacacctaatttaaaccaggtttgaccctttaaacacagtttgtttcactgaacttgatcaattagttatcttaactatttagtgattgagctctaaacttggaaagtcatgagaaagaagagagtggaaaataaaacgcatcatccttgttttatgttagatgcttcccatggcatactcggtgaacacagccatgtcctaaaagcaatctaccaaatgctgagagagagaggcacttacgcggcatgatcccttggctc

SEQ ID NO: 7034 - DNA, 505 bp, Homo sapiens
  MAP TO AL136139.4; EXPRESSED IN HEART, SIGNAL = 3.3; EXPRESSED IN BRAIN, SIGNAL = 1.3; EXPRESSED IN BONE MARROW, SIGNAL = 1.4; EXPRESSED IN FETAL LIVER, SIGNAL = 1.4; EXPRESSED IN ADULT LIVER, SIGNAL = 1.4; NT HIT: gi14757672, EVALUE 0.00e+00; EST_HUMAN HIT: BG325473.1, EVALUE 0.00e+00; SWISSPROT HIT: Q14511, EVALUE 2.00e-80
ctcaagggcctgctggagccgctgaagtctctcaatagctgtgtctggatccaggaagagccttttgtcctgagctggggaggctgacagtgaggactccttggaggaggtggaagacgtggacatgttactccgggtgctgcctgtactggagaaagacaatcggttgatcccatccaccaagtcccgagagcctttagcatctggcgggttatgcagagggacatcataaacaccatccctttcctgggggtttgctttctcactggtttctgctggtggctcaagaaactgaacgcctcgggggacatcatatgcgtcgttctgagagcccactgactgtccgagttgcgggggtgggtgattcggggacaggctctggtgccttcgagccaccggttctgcagctcctggaatgtcacagttgtattttacatgaaggtccttccctgctggcttggtgcaggttggaggaatgtcataaaccccctccggtctgaggtcc

SEQ ID NO: 7035 - DNA, 500 bp, Homo sapiens
  MAP TO AP000962.2; EXPRESSED IN PLACENTA, SIGNAL = 5.3; EXPRESSED IN ADULT LIVER, SIGNAL = 3.4; EXPRESSED IN HELA, SIGNAL = 3.7; EXPRESSED IN BONE MARROW, SIGNAL = 4.4; EXPRESSED IN FETAL LIVER, SIGNAL = 3.5; NT HIT: AL163227.2, EVALUE 6.00e-96; EST_HUMAN HIT: BE420422.1, EVALUE 1.00e-121; SWISSPROT HIT: Q60477, EVALUE 2.70e+00
agagactggcagcattttgcccctgccctagagatttgtggaactttgaacttgagagagatgatttagggtatctggcagaagaaatttctaagcagcaaaggattcaagaggtgactagagtgctattaaaggcaatcagttttataagggaagaagagcataaaactggaaaatttgaagcctgacaatgcgatggaaaagaaaatcccatgtttttgaggagaaattcaagttagctgcagaaatttgcataagtaatgaggacccaaatgttaatccccaagacaatggggaaaatatctccaaggcatgtcagaggtcttcatggcagcccctcccatcacaggcctggaggcctaggaggaaaaagtggtttcatgggtcttgcccagggtccctgtgctgtgtgcagcctagggactttatgccactctagctaaaatgggccaaggtacagctcaggctgttgcttcagctggtggaagccccaagccttg

SEQ ID NO: 7036 - DNA, 528 bp, Homo sapiens
  MAP TO AC008119.6; EXPRESSED IN LUNG, SIGNAL =   2; EXPRESSED IN BONE MARROW, SIGNAL = 2.4; EXPRESSED IN HELA, SIGNAL = 1.1; EXPRESSED IN PLACENTA, SIGNAL = 1.4; EXPRESSED IN BRAIN, SIGNAL = 1.6; EXPRESSED IN ADULT LIVER, SIGNAL = 1.5; NT HIT: gi14764461, EVALUE 0.00e+00; SWISSPROT HIT: Q14242, EVALUE 2.00e-24; EST_HUMAN HIT: AL583011.1, EVALUE 0.00e+00
tgctggctgccatgggaatgcccttgtgagtaacagaggacacagaaaagggtatgaacagacctcttttggtagtaggttccatggacagggcctctgtggcactgggttctgtggacagggcctccatggctgccagtggagtggtctgtgcctccgtggctgtgggttgagtggtctgtgcctccgtggcttctggtgcagtggtctgtgcctccatggctgtggtttgagtggtctgtgcctccatggctgctggtggagtggtctgtgcttccatggctgctggtgcagtggtctgtgcctccatggctgctggtgcagtggtctgtgcctccaggcctgtgggttgagtggtctgtgcttccgtggctgctggtggagtggtctgtgcctctgtggctgccagtggagtggtctgtgcctccgtggccgtcagtcgagttgtctgtgcctctgtggctgccagtggagtggtctgtgcctccgtgggcactggttgagtggtctgtgcctccgtggctgctg

SEQ ID NO: 7037 - DNA, 533 bp, Homo sapiens
  MAP TO AL163247.2; EXPRESSED IN ADULT LIVER, SIGNAL = 1.8; EXPRESSED IN HELA, SIGNAL = 3.1; EXPRESSED IN BRAIN, SIGNAL = 1.6; EXPRESSED IN HEART, SIGNAL = 1.5; EXPRESSED IN BONE MARROW, SIGNAL = 1.8; EXPRESSED IN LUNG, SIGNAL = 1.6; NT HIT: AL163247.2, EVALUE 0.00e+00; SWISSPROT HIT: P08548, EVALUE 2.00e-24; EST_HUMAN HIT: BG435712.1, EVALUE 7.00e-66
tccatcagcatatggaacattccccaagatagaccatatgataggccacaaaacaaatctcaacaaatttaagaaaatcaaaactatagcaagtactctctcagaccaaagtggaataaaattggaaatcaactccaaaaggaactctcaaaataatgcaaatacgtggaaattaaataacttgttcctgaatgatcattgggtcaataatgaaatcaaggtagaatttaaaatattctttgaactgaatgatagtagtgacataacctatcaaaacctcttggatactgcaaccgatattacaactgataccacagaaatacaaaagatcattcaaggctactatggacatctttacatgcataaactagaaaacctagaggagatagataaatgcctagaaatatacaaccatgcaagagtaaaccaaaaataaatagactctgaacagaccaacaacaagcagcaagactgaaacagtaatttaaaattaccattttaaatgggagcagctcacacctgtaatcccagga

SEQ ID NO: 7038 - DNA, 598 bp, Homo sapiens
  MAP TO AL355075.2; EXPRESSED IN HELA, SIGNAL = 4.1; EXPRESSED IN ADULT LIVER, SIGNAL = 1.9; EXPRESSED IN BRAIN, SIGNAL = 2.1; EXPRESSED IN LUNG, SIGNAL = 1.9; EXPRESSED IN HEART, SIGNAL = 1.7; EXPRESSED IN BONE MARROW, SIGNAL =   3; NT HIT: gi13649630, EVALUE 0.00e+00; SWISSPROT HIT: P39188, EVALUE 3.00e-04; EST_HUMAN HIT: BE940121.1, EVALUE 1.00e-86
accgtgttgcccaggcttgcctcaaactcttgggctcaaggaatcctcttgcctcagctcccaaagtgttgggattacaggcatgagccactgcacctggccttttcttaatttctctgctcttaagcctctgccttaccttttccctatccctctctcttagaatattctctggatgaacccagtcctgggaaaaacaacattggttgttttctacccacaaatcattggcattatcaggagggctgtggggaagatatgctctcatgcaaatacacgctcagtgcagccaggtgctcatctcctgtctttctctccttctaggcatatacaagctgagtttcagccatggaaaaactccatgggcatgtgtctgcccatccagacatcctctccttggagaaccggtgcctggctatgctccctgacttacagcccttggagaaactacatcagcatgtatctacccactcagatatcctctccttgaagaaccagtgcctagccacgcttcctgacctgaagaccatggaaaaaccacatggatatgtgtctgcccacccagacatcctctccttggagaaccagtgcctggcca

SEQ ID NO: 7039 - DNA, 561 bp, Homo sapiens
  MAP TO NM_006777.1; EXPRESSED IN PLACENTA, SIGNAL = 1.9; EXPRESSED IN ADULT LIVER, SIGNAL = 1.7; EXPRESSED IN BRAIN, SIGNAL = 1.7; EXPRESSED IN HELA, SIGNAL = 1.2; EXPRESSED IN LUNG, SIGNAL = 1.6; EXPRESSED IN BONE MARROW, SIGNAL = 1.7; EXPRESSED IN HEART, SIGNAL =   2; SWISSPROT HIT: P38739, EVALUE 3.30e-01; EST_HUMAN HIT: BG391478.1, EVALUE 0.00e+00; NT HIT: gi11422608, EVALUE 0.00e+00
tcagctccaacacatctgactcccaatattattttgttaaatcagacaccactttctacaccaccaaatgtcagttcttcacttccaaatcatatgccctcttcaatcaatttacttgtgcagaatcagcagacaccaaacagtgctattttaacaggaaacaaggccaatgaagaggaggaggaggaaataatagatgatgatgatgacactattagctccagtcctgactcggccgtcagtaatacatctttggtcccacaggctgatacctcccaaaataccagttttgatggatcattaatacagaagatgcagattcctacacttcttcaagaaccactttccaattccttaaaaatttcagatataattactagaaatactaatgatccaggcgtaggatcaaaacatctaatggagggtcagaagatcattactttagatacagctactgaaattgaaggcttatcgactggttgcaaggtttatgcaaatatcggtgaagatacttatgatatagtgatccctgtcaaagatgaccctgatgaaggggaggcc

SEQ ID NO: 7040 - DNA, 504 bp, Homo sapiens
  MAP TO AC006130.1; EXPRESSED IN ADULT LIVER, SIGNAL = 1.7; EXPRESSED IN PLACENTA, SIGNAL = 1.7; EXPRESSED IN BRAIN, SIGNAL = 1.8; EXPRESSED IN HELA, SIGNAL = 2.8; EXPRESSED IN LUNG, SIGNAL = 1.6; EXPRESSED IN BONE MARROW, SIGNAL = 1.9; EXPRESSED IN FETAL LIVER, SIGNAL = 1.8; NT HIT: gi14764137, EVALUE 4.80e-01; SWISSPROT HIT: Q9NYT6, EVALUE 4.00e-21; EST_HUMAN HIT: BG284252.1, EVALUE 0.00e+00
tggtcaaaccatcttccagggcattcagtttatttcattttcagacagttcccatggggtgaaaaacctatgctttcactgaaaatggttaagatgcagtcctaatcctaataaatactaacaaatcattattaatcaaaccaataacatgcttctcatttttagtagaaatcatgggttggagagactctgtgaaagtaatgatcaatgtggagaagccctcagccagattccacatcttaatctgtacaagaaaattccacctggagtaaaacagtatgaatacaacacgtacggaaaagtcttcatgcatcgccgcacatccctcaagagtcccatcacagttcacactggacacaaaccatatcagtgccaggaatgtgggcaggcctacagttgtcgttcacacctaagaatgcatgtgagaacccacaatggagagagaccctatgtgtgtaaattatgtgggaaaacctttcctcgtacttcctccctcaatcggca

SEQ ID NO: 7041 - DNA, 534 bp, Homo sapiens
  MAP TO AC009819.2; EXPRESSED IN ADULT LIVER, SIGNAL =   2; EXPRESSED IN PLACENTA, SIGNAL =   3; EXPRESSED IN LUNG, SIGNAL =   2; NT HIT: gi14768105, EVALUE 0.00e+00; SWISSPROT HIT: Q62785, EVALUE 3.00e-33; EST_HUMAN HIT: AL560040.1, EVALUE 0.00e+00
agcaactgcccctcccccagctccccccacatcccccaaacaatttctgtgccaaaatgaagaggaggccccaggccatggggggctcctggccacgaggggctgttgcggcggcgccagggcacagggtgggcgagacacagcagaggtcctggcagcgcggcccaggtccccggcatctcctcccatgggtcgcggttacttatacagggagagcgactgcattcgttttcctgacaatgtggcatcatcttttgctttcctttcctcttccttcttccgggcagcctcctcccgctgtttccggatgatggccagcgggccaggtcagccttggcttgctctgtcttcccggccaagtgcattttcatgtaacgctcttttgccttctgcttctcaatctcttctcgttctctcctcgaaagctcctttggcccatccagatacagttgtgtgacctttttggttgtctgtgccacctggttggggttctcgatgttgaagagcccttcaacgcctttgcggttttgctgg

SEQ ID NO: 7042 - DNA, 503 bp, Homo sapiens
  MAP TO AL160176.3; EXPRESSED IN ADULT LIVER, SIGNAL = 4.7; EXPRESSED IN LUNG, SIGNAL = 5.7; EXPRESSED IN HEART, SIGNAL = 4.5; EXPRESSED IN PLACENTA, SIGNAL = 2.3; NT HIT: gi14786453, EVALUE 1.00e-129; SWISSPROT HIT: P01133, EVALUE 3.50e+00; EST_HUMAN HIT: BE544267.1, EVALUE 1.00e-97
tgctgcgcaccaacaagaacctgctttaaatttccatgccaatttacaacccccatactctaccaggcaaggttagtgactattgaaaataccaccaggacagggccatctaaagacacatttggtagtgtattaaccatacaaaaaacgacactgtacagtttaaaaacaaatcttacacagccttacatttcaatttttttctttaaaaggagtgagttgtgtacaggggcgttaaatgctttaagacaagaaaaaaaactgcgctagagccaacttattcatcatcatcatcttcttcatcttcttcatcttcctcctcctcatcctcttcatcttcctcatcttcctcctcttccttctttttcttgcttttttcagctttgacaactcccttttttgctgcctcaggctttcctttagcttgatatgcagcaatatccttttcgtatttttccttcagcttcgcagccttcttttcaccaggctgcttgtcatctgca

SEQ ID NO: 7043 - DNA, 516 bp, Homo sapiens
  MAP TO Z93242.1; EXPRESSED IN ADULT LIVER, SIGNAL = 1.8; EXPRESSED IN HELA, SIGNAL = 0.52; EXPRESSED IN FETAL LIVER, SIGNAL = 1.8; NT HIT: gi13629551, EVALUE 0.00e+00; SWISSPROT HIT: Q9Y5P3, EVALUE 4.00e-68; EST_HUMAN HIT: AA770598.1, EVALUE 1.00e-128
tggtcccaccagccaccctcttggtgccgtatcctgtaatcgtccccttgcctgtgccagtccctattcccatccccatcccgatgcctcagagttctgaatccaagttcagctccagtttccccaagccaccatcttccttcggcctgcacccctttaaaggcacccagacccctctggaaaaagatgaactgaagccctttgacatcctccagcctaaggagtacttccagctcagccgccacacggtcattaagatgggaagtgagaacgaggccctggatctctccatgaagtcagtgccctggctcaaggctggtgaagtcagtcccccaatcttccaggaagatgcagccctagacctgtcagtggcagcccaccggaaatccgagcctccccctgagacactgtatgacagtggtgcatcagtggacagctcaggtcacacagtgatggagaaacttcccagtggcatggaaatttcttttgcccctgccacgtcccatgaggccccag

SEQ ID NO: 7044 - DNA, 549 bp, Homo sapiens
  MAP TO AL133224.2; EXPRESSED IN FETAL LIVER, SIGNAL =   1; EXPRESSED IN HEART, SIGNAL = 1.4; EXPRESSED IN LUNG, SIGNAL = 1.1; EXPRESSED IN PLACENTA, SIGNAL = 2.1; EXPRESSED IN HELA, SIGNAL = 0.34; EXPRESSED IN ADULT LIVER, SIGNAL = 1.2; NT HIT: AL163246.2, EVALUE 5.00e-75; SWISSPROT HIT: P03363, EVALUE 9.00e-02; EST_HUMAN HIT: BE064410.1, EVALUE 5.00e-73
gggcagtgatctgtcttcacccgaatagatgcttactccggatatgggtttgcctatcctgcagacaatgcttctgccaagactaccatctgtggattcaggaaatgccttatccaacatcatggtatttcacagaacattgcctctgaccaaggcactcactttacagctaagaagtgtggcagtggcctcatgctcatggaattcactggtcttgccatgttccccatcatcctgaagcagctggattgatagtacagtggaattgccttttgaaatcacaattataatgccaactaggtgaccatcctttgaagagccggcacaaagttctccagaaggctgtgtatgctctgaatgtgtccaatatatgctactgtttctcccatagccaggattcgtaagcctaggaatcaaagggtggaaatgaaagtggcaccactcaccatcacccctagtaacccactagcaaaatttttgcttcctgttcccacaacattatgttctgctggcctagaagtcttagctccagagggaggaatgctgcca

SEQ ID NO: 7045 - DNA, 506 bp, Homo sapiens
  MAP TO AL109824.21; EXPRESSED IN ADULT LIVER, SIGNAL = 1.4; EXPRESSED IN LUNG, SIGNAL = 1.8; EXPRESSED IN HEART, SIGNAL = 1.7; EXPRESSED IN BONE MARROW, SIGNAL = 1.6; EXPRESSED IN FETAL LIVER, SIGNAL = 1.4; EXPRESSED IN BRAIN, SIGNAL = 1.7; EXPRESSED IN HELA, SIGNAL = 2.6; NT HIT: gi14772732, EVALUE 0.00e+00; SWISSPROT HIT: Q09472, EVALUE 5.00e-04; EST_HUMAN HIT: AL118850.1, EVALUE 0.00e+00
gcatggcctgcacatgaggggggaccatgttggtttgttgaatgctaacatcaggcatcatctgagataaactgacatcgttatttgctgtagtagcaggatcaccatgctgctgggccatgtgtgggctgggccctggtggccgcaggacctgtccctgaatgcccataacctgagatggactgttgttcacaggcccttgctggggcagcatctgtcctgacatctgtcccgtaaactgcaccatatttccttgcatgtttggagttggtcccctcattatctgggctggtcccggcatgacattggactggttctgagtgttaaactgctgcttattcccctgcatttgattggtcataatctgctctatcattgggttctgttggagcaaaacctgcccctgaggccccatcatctggttatgtggcgccatcatttgtgggccctgctgggaaagcatctgcttgggtggggtcatcctttggggcgagggcccaagattt

SEQ ID NO: 7046 - DNA, 561 bp, Homo sapiens
  MAP TO AC008151.1; EXPRESSED IN ADULT LIVER, SIGNAL =   2; EXPRESSED IN BRAIN, SIGNAL = 1.8; EXPRESSED IN HELA, SIGNAL = 0.54; EXPRESSED IN HEART, SIGNAL = 2.3; EXPRESSED IN BONE MARROW, SIGNAL = 2.2; EXPRESSED IN FETAL LIVER, SIGNAL = 1.9; EXPRESSED IN PLACENTA, SIGNAL = 2.3; EXPRESSED IN LUNG, SIGNAL = 1.8; EST_HUMAN HIT: AW605307.1, EVALUE 7.90e-01; NT HIT: gi14772238, EVALUE 5.30e-01; SWISSPROT HIT: P39801, EVALUE 1.10e+00
tggcttttggcccttcaggatgaagcgctttcctagggcatcttagggacccagcatcctgtgtctttccatgtctctggctctgagtcacacttgtcagctcattcccaatgatcagactgtttgtgccctgactcacttgggacaacagaaaaaaatagcaacttggctgacctgctttgttccccatcctttcatatcaatgacaaatgggacatttatggtaaaaccctggggaagtgtctcagagtttggtgtctcacttttgctaaggtgagaaatcctactgtccaggaagaagttccaggtctcagcaccccaaatgccaagaaagtgaggtttttctaataataggctttatagctacagcctacaataggctttaatgtttatcaacaggagagaaagttgattcggttgggtaacatttgcctgccacatttacaggcactgcatgccgacgcaatggtgtccagtggaaggagggaacatctcttccaacatgtttctttttacaaggataaaagcttttcccagaagtccccctcatgtcccttggca

SEQ ID NO: 7047 - DNA, 501 bp, Homo sapiens
  MAP TO AC008272.1; EXPRESSED IN ADULT LIVER, SIGNAL = 2.9; EXPRESSED IN HELA, SIGNAL = 5.1; EXPRESSED IN PLACENTA, SIGNAL = 5.3; EXPRESSED IN BRAIN, SIGNAL = 3.6; EXPRESSED IN HEART, SIGNAL = 3.2; EXPRESSED IN FETAL LIVER, SIGNAL = 3.6; EXPRESSED IN LUNG, SIGNAL = 3.2; SWISSPROT HIT: P03341, EVALUE 1.00e-13; EST_HUMAN HIT: AA663213.1, EVALUE 0.00e+00; NT HIT: AB008681.1, EVALUE 0.00e+00
gttcagggcccagggcttgcttttggagctttctcctgatagctgtggctgattgggtaataaatttatcttttagaatcaattgaccctcgagggattcaggcgagaggggagtatatattcttaagacctctcgtagctgctcgaggaaggcagaaggattttattcctttccctgtgttatggtggacatcactgaataattcatgggcttttttctaatcctccgtagtccctctagaacacaggtcaacagatgtttacaactccagtccccatgatctgagtcaaggtcccagtggggatccatactggggatggcttgctgaccagtagggaatttgtgcctttcttcagctgtcattctatcatttactgactaagataccaggtatctccaaactctcaggctgcagctaaagccacattcttttcattaaagaccagggtttgatctaagagtagcatgacatctctccaagcgaggtcaaaggtttgccc

SEQ ID NO: 7048 - DNA, 505 bp, Homo sapiens
  MAP TO AC025436.2; EXPRESSED IN PLACENTA, SIGNAL = 1.5; EXPRESSED IN ADULT LIVER, SIGNAL = 1.8; EXPRESSED IN BRAIN, SIGNAL = 2.8; EXPRESSED IN HELA, SIGNAL = 0.6; EXPRESSED IN BONE MARROW, SIGNAL = 1.8; EXPRESSED IN LUNG, SIGNAL = 2.4; EXPRESSED IN HEART, SIGNAL = 2.7; EXPRESSED IN FETAL LIVER, SIGNAL = 1.6; NT HIT: gi14861873, EVALUE 0.00e+00; SWISSPROT HIT: Q9Y5E5, EVALUE 6.00e-93; EST_HUMAN HIT: BG722685.1, EVALUE 0.00e+00
gtcaatgacaacgcccccgccttcacccaaacctcctacaccctgttcgtccgcgagaacaacagccccgccctgcacatcggcagtgtcagcgccacagacagagactcgggcaccaacgcccaggtcacctactcgctgctgccgccccaggacccgcacctgcccctcgcctccctggtctccatcaacgcagacaacggccacctgttcgccctcaggtcgctggactacgaggccctgcaggcgttcgagttccgcgtgggcgcctcagaccgcggttctccggctttgagcagcgaggcgctggtgcgcgtgctggtgctggacaccaacgacaactcgcccttcgtgctgtacccgctgcagaatggctccgcgccctgcaccgagctggtgccccgggcggccgagccgggctacctggtgaccaaggtggtggcggtggacggcgactcgggccagaacgcctggctgtcgtaccagctgctcaaggccacggagc

SEQ ID NO: 7049 - DNA, 570 bp, Homo sapiens
  MAP TO AL022319.2; EXPRESSED IN ADULT LIVER, SIGNAL = 2.3; EXPRESSED IN HELA, SIGNAL = 1.3; EXPRESSED IN PLACENTA, SIGNAL =   4; EXPRESSED IN BRAIN, SIGNAL = 2.1; EXPRESSED IN HEART, SIGNAL = 2.4; EXPRESSED IN FETAL LIVER, SIGNAL = 2.8; NT HIT: AF211189.1, EVALUE 3.00e-89; SWISSPROT HIT: Q9Z0Y8, EVALUE 6.00e-23; EST_HUMAN HIT: BI160856.1, EVALUE 3.00e-06
tcagccccgtccccattcacaggagtcacaaacccaccagacagatgggtgcagggaacactgagtgtgatggaggcacctgctagaggtgtggggcgcaggggaagcatcccgtctggggcgcttcccagggcgggcagttttcaattggatttgccagaggcaccgggaacctaacagggcggcctgctgggccctgaccctgccctgtcccctcccatcaaccgccctcagagggcggcctgaaccctccccttcccttcggccccgccacttgcaggaccccgccccctccccgaagccgatcaggcctcgccccgcccccttgcatagagcccggttggccccgcccacctgcccgcccctcccgcggcagcctgaccccggccccacccccgccccaggtagtctcgctgggcctgtacttcggcgagcaggcgtacctacgcagcagctggaacgtgctggatggctttcttgtcttcgtgtccatcatcgacatcgtggtgtccctggcctcagccgggggagccaagatcttgggggtcctccgagtcttgcggctcctgc

SEQ ID NO: 7050 - DNA, 507 bp, Homo sapiens
  MAP TO AC022423.2; EXPRESSED IN HEART, SIGNAL = 2.1; EXPRESSED IN BONE MARROW, SIGNAL = 1.6; EXPRESSED IN LUNG, SIGNAL = 1.6; EXPRESSED IN FETAL LIVER, SIGNAL = 1.7; EXPRESSED IN HELA, SIGNAL = 0.54; EXPRESSED IN ADULT LIVER, SIGNAL = 1.7; EXPRESSED IN BRAIN, SIGNAL = 1.5; SWISSPROT HIT: P10388, EVALUE 3.60e+00; EST_HUMAN HIT: H50901.1, EVALUE 7.00e-72; NT HIT: AF338650.1, EVALUE 0.00e+00
cagaggcctgatgggacccgggagggcccctgggagtgaaatgcagtccccttctctgtcaaactcttcctcatcactggcatcgttggcatcgtagcagcctaccttcctctggcggaggagagggtttcggagggcctgtgggcttccggggagactggcttgtctggcaactgtcacctgcttgtggaagagcccagaagcccgatggctcccaagagtcacgaggctgttggctctgggttttccaggctccttgtgagctggtggaggtggggacagaaaagtcaagtgaaattgagcttcccacttggccctgtcttatcatctgaccccatcattacacataagcatttccacattcactaacaccagacacacagcctcagccactggacacaaggcctaggcaacatggcttcctggaggctatatggagtagataggcgggctatctttctcttttccctactgacctacccccccccccgcccttttcttaaaccc

SEQ ID NO: 7051 - DNA, 500 bp, Homo sapiens
  MAP TO AL022312.7; EXPRESSED IN ADULT LIVER, SIGNAL = 2.3; EXPRESSED IN PLACENTA, SIGNAL = 5.3; EXPRESSED IN HELA, SIGNAL = 1.4; EXPRESSED IN FETAL LIVER, SIGNAL =   4; EXPRESSED IN HEART, SIGNAL = 2.8; EXPRESSED IN LUNG, SIGNAL = 2.5; NT HIT: AF200923.2, EVALUE 2.00e-03; EST_HUMAN HIT: BI091151.1, EVALUE 0.00e+00; SWISSPROT HIT: P53857, EVALUE 4.10e-01
tgggtacacagcggctgctccagcgcccaccctcctgtgtgcatccaagcctgggggaagcagaaatagacaagagggcacacccactttttgctaaaggcatgagccagaattggcaggctcacctctgctggcctctcattggctgggactcagtcacatggccacaagcagctgctagggaacctgggaagtgtagtcttcagcggggccgccatgtgcctggcctcaccttgggagttatcttattgatggaggagaagagaatggatatgggggaccagtagcatctctgggagagggggagggagcagcaataactcagtcgtcggatccagctctcattgtcagagtttccggaacagcttgctcctgtttccctcactgtgcagcccagggctgggggcagtgaggagcttgcagctctgtgggaaggggaaacaccccctcccctcggcccctcagacgctacccaatgatgccggtttgcagagttggcc

SEQ ID NO: 7052 - DNA, 509 bp, Homo sapiens
  MAP TO AC006547.9; EXPRESSED IN PLACENTA, SIGNAL = 3.4; EXPRESSED IN ADULT LIVER, SIGNAL = 3.2; EXPRESSED IN BRAIN, SIGNAL = 3.6; EXPRESSED IN HELA, SIGNAL = 5.6; EXPRESSED IN LUNG, SIGNAL = 3.5; EXPRESSED IN HEART, SIGNAL = 3.7; EXPRESSED IN BONE MARROW, SIGNAL = 4.1; EXPRESSED IN FETAL LIVER, SIGNAL =   3; NT HIT: gi14777147, EVALUE 1.00e-87; EST_HUMAN HIT: BG993104.1, EVALUE 2.00e-87; SWISSPROT HIT: Q9QZZ4, EVALUE 4.20e-01
tcccaagcccaagcccaagcccatgcctatgtgcccgtcacaggggctagacgaggctcctcctccctctggctgccctgagtggtgggcccctggggctgcatggctccaagggcagaaccccaggtgtctgcagtagccagctgtggcctccctcctgttgcagagcccctgcccctcagccgtggatgctcagggacagggccatgggtcactatgtggctcttatggctccttgaggcccagttcctgaggccacggtgccatgtgtggcccccgtgggtgctgactggcggctgcaggcggggtggcaggtgggcagtggtgagaatgccttctccctacaggttccaggccctgattccctgaccctgggggacgacagcatccgtagcctggactttgtgtccgagccgagcctggacctccctgactatgggccagggggcctgcatgcagcctacccgccatccccaccgctcagcgcctctgatgccttctcgggcgct

SEQ ID NO: 7053 - DNA, 509 bp, Homo sapiens
  MAP TO AC011467.3; EXPRESSED IN ADULT LIVER, SIGNAL = 1.9; EXPRESSED IN PLACENTA, SIGNAL = 1.9; EXPRESSED IN HELA, SIGNAL = 1.8; EXPRESSED IN LUNG, SIGNAL = 1.7; EXPRESSED IN HEART, SIGNAL = 1.9; EXPRESSED IN FETAL LIVER, SIGNAL = 1.6; NT HIT: D10083.1, EVALUE 0.00e+00; SWISSPROT HIT: P03356, EVALUE 5.00e-40; EST_HUMAN HIT: AV752762.1, EVALUE 0.00e+00
agctcggggatttgcccctgcccaggactagcaaattgactttactctcatgcctcgagtcagaaaactagaatatctcttagtctgggtagacactttcactggatgggtagaggccttccccacagggtctgagaaggccaccgcggtcatttcttcccttctgtcagacataattcctcggtttggccttcccacctctatacagtctgataatggaccagcctttactagccaaatcacccaagcagtttctcaggctcttggtattcagtggaaacttcatatcccttaccatcctcaatcttcaggaaaggtagaacggactaatggtcttttaaagacacacctcaccaagctcagcctccaacttaaaacagaatggacagtacttttacctcttgcccttctcagaatcagagcctttcctcgagaagctacagggtacagtccatttgaactttcatatggatgcactttcttgcttggccccaacctcatcccaggca

SEQ ID NO: 7054 - DNA, 516 bp, Homo sapiens
  MAP TO AC008762.5; EXPRESSED IN BONE MARROW, SIGNAL = 2.9; EXPRESSED IN LUNG, SIGNAL = 2.3; EXPRESSED IN HEART, SIGNAL = 2.4; EXPRESSED IN FETAL LIVER, SIGNAL = 1.7; EXPRESSED IN ADULT LIVER, SIGNAL = 1.9; EXPRESSED IN BRAIN, SIGNAL = 2.1; EXPRESSED IN HELA, SIGNAL = 4.1; NT HIT: gi16163638, EVALUE 2.00e-68; EST_HUMAN HIT: BG034571.1, EVALUE 3.00e-68; SWISSPROT HIT: P52272, EVALUE 7.00e-14
ctcgatctcggagcccacgcgatccatgccgtggcccaggcccgcgcccatgcgctccatgccggcacccccgaggcggtcaatgccaggacccatcctctcgatcccagggacgcttcctccacctccacctgaaacagggacacaaaacacaggtgggtgtcaagaacttgagtgtgcgtgtgcacaacacgccagaccacttcagctcatgggcatggatcaggggtaaaggcccaccataatttaccattaagacacccctcaaatgttgacaacagctacagctgtgtggtgggcacatgggggcctcccagcattctctctgctctatgccacagctgagatttccataacacaacttctaaagaacacccctgtatgtgtgtctgtgaggtgctagtgtctgtgacaagctttgtgaaccatggacgtcaattcctgagacatctgaggtttctccatcagcagacactgagaaatgctccagggggaggcatggacacccccgactcg

SEQ ID NO: 7055 - DNA, 516 bp, Homo sapiens
  MAP TO AC010620.3; EXPRESSED IN ADULT LIVER, SIGNAL = 2.4; EXPRESSED IN PLACENTA, SIGNAL = 3.1; EXPRESSED IN BRAIN, SIGNAL =   3; EXPRESSED IN HELA, SIGNAL = 4.1; EXPRESSED IN LUNG, SIGNAL = 2.6; EXPRESSED IN BONE MARROW, SIGNAL = 3.4; NT HIT: gi13650821, EVALUE 0.00e+00; EST_HUMAN HIT: BF376299.1, EVALUE 0.00e+00; SWISSPROT HIT: Q03923, EVALUE 5.00e-68
ttcacatttgaagggcttctctccagtatgaattaccttatgtgtagtaaggtgtgaagaatggtagaaggctttgccacattcttcacatctgtagggtttctctccagtatgaatcatcttatgtgtagtaagggttgaggagtgcttaaaagctttgccacattcttcacatttgaagggtttctctccagtatgaactctcttgtgtctagtaagggttgagaaccgcttaaacactttgtcacattcttcacattggtaagaattctctctaatatgaattcttttatgttgatgtaggtgtaaaagcatgcaaaatgattcatcacattttttacatttgaaaggtttctctccagtatgtcttgtcttgtgtctatttgaattgaaaattttatgaaagacttttatatatttatcacatggaaatattttgctctgggtagttgtcaaacactggtttagttcataaccttttttgtacaccttacactcaaccacatttgcggagcc

SEQ ID NO: 7056 - DNA, 517 bp, Homo sapiens
  MAP TO AL024498.12; EXPRESSED IN PLACENTA, SIGNAL = 2.2; EXPRESSED IN BONE MARROW, SIGNAL = 1.7; EXPRESSED IN ADULT LIVER, SIGNAL = 1.6; EXPRESSED IN BRAIN, SIGNAL = 1.5; EXPRESSED IN HELA, SIGNAL = 1.4; NT HIT: gi4758419, EVALUE 1.00e-106; EST_HUMAN HIT: BG114549.1, EVALUE 7.20e-01; SWISSPROT HIT: P55198, EVALUE 6.20e+00
tggaagggtggcattttgtctccttgaaaggtggctaggtcacaggtagctttgtaaacatcagactttgggaaggaagggcaaggctgccctggaatagggaagctggtttcagtaactatatcaaagtcttctggattttccaagggaggtatgttgctgaaatgaccactgctgtcttgattttcttctgcctagaaaaatgatacaaacatagacacacgctatgtaaatcgtgtggacaccctcacctgtaacaatagcctagaagtaagtaaaaacagacatccatgtgctgggctctgtgttgtgaacatggcactgctcaggtacgtgatgtaagcacgtggtccaggggttgctaagcttgggctcactcagacataaataccaacgactgaatgacaaaggtccatggtagccaggtaggatgcttctgagtggcagatggtcctgttctcacctatactgtcttcctaatagtggagacttaggagccacacgggcctgggttcaa

SEQ ID NO: 7057 - DNA, 514 bp, Homo sapiens
  MAP TO AC009336.2; EXPRESSED IN BONE MARROW, SIGNAL = 2.7; EXPRESSED IN FETAL LIVER, SIGNAL = 2.8; EXPRESSED IN BRAIN, SIGNAL = 2.7; EXPRESSED IN ADULT LIVER, SIGNAL = 3.3; EXPRESSED IN LUNG, SIGNAL =   3; EXPRESSED IN HEART, SIGNAL = 2.1; SWISSPROT HIT: P23812, EVALUE 1.00e-16; NT HIT: AF154915.1, EVALUE 0.00e+00; EST_HUMAN HIT: BF956955.1, EVALUE 7.20e-01
gagatagggggaagcgcggccaactggccgccattcggcctcaggttggagaagtagaaagagtctggcgactgcagattcagaagcgagcccacatagcccgctctgtagagactgcgctcacacatctccaacaaagggcttcggctgcgctcgcaacagtatttagttacaaccgggaataagaggacaggctcagacgattggacgaaactttgcctgcaggttcttcaaagccggtcatttcagcaccgcctacatccccccgacccgttttcccccccttcagagtattatgataacacccgcaatgttcgatggcgaaggacgaggctgccagcagagccaaatcaggttgagcgaagactaactgtctgcgggtttccaggcccggcttcagcagctggggacatcgggcaagagggtgactctgcccaagtgtcccctgggactcttcttggtcgtgattggctttgcgattcgttttccgcaggctttctgggcccggcttgct

SEQ ID NO: 7058 - DNA, 574 bp, Homo sapiens
  MAP TO AD000092.1; EXPRESSED IN ADULT LIVER, SIGNAL =  14; EXPRESSED IN BRAIN, SIGNAL =   6; EXPRESSED IN HELA, SIGNAL =  16; EXPRESSED IN LUNG, SIGNAL =  11; EXPRESSED IN HEART, SIGNAL =  12; SWISSPROT HIT: P27797, EVALUE 1.00e-31; EST_HUMAN HIT: BE939486.1, EVALUE 2.00e-75; NT HIT: AY047586.1, EVALUE 1.00e-75
acagccaggtggagtccggctccttggaagacgattgggacttcctgccacccaagaagataaaggatcctgatgcttcaaaaccggaagactgggatgagcgggccaagatcgatgatcccacagactccaagcctgaggttggtgtttgggcaggggctctgctctccacattggagggtgtggaagacatctgggccaactctgatctcttcatctaccccccaggactgggacaagcccgagcatatccctgaccctgatgctaagaagcccgaggactgggatgaagagatggacggagagtgggaacccccagtgattcagaaccctgagtacaaggtgagtttggggctctgagcagggctggggctcacagtggggagtgcaccaaccttactcacccttcggtttccttctcccttctgcagggtgagtggaagccccggcagatcgacaacccagattacaagggcacttggatccacccagaaattgacaaccccgagtattctcccgatcccagtatctatgcctatgataactttggcgtgctgggcctggacctctggca

SEQ ID NO: 7059 - DNA, 537 bp, Homo sapiens
  MAP TO AC005151.1; EXPRESSED IN LUNG, SIGNAL = 1.1; EXPRESSED IN ADULT LIVER, SIGNAL = 1.2; EXPRESSED IN BRAIN, SIGNAL = 1.1; EXPRESSED IN HELA, SIGNAL = 1.6; NT HIT: gi7305360, EVALUE 2.00e+00; SWISSPROT HIT: P32521, EVALUE 6.70e-02; EST_HUMAN HIT: BI768810.1, EVALUE 4.80e-02
tgggtggggcctggagacaccactggctcctcagtggctgtcactggtgggttcagggctgtggtgagtggggcagctggggtgagggctggcctgtgggtgggggtcctggggctttcctgtgacagctgtggctcctcatcactgggagtgggcaacccttgactgggagggagggtctcattgccaagggcctctgtgggaacccaaactgctggctccacacctgcggagacaaaagaagaggttcagaaggcggggtgactgctgccccgggggtcattgctgggcagggctgtggtgtgaggcttgaggactggcactctcggtgatggggtgagggcagcttctaacggccagatgtcagcaggtctggactccgccccagacgtcagaccctgaccccagaaccaagagacctcaggtctaagtctggctgcaccaccttctcaccatgtgaccccactctgggcctcatttctcctctctgtgaaatggggcgaatagaccggatgaggcctctgcatcccctgtgcc

SEQ ID NO: 7060 - DNA, 502 bp, Homo sapiens
  MAP TO AL035682.16; EXPRESSED IN FETAL LIVER, SIGNAL = 1.6; EXPRESSED IN LUNG, SIGNAL = 1.1; EXPRESSED IN ADULT LIVER, SIGNAL = 1.3; EXPRESSED IN HELA, SIGNAL = 1.8; EXPRESSED IN PLACENTA, SIGNAL = 2.6; EXPRESSED IN BRAIN, SIGNAL = 1.1; NT HIT: Y13413.1, EVALUE 7.40e+00; EST_HUMAN HIT: AW590082.1, EVALUE 2.00e-38; SWISSPROT HIT: P31366, EVALUE 1.10e-01
ggcccagagaagcaaggcggctgtgcaaagacccacagtagttattaaatcacagcctttaagcaacaactgacataatctaataacaaaggagatggcttcaaagacaggtcaaggttgttacacgagagaaacttaccagatcattgtgaggctagaaggttcctgggaggctggagaaagatctcatgtgggtgggacccttgtagggtcactcaccacaaagattcatgcagatgcagatttcaagcccttccctgctttgctgtgccctcaagataccgtggaagcttcactgtggccctcaaggccctgcacaacctggctcctaccctcattcctgcctctccaggcactattcttacccctgagtcttatgagcgctcactacatgcctggcatcactctaagcacctcgtatacatgggcttgtctcatctgtacagcacccataggaggcaggtctcctcaccccatcctacaggggaggacaccaggcaca

SEQ ID NO: 7061 - DNA, 501 bp, Homo sapiens
  MAP TO AL023585.1; EXPRESSED IN ADULT LIVER, SIGNAL = 3.4; EXPRESSED IN LUNG, SIGNAL = 3.4; EXPRESSED IN HEART, SIGNAL = 2.8; EXPRESSED IN FETAL LIVER, SIGNAL =   2; EXPRESSED IN PLACENTA, SIGNAL = 2.7; EXPRESSED IN BRAIN, SIGNAL = 3.3; NT HIT: AF019413.1, EVALUE 3.00e-05; EST_HUMAN HIT: AA317973.1, EVALUE 5.00e-05; SWISSPROT HIT: O60810, EVALUE 8.00e-21
cccacatggatgtctctcgctacgtttccccagagcagaagaaggagattgttaccaagttcaccactcagttcctcaagctgcactgcctccaaaagctttatatgaactctgtttctttcctcgaaggccacctggaccagctgctcaggtgagggagggtggtgagctttctctgcagaccacagcagagcctgtttcactaaacgctagtgggcatctactgtgagccagcctatgaggatgtaacagtgaaggggacactagaatgtccatacattgtcctgttggcggccctgtcctgaaatgggtatcatgcaaccatcccaatagaggcagcgggatcagctagcggagatgctatagagaggttgtcatactaggaagctagctactggggggttcagatctagtgagggtgcctttctgaattcttcctgaggacgtgtgtctaagttaagatgatgaaaaataggccaggggcggtggctcatgcctgta

SEQ ID NO: 7062 - DNA, 528 bp, Homo sapiens
  MAP TO AC007324.38; EXPRESSED IN ADULT LIVER, SIGNAL = 3.3; EXPRESSED IN BRAIN, SIGNAL =   8; EXPRESSED IN PLACENTA, SIGNAL = 2.9; EXPRESSED IN HEART, SIGNAL = 7.6; EXPRESSED IN LUNG, SIGNAL = 3.8; EXPRESSED IN BONE MARROW, SIGNAL = 6.4; EST_HUMAN HIT: F01302.1, EVALUE 0.00e+00; SWISSPROT HIT: Q9NY65, EVALUE 8.00e-72; NT HIT: gi16166973, EVALUE 0.00e+00
accagcgggaagtggatgcgggggtagggcaccaggttggtctggaactcagtgaggtccacattgagggccccgtcaaagcggagagaagcagtgattgaggacacaatctgactgatgaggcggttgaggttggtataggtagggcgctcaatgtcaaggttcctgcggcagatgtcatagatggcttcgttgtccaccatgaaagcacaatctgaatgttccagtgtggtgtgggtggtcaggatggagttgtagggctccaccactgcagtagagacctggggggctgggtagatggcaaactccagcttggatttcttgccataatccagggagaggcgttccatcagcagagaagtgaagccggagccagtgcccccaccaaaactgtggaaaatcaggaagccctgcaggccagagcaagcatctgtctagggagagcaggacatgagaagaaatcatgaagacaagtttccgagaacaccccacagtaaaaaagccagaccgcccactctgtctgcctca

SEQ ID NO: 7063 - DNA, 511 bp, Homo sapiens
  MAP TO AC011890.4; EXPRESSED IN ADULT LIVER, SIGNAL = 1.3; EXPRESSED IN HELA, SIGNAL =   1; EXPRESSED IN BONE MARROW, SIGNAL = 0.94; NT HIT: gi13632536, EVALUE 0.00e+00; EST_HUMAN HIT: AL527598.1, EVALUE 0.00e+00
ccaatcagcaaaaatatgtgccccacagatttctaatgttcataatttagaatttatcacatataatatttattaatagtttatttgcaaaattattattcttaaaacacttctttccaacacatttacaatgttcatgtgttttaaagaaaaaaaccaccctcatttaaaaatgtactactgactttaatgtgtggttataccagtgccaccaaattagaaaagaaaaagaaacatacagctgtattggatatgtagttactactacaaataatgacaacacacgtcctatacaaagatcatattcacgcttttctaccacttctcagtcattgtcagaaccatttggaggtaagaaaaccaatgcatcattgaaaatatgcccaaatgccctaaggcggtataccccatacatcatcacatgcatctgatttggagtcagtccattaaaagtaacagccatatctgaacaacagccttctactacctggttggggtgataagtcattgc

SEQ ID NO: 7064 - DNA, 500 bp, Homo sapiens
  MAP TO U91327.1; EXPRESSED IN ADULT LIVER, SIGNAL = 1.2; EXPRESSED IN HELA, SIGNAL = 2.2; EXPRESSED IN BRAIN, SIGNAL = 1.4; EXPRESSED IN HEART, SIGNAL = 1.4; EXPRESSED IN LUNG, SIGNAL = 1.6; EXPRESSED IN FETAL LIVER, SIGNAL = 1.5; NT HIT: gi12737512, EVALUE 0.00e+00; SWISSPROT HIT: Q9Z1D7, EVALUE 2.70e+00; EST_HUMAN HIT: AA380137.1, EVALUE 0.00e+00
tgcctcctgtttgggaagcccgcaagctaagtagggatgaagatgacaatttaggaccaaagaccccatctctaaatggctaccataataatctagatccaatgcataactatgtaaatacagagaatgtaacagtgccagcaagtgctcacaaaatagaatattcaaggcgtcgggactgtacaccaacagtctttaactttgatatcagacgcccaagtttagaacacaggcagcttaattacatacaggttgacttggaaggtggcagtgactctgacaaccctcagactccaaaaacgcctacaactccccttccacaaacccctaccaggcgcacagagctgtatgccgtgatagacatcgagagaactgctgctatgtcaaatttgcagaaagcactgccacgagatgatggtacatctaggaaaactagacacaatagtactgatctgcccatgtgagcctggaaagcattgtgttgtttgcacctttgtgaa

SEQ ID NO: 7065 - DNA, 503 bp, Homo sapiens
  MAP TO AL358293.1; EXPRESSED IN HEART, SIGNAL = 1.7; EXPRESSED IN LUNG, SIGNAL =   2; EXPRESSED IN ADULT LIVER, SIGNAL =   2; EXPRESSED IN BRAIN, SIGNAL =   2; EXPRESSED IN BONE MARROW, SIGNAL = 2.3; EST_HUMAN HIT: BG622817.1, EVALUE 7.00e-01
ggaaggaaggaaggaaggaaggaaggaaggaaggaaggaaggaaggagaaagaaagaaagaaagaaagaaagaaagaaagaggaaggaaggaaggagaaaagaaaaggaaggatggaaggaaggaaggaaggaaggaaggaaagaaagaaagaaagaaagaaagaaagaaagaaagaaagaaagaaagagaaagaaagagaaagaaagaaagagaaaaggaaagaaaagaaaagaaggaaggaaggaaagaaagaaagaaacaaaaagaaagaaagagaaagaaaaggaaggaaggaaggaaagaaaggaaagaaagaaagaaagaaagaaagaaagaaagaaagaaagaaagaaagaaagaaagaaaagaaaagaaagagaaagaaagagaaaaagaaagagagacagaaagagaaaacatctacctcttttttgaagacaattcctctagctccatcatggagtgattgctttccaagcctaccagacaagtgattcccca

SEQ ID NO: 7066 - DNA, 600 bp, Homo sapiens
  MAP TO AL133367.2; EXPRESSED IN ADULT LIVER, SIGNAL = 6.7; EXPRESSED IN FETAL LIVER, SIGNAL =   4; EXPRESSED IN HEART, SIGNAL =   7; EXPRESSED IN BONE MARROW, SIGNAL =  14; EXPRESSED IN LUNG, SIGNAL = 9.4; EXPRESSED IN HELA, SIGNAL =  11; SWISSPROT HIT: P52859, EVALUE 3.00e-62; EST_HUMAN HIT: BI160175.1, EVALUE 1.00e-124; NT HIT: gi15431287, EVALUE 1.00e-119
cctggatgaggcggtgcaggaagtcctgcacgggaaccagtgaaagtgccccaagttcctgaagatggtggagttgcagatcagcttgaagaactatgacccccagaaggacaagcgcttctcgggcaccgtcaggcttaagtccactccctgtcccaagtgtgggtcctgggggaacagcagcactgtgacgagaccaaggccacggatatccccccaagtggacactgaggtgccaaaaaaactcaagaataagaatctggtcaagaagctggccaagaagtatgatgcatttttggcttcagagtctctgataaagcaaatcccacgaatcctcggcataggcctaacaaaggcagtaaagttcccttccctgctcacacacgatgaaaacacggtggccaaagtggatgaggcgaagtccacaatcaagtttcatatgaacatgttatgtttggctgtggctgttggccacgtgaagatgacagacgatgagcttgtgcataacattcacctggctgttaacttcttggtgtcactgctcgagaaaaaactggcagaatgtccgggccttatatatcaagagcaccacgggcaagc

SEQ ID NO: 7067 - DNA, 510 bp, Homo sapiens
  MAP TO AD000671.1; EXPRESSED IN ADULT LIVER, SIGNAL = 1.8; EXPRESSED IN PLACENTA, SIGNAL = 1.7; EXPRESSED IN LUNG, SIGNAL = 1.8; EXPRESSED IN HEART, SIGNAL = 1.8; EXPRESSED IN BONE MARROW, SIGNAL = 2.2; EXPRESSED IN FETAL LIVER, SIGNAL = 1.9; EXPRESSED IN BRAIN, SIGNAL = 2.1; NT HIT: gi16177553, EVALUE 2.00e-96; SWISSPROT HIT: Q9UMN6, EVALUE 4.00e-17; EST_HUMAN HIT: BE393370.1, EVALUE 1.00e-91
cgctggtgctgagcagtgggccagccagcccgccccgccaggccatccgcgtcaagagggtgtccactttctccggccggtccccgccagcacctcccccatacaaagccccccggctggatgaagatggagaggcctcagaggatacccctcaggttccagggcttggcagtggcgggtgagtgcgggtgctgaggctggcagagcaggcaagggggcagatgggcgggagatgcggctcatccttctcgggctcgccctcccaggtttagccgtgtgaggatgaaaacccccacagtgcgtggggtccttgacctggatcggcctggggagcccgctggggaagaaagtcctgggtgagtggccaggcccctctccctggagggtctgggacctctgtccttccccttcctgacaggtctcttctcgcaggcccctccaggaacggtcccctttgctgccacttccggaagatggtcctccccaggtccccgatggtcccccagacct

SEQ ID NO: 7068 - DNA, 547 bp, Homo sapiens
  MAP TO AC020582.3; EXPRESSED IN ADULT LIVER, SIGNAL = 1.1; EXPRESSED IN HELA, SIGNAL = 2.4; EXPRESSED IN BRAIN, SIGNAL = 1.2; EXPRESSED IN HEART, SIGNAL = 1.4; EXPRESSED IN BONE MARROW, SIGNAL = 1.5; EXPRESSED IN LUNG, SIGNAL = 1.3; NT HIT: gi14769392, EVALUE 7.00e-96; SWISSPROT HIT: P04776, EVALUE 3.90e+00
gtgccctcgggcccaatttcatcctctgtaggcaggggacataaaatcagaagcacttcccaggggctcctggatgctgcagggaacctcaccaaaatatcttacgttgcagataagcaacagagcaggcccaaatctgaaagcatggccaagaagcaacctgcttgcaagaccccaggtaaggcttttatctctccagatggcaagcagatatcaagtggaaacaactggaaagcaaagccttgaatgggcattaaagtctattctagtcttttactgaattgtggctttgatagggctggtttatgagtttgggagcaaaatagtgccccattctagatttaatagatttggaggtagttaattttgagccttccctttcctaatgggatccccctctggacatccatctacattccatagtagacacatgaccatttccccattccctcttcctcaccctctgcacaccttacatttggatggaattttatgcttttctcaaaatacttttacatgtattaagcccctccctaacaccatgtgg

SEQ ID NO: 7069 - DNA, 555 bp, Homo sapiens
  MAP TO AP000303.1; EXPRESSED IN ADULT LIVER, SIGNAL = 1.7; EXPRESSED IN BONE MARROW, SIGNAL = 2.4; NT HIT: gi16166227, EVALUE 0.00e+00; SWISSPROT HIT: P25459, EVALUE 2.30e-02; EST_HUMAN HIT: AU117418.1, EVALUE 0.00e+00
gcaaccagcaccatggactcccagatgttagcaactagctcaatggattcccagatgttagcatctggcactatggactctcaaatgttagcttctggcaccatggatgctcagatgttagcgtctggtaccatggatgcccagatgttagcgtctagtacccaagattctgctatgttgggttcaaaatctcctgatccctataggttagctcaggatccttacaggttagctcaggatccctataggttgggccatgacccctatagattaggtcatgatgcttacaggttaggacaagacccttatagattaggccatgatccctacagactaactcctgatccctataggatgtcacctagaccctacaggatagcacccaggtcctatagaatagcacccaggccatataggttagcacctagacccctgatgttagcatctagacgttctatgatgatgtcctatgctgcagaacgttccatgatgtcatcttacgaacgctctatgatgtcttatgagcggtctatgatgtcccctatggctgaacgc

SEQ ID NO: 7070 - DNA, 515 bp, Homo sapiens
  MAP TO AC000380.1; EXPRESSED IN PLACENTA, SIGNAL =  22; EXPRESSED IN LUNG, SIGNAL =  12; EXPRESSED IN HELA, SIGNAL =  19; EXPRESSED IN BRAIN, SIGNAL =  15; EXPRESSED IN ADULT LIVER, SIGNAL =  17; EXPRESSED IN FETAL LIVER, SIGNAL =  12; EXPRESSED IN BONE MARROW, SIGNAL =  11; EXPRESSED IN HEART, SIGNAL =  27; SWISSPROT HIT: Q92956, EVALUE 3.60e+00; EST_HUMAN HIT: AA767830.1, EVALUE 2.80e+00; NT HIT: AB014520.1, EVALUE 3.00e-30
gccacacccatgcacccatcaccaacgtgcaatggtaactctgacaggctcacgcagtggccccagaacacaactttggtcaggcatgcagtcacttactgcgccctcagcatgcacctgtgaccctcacgtgcatacctgggctttatgcgcacctgggtacctgtggcaacttggacccctcccagtacgcctaggtatgcgcgcccatgagccggcactcacttgagtccctgcacatgcccacctgggccatacaggcgccagtagtacccctcgggggacacctgtattctcgcgtgcacacctgggttccacgtacatctggatctctgcgcgctcccacctgtgacccactcagctcacgacccgctcggttcccgcccgcccccgcccccgcccccgccgccgccgccgccgccgccgccgccaccgcccgggtgtacctggatgttgagcttgcgctcgcaggccggtcccgtgccctgcaccacgctgtcgagcaccgccaccac

SEQ ID NO: 7071 - DNA, 503 bp, Homo sapiens
  MAP TO AL133367.2; EXPRESSED IN BONE MARROW, SIGNAL = 1.7; EXPRESSED IN HELA, SIGNAL = 1.1; EXPRESSED IN ADULT LIVER, SIGNAL = 1.2; EXPRESSED IN PLACENTA, SIGNAL = 1.6; NT HIT: AF159295.1, EVALUE 2.00e-31; SWISSPROT HIT: P03326, EVALUE 1.40e-01; EST_HUMAN HIT: BI819202.1, EVALUE 6.00e-63
cctgcgcccgactgcttctccctctctagcgagcttgctgcctcagcctccgccctgctggccgccgctgccgccgccgcaccccggcacctcagagcctcacggagccaagatggccgcccctcggcttcctctgctgcctccggctgccggaagtgacgacaggccgccacccggagtcccgccaatcagcatggcctgagaaagccggcccggctgttgttgctaggggcgacttggtccagacctcgccgcgggggcggtgcagagggctggatagtgctggtcgggtctccgctgactcccgcgggctgcgggttcctcctgtcccgagcgcgccggcaaccgcgaaagagccgagaaacggctctgggcgacagccagagccctcccgctgagttggcatttacacactacaggcctgggttggctggattacagatcgagagcctattgtgcgcaaaagttgcggttgcatccctgggactgcgctgcaccgaatg

SEQ ID NO: 7072 - DNA, 544 bp, Homo sapiens
  MAP TO AL109798.8; EXPRESSED IN PLACENTA, SIGNAL = 2.2; EXPRESSED IN HEART, SIGNAL = 2.6; EXPRESSED IN LUNG, SIGNAL = 2.5; EXPRESSED IN BONE MARROW, SIGNAL = 2.7; EXPRESSED IN FETAL LIVER, SIGNAL = 2.2; EXPRESSED IN BRAIN, SIGNAL = 2.8; EXPRESSED IN HELA, SIGNAL = 4.6; EXPRESSED IN ADULT LIVER, SIGNAL =   2; NT HIT: gi4507280, EVALUE 0.00e+00; SWISSPROT HIT: O76039, EVALUE 1.00e-102; EST_HUMAN HIT: AA403214.1, EVALUE 0.00e+00
tgggacactgcagcccaatgaaaagcagagtcggcatagctatattgacacaattccccagtcctctaggagtccctcctacaggaccaaggccaaaagccatggggcactgagtgactccaagtctgtgagcaacctttctgaagccagggcccaaattgcggagcccagtaccagtaggtacttcccatctagctgcttagacttgaattctcccaccagcccaacccccaccagacacagtgacacgagaactttgctcagcccttctggaagaaataaccgaaatgagggaacgctggactcacgtcgaaccacaaccagacattctaagacgatggaggaattgaagctgccggagcacatggacagtagccattcccattcactgtctgcacctcacgaatctttttcttatggactgggctacaccagccccttttcttcccagcaacgtcctcataggcattctatgtatgtgacccgtgacaaagtgagagccaagggcttggatggaagcttgagcatagggcaagggatggca

SEQ ID NO: 7073 - DNA, 508 bp, Homo sapiens
  MAP TO AC004500.1; EXPRESSED IN ADULT LIVER, SIGNAL = 1.8; EXPRESSED IN BRAIN, SIGNAL = 1.9; EXPRESSED IN HELA, SIGNAL = 1.9; EXPRESSED IN LUNG, SIGNAL = 1.9; EXPRESSED IN FETAL LIVER, SIGNAL = 1.6; NT HIT: gi16158288, EVALUE 0.00e+00; EST_HUMAN HIT: AW998134.1, EVALUE 9.00e-93; SWISSPROT HIT: P41777, EVALUE 2.70e+00
ggcagctgctgaagagcctcgtggaggcctgaagatagaaagtgaaacccctgtagacttggctagcagcatgccctccagcagacacaaagcagccaccaaaggctcaaggaaacccaatataaagaaggagtctaagtcttcccctcgacctacagcagagaaaaagaaatataagtcaacaagtaaatcttcccagaaatcaagggaaatcatagaaacagatacctcatcctcagattcagatgaaagtgagagccttcctccttcctcacaaactcctaagtaccccgagagcaataggactcctgttaaaccctcctcagtggaggaagaagatagcttttttcggcaacgaatgttctctcctatggaagagaaggaacttctttcacccctcagtgagcctgatgacaggtacccacttattgtgaagattgacctgaatcttttgactagaataccaggaaagccttacaaagaaacagagccgcccaagggggaaaag

SEQ ID NO: 7074 - DNA, 504 bp, Homo sapiens
  MAP TO Z95624.1; EXPRESSED IN PLACENTA, SIGNAL = 1.7; EXPRESSED IN ADULT LIVER, SIGNAL = 1.5; EXPRESSED IN HEART, SIGNAL = 2.4; EXPRESSED IN BONE MARROW, SIGNAL = 1.9; EXPRESSED IN FETAL LIVER, SIGNAL =   1; EXPRESSED IN LUNG, SIGNAL = 1.6; NT HIT: gi5803162, EVALUE 0.00e+00; EST_HUMAN HIT: BI837019.1, EVALUE 0.00e+00; SWISSPROT HIT: Q39433, EVALUE 4.00e-30
gtaggcctgggcctgctccctgggcacctgcctcttgaatgccagatgtaggcgattccccaccaggattttagggacaccaggggcatgttcctcaatcttcttaatccatcgatccataccctcgaaagaccagcggtttgcaatgtcgtagaccaggatcactccttgtgcaccacgagagtaggagcggaatatggtacaaaatcttccctgccccgacgtatcccagagcttcagcttcacccgctggccgtccagcaggatggtggtcgtcttgtagtcgattccccccaggtgactgtacggggactcggccgtgccgtcctgcaggctctccaggatctcactcttgcctacgtccctgtcgcccaccagcaggaacttgagcaggaagtcgtaggcctggtcggggctgcccggggcgctcatcgtgctggccccgccccccgcctgggccagaccagcaaggttgtgcgcagaggcggtgccgggcctattttt

SEQ ID NO: 7075 - DNA, 528 bp, Homo sapiens
  MAP TO AL049839.3; EXPRESSED IN ADULT LIVER, SIGNAL =   2; EXPRESSED IN HELA, SIGNAL = 0.58; NT HIT: L28101.1, EVALUE 0.00e+00; SWISSPROT HIT: P29622, EVALUE 2.00e-08; EST_HUMAN HIT: T94145.1, EVALUE 2.00e-94
gggatgtgggttctggctgggatatgtgctaggtaggtgacttgggtgagtcactttgggagtcttcatttcctgctctgttgggtgagaatggagtctagtgctgtgcagagctcacacaggtgggaaacacaatgacatgatggacacaaggagtgtgccttgtaagtctaaaacattgccatccaatagtgttgctgtcaccatacatgtggaaggtggtgggtgttacattgcctttcacaagcccatctgcaggagttgagggtgtcactcacgatctccgggtgctggcccactgccagccttctcagtagggccaggtgttcttctgggggaatttcctgggcattctcttccctcccataggcctgagagtgcagaggatgcatcttatcgactacctgctcctcctgctggttggactactggccctttctcatggccagctgcacgttgagcatgatggtgagagttgcagtaacagctcccaccagcagattctggagacaggtgagggctccccca

SEQ ID NO: 7076 - DNA, 506 bp, Homo sapiens
  MAP TO Z98884.11; EXPRESSED IN LUNG, SIGNAL = 1.8; EXPRESSED IN ADULT LIVER, SIGNAL = 1.6; EXPRESSED IN BRAIN, SIGNAL = 1.6; EXPRESSED IN HELA, SIGNAL = 2.3; EXPRESSED IN PLACENTA, SIGNAL = 1.6; EXPRESSED IN HEART, SIGNAL = 1.8; EXPRESSED IN BONE MARROW, SIGNAL = 1.9; NT HIT: AF263546.1, EVALUE 9.00e-15; SWISSPROT HIT: P16853, EVALUE 8.00e+00; EST_HUMAN HIT: AU124684.1, EVALUE 1.00e-113
ccacccactccctgcatcccagtgttcctgactctgtttctgtaaattaatctatttttccatattggaaaaagggcattctgtaactgtttgtaactatgaaaacagttccttccacaatgaaaagatcaggaaagtactgagtacattcaagcagatgtgtgccttagaacaagtttcaaaaaaggacagtagagcttacctatcgtgggatcagatacttcagggatacaaagtaggtcctattaaagcttaacatttgtccctttagtaggtgggacagtcttggaaattatagagaaattagaagaaatgcaattaaaactttcgttcattgcttcaggaagaatttctttttctgttttagttctaatgtaagagattgttaacagtgagagtcccggagtaacatctttatacttaagaaaatgtatttggaatcgtaatgtactcatgctcatgcctttacatgttccaggtctacaggtccaactgctgccactggc

SEQ ID NO: 7077 - DNA, 534 bp, Homo sapiens
  MAP TO AC011330.4; EXPRESSED IN BRAIN, SIGNAL = 3.1; EXPRESSED IN ADULT LIVER, SIGNAL = 3.1; EXPRESSED IN PLACENTA, SIGNAL = 2.1; EXPRESSED IN LUNG, SIGNAL = 2.6; EXPRESSED IN HEART, SIGNAL = 2.6; EXPRESSED IN BONE MARROW, SIGNAL = 2.6; EXPRESSED IN FETAL LIVER, SIGNAL = 2.4; NT HIT: gi16160681, EVALUE 0.00e+00; SWISSPROT HIT: P34688, EVALUE 1.10e-01; EST_HUMAN HIT: BE731283.1, EVALUE 0.00e+00
gccatgccagggggtctctgtggaggttggcaagctggtccataagttccatgtaggggttggtagcttggtccaggaaacccttgtagaagttggcagcccagctgaagagatccctgaggaggtcatccagccataccaggagttctctgtggaggttggcaggctggccccaagagacttctgcgatcaatctgttatctcagggcatccctgagattgataaaccatcccaagagttccctgaggagattgatctgcaggcccaggaggtccctgaggagataaattagaagtcctgggtggtccctgaagtgattgatcagctgcctggagagggtattcctcaagcccagcatccatctggtgatccaaaccctcagagccagtctctagcccatgaccagcactcaccccttccaccagcaacatgtgattaattttctcattagtggtatcacactataccagccatttgagccagcaaccttttctgttggctaactacactggccagctctcaccagcgatgtc

SEQ ID NO: 7078 - DNA, 500 bp, Homo sapiens
  MAP TO AL020993.1; EXPRESSED IN PLACENTA, SIGNAL = 4.1; EXPRESSED IN ADULT LIVER, SIGNAL = 2.3; EXPRESSED IN HELA, SIGNAL = 1.2; EXPRESSED IN HEART, SIGNAL = 3.1; EXPRESSED IN LUNG, SIGNAL = 2.4; EXPRESSED IN FETAL LIVER, SIGNAL = 3.6; NT HIT: X99832.1, EVALUE 4.70e-01; EST_HUMAN HIT: BF748611.1, EVALUE 9.00e-62; SWISSPROT HIT: O35261, EVALUE 2.10e+00
ccctccagggccatcgtgacttggctgtgggtttcatgtactttcgtgactactcttggcgaagctggaggggctgacatgacagagcccctacggagccccagaggagactaacgcaaggtcatgaagagtgggcgtgatcccctcagactctgcctccctgaacaggaggccgtgggctccaccacgccgggctgaaagctctacatccatgacctcatctgatcctcacaaccatctctagagaggagtatcattacactcattttacagtggaggaaactaaagctcagagagggtaagccaattatccaaggtcacagagtcagaggaaaagctggaaatcaggctcagatggtcagacacccaggcccacacactgagcgaccccaccacactgcccccacccaggctactctagaccacagggaggtcagcccaggaagctagagcagctggattgccaaggctactctagaccacagggaggtcagcccagg

SEQ ID NO: 7079 - DNA, 534 bp, Homo sapiens
  MAP TO AL137846.1; EXPRESSED IN HEART, SIGNAL = 1.5; EXPRESSED IN ADULT LIVER, SIGNAL = 1.5; EXPRESSED IN LUNG, SIGNAL = 1.2; EXPRESSED IN BONE MARROW, SIGNAL = 1.1; NT HIT: D88155.1, EVALUE 7.00e-22; EST_HUMAN HIT: BI833892.1, EVALUE 7.00e-69; SWISSPROT HIT: P04929, EVALUE 1.50e-02
tgggccaacaccgtcaccagcatcaccaataccaccttccctatgaccatcaaagacatgggcattgctgccaccaaccatgcaacatggtctccccgttggcaccgtgtcgccatcaccattgctgtcaccctggttgacaaacaccaccatcgtcaccaatacccacatgcctgtgtttttcatgaacatggccaccgccaccatcaaccacccaaccacagtcacctgtcaccatcatcactgccatcatcatcaccacagtggtcacaatgaacaagaattatgaagcccatcaccagcctccctcggggaggatccctgggcagttattgaacctctcggtcccccatctgtaaaatgggcgtgacgacagtaccaacttcacaaccttgtcctgagaatttagggagccgctgtgtggaaagtgctctgaagaacagtgtctggcacgtgagaagctcggtgggttgggttagctggcaccacaataatgccatcacaatgggagctgctctcaccgccgtcatggcc

SEQ ID NO: 7080 - DNA, 512 bp, Homo sapiens
  MAP TO AC003682.1; EXPRESSED IN BONE MARROW, SIGNAL = 2.3; EXPRESSED IN FETAL LIVER, SIGNAL =   2; EXPRESSED IN HELA, SIGNAL = 3.4; EXPRESSED IN HEART, SIGNAL = 1.9; EXPRESSED IN LUNG, SIGNAL = 1.7; EXPRESSED IN BRAIN, SIGNAL = 1.8; EXPRESSED IN PLACENTA, SIGNAL = 2.3; EXPRESSED IN ADULT LIVER, SIGNAL = 1.6; SWISSPROT HIT: Q13398, EVALUE 1.00e-65; NT HIT: gi14766466, EVALUE 0.00e+00; EST_HUMAN HIT: AA312672.1, EVALUE 0.00e+00
cgcactgtccacagtcgtaaggccttaatccagtgtgaattttctggtgttcaacgagggtatagctttgtctaaaaaatttcccacattcactgcactcaaaaggcctttctccagtgtgagttctctggtgcctaacaagtttagatttgaacataaaagctttcccacattccccacatacataaggcctttctgcagtgtgaactttgtggtgtttattgagggtggttctttggctaaaggattttccgcactcatcacactcaaagggcctagctccactgtgaattaactggtgctgaatgaggccacactttaggctaaatgatttcccacactggccacactcataaggccttgctgtagtgtgaattctctggtgtacaacaaggctgaagctttgtctgaataatttcccacattcaccacactcatatggcttttctcctgtgtgagttctctggtgtcgaacaagagtggatttggacccaaaggcttttccacattca

SEQ ID NO: 7081 - DNA, 516 bp, Homo sapiens
  MAP TO AC022150.5; EXPRESSED IN LUNG, SIGNAL =   2; EXPRESSED IN HEART, SIGNAL = 1.8; EXPRESSED IN PLACENTA, SIGNAL =   3; EXPRESSED IN ADULT LIVER, SIGNAL = 1.7; EXPRESSED IN BONE MARROW, SIGNAL = 2.4; EXPRESSED IN FETAL LIVER, SIGNAL = 1.8; NT HIT: gi14754683, EVALUE 0.00e+00; EST_HUMAN HIT: BI260133.1, EVALUE 0.00e+00; SWISSPROT HIT: P51522, EVALUE 2.00e-48
aagtgttgactgcttgccaaaggctttgccacactcattacacttgtaaggtttctctccagtgtgaagtccagtatgttgttccaggtgtgaatcactcccaagtcttgtcagaaaccttacatttgtaagctttctctccagtataaattctcctatgtctttaaggtgtgatttccaaatggaaactttgtcacatgcttcacatttctaaggtttctctccagtatgaattctatgatgacgtgaaaggtgtgattgttgattaaaagccttcccacattcattacacttgtaaggtttctctgcagtgtgaattctggtatgtcttgacaggagtgaattacgcacgaaagccttgtcacaaattgtacatttgtaagatttctctccagtatgaagtctacgatggtatataagggatgagcagtgacggaaggtattgccacactcattacacttgtaaggtttctcaccactatgaagtctacgatggcaatgaagggatgacctgcg

SEQ ID NO: 7082 - DNA, 536 bp, Homo sapiens
  MAP TO AL139395.2; EXPRESSED IN HELA, SIGNAL = 0.86; EXPRESSED IN ADULT LIVER, SIGNAL = 1.5; EXPRESSED IN PLACENTA, SIGNAL = 1.5; EXPRESSED IN BRAIN, SIGNAL = 1.5; EXPRESSED IN HEART, SIGNAL = 1.4; EXPRESSED IN FETAL LIVER, SIGNAL = 1.4; EXPRESSED IN LUNG, SIGNAL = 1.6; NT HIT: AF401481.1, EVALUE 8.00e+00; EST_HUMAN HIT: BG482898.1, EVALUE 1.90e-01; SWISSPROT HIT: Q17848, EVALUE 7.60e-01
ttggtttggcttcccccacggccaatgccaatttgcattttctctccattgatggcagccatgtatttccctttctttgtggacttagggacctggcgggagtttttgccaggtggtttttcaatccccttgttgttacctttgagggattttttcctggtgtttttctgagaagagctttggttcatagccccactcttgctgggtgaacttttctttcttgattttgacactttgttgttggtactaatttgaccagatggatcattaaatgttgacaggcaagggtttttttggagcaggctgacagaatcctcatcattgaacatatggaactgaaactggtgattatttaaagtaaatccatcctccatttggacctgccgtgaaagggtactgcagtcccacttgattttttccacactgtccaatggtcctgggacaccctcttggaacccctttagtgttcctagtgtcttcatactctcacatctggtaatttgaggggaaagactaggggtgtccggtggggacat

SEQ ID NO: 7083 - DNA, 563 bp, Homo sapiens
  MAP TO AC012064.1; EXPRESSED IN LUNG, SIGNAL = 2.6; EXPRESSED IN BONE MARROW, SIGNAL = 2.3; EXPRESSED IN BRAIN, SIGNAL = 2.5; EXPRESSED IN ADULT LIVER, SIGNAL = 2.9; EXPRESSED IN HELA, SIGNAL =   1; SWISSPROT HIT: Q00657, EVALUE 1.00e-19; NT HIT: gi16161051, EVALUE 1.00e-97; EST_HUMAN HIT: BG991974.1, EVALUE 2.00e-97
gcagcctcagctcccgcaacaccctggccttctcaatggatgtgggaccagtgcacacagatgccaccctacaagtgaccattgccctagagggcccagtagccccactgaagctggcccagcacaaggagatctacatcttccagggagaggcagctgagatcagaagggaccagctggaggtgaggagctggaggtggtgagcggggtgtggaccaggtagagggccttcctcccagcctccatgccgggaacacatgtgacttgggctgtacctgtggtggtcccagcttgtgtgtgtgcacgtgcctcagatgtgctcccatatatgttgtgttcccaagagtttctggggagcttgctgtacacccatcctcctgggagtggtgtgtgcctctagagctggtgtccactcatgtccatggcatggctgagcatgcagattcctggacgccacccagccctacagaatctctgaagtggagcccgagaatctgcattgcagtcagttccctgggagggcatcacgggtcctgaacttttgggattgctggccgtggaga

SEQ ID NO: 7084 - DNA, 559 bp, Homo sapiens
  MAP TO AL160175.5; EXPRESSED IN ADULT LIVER, SIGNAL = 1.8; EXPRESSED IN HELA, SIGNAL = 2.3; EXPRESSED IN HEART, SIGNAL = 1.7; EXPRESSED IN LUNG, SIGNAL = 2.5; SWISSPROT HIT: Q07817, EVALUE 4.00e-24; NT HIT: D30746.1, EVALUE 0.00e+00; EST_HUMAN HIT: BI522819.1, EVALUE 0.00e+00
gccattgatggcactgggggtctccatctccgattcagtcccttctggggcctcagtcctgttctcttccacatcactaaactgactccagctgtatcctttctgggaaagcttgtaggagagaaagtcaaccaccagctcccggttgctctgagacatttttataatagggatgggctcaaccagtccattgtccaaaacacctgctcactcactgagtctcgtctctggttagtgattctcttctaagatccaaagccaagataagattctgaagggagagaaagagcttcaggaaaaaaaaataattaatatgcatgccatttaccctaaaaattccattccccctccaggtaccagaactggtttctttgtgggtcttacgaaggtctgggtctaggttccaagatacttcacttaagtcaaatcgaaagcaccagtggactctgaatctcccaccagccttttctacccccgtcttctccgaaatgccttcctcggaaagtcactccctgggcagtcccccccgccccactcccgctcccccgcaccacctaca

SEQ ID NO: 7085 - DNA, 503 bp, Homo sapiens
  MAP TO AC008747.4; EXPRESSED IN ADULT LIVER, SIGNAL = 1.8; EXPRESSED IN HEART, SIGNAL =   2; EXPRESSED IN BRAIN, SIGNAL = 1.5; EXPRESSED IN BONE MARROW, SIGNAL = 1.7; EXPRESSED IN FETAL LIVER, SIGNAL = 1.2; EXPRESSED IN HELA, SIGNAL = 0.54; NT HIT: M32788.1, EVALUE 0.00e+00; SWISSPROT HIT: P03338, EVALUE 3.00e-20; EST_HUMAN HIT: BF732456.1, EVALUE 7.00e-35
cggatcctcagctcccttggctcctcctgtattgcctccctctgaagaagaggaaagttttcctcacacagttctgccaccttataaccctcctgctcccccagaatctccccttgcctcctcaactacatctcctgtggcgtccccatctattgcctcctgattgtggccatggcaggaggaggtagcccccctcctcccactgagagaggcacaaatccctccgggtgatgagcgctcagctccattcttagtttacgtccctttctctacttctgacctgtacaactggaaggctcataatccccccttctttgaaaaaccccaggttctgacctcactgatggagtccatgctccagactcaccggcccacctgggatgattgtcagcaacgccttttaaccctcttcatctctgaagagaggaattgtatccgaagagaagccagaaagtatttccttacatcagctgatagaccagagggggaagcccaaaacctcg

SEQ ID NO: 7086 - DNA, 530 bp, Homo sapiens
  MAP TO AC004477.1; EXPRESSED IN BRAIN, SIGNAL = 4.6; EXPRESSED IN HELA, SIGNAL = 1.5; EXPRESSED IN ADULT LIVER, SIGNAL = 4.3; EXPRESSED IN HEART, SIGNAL =  23; EXPRESSED IN LUNG, SIGNAL = 4.6; EXPRESSED IN BONE MARROW, SIGNAL = 1.8; NT HIT: gi14771855, EVALUE 0.00e+00; SWISSPROT HIT: Q14494, EVALUE 7.00e-35; EST_HUMAN HIT: AI885559.1, EVALUE 0.00e+00
gagttcctgcgctccctgcgacagatgaagcagaaggtccagagcctgtaccaggaggtgtttgggcggctgcgagatgagaacggacgaccctactcgcccagtcagtatgcgctccagtacgccggggacggcagtgtcctcctcatcccccgcacgatggccgaccagcaggcccggcggcaggagaggaagccaaaggaccggagaaagtgagcctggggaagaagggggtttgaagcccaccaagaccgaaactggagaagggctggacctggacctggacctggacctacagcggggacttaaatgccttcttatccaatatatcttctcagatgggatgactgcgggtcagtgtacaggaagaggcaggcactggctggctcagctccactcgggtggagtggaagtggccagaccatttagacggacagggtcctcaccctacccctttcctgtgaggcaggggtggtggtggagttgctggaggtagaggagctatgtggagcaaaggccgacagagggga

SEQ ID NO: 7087 - DNA, 530 bp, Homo sapiens
  MAP TO AC013648.3; EXPRESSED IN ADULT LIVER, SIGNAL =   2; EXPRESSED IN BRAIN, SIGNAL = 4.9; EXPRESSED IN HELA, SIGNAL = 7.9; EXPRESSED IN LUNG, SIGNAL = 2.4; EXPRESSED IN HEART, SIGNAL = 2.4; EXPRESSED IN BONE MARROW, SIGNAL = 2.5; EXPRESSED IN FETAL LIVER, SIGNAL = 2.4; SWISSPROT HIT: P07197, EVALUE 2.00e-03; NT HIT: gi15312381, EVALUE 2.00e+00; EST_HUMAN HIT: BG168568.1, EVALUE 0.00e+00
aggtggaaggagccgggtggatgccgggcagggaaccaaccacacatgcagaagcacagggggatgaaggagatggagaggaaggactacagaggacaaggatcactgaggaacaggacaagggcagggaagacacagaaggacagataagaatgcccaagttcaagataccctccttaggatggtcgccaagcaagcacacaaagacaggcagagaaaaagccacagaagacacagagcagggaagggaaggagaggccacagcaacagctgatagaagagaacagagacgcacagaggaaggattaaaagacaaagaagacagtgactcaatgacaaacacaacaaaaatacaactaatacacgatgaaaaacgcttaaaaaaggaacaaattctgacagaaaaggaagtggccaccaaagacagcaagttcaaaatgcccaagttcaagatgccattgttcggggcgtcagccccaggcaagtccatggaggcctcggtggatgtgtctgtgccgaaggtggaggcc

SEQ ID NO: 7088 - DNA, 579 bp, Homo sapiens
  MAP TO AL355838.2; EXPRESSED IN ADULT LIVER, SIGNAL =   3; EXPRESSED IN BRAIN, SIGNAL = 4.1; EXPRESSED IN HELA, SIGNAL =   6; EXPRESSED IN BONE MARROW, SIGNAL =   5; EXPRESSED IN LUNG, SIGNAL = 3.2; EXPRESSED IN HEART, SIGNAL = 3.7; SWISSPROT HIT: P39811, EVALUE 7.30e+00; NT HIT: gi7705432, EVALUE 1.00e-116; EST_HUMAN HIT: BG755311.1, EVALUE 1.00e-116
tgagggcaatggccagcagcgcatgcatctgatcattctgcttgttaatcatctcatacttacatgtggtcctctggaacatgctcttggtcctctggatgtagaagaggatattggtgaagacctggatggcgtcctggtagcaatgcatcatcaaatacgcaaacccaagataatagtatgtggtgacctggcactctaacacacaggaatacatgatcttctggttcagctcgatgttctctagcaccttgatggcctggtactaatctcctaacagggattgcaggcagagaaaccccacaaggctgaagtaaccaagcatctccccagccacactctcagggtcacctcgcttgtgtatacctccaactgtcggttgatgttggatttgtctacccaggaatgaaggacattgaggacactgtgaacattccagattttgggattggaacaaaggaagtcaatctcctcctccgacttcttagcagtcttacagcagtactgactgaatgactgaaactggtagatgaactcatcaatgatatcctagagcccctggttgggtagttcaaggga

SEQ ID NO: 7089 - DNA, 509 bp, Homo sapiens
  MAP TO AL137038.3; EXPRESSED IN ADULT LIVER, SIGNAL = 1.6; SWISSPROT HIT: P07197, EVALUE 8.20e-02; NT HIT: AF321876.1, EVALUE 5.00e-69; EST_HUMAN HIT: BG741659.1, EVALUE 0.00e+00
gtgcctgtgccaccatccccagtgattcctccaggcccctgcagacggcgggctcttccaatgcggagaaaacgtcggcctcctgctctgaaaaccaccagcctcgaggctgctcctccggagggcaggaccctacagcgatatgaggaaaaaggatgggattagggcatgggaggctccaggaaggaaagaaatgagaaagggcaggagggttcgagatgacagagagaaaaagggaatcgaggcaaaagtctgggggaaatgagaggggggaaatgagtggattggcctgaacaggagacagcggaggaagacggtgaaggcggaagcctgggaggacaggctgcagtttgagcaaagagggtatgggtcgcgagaaatgaagggtgtggactgggtgggaggaatgcgggtggacgcagggtgggggatgctgaagggtgtcgagggggacgaaacaagatggaggaaactgagtgcgtttccggagcggggcttgtctcaccgaa

SEQ ID NO: 7090 - DNA, 562 bp, Homo sapiens
  MAP TO AC000090.2; EXPRESSED IN HEART, SIGNAL = 1.4; EXPRESSED IN LUNG, SIGNAL = 1.1; EXPRESSED IN BRAIN, SIGNAL =   1; EXPRESSED IN HELA, SIGNAL = 0.7; EXPRESSED IN ADULT LIVER, SIGNAL = 1.2; NT HIT: L41825.1, EVALUE 0.00e+00; EST_HUMAN HIT: BE146928.1, EVALUE 7.00e-26; SWISSPROT HIT: P10264, EVALUE 7.00e-14
ggccatgaagcacggcaaccaaactggctcgactgattcttttcttggagcctgctataattgtggccaacttggtcatacccaaaaaaactacactgttaaaaacttaaaagcggccaagccggctcaacaaacacggccaaatgctcctgctactgtttgcctgcgttgtcgtaagggtaaacattgggcaagtacttgccactcagtctgatatagatgaaaatcccttgccacagaaccagggaaacaggaagcaaggccagtcccaggccccaatatcaaatgggacacctcggactcagaccaatgttgtgtttttgcgtcaagcagtcccaacgcagcccccagcacaaacaaatttacctacagccaatccagatgggtcccagcctcttcttctgtctcagtacaatgcttgtctacctccacagtaggcagcagggcggtcgatctctgtagtaccattcctctaaatttactacctaattctttgcctttaattgtccccatgggggtcactggccctttacctcaaggttcggtgggcctggtgttaggc

SEQ ID NO: 7091 - DNA, 506 bp, Homo sapiens
  MAP TO U91328.1; EXPRESSED IN LUNG, SIGNAL = 1.2; EXPRESSED IN HELA, SIGNAL = 1.2; EXPRESSED IN ADULT LIVER, SIGNAL = 1.2; EXPRESSED IN BRAIN, SIGNAL =   1; NT HIT: U91328.1, EVALUE 0.00e+00; EST_HUMAN HIT: BI604131.1, EVALUE 0.00e+00
gaccagcgcgagaagagcgggatttcgctttggcgcgagctttgcctccttgcttaccacgtccagacattgcaatcagacaaaaatcaccaaaaccagcggcctaagctcacgagaaaacaaacaaaatcaagaaatatgtaaaacatggccgcttttataggtagttcctggggagtaaatccgactttttgattggtcggtagcaaatgctagtcagatagccaatagaaaagctgtactttcatacctcatttgcatagctctgcccacggatgacaactgtgcagtttgtcttccaattaactaagaggtactctccatccctcattagcataaaagccctataagtagcagaaatccgctctttactttcgacacatttctggtgttttaagatgcctgagccagccaagtctgctcccgccccgaagaagggctccaagaaggcagtgaccaaagcgcagaagaaagatggcaagaagcgcaagcgcagccgcaaggag

SEQ ID NO: 7092 - DNA, 563 bp, Homo sapiens
  MAP TO AL035701.13; EXPRESSED IN ADULT LIVER, SIGNAL = 1.6; EXPRESSED IN PLACENTA, SIGNAL = 1.4; EXPRESSED IN LUNG, SIGNAL = 1.2; EXPRESSED IN HEART, SIGNAL = 1.5; EXPRESSED IN BRAIN, SIGNAL = 1.3; NT HIT: AL163279.2, EVALUE 3.40e-02; EST_HUMAN HIT: BE538361.1, EVALUE 2.00e-01
ccctgcagtggatgcaggagcagtggatgaagggagcccttctcttctgatgccatcagctgctgacttcaccacacatctgacctagatggtcaacaattttgtccaccctttaagcaaccaggcacctactgaatgaacaaagaggatatggacaatatcccgcaagtgctagaaaatttaagttctgctaaattggatattacatacattcccccagagcttggccttaccctattgttcaaattgaggtaaatttttctggtcataatgatagtaatccccaacacttaacatgtgtcagatactgtgctgagtacttgctttaaagcttctcattcattcgacagtaaccccaagagatatgtacttaacagggccctttttgcagatgaggaaatgaaagctcaaatagctcgagacattggcccatgattgttctgctggtgagtagcagagtgaatactcaaattcaggtctggtaggttctaggaattgtgctacataacttttaccatccccccaactttgacagcccatattcaccaatgcacaggccagcc

SEQ ID NO: 7093 - DNA, 513 bp, Homo sapiens
  MAP TO AP001678.1; EXPRESSED IN ADULT LIVER, SIGNAL = 1.2; EXPRESSED IN BRAIN, SIGNAL = 1.2; EXPRESSED IN HELA, SIGNAL = 1.8; EXPRESSED IN LUNG, SIGNAL =   1; EST_HUMAN HIT: BE222256.1, EVALUE 9.00e-56; SWISSPROT HIT: P70213, EVALUE 1.00e-12; NT HIT: AL163209.2, EVALUE 1.00e-113
tggcaacatcccctccccaacccatggtaccatcaccctttccacctttgtctgaggaggtaaaccctacactgcctgaggcaacagtgatgggctttcctgaggcagttgccaggcaaaataacgttgattctcctcaggagtcagccccaatgcccctgtttgcttctagacctataactagactaaagtccctatgggcccctagaggtgaggttgagagtgtgacccacgggaggtgtggtacactcaagaagaactgtttgtgttctctaatttatataaacagaaatctgaagaacaggcatgggaacggatattaggagtatgggataatggtgtaacaaacatagagttgaatcagactgaatttattgatttgggcccactaagtagggactctgcatttaatgttgcagctcggggaattaaaaagggttctaatagtttgcttgcttgtttagccaaaatatgtattaaaagggcccactgtgagcaagctggaaatgcctg

SEQ ID NO: 7094 - DNA, 524 bp, Homo sapiens
  MAP TO AL022328.21; EXPRESSED IN HELA, SIGNAL = 2.4; EXPRESSED IN BONE MARROW, SIGNAL =   2; EXPRESSED IN FETAL LIVER, SIGNAL = 1.1; EXPRESSED IN ADULT LIVER, SIGNAL = 1.5; EST_HUMAN HIT: AW583846.1, EVALUE 0.00e+00; SWISSPROT HIT: P21133, EVALUE 5.60e-01; NT HIT: gi15982587, EVALUE 0.00e+00
cgaccctgatgctggcgttggacacatgtccatggatgttccaccgtggccgagtgggagccacatctgacacagactcccctaagctgatgctggcattggatacgtgtccgtgggtgttccaccgtggctgggtgggagccacatctgacacattctccccgaccctgatgctggcgtcagacacgtgcccgtgggtgttccaccgtggccgggtgggagctatttcagaagcgtagtcccctgtgggaagaccaccccctgacacctgcccaaagagccgctctgtgggctggctgctcccctcctccagagcagcacgcctgggtgggtgtgaggggagcagagtctcccgcgaggcggagccacaggcatccatcttcccacaactgtcctcccacagctgtagccctgagctgcccaagctgcactctgcagcctgcaggggccctggtgcaggtgaggtggccacagctggcctcaggacagtactaaagtcgtactcctgtggcctggagggctga

SEQ ID NO: 7095 - DNA, 503 bp, Homo sapiens
  MAP TO L39891.1; EXPRESSED IN HELA, SIGNAL = 2.4; EXPRESSED IN ADULT LIVER, SIGNAL = 2.6; EXPRESSED IN HEART, SIGNAL =   6; EXPRESSED IN BRAIN, SIGNAL =  13; EXPRESSED IN BONE MARROW, SIGNAL = 4.8; SWISSPROT HIT: P98161, EVALUE 4.00e-12; EST_HUMAN HIT: BF848335.1, EVALUE 0.00e+00; NT HIT: L39891.1, EVALUE 0.00e+00
caccgcagctccgccaactccgccaactccgttgtggtccagccccaggcctccgtcggtgctgtggtcaccctggacagcagcaaccctgcggccgggctgcatctgcagctcaactatacgctgctggacggtgcgtgcagcgggtggggcacacgcggccccctggccttgttcttggggggaaggcgtttctcgtagggcttccatgggtgtctctggtgaaatttgctttctgtttcatgggctgctgggggcctggccagagaggagctgggggccacggagaagcaggtgccagctctggtgcagaggctcctatgctttcaggcccgtggcagagggtgggctcaggagggccatcgtgggtgtcccccgggtggttgagcttcccggcaggcgtgtgacctgcgcgttctgccccaggccactacctgtctgaggaacctgagccctacctggcagtctacctacactcggagccccggcccaatgagcacaac

SEQ ID NO: 7096 - DNA, 534 bp, Homo sapiens
  MAP TO AC004943.1; EXPRESSED IN ADULT LIVER, SIGNAL = 4.1; EXPRESSED IN HEART, SIGNAL = 1.8; EXPRESSED IN LUNG, SIGNAL = 4.4; EXPRESSED IN PLACENTA, SIGNAL =  18; EXPRESSED IN BRAIN, SIGNAL = 1.4; EXPRESSED IN HELA, SIGNAL = 7.9; SWISSPROT HIT: P05783, EVALUE 4.00e-71; EST_HUMAN HIT: BE744906.1, EVALUE 0.00e+00; NT HIT: gi4557887, EVALUE 0.00e+00
tccgggagcacctggagaagaagggaccccagttcagagactggagccgttacttccagaccatcaaggacctgagggctcagatcttcgcaaatactgtggacaatgcctgcatcgttctgcagattgacagtgcccgtcttgcagctgatgattttagagtcaagtatgagacggagctggccgtgcactagtctgtggagaatgacatccatgggctctgcaaggtcattgatgacaccagtgtcacttggctgcagctggagacagagatcaaggctcgcaaggaagagctgctcttcatgaagaagaaccacggagaggaagtaaaaggcctacaagcccagattgccagctctgggttgaccttggaggtagatccccaaatctcaggacctcgccaagatcatggcagacatctgggcccaatatgacaagctggctcggaagaacagagaggagctggacaagtactggtctcagcagattgaggagagcaccacggtggtcaccacgcagtccgtcaaggttgga

SEQ ID NO: 7097 - DNA, 553 bp, Homo sapiens
  MAP TO AP000354.1; EXPRESSED IN LUNG, SIGNAL =   2; EXPRESSED IN BRAIN, SIGNAL = 1.9; EXPRESSED IN HELA, SIGNAL = 2.3; EXPRESSED IN ADULT LIVER, SIGNAL = 2.1; EXPRESSED IN FETAL LIVER, SIGNAL = 1.9; EXPRESSED IN HEART, SIGNAL =   2; EST_HUMAN HIT: BG619925.1, EVALUE 2.00e-01
ccatcccaaagcctttttctgtgtgtgtgttcttcagattctttctcagtctgtttcctctattttgtataaagttctgagaggttttctcatccagtttcctagcacaccacttaaaagaaactactgatttaaggactataaagaattgacattgaacgaaaaagacataattataaaattatgctagaaatatataagcatgtcatttaaagatcatataacaggagaaaatatttgtgccctctggatctttaagggcattgctttactaatgcagagttacattctgcttgtggttatcctaaaatcattgagaaaattttagccagtaaagtgggcggtgggggtgggggtgggggtgggagtgggggcagcagtttttagtaatcaggggaaaacaattactgacatgtaacatggattgcattaaatcagcccaggaatgatagagttaatggcgcctgcagatccaccttcttctgaggtgagaaagaatctgaggtcaggaactttgtcgactatgtgacttgtcactgtgctcagccctgcg

SEQ ID NO: 7098 - DNA, 511 bp, Homo sapiens
  MAP TO AC004065.1; EXPRESSED IN LUNG, SIGNAL = 1.5; EXPRESSED IN ADULT LIVER, SIGNAL = 1.9; EXPRESSED IN BRAIN, SIGNAL = 1.6; EXPRESSED IN HELA, SIGNAL = 1.5; SWISSPROT HIT: P29371, EVALUE 1.20e-02; NT HIT: X65172.1, EVALUE 0.00e+00; EST_HUMAN HIT: BI769912.1, EVALUE 4.60e-02
cctgcaacgtcaccgaagcgtgggaccccatgagtataaagagagcctgtagcgcaggacgctcagttctccagcctgtgccgggcagctggcaccctccctacgtgtgatgtgactcgataacccttaatctcgggaggatctcattctttctgcctgccagagccgcaagcgcctctgagaaagtgcagctgttgccccttagccccagctgcatcccctaaccagcagggattgcagtatctttcagcttccagtcttatctgaagactccggcaccaaagtgaccaggaggcagagaagaacttcagaggagtctcgtcttgggctgcccgtgggtgagtgggagggtccgggactgcagaccggtggcgatggccactctcccagcagcagaaacctggatagacgggggtggaggcgtgggtgcagacgccgtgaacctgaccgcctcgctagctgccggggcggccacgggggcagttgagactgggtggctgcaactgctgga

SEQ ID NO: 7099 - DNA, 510 bp, Homo sapiens
  MAP TO AL139316.1; EXPRESSED IN LUNG, SIGNAL = 3.4; EXPRESSED IN HEART, SIGNAL = 2.8; EXPRESSED IN ADULT LIVER, SIGNAL = 1.3; EXPRESSED IN BRAIN, SIGNAL = 1.5; EXPRESSED IN BONE MARROW, SIGNAL = 2.2; SWISSPROT HIT: P10386, EVALUE 7.10e-01; NT HIT: gi15300842, EVALUE 0.00e+00; EST_HUMAN HIT: BG742081.1, EVALUE 0.00e+00
tgctggtggtccccaggctcctggtggaacggtgccccatggaacaggtggtgctgccccaggggcttggggaggaggaggagcgggatatgggcctggagatggatatggcatattaggggtaggatactgccctcccattcctggcgcccaaggtccagaagacatggatccccatggacctaaaggaccagctgcagctggatctgtgggtgcaccatatggtctgggtagctctggaaagggcatatttggtgtaggatatggccctgtggggccagggcccggcacagttggggctggataaggaccaccaggtgggggacatgatggtccggaaggaggaaagggtgctgggggtcctggaggtggtccggtgggaggcacggagggatacattcctgttggtgctggtccaaaaggcacagtggagggtgttgcacttggtgggagtccagatggcactgaagatggagcactcggattattccaagggttggagcctggcca

SEQ ID NO: 7100 - DNA, 509 bp, Homo sapiens
  MAP TO AC001070.1; EXPRESSED IN HELA, SIGNAL =   7; EXPRESSED IN LUNG, SIGNAL = 6.6; EXPRESSED IN HEART, SIGNAL = 4.3; EXPRESSED IN FETAL LIVER, SIGNAL = 2.4; EXPRESSED IN ADULT LIVER, SIGNAL = 3.3; SWISSPROT HIT: O22315, EVALUE 7.00e-03; NT HIT: gi16165307, EVALUE 0.00e+00; EST_HUMAN HIT: AU140691.1, EVALUE 0.00e+00
agaggcaccggggctggaacctgggacattcttgcagcaaggccagcagcagacatggacggaggaggccgagcggtgccaagactgatagctgtcagggcaagtgcaatcctggactgagcatgattttctggcacagatgttctctggtggtcaggtattcggggacctggaccatccatcatggagccgccggcttgctgcaggacagacatgggtgttctagagctgccaaggggttcaagcattccaggtgatctgcagcgatcaagaggtgttggggacatgctaggacgactgaagcagctcattctggaactgttgagtgctactggaggtgtccgtgaaccagaatgatttcttgttgctggaggagtagcagatcgtgaacgatcagaactacttccagatgcagaacgcctgcggatggctggaggagatcttgttaaggaccgtttaccccgagctgttcgtggagtacgggatctggagcggcggcggatagcaag

SEQ ID NO: 7101 - DNA, 524 bp, Homo sapiens
  MAP TO AC004789.1; EXPRESSED IN ADULT LIVER, SIGNAL =   2; EXPRESSED IN PLACENTA, SIGNAL = 2.6; EXPRESSED IN BRAIN, SIGNAL = 1.8; EXPRESSED IN LUNG, SIGNAL = 1.8; EXPRESSED IN FETAL LIVER, SIGNAL = 2.1; SWISSPROT HIT: P21736, EVALUE 9.60e-01; NT HIT: AF119669.1, EVALUE 2.00e+00; EST_HUMAN HIT: W85705.1, EVALUE 1.00e-115
gcaccgtgcctggtgtgtggactcagttgatacttgttgaccgaaggcaaatctacagaaaagcactaggaagaaagggaaagtcactcggctgtgccacatgagctttcaacctatgccgagctgcctccagcccgcgccacccccctgcgtctacggctttgcagtcacaagatcctttgtatgtgctgtctatatataatcgctttgtttcacaaagatctgtgcatctttccatgtcatccgccagattcccagtctttcccaggccagcctaggctattggctgctcgcaggaactcccttctgccttctctcctgccagttttggctcaacccagtccctctgcctagaaagccctagtatttccatcatgattcttcctaccctgcaaagcccagcccaggaggaaccccctcctctcacggaaccccctcctctcacagaaccccctcctctcacacaatcccctcctctcacacaatcccctcctctcacagaaccccctcctctcacggaaccc

SEQ ID NO: 7102 - DNA, 570 bp, Homo sapiens
  MAP TO AC006992.2; EXPRESSED IN FETAL LIVER, SIGNAL = 2.2; EXPRESSED IN ADULT LIVER, SIGNAL = 1.7; EXPRESSED IN PLACENTA, SIGNAL =   2; EXPRESSED IN BRAIN, SIGNAL =   2; EXPRESSED IN HELA, SIGNAL = 3.4; EXPRESSED IN LUNG, SIGNAL = 1.8; EXPRESSED IN HEART, SIGNAL = 2.1; EXPRESSED IN BONE MARROW, SIGNAL = 2.2; EST_HUMAN HIT: AV646395.1, EVALUE 8.00e-01
tgggagggatccccaaatcaaatcttccctcaacgatgaagatttttatccagcacacagcatataataaatatgtgatgacagaatgattgaatctgacacttgggagtatagacaaaatttggcactactggctcaaaaaatggagtttaaaaattgccacaagcaatggcactattgcctcattgtcttatattattatcttatttaattttgacacatactatatatttattgtgtgaagaatttgtatcttctatttcttttgtactcatccacaaatgcccatgacagaggcctgttaagtatttcccttactgcatatatcatactgtgtataatttccactgaaagatttaacggcaaagatcaggaaggagagaggaaaatagtattctgcctcaactataatattgagtggtgtgaaaaaaacttgataacttgacccaatcttcctttcaggctgattttctgccttagcaatgtgtctcactctagacaccatatttgaaccatagaggtttacccatagcttctggaagacaatttctgctctcatgcatctgggcc

SEQ ID NO: 7103 - DNA, 505 bp, Homo sapiens
  MAP TO AL022152.1; EXPRESSED IN PLACENTA, SIGNAL = 1.5; EXPRESSED IN BRAIN, SIGNAL = 1.2; EXPRESSED IN HELA, SIGNAL = 1.4; EXPRESSED IN ADULT LIVER, SIGNAL = 1.7; EXPRESSED IN HEART, SIGNAL = 1.5; EXPRESSED IN BONE MARROW, SIGNAL = 1.5; EXPRESSED IN LUNG, SIGNAL = 1.5; EST_HUMAN HIT: BG480822.1, EVALUE 6.00e-29; NT HIT: AF064589.1, EVALUE 0.00e+00
tgccccgaggtgctttctcgcgtccttctacaggttcccagaagacaaaccccctaggaagacaggcgacctgtgaggccctagagcaccaccttaagagaagaagagctgtaagccggcctttgtcagagccatcatgggtgagtttctcagctgaggccactggcactgtccctctctccctcagtcctgtgggatcccatcatacctattcgtgttcacacgtttacctgctgctcctgaacaatattcatcatgcctctctttctaaaccttccacgccccagctttgagcaaggcttccagaaggcaattttcatactggagttggtagatgcagaggatcccccagatgaggaagaggaggaagcttcctccattttctcttcctctttccactttttattcccctcgtcctcctcctgtttttctttctcatcctcatcctcctctctgcttctgcgttctccaggggacaaggatatgcctactgctgggatgccga

SEQ ID NO: 7104 - DNA, 501 bp, Homo sapiens
  MAP TO D84394.1; EXPRESSED IN ADULT LIVER, SIGNAL =  37; EXPRESSED IN HELA, SIGNAL =  27; EXPRESSED IN BONE MARROW, SIGNAL =  29; EXPRESSED IN LUNG, SIGNAL =  29; EXPRESSED IN HEART, SIGNAL =  11; EXPRESSED IN FETAL LIVER, SIGNAL = 9.2; SWISSPROT HIT: P39023, EVALUE 7.00e-86; NT HIT: gi14753112, EVALUE 0.00e+00; EST_HUMAN HIT: BE748899.1, EVALUE 0.00e+00
gcccgctgctttgtctgcaccagcaaggacttgcggagggtgagcacccacttcttggttcccaccacacagcctttcagcatgacaaagtcattggtcacttcaccatagtggacgaagccacccaaagggttgatgctcttgtcagacaggtcatagtcagtggaggcattgttcttgatcagcttgccatccttgataaggtagccctagccaatcctatagatcttcttgttgatctcagtgcggtgatggtagcctttctgcccaccacgtaccacagagaagcccacacgagcaggatgccatgccccaatacaggccaccttgcacaggccttggtgggtcttgcggggcagcttcttggtgtgccaacgactggtgacccttttgtagcctttgcccttggtcaccctgatgacgtcgatcatctcatcctgcccaaacacttggttcacaggtacctggtgcttgagcctctcgccagcccagtccagcttc

SEQ ID NO: 7105 - DNA, 503 bp, Homo sapiens
  MAP TO AJ239319.2; EXPRESSED IN ADULT LIVER, SIGNAL = 1.7; EXPRESSED IN LUNG, SIGNAL = 1.3; EXPRESSED IN HEART, SIGNAL = 1.4; EXPRESSED IN BRAIN, SIGNAL = 1.3; EXPRESSED IN HELA, SIGNAL = 0.33; SWISSPROT HIT: Q14202, EVALUE 5.00e-18; NT HIT: X95808.1, EVALUE 1.00e-84; EST_HUMAN HIT: AL523289.1, EVALUE 2.00e-84
gatggagaagggccagggggggcccatcctcgagttggggcagtctgggattccagtagatcctctccaaattccatgtctactggtaggtctccagccaggggcttctctggcagggtcaatgggtcaaatggactggggaaatcactggggtccatgagtatggctggatatgtactgcagattaggagtagaagagggggcagtagaggtggtcttagcctgaattccttcttatataggctctgagacacaccccatcatccacttggatttctcatgagcagcccccaccaccacaatctacaagcatttccgaaggctttagtcctaatgaccactccccccaatacagcgcccccagtggggagaggcgttccccgccctggccccgtgcccacactggccaggcagtcggtcgttctacccgcccacccccctactcgactgcaactcccattcccttccccccttaccttttaccccccgcaactcaggctgaa

SEQ ID NO: 7106 - DNA, 507 bp, Homo sapiens
  MAP TO AC004687.1; EXPRESSED IN ADULT LIVER, SIGNAL = 1.2; EXPRESSED IN BRAIN, SIGNAL = 1.1; EXPRESSED IN HELA, SIGNAL = 0.93; EXPRESSED IN LUNG, SIGNAL = 1.1; EXPRESSED IN HEART, SIGNAL = 1.5; EXPRESSED IN FETAL LIVER, SIGNAL = 1.8; SWISSPROT HIT: P05164, EVALUE 3.00e-20; NT HIT: M19508.1, EVALUE 0.00e+00; EST_HUMAN HIT: BF905703.1, EVALUE 0.00e+00
agcagcaggcagcagggagcttgaaggtgggagagggggactatggggacccatgtggactccctttctgtctgtctgtccctgtgtttctggatgggagaacagcttaaaagccatccttcccaaagccttgcctctgtctggacacccaggtccatatcctttttataaaaggaagccttcctcccacccgtgggcctgcctgcatggtcctgcatgtctgcccctgggctggggctctgctgggtgggtctgtatcccttctctggccctcactcctcctttctccaagcagcatcaagcagcggcttcgcagcggctcagccagccccatggaactcctatcctacttcaagcagccggtggcagccaccaggacggcggtgagggccgctgactacctgcacgtggctctagacctgctggagaggaagctgcggtccctgtggcgaaggccattcaatgtcactggtactgttgcccatcacaccccaggtccctgctcca

SEQ ID NO: 7107 - DNA, 526 bp, Homo sapiens
  MAP TO AL031058.1; EXPRESSED IN BRAIN, SIGNAL = 0.9; EXPRESSED IN ADULT LIVER, SIGNAL = 1.9; EXPRESSED IN HELA, SIGNAL = 1.5; EXPRESSED IN BONE MARROW, SIGNAL = 0.85; EXPRESSED IN FETAL LIVER, SIGNAL = 1.2; EXPRESSED IN LUNG, SIGNAL = 1.4; EXPRESSED IN HEART, SIGNAL = 6.1; EST_HUMAN HIT: BG678877.1, EVALUE 0.00e+00; SWISSPROT HIT: P15924, EVALUE 3.00e-72; NT HIT: gi15300248, EVALUE 0.00e+00
tccggcagcctcagcctcactcaatttgctgacatgatctccttgaaaaatggtgtcggcaccagcagcagcatgggcagtggtgtcagcgatgatgtttttagcagctcccgacatgaatcagtaagtaagatttccaccatatccagcgtcaggaatttaaccataaggagcagctctttttcagacaccctggaagaatcgagccccattgcagccatctttgacacagaaaacctggagaaaatctccattacagaaggtatagagcggggcatcgttgacagcatcacgggtcagaggcttctggaggctcaggcctgcacaggtggcatcatccacccaaccacgggccagaagctgtcacttcaggacgcagtctcccagggtgtgattgaccaagacatggccaccaggctgaagcctgctcagaaagccttcataggcttcgagggtgtgaagggaaagaagaagatgtcagcagcagaggcagtgaaagaaaaatggctcccgtatgaggctggcc

SEQ ID NO: 7108 - DNA, 580 bp, Homo sapiens
  MAP TO AF129408.1; EXPRESSED IN FETAL LIVER, SIGNAL = 2.2; EXPRESSED IN LUNG, SIGNAL = 2.5; EXPRESSED IN BONE MARROW, SIGNAL = 2.6; EXPRESSED IN HELA, SIGNAL = 5.3; EXPRESSED IN PLACENTA, SIGNAL = 3.1; EXPRESSED IN ADULT LIVER, SIGNAL = 2.5; SWISSPROT HIT: Q9NSI6, EVALUE 3.00e-65; NT HIT: AL163279.2, EVALUE 0.00e+00; EST_HUMAN HIT: AU139205.1, EVALUE 0.00e+00
tgcatgggagggagagaaacagcaaagagaaaaaagtttcaagggaaactttttcggggggaaaaaaccaatgtgtgtaagagaaaaggatggtgagagtcaatcagtgaacaaagataaatgttttgaattacctttcataaaattgtttggtttttctattttgtcatcatctgaatctaaatcagtttcacatccatgatctgaggaacactgggacatagcaatagggtcacagttcagatttcctgaaattgggttcatttccattttatgacatttcccatcttctctatcttgctcttcagattcagagtcttctgagtcactcagaatcttggtttttttaaagaaactcgcattcttgtgaaatgtattgtatttcctaccaccagatcttcctggttcagaatctgcttcctctgagatgctctctgccttaagtttctgcacagacgttgatgggccagcagttctgttacatgcatgatctgaatcatgacttttagagtcttcctcagaagactctattttaagaaattttgtctttgaaggtgctggagtatgggacttgtaacca

SEQ ID NO: 7109 - DNA, 500 bp, Homo sapiens
  MAP TO AC010680.2; EXPRESSED IN ADULT LIVER, SIGNAL = 1.6; EXPRESSED IN BONE MARROW, SIGNAL = 2.1; EXPRESSED IN LUNG, SIGNAL = 1.7; EXPRESSED IN PLACENTA, SIGNAL = 1.6; EXPRESSED IN BRAIN, SIGNAL = 1.6; EXPRESSED IN HELA, SIGNAL = 2.2; EST_HUMAN HIT: F01184.1, EVALUE 7.00e-72; SWISSPROT HIT: P52179, EVALUE 3.00e-17; NT HIT: gi16157781, EVALUE 0.00e+00
ttttcaggtccccctggccctcctgaaaaaccagaggtatcaaatgtcactaagaacactgccactgtcagctggaaaaggccagtggatgatggtggcagcgaaattacaggatatcatgtagaaaggagagaaaagaaaagcctgcgatgggtgagagcaataaaaacaccagtttccgatctcaggtgcaaagtaacaggactgcaagaaggaagcacctacgaattccgtgtcagtgcagaaaacagagcaggaattggtccacccagtgaggcttcagattctgttctgatgaaagatgcagcatgttagtatttgtctttttcaacaccgttcattccagagtgccaatattttatctaaattacccaaaagccaaactctgaatatatacttttgtgtctttgtttctttctcagatcctccaggaccaccttcaaatccgcatgtcactgatactaccaagaaatctgcttctttggcatggggcaagcctc

SEQ ID NO: 7110 - DNA, 540 bp, Homo sapiens
  MAP TO AL023553.5; EXPRESSED IN PLACENTA, SIGNAL = 2.5; EXPRESSED IN BRAIN, SIGNAL = 1.7; EXPRESSED IN ADULT LIVER, SIGNAL = 1.6; EXPRESSED IN HELA, SIGNAL = 2.3; EXPRESSED IN BONE MARROW, SIGNAL =   2; EXPRESSED IN FETAL LIVER, SIGNAL = 1.8; EXPRESSED IN LUNG, SIGNAL = 1.6; EXPRESSED IN HEART, SIGNAL = 1.6; SWISSPROT HIT: Q07284, EVALUE 5.80e-01; NT HIT: L28832.1, EVALUE 5.10e-01; EST_HUMAN HIT: BF445430.1, EVALUE 8.00e-04
tccccgggtggggcactaactccatctgactgatgagcggcagaacctcaggtgaaggctcttgctgcaaaacaataaataaaaatgttgcttcccgcaggcactattctgtgcctcatggacaggatctcatccagtcatcagtgaaccaatgatgtgagcacgattgttagctatttcttgatagggaaactgagctccgagagaagtgacttgtccatggtcccacaacaactagtagatggtggggccagacctcagaccccccgatacaggacgcctggctcagggcttgccaagcagtgtcctgcagcttcagggggccagtgcctcagaggtgcctggtgcctgggccacacttgggtgttgagcctatacagcacccaaggtgttgagcacttgggtgttgaggtgttgctgcctttcttaccaaatgttttgggggaagtgctccccacggctgggaggagcgcctcagtgaagggagtactgtgaaatgggacaggtgatgaggcagggtggcatcgcgccttgagcaag

SEQ ID NO: 7111 - DNA, 564 bp, Homo sapiens
  MAP TO AC010422.6; EXPRESSED IN ADULT LIVER, SIGNAL = 1.7; EXPRESSED IN PLACENTA, SIGNAL = 1.6; EXPRESSED IN BRAIN, SIGNAL = 1.7; EXPRESSED IN HELA, SIGNAL = 2.1; EXPRESSED IN BONE MARROW, SIGNAL = 1.9; EXPRESSED IN LUNG, SIGNAL = 1.6; EXPRESSED IN HEART, SIGNAL = 1.6; SWISSPROT HIT: P52737, EVALUE 8.00e-31; NT HIT: gi14759689, EVALUE 0.00e+00; EST_HUMAN HIT: AA349989.1, EVALUE 0.00e+00
tcgaaggcacgaaagaagtcacactggagtgaaaccatgtgagtgtaagcagtgtggcaaagctttcacttgtttaaattccctgaaagtacacaaaagaattcatactggagaaagaccctttcagtgtagacaatgtggtaaagccttcagttactcaaagtctttgcacgtgcacgaaaggactcatagtagacagaagccctaagaaagtaaagtgtggtaatgctgtcagttgtattagttccttttggatgtatgagagtacttacgctggagagaaattcaaggaatgtaaacggtgtgattaagccttcagttgtcctaattccctttgaagacgtgactcatgcggcaatgaaatatttaacaaatgggggaggaacttgcactctcctgcgggattgcagatatgtgaatggactccatggacagaaaagctacgaatgtatggagtgtaggaaagccttcacttcacgtaatcttttaaagacacctgagaatatatactggagagaaactataaagaaaattctatatccatcccatcttttgtggggtttg

SEQ ID NO: 7112 - DNA, 539 bp, Homo sapiens
  MAP TO AC007463.3; EXPRESSED IN FETAL LIVER, SIGNAL = 1.8; EXPRESSED IN HELA, SIGNAL = 2.6; EXPRESSED IN ADULT LIVER, SIGNAL = 1.5; EXPRESSED IN PLACENTA, SIGNAL = 1.5; EXPRESSED IN BRAIN, SIGNAL = 1.6; EXPRESSED IN LUNG, SIGNAL = 1.6; EXPRESSED IN HEART, SIGNAL = 1.6; NT HIT: X01871.1, EVALUE 1.30e-01; EST_HUMAN HIT: AL565457.1, EVALUE 1.90e-01; SWISSPROT HIT: O77469, EVALUE 3.90e-02
tgcacacatctggacaaccccgtaagcactggtgcttctgcccttcatcatcaggcagatgggcatttcaaacaacatgaacacctgcctgggagggtactcccaccctggctctaacccttgtccacagtgaaaatcccaaatgcttgcacttccttgttttgctcttgaccttctctttggagaaactctttgctgcttgccaagtgaatagtaaactttatcacacatcaattggtgcctatgtgtcattcatcccaacatctgcaaaatctctgaggggctgtccagcaaactacggaaaatggtaggtgccccctcccaaaaagaaatttgcaagtgttgtttgcaattgatgtttgcaagtgtttaattaattaattaattaagtatacctccattcattctgcctgctccagggtttttacgtgtttggtttcttctgtcttcaatattctaccccattcttctcctgactcttcttccagataaactcaccttcactcttcaaagaaaacttgctcagcttccccagtcca

SEQ ID NO: 7113 - DNA, 511 bp, Homo sapiens
  MAP TO AC003043.1; EXPRESSED IN LUNG, SIGNAL = 2.1; EXPRESSED IN HEART, SIGNAL = 1.9; EXPRESSED IN FETAL LIVER, SIGNAL = 2.3; EXPRESSED IN ADULT LIVER, SIGNAL = 2.8; EXPRESSED IN PLACENTA, SIGNAL = 2.2; EXPRESSED IN HELA, SIGNAL = 3.8; EXPRESSED IN BONE MARROW, SIGNAL =   2; SWISSPROT HIT: P42768, EVALUE 8.00e-01; NT HIT: D16195.1, EVALUE 5.00e-35; EST_HUMAN HIT: AI083922.1, EVALUE 0.00e+00
tcaccagcccggaggacgagctgggggcggaggtgggcgacgaggcgggagacaagaagagcccgtggcagcggcgggaggagcggccgctgatggtgttcaacgtcaagtagcgcccgcgcagggcctggcaccgcccctcccgcgcgggcccgcacccagggtgcgcgccccgggggcccgcgggggccctcgcgcgtagctcccagccccaggccggagaggggcccaggggccttggagctgttccgtggttggtgctgggtcgtgtcttgcaagggaccctgtgtctgcctccaagccggggaggagggggggtccagacccccacggggaggtgccggggaggagggctggggggaagcagtgcctgtgtagacgtggctgtacatagaaagctctattgtgggaaagcaggaggggtgacccagcctcagctgctagtgtgagggctgggaagggagggggcgttctttgtggacccctgggaggggagggggtgctgcttgct

SEQ ID NO: 7114 - DNA, 523 bp, Homo sapiens
  MAP TO AL121774.3; EXPRESSED IN HELA, SIGNAL = 1.5; EXPRESSED IN ADULT LIVER, SIGNAL = 1.2; EXPRESSED IN HEART, SIGNAL = 1.3; SWISSPROT HIT: P51841, EVALUE 5.60e-01; NT HIT: AB011171.1, EVALUE 0.00e+00; EST_HUMAN HIT: BE900622.1, EVALUE 0.00e+00
cagccacaccggcctcacaggtgagtgggaaattgtctcgagccccagtggatggcacaggcaggagacccctgcacacgggagcatccttcctgaagggcggaggggatggactttccgcccacctgagggccctgggcaggggctccatgagcccaggcttgaggggaaggatgcccaggttcttccccaacctccaacatgactcctccctcccccaggagtcagcatcaaccgacagagttcaaggcctggaacttctctctaaggtttctcactctgccctgctggctcgggtctgccgggtccctggaaccctcttccttcggctggcactctgcagactgctggaagtcctgaacctgccccagcagggccaccggtgagcttggtccctggccactgctctcctccagccctgcagtggggctgggaaggggtcccttctccatgacaatcacccgccggttgtcctccagggtgaggtctgcagtgacatacagggtctcgcctccatccggct

SEQ ID NO: 7115 - DNA, 512 bp, Homo sapiens
  MAP TO AF053356.1; EXPRESSED IN ADULT LIVER, SIGNAL = 2.9; EXPRESSED IN BONE MARROW, SIGNAL = 2.9; EXPRESSED IN LUNG, SIGNAL = 2.7; EXPRESSED IN HELA, SIGNAL = 4.5; SWISSPROT HIT: Q9Y493, EVALUE 1.00e-09; NT HIT: AY046055.1, EVALUE 0.00e+00; EST_HUMAN HIT: AL550694.1, EVALUE 7.20e-01
ggggactgtgggcttttctgtggtgacactgggtttttctatggaaactgtaggtttcttggtggagattgtagggttttctgtgaggccagtggtttcagaagggccagtggaagaaactggagatacgggaggaagctctggtagcacttttactgcaaagaaaaataagaatccctggagtttagtcaaaaccataccaccaccctctttactgccatctaactggagtgggctcccatgggtggcttattcacacctctctttctactcccaaaccccaaccttcatccactcaacgaacactaatatatgtcagatattatgccagaaatgaataggatatgggtccagccttcaagactgcagaggaaggagttctggatccagcccccaaaatccatggtatcgaagccacattcacccaggcaaacatcttgaagtgcaggggaaggagaggtgtgttgaagatggaaaaccaagccagctgggtgagaattcgggctccaggg

SEQ ID NO: 7116 - DNA, 504 bp, Homo sapiens
  MAP TO AC004506.1; EXPRESSED IN PLACENTA, SIGNAL = 1.5; EXPRESSED IN BRAIN, SIGNAL = 1.3; EXPRESSED IN ADULT LIVER, SIGNAL = 1.2; EXPRESSED IN HELA, SIGNAL = 1.5; EXPRESSED IN BONE MARROW, SIGNAL = 1.4; EXPRESSED IN LUNG, SIGNAL = 1.2; EXPRESSED IN FETAL LIVER, SIGNAL = 1.1; SWISSPROT HIT: P07631, EVALUE 5.40e-01; NT HIT: gi14767767, EVALUE 6.00e-87; EST_HUMAN HIT: AI887263.1, EVALUE 8.00e-87
gacgagggaatgggccgagcagctgacgaagatgagccgaggcaagcacttcatcggagacttcctacctccagacaagctggagaagtttatggagactttcaaggccctgaaggagggtcgcgagcctgactactcggagtacaaggagttcaagctcaccgaggagaacgtgctgatgaagatgggctggaaggagggtgagggcctcagcgagccagggcatcaagaacccggtcaacaagggcagcaccgcagtggctggtgccggcttcggcattgacccgccagccgctgtctccaaggaagacggcgagaactaggccttcctcaagaggatgatgccggcctaccgcttccggcccaaccccccggaacaaccccagacggtcttactactgagtgttctggaaacacgtactttctgaatgaccaaccgtccctggactgtagcatgttccgacctgtatttctgcccacccctcccgttgtcacgagtgccgt

SEQ ID NO: 7117 - DNA, 526 bp, Homo sapiens
  MAP TO AL109804.24; EXPRESSED IN ADULT LIVER, SIGNAL = 1.9; EXPRESSED IN LUNG, SIGNAL = 2.1; EXPRESSED IN FETAL LIVER, SIGNAL = 1.8; SWISSPROT HIT: O43301, EVALUE 2.00e-08; NT HIT: gi16194862, EVALUE 0.00e+00; EST_HUMAN HIT: BE545236.1, EVALUE 0.00e+00
cccacccccacccctactcggccaagttcagaccaggactcttctgttgcgttcttccttcggggtcacatgccccttgccgggctgcgcgctctgtcttgcaaacctcttctcttacccgttcagtccttggcgggtcccttcagcctggcagtcagcggaccagtgcccaatcccaaagccagtctctgggtgtgtccccacccactctcccatgaccttatctcccccggggctggagggcgtggaaaggcgcagactgcagaactatcgtttcccccgccccaacccgctccgcaggcccctgaaccgaaagagggcggggccgggcagacggcgctggcaccgcgccggcgcgccctcagttggaaagaaagtcgatggacgcgcgcacggagcgattggtgctgacgtcgacggcggtgaccttaatttcggtgtcgccaaactgcatggcggcgcggatctcgcggcggccgggaggcgcgccggcggtgtcctggccgcagtcggcgggctcaagctc

SEQ ID NO: 7118 - DNA, 577 bp, Homo sapiens
  MAP TO AC010519.6; EXPRESSED IN ADULT LIVER, SIGNAL = 1.5; EXPRESSED IN HELA, SIGNAL = 1.6; EXPRESSED IN LUNG, SIGNAL = 1.7; EXPRESSED IN FETAL LIVER, SIGNAL = 1.3; SWISSPROT HIT: Q15428, EVALUE 2.00e-01; NT HIT: gi11425304, EVALUE 0.00e+00; EST_HUMAN HIT: BE259138.1, EVALUE 0.00e+00
gttggcatcaacccggtggccccatccctggcaaacacatgcgcgtgtcccccggacagaggggcagagtgtgccaggaaatgggaagaaacaggaactgacacagcactttgcccctcctttggcaggggagacgttttacatcacagccccctccctaaatccacgcccaccccccagcaacccagctgaagcaggcggcagggaaggaggcctttgtgactcaaataacttaggcaagaaaaaccgtcaggggatccccggctcgagtccccaggaggctgagggcggacacccgactgtcccggcgtcttcgggaggaggggacggggaaggggaggcggcccggtgttatctggtcaacgtcctggcgccgaggccaccgttgtgactggagggtgggtaggcctcgggcctgtgcaggggcggcggggatgcgggggtgccggccgaggcagcgtgggggtacgagggcgcgggcgtccggccgggggcctgctgcaggttcaggatgctgtcgatggcgctctgcaggtgctcggtgagcgtgtcatcctgcgggctgtcgctggagaag

SEQ ID NO: 7119 - DNA, 506 bp, Homo sapiens
  MAP TO AP001101.1; EXPRESSED IN LUNG, SIGNAL = 2.7; EXPRESSED IN HELA, SIGNAL = 0.83; EXPRESSED IN ADULT LIVER, SIGNAL = 1.6; EXPRESSED IN HEART, SIGNAL = 3.4; EXPRESSED IN BRAIN, SIGNAL = 1.3; EXPRESSED IN FETAL LIVER, SIGNAL = 1.5; EXPRESSED IN BONE MARROW, SIGNAL = 1.6; SWISSPROT HIT: P27393, EVALUE 6.20e-02; NT HIT: gi16166483, EVALUE 0.00e+00; EST_HUMAN HIT: AA454905.1, EVALUE 0.00e+00
cagcctggcctgggttgtggctatggccaggcccccaagctgtccccgatgcccagggctggtgaccacccaggcaggtgggggccccacttggtaacagagtcatagggcagaacccacctgggctgccacagaaggtctggctgcccctgtgcccactgctccccaccatggccaatcagaagagtcaggggctcctggtctttccgggagggacgtggcccagccagctctaggtgttctgagcagctctgggacccagcgattgaggggtcaggctgggggtgtcagagccagggtcctccttaagtacctcccacactacacagacagtggcccttttgtgggcagcaaattcttgagccatgaaaggatgctttgggccccttccctcccaggagggcagcctgtgcagggatggtgctcagcaggtggacagggcctggggcctgtgtcagggtctcaggcctgggagcaccagcagaggagatggcggctcccagcag

SEQ ID NO: 7120 - DNA, 505 bp, Homo sapiens
  MAP TO AF015416.1; EXPRESSED IN ADULT LIVER, SIGNAL = 1.5; EXPRESSED IN HEART, SIGNAL = 1.3; EXPRESSED IN FETAL LIVER, SIGNAL = 1.9; EXPRESSED IN LUNG, SIGNAL = 1.3; EXPRESSED IN BONE MARROW, SIGNAL = 1.4; EXPRESSED IN HELA, SIGNAL = 0.84; SWISSPROT HIT: P91285, EVALUE 3.10e-01; NT HIT: U79156.1, EVALUE 1.90e+00
ctgctggacaggcactgcggctgatcagctgcagattggttgctgcgcaggagaagaagaagaagagcctggggaagcggctccaggccagcctgggtggcggcaggtgcgtctccagggcagagatactctcttgtgtgtgaggtgtgtgtgccggtgcaaacctgtgcacctcagtgtccatctggcatggggcgcacctccagaccagaccctggctccccagatggggaggctttgaccacctccttgcaaggcaaccactgaattcctatcttcttccccagggtgtcctcaccatgcccaccgtcagccacccacaacctatgaaaacttcctagtatggccctacagctctggcccagcccttcttcccattttactttctgacaataagctctggaacacacgatgccctctgtccagagcctctgcacttgcccttccctccacctagaatattctgtttgctgcctgtcctgcaagtctgccctggctcccccag

SEQ ID NO: 7121 - DNA, 541 bp, Homo sapiens
  MAP TO AC005042.1; EXPRESSED IN LUNG, SIGNAL =   2; EXPRESSED IN HEART, SIGNAL = 2.5; EXPRESSED IN FETAL LIVER, SIGNAL = 2.6; EXPRESSED IN ADULT LIVER, SIGNAL =   2; EXPRESSED IN PLACENTA, SIGNAL = 3.5; EXPRESSED IN HELA, SIGNAL = 5.7; EST_HUMAN HIT: AW873285.1, EVALUE 1.00e-91; NT HIT: gi14738307, EVALUE 2.00e-90
tgttctggtgccccttcacgctcatgaattacatgtaacacttagaataaaacattttatgtgctgtgaaaaatgcataggcaatagttaaaaatgtaaagataaaaaaggagtattaaatgtcttcagatctctttttacaggttaattttagcatttggtttaaaccaccaaaaaaaaaaaaaaaaactaaaacaactaaagcaccgtgaggaaaaattaatgtctggctcaaagcataaaaaggaaaagaatcttagatgcctaaaatagtggattcacattctgtagtgagctatgtgtatttcttttgtaatggcaatgaacacaaaaccctggataaacccattctcttttttccccccctttcatcagccatcagtagccaatcgggccatgagaagagttagttcagttccatctagagcacagtctccttcttatgttatcagcacaggcgtgtctccttcaagggggtctctgagaacttctctgggtagtggatttggctctccgtcagtgaccgacccccgacctctga

SEQ ID NO: 7122 - DNA, 514 bp, Homo sapiens
  MAP TO AC005488.2; EXPRESSED IN BRAIN, SIGNAL = 4.9; EXPRESSED IN ADULT LIVER, SIGNAL = 2.3; EXPRESSED IN HELA, SIGNAL = 1.6; EXPRESSED IN LUNG, SIGNAL = 2.5; EXPRESSED IN HEART, SIGNAL = 2.9; SWISSPROT HIT: P08042, EVALUE 4.80e+00; NT HIT: gi14742307, EVALUE 3.00e-64; EST_HUMAN HIT: AI809538.1, EVALUE 1.00e-114
ggggagggactcacaaccgctagtagcgtttgtgaaaagtacctggtaacaggctgtgctggaggggaattcagcccccataaaagatcacggattaggaattacgtaagcataggtctcgggcccttttatcttggacgcgatccttccacgggatcgcctccggatggatgtggcgctgggagccacgcggaaaacctcaagagtcagaaacaggcgttaaaggcaggcggcattttccaaaccagttgggtctcgggcgctgccgggcggtagcgtctcccggagtcgcgcgcgcatgacgtagagggcgcgcgatgacgcgacgcgcggcgcggtgcacgctgggatatttaagtctcctccgcggcgcggagccgcgatgtctccggcggctgcggcggctggagcaggcgagcggcggcggcccatagcgagtgtcagggacggccggggccggggctgcggcgggccggccagggcggtgctcctgggcctgtcgctggttggcctc

SEQ ID NO: 7123 - DNA, 505 bp, Homo sapiens
  MAP TO AC004127.1; EXPRESSED IN HEART, SIGNAL = 2.6; EXPRESSED IN PLACENTA, SIGNAL = 3.9; EXPRESSED IN ADULT LIVER, SIGNAL = 2.7; EXPRESSED IN FETAL LIVER, SIGNAL = 2.8; EST_HUMAN HIT: AW013827.1, EVALUE 0.00e+00; SWISSPROT HIT: P10266, EVALUE 4.00e-65; NT HIT: X92887.1, EVALUE 0.00e+00
tcccaaggacaggccatagttgaaagaactaatagaacactcaaaactcaattagttaaacaaaacgaagggggagacagtaaggagtgtaccactcctcagatgcaacttaatctagcactctatactttaaattttttaaacatttatagaaatcagactactacttctgcagaacatcttactggtaaaaagaacagcccacatgaaggaaaactgatttggtggaaagacaacaaaaataagacatgggaaatagggaaggtggtaacgtgggggaaaggttttgcttgtttcactaggagaaaatcagcttcctgtttggatacccactagacatttaaagttctgcaatgaacccatcggagatgcaaaaaaaagcgcctccgcggagacagaaacactgcaatcgagcaccatcaactcatatgatgaacagaatggtgatgtcagaagaacagacgaagttgccatccaccaagaaagcggagccactgacttgggc

SEQ ID NO: 7124 - DNA, 500 bp, Homo sapiens
  MAP TO AL117259.3; EXPRESSED IN ADULT LIVER, SIGNAL = 4.8; EXPRESSED IN HELA, SIGNAL = 5.7; EXPRESSED IN PLACENTA, SIGNAL = 4.4; EXPRESSED IN LUNG, SIGNAL = 2.9; EXPRESSED IN HEART, SIGNAL =   3; EXPRESSED IN BONE MARROW, SIGNAL = 3.1; EXPRESSED IN FETAL LIVER, SIGNAL =   4; EST_HUMAN HIT: BG565282.1, EVALUE 1.00e-118; SWISSPROT HIT: Q9UK55, EVALUE 4.00e-09; NT HIT: gi14748336, EVALUE 1.00e-123
gccctcagggaggagacgggatgaatgaaaacggggtcaggactgagagctgcctgccggcctggcagggaatgggaactggaggaggttttgctctgtgaaataatgtcccctctttgggtgagcaaatgtcacccacacttgctctaggtctccctggggcagggctaacctacttgagccacaggaaggaggcagggtccctgaagaagcttttactatccacaaagacattttaggaggcattaaaaccatctctatcctctcctctccacaggaagtcttgcagctgaagggaggcactccttggcctccgcagccgatcacatgaaggtggtgccaagtctcctgctctccgtcctcctggcacaggtgtggctggtacccggcttggcccccagtcctcagtcgccagagaccccagcccctcagaaccagaccagcagggtagtgcaggctcccaaggaggaagaggaagatgagcaggaggccagcgagga

SEQ ID NO: 7125 - DNA, 515 bp, Homo sapiens
  MAP TO AF038458.1; EXPRESSED IN ADULT LIVER, SIGNAL =   4; EXPRESSED IN PLACENTA, SIGNAL = 5.4; EXPRESSED IN HELA, SIGNAL = 1.5; EXPRESSED IN BONE MARROW, SIGNAL = 3.9; EXPRESSED IN LUNG, SIGNAL = 3.6; EXPRESSED IN HEART, SIGNAL = 4.1; EXPRESSED IN FETAL LIVER, SIGNAL = 4.9; NT HIT: gi13375645, EVALUE 1.00e-125; SWISSPROT HIT: P35950, EVALUE 3.20e-01; EST_HUMAN HIT: AI473367.1, EVALUE 1.00e-118
tgcgctacaaggtgcacggcggccagccccccggcaaggccaagattcccgcgcctgttagcagcgtttgctcccagaccaacggcgccctgggccccacgcccacgcccgccccgcccgccccggagcccgcggcgctcagggcccacaccgtggtccagctggactgcgagccctgggggcccggccacgaacctgtgggaccctagccaggcgcccccccctctaagggtcctctggccccacggacagcaggacccggacaccctgtgggacctggcctcaaactcaccaaatcgctcatggtttttaaaactctgatggggagggtgtcggggacaccggggcaaaacaagaaagtcctatttttccaagcttgggcgaagacccttgccctcgtctctgtctatgggggttgggggacggagcaggggtctggagctggggaatgcctcctttggggagacaccccctccccgcccagttcagtctgaggaccccggaggaggctgagg

SEQ ID NO: 7126 - DNA, 538 bp, Homo sapiens
  MAP TO AC002481.1; EXPRESSED IN HELA, SIGNAL =  10; EXPRESSED IN PLACENTA, SIGNAL = 8.8; EXPRESSED IN HEART, SIGNAL = 5.8; EXPRESSED IN BONE MARROW, SIGNAL = 5.9; EXPRESSED IN LUNG, SIGNAL = 5.8; EXPRESSED IN FETAL LIVER, SIGNAL = 6.2; EXPRESSED IN ADULT LIVER, SIGNAL = 5.5; EST_HUMAN HIT: BG436739.1, EVALUE 0.00e+00; NT HIT: gi5902021, EVALUE 9.00e-80; SWISSPROT HIT: Q27549, EVALUE 1.70e+00
ctgtggtgggtttgctggcgaacttggtgcacagcctcctggtgaaggtaaagatatgccagaagacggtgaagcgctacgatgtgggtgccccatcctccatcaccatcagcctgccaggcacagaccctcaagacgccgagcggagaaggtactgtgaaattttccaaaatcttgtcaagctaggagcatactggtcgagtcacatgccatctgttgaggtgttcgctgtacataggtggagacctacagtcaggtattggggcacatccggaaagacaaaatcagtctttggccttaaggaactcagcagttaggtgtctggggtccacgaggcacttttctcaccactcgggccacttaataagtctcaagaaatgcagtttcctttggtgctgtgaagtcccagtggagggacacagaaccctggccttgcctcagaatctcagaatcctagacattgggcctgtgggagccagaagcaacctgctggtactttcccctgtgaggaagggacagggaaggaggcctggggtcc

SEQ ID NO: 7127 - DNA, 515 bp, Homo sapiens
  MAP TO AC009757.8; EXPRESSED IN LUNG, SIGNAL = 1.7; EXPRESSED IN ADULT LIVER, SIGNAL = 1.8; EXPRESSED IN HELA, SIGNAL =   1; EXPRESSED IN BONE MARROW, SIGNAL = 1.7; EXPRESSED IN FETAL LIVER, SIGNAL = 1.6; SWISSPROT HIT: P17473, EVALUE 1.90e-01; EST_HUMAN HIT: BI829473.1, EVALUE 4.60e-02
gctgctcccatagccgccagaagccgtagactcttctgaactgtgggacccaagactgccgggtacgcagcgggcacaggacggcaggggcacctgcgctgccgcctaccgccctggagggcgcttcaggcccagatcccagggcagcagagggtgcgacaaggcgtcccagcagccgcggccctgcagatccttggggcgcctagccggcatcccctcccctgacccgacgccttctctttgtcctgaaggatggactgcaaagctatgtccggcggtgtggacgaaactcagtaaaaggggtttcggcaaggggagactcacccgccatctccgtaggaaggtggctggggctgtgtctgcgcagcccagtcccggcctcctcctcctcccagagggcttccaggtctgaccgagggtcgctgggactcgagaactggaggctctgactggaacactcctgggcgcactctggctcagcctggacccgggcaggcccgttttcaccggggtgt

SEQ ID NO: 7128 - DNA, 513 bp, Homo sapiens
  MAP TO AC008739.5; EXPRESSED IN BRAIN, SIGNAL = 1.6; EXPRESSED IN HELA, SIGNAL =   2; EXPRESSED IN ADULT LIVER, SIGNAL = 1.8; EXPRESSED IN PLACENTA, SIGNAL =   2; EXPRESSED IN LUNG, SIGNAL = 1.7; EXPRESSED IN HEART, SIGNAL = 2.1; EXPRESSED IN BONE MARROW, SIGNAL = 2.1; NT HIT: gi14760983, EVALUE 1.00e-111; EST_HUMAN HIT: BG718610.1, EVALUE 1.00e-109; SWISSPROT HIT: Q03923, EVALUE 2.00e-36
tgctctgggtagctgtgagacattggttaagtccattacaacctcctttgtgcatcttacactcatccatactttcacagccttttcttaatggtaaattttcatgtctacattttccatatcttttcagtgtcactttttggaaagaatcttttatattctgctccggccaaaggtcttgggcaaaatgagaacacataactgaaagaaacaaaaatgacaaattactccacttgctagacttagatgaagatagtttacaaatgtaatatataaaattaaacaaactacattaagtaagatggcacagcaaaataccataggccctaaatccttcatagacatttaaatgtaacaaaaacatactgaccaaaatacatttgtggaaaatttataaatgagttaagtgtgtgcagtgccccaggtgagcataatgcaaagagccacataggaaaaaaaaagtttgttacatttacaacacagctatttcggttgcccaatgtaacacagtgg

SEQ ID NO: 7129 - DNA, 522 bp, Homo sapiens
  MAP TO U73629.1; EXPRESSED IN ADULT LIVER, SIGNAL = 3.6; EXPRESSED IN BRAIN, SIGNAL = 3.9; EXPRESSED IN LUNG, SIGNAL = 3.3; EXPRESSED IN HEART, SIGNAL = 3.8; EXPRESSED IN FETAL LIVER, SIGNAL = 4.9; SWISSPROT HIT: P39748, EVALUE 1.00e-17; NT HIT: gi14784566, EVALUE 4.00e-94; EST_HUMAN HIT: W05005.1, EVALUE 0.00e+00
ggccaagcatcctggccttctgtggtccttgatggagacctatgttgcaggttttttttgtgtaataaataatgctgctaccttagaatatcaacagtatcttatttctctaagcacgtggttcaatttctggtactcgttgagccttactattgagtaaattctcctgctagactgagttttttgagaatggggaccttgttcatctttttatctttagcagtgctgacatggtgtcctttttgttgtgtggaatttagttgaaggcatgaagttggtgagataacaccagttataacctttctcctttcctccgtctctgacttgcctttcctttttagtcatccctcctctgtgttgccatgggaattcaaggcctggccaaactaattgctgatgtggcccccagtgccatccgggagaatgacatcagagctactttggccgtaaggtggccattgatgcctctatgagcatttatcagttcctgattgctgttcgccagggtggggatgtgctgca

SEQ ID NO: 7130 - DNA, 544 bp, Homo sapiens
  MAP TO AC004796.2; EXPRESSED IN ADULT LIVER, SIGNAL = 1.5; EXPRESSED IN BRAIN, SIGNAL = 1.4; EXPRESSED IN HELA, SIGNAL = 2.1; EXPRESSED IN BONE MARROW, SIGNAL = 1.9; EXPRESSED IN LUNG, SIGNAL = 1.7; EXPRESSED IN HEART, SIGNAL = 1.9; EST_HUMAN HIT: BI520715.1, EVALUE 0.00e+00; SWISSPROT HIT: Q12888, EVALUE 8.90e-02; NT HIT: gi4505798, EVALUE 0.00e+00
gccctgggcttttgcaagctgagttgttcgaatatttaaagactggcttcttgtaacagttgccacagaaagggattttccattcacctttctttcaagatgacaatttgctgtcgatctctcttcaagaagaacagcatcccaaggatcctttgctagcaaacttgaaacatttttctcttcctcatggtctaatacctccacattatccaccttaggcttacttagaggatccaagtctaaccagtcaaatttactgatatcctcagactttggagatacctgtagattgctgacttttgaatctgttatctccaaatcagtccttgctttcccattttttaaaaattctgatgtactagctattttgtcaaatagttttgccatgtcagtactgactactggacgatagataggtaagcttccttgtggatgaaagggtgtggcaggtgtcaaaggatatgagaaatatggagattgtcccggaagacttaaatatataggttctgtagatggaaaagtgggcattcttggattgaagcca

SEQ ID NO: 7131 - DNA, 525 bp, Homo sapiens
  MAP TO AL021938.1; EXPRESSED IN LUNG, SIGNAL = 2.1; EXPRESSED IN BONE MARROW, SIGNAL =   2; EXPRESSED IN BRAIN, SIGNAL = 1.9; EXPRESSED IN ADULT LIVER, SIGNAL = 2.1; SWISSPROT HIT: Q92833, EVALUE 1.00e-53; EST_HUMAN HIT: BF311359.1, EVALUE 0.00e+00; NT HIT: gi16162622, EVALUE 0.00e+00
atcctgccaccaacgcccaggacctgggaagaagggctgcagggggaatgagctgagaagcccactactcccgagacagggaagcggaactggagctttcgcaagggaagagaacgtgaagactgtgagggaactgcagggatctgggggcaggagggcaggcaccaccccctgaccccccgcccagacctacctatgagcgggagctcgtccatggtgatgccctgagatttgaggtgcttcttgatgcaggccagccgctgcacgttggggccccagcgccggcccagcttgtggatgtgctgaatctgcgtgacaaaccgcatctcatcgttgagcttgcactcgggccgccagtccggaggggggatcaccctgcacatcccgaacttctccacctgagcgcggaccgactcgatgtagatgagcggatcgtggaactccttggcggagggcctgaggacggggatctcgtccatggccgcccacccggccttgccgccgcccttctcggccttgcccgag

SEQ ID NO: 7132 - DNA, 590 bp, Homo sapiens
  MAP TO AL160176.3; EXPRESSED IN ADULT LIVER, SIGNAL = 2.8; EXPRESSED IN PLACENTA, SIGNAL = 5.1; EXPRESSED IN HEART, SIGNAL = 3.1; EXPRESSED IN LUNG, SIGNAL = 2.6; SWISSPROT HIT: P05047, EVALUE 5.70e+00; NT HIT: gi15295224, EVALUE 1.40e-01; EST_HUMAN HIT: BG722482.1, EVALUE 0.00e+00
cgcatcagggttgtggcagtgaaacttaacacttttttttaaaacataatgcgccttacactattccaattagcaccacttttaaaactcttttttaaaaaagaacctaagaactctcaagattttcctgggaagtatttgtactgtctttaatttgcaactgcaaaataccttgtccagacataatattgcataaaagccgacttgaattttttctttttcatgtaaggggttgtttattaaaaccagctgtaccttgatcagtccagtagtttcagccaggctcaccgctaacttactgtcttcactggccaccatcacattctcctctagagcgtggaactgcaacacctccatctcttgcggggagtacagctcttgctggatactaatggccacacactgctgcaggctctgccggggcccttcctcaagccacagcaacccagggccaggctgttgcaccaccacctgcaccccttcttgctgctgtatgctcagcaagctcatatcctgcaactccacagcttcagaagtgaagtgcaccgtctgcagggtcaggatgtacttctcgctctcctccgaggggg

SEQ ID NO: 7133 - DNA, 511 bp, Homo sapiens
  MAP TO AL136450.1; EXPRESSED IN HELA, SIGNAL = 2.1; EXPRESSED IN ADULT LIVER, SIGNAL = 1.3; EXPRESSED IN LUNG, SIGNAL = 1.4; EXPRESSED IN HEART, SIGNAL = 1.2; EXPRESSED IN FETAL LIVER, SIGNAL = 1.4; EST_HUMAN HIT: AA303144.1, EVALUE 1.00e-103; SWISSPROT HIT: P52154, EVALUE 6.30e-02; NT HIT: AL096805.1, EVALUE 1.20e-01
ccccagtcccccattcagggcttgttccagtccaagttgccacttcggttccagctccttcccctcccttagcacctgtcccggctctggctccagcgccaccgtcagtgcccacgctcatctctgactcgaaccccctttctgtttcggcctcagtcttggtgcctgtgccagcttctgctcccccttcaggcccggttcccttgtcggctccagctcctgccccgctttcagtcccagtttcagctcctcccttggctctcatccaggctcctgtgcccccttcagctccgaccttggttctcgctcccgtccccactccggttctggctcccatgccagcatccacgcctccagcggcccctgcccctccgtctgtgcccatgcccactccaaccccatcttccggcccaccttctacccccaccctcatccccgcctttgctcctacaccggtgcctgcacccaccccagcccccatctttactccagcccctacacccatgcctgc

SEQ ID NO: 7134 - DNA, 514 bp, Homo sapiens
  MAP TO AC025761.3; EXPRESSED IN ADULT LIVER, SIGNAL = 1.5; EXPRESSED IN PLACENTA, SIGNAL = 1.9; EXPRESSED IN BRAIN, SIGNAL = 1.3; EXPRESSED IN LUNG, SIGNAL = 1.1; EXPRESSED IN BONE MARROW, SIGNAL = 1.3; EST_HUMAN HIT: BG939050.1, EVALUE 7.20e-01; SWISSPROT HIT: P33485, EVALUE 1.40e-01; NT HIT: AJ297949.1, EVALUE 1.20e-01
cgagggggctgctgttttgcagccctgcgaggcgtgcagtcggagaagtggtcggggttccacaccgtccctgagcctgcccccggccaaggtggcccgacgtgctgcagtggctggcgcaggtgatccgggcagcgcgtccggcactagtcaagggggcagcggcacgggagggaggggcgcctttctcttttctcctccccctgcagcccagctgcactgcgtgggggctctccatctccacgcaatcagcaggcggaatccctgccctggagcgccctggctctggactgcacccccctagggtttgtcctgcagattcccctccccatctttctctgccacacacgcttccctaagccgcgcgcgccgcaaactcagtctcggtccccgcaggtgatgtcatgcccattgttttggtgcgcccaaccaatcggactcgccgcctggattctaccggagccggcatgggcccttcctcgcaccagcagcaggagtccccgctcccgaccat

SEQ ID NO: 7135 - DNA, 519 bp, Homo sapiens
  MAP TO AC008812.4; EXPRESSED IN LUNG, SIGNAL = 1.5; EXPRESSED IN BONE MARROW, SIGNAL = 1.7; EXPRESSED IN ADULT LIVER, SIGNAL = 2.3; EXPRESSED IN HELA, SIGNAL = 2.2; EST_HUMAN HIT: BE562903.1, EVALUE 1.00e-121; SWISSPROT HIT: P33891, EVALUE 9.50e-01; NT HIT: AF209481.2, EVALUE 0.00e+00
ggccaggtctgggagggaggtgggactgagagccaagatgttgtccctgggggtctgtaggggcctctcccacagcccctccccactctagagcaggacaggagagggaggaggaggaggggaagaacctggctctccttggccttctgtgctgccttctccaggtgtcagttttcctcatcttcaaaggggattaactgagaccttggctctcacaaatgatgtctctatggggctcagttcagggcttggcacacagtaggtgtttaataattgcagttccttttcttcttggcccagtgtccaaggtccccagctccctaagtcaggaacaatccgagcaagacgcaatctaccagaacctgacccagcttaaagctgcagtgggtgagctctcagagaaatccaagctgcaggagatctaccaggagctgacccagctgaaggctgcagtgggtgagttgccagagaaatccaagctgcaggagatctaccaggagctgacccggctgaaggctg

SEQ ID NO: 7136 - DNA, 525 bp, Homo sapiens
  MAP TO AC005684.1; EXPRESSED IN HEART, SIGNAL = 1.7; EXPRESSED IN FETAL LIVER, SIGNAL = 1.4; EXPRESSED IN LUNG, SIGNAL = 1.2; EXPRESSED IN ADULT LIVER, SIGNAL = 1.2; EXPRESSED IN PLACENTA, SIGNAL = 1.6; EXPRESSED IN BRAIN, SIGNAL = 1.1; EXPRESSED IN HELA, SIGNAL = 2.3; EST_HUMAN HIT: BE169131.1, EVALUE 1.00e-125; SWISSPROT HIT: P48681, EVALUE 7.40e-01; NT HIT: gi14749657, EVALUE 3.20e-02
tcgcatggaggccttggaggctcacagacccaggactgaactctggccttaccagctgtgtgctgtgggcaggttccttcacttctccaagcctcagtttctgtctataagttaggaatatcaccctttcttgcagggttgttacagggatttacgtaggtaatggcagtaaagagtttaaggctgcccttacgcagcaagtgctggctaaatgacagctcttgccactacattatcgtgctcgttataagcagcgatcctgagtctattactcacctcctgctatcccctttctgggcccttgcccagtgctccacctgggccagattgctcttcctttggctgtgtttttcagggttggtcctgggaggaaaggcccgctggtacccaccagtcccattctgttctcctgggccatatgaggcaggcagcattccattcttctctgcccgttggggctgtgcctgctggcctcttgggccagtgggtaaatccataaacaaggcatcctcctcggctggcgag

SEQ ID NO: 7137 - DNA, 511 bp, Homo sapiens
  MAP TO AC011536.5; EXPRESSED IN BONE MARROW, SIGNAL = 3.2; EXPRESSED IN LUNG, SIGNAL = 3.5; EXPRESSED IN HEART, SIGNAL = 2.9; EXPRESSED IN FETAL LIVER, SIGNAL = 3.5; EXPRESSED IN ADULT LIVER, SIGNAL = 3.1; EXPRESSED IN PLACENTA, SIGNAL = 5.1; EXPRESSED IN BRAIN, SIGNAL =   3; NT HIT: gi13651412, EVALUE 4.00e-88; EST_HUMAN HIT: BI005091.1, EVALUE 5.00e-88; SWISSPROT HIT: Q02817, EVALUE 4.00e-07
gggtgtcaggggtggggtcccaggacagggtgggaggagacagagatactagggagcagacagaaaaagggagagacagaaaacaagacacagagaggacacagagaaagaaatgggagagggcgagacaccaggagacccaagcagaaactgagggagctagagaatgagaaacagacagatagacacaagcaaagcgaggcccagagatgagcaccaagagacagagagacaaacagagaaaaaagaaaacaaagagacccagaaggaccagagtgaaaccaaaccagccccgaagagacgggaccccgccccccgccccacctctgctcccccaacactcaccacagccaacctgtgcccgccagtcttcgatgacaaccccagcggcctggcaggcggccacgtaggaagccagagccttgcaaagaatgtcacggtccccaccacccatgcagacgtccagaacacagcccttgaagaagctctcaggtggcacatgagcatggca

SEQ ID NO: 7138 - DNA, 504 bp, Homo sapiens
  MAP TO AC013648.3; EXPRESSED IN HEART, SIGNAL =   2; EXPRESSED IN BONE MARROW, SIGNAL = 1.5; EXPRESSED IN LUNG, SIGNAL = 1.8; EXPRESSED IN FETAL LIVER, SIGNAL = 1.7; EXPRESSED IN PLACENTA, SIGNAL = 3.6; EXPRESSED IN HELA, SIGNAL = 3.3; EXPRESSED IN ADULT LIVER, SIGNAL = 1.8; EST_HUMAN HIT: BF764206.1, EVALUE 0.00e+00; NT HIT: AY044229.1, EVALUE 1.90e+00; SWISSPROT HIT: gi1351901, EVALUE 2.00e-14
acgttcccgagggagctggcctcaaagggcacctgcccaagttgcagatgcccagtttcaagatgcccaaagtagatcgcaagggaccccagatagatgtcaagggccccaagctggacctgaaaggcccgaagacggacgtgacggcccccgacgtggaggtgtctcagcccggcatggaggtggatgtcgaggccccaggagccaagttggatggtgcacggctggagggggacctgtccctggccgacaaggatgtgactgccaaagacagcaagttcaaaatgcccaagttcaagatgccgtcgttcggggtgtctgccccaggcaagtccattgaggtcttggtggatgtgtctgcgccgaaggtggaggccgacgtgagcctcccctccatgcagggggacctgaagaacactgacatcagcattgagcccccctctgcccaactggaggtccaggctggccaggtggacgtgaagctcccagagggccacgttctcg

SEQ ID NO: 7139 - DNA, 501 bp, Homo sapiens
  MAP TO AP001760.1; EXPRESSED IN LUNG, SIGNAL = 5.3; EXPRESSED IN HEART, SIGNAL =   5; EXPRESSED IN BONE MARROW, SIGNAL = 5.5; EXPRESSED IN FETAL LIVER, SIGNAL = 5.1; EXPRESSED IN ADULT LIVER, SIGNAL = 4.9; EXPRESSED IN HELA, SIGNAL = 3.9; SWISSPROT HIT: O95613, EVALUE 3.00e-15; EST_HUMAN HIT: BF932447.1, EVALUE 7.00e-01; NT HIT: gi16166512, EVALUE 9.00e-55
gcattgcagccagtgtgggcgggagccgcccacagcccaggacggggagcttgctgcgctccacgtgaaggaagactgcgccctgcagctgatgctggcccggagcaggtgggtttgcagtgacgccatctgcagtccctgtgaggccagacaccttggagggtagaaggtgggcaggctcctgggaggaggcgctgtgggctccactgggcgaaaaggtctggagggagctggaacaaggtgtggcgctctaggttttcagcctaattgcagtgggacagctttgtgctcggacgggcaggctggcagttgccatcctgaagccccctggccgcagtgggacagctttgtgctcggacaggcaggctagcagtcgccgtcccggagccccctggccgcagtgggacagctttgtgctcggacgggcaggctggcagttgctgtcccgaagcccccaggctgcaatggggacagctttgtgcttggatgggcaggctggca

SEQ ID NO: 7140 - DNA, 530 bp, Homo sapiens
  MAP TO AF114156.1; EXPRESSED IN HELA, SIGNAL = 2.7; EXPRESSED IN ADULT LIVER, SIGNAL = 1.4; EXPRESSED IN BRAIN, SIGNAL = 1.5; EXPRESSED IN HEART, SIGNAL = 1.7; EXPRESSED IN FETAL LIVER, SIGNAL = 1.8; EXPRESSED IN LUNG, SIGNAL = 1.5; EST_HUMAN HIT: AL042461.1, EVALUE 1.00e-120; SWISSPROT HIT: P08048, EVALUE 3.00e-85; NT HIT: gi4507966, EVALUE 0.00e+00
ggagctgatgctacacacatggatggtgatcagattgttgtggaaatacaagaagcagtttttgtttctaatattgtggattctgacataactgtgcataactttgttcctgatgacccagactcagttgtaatccaagatgttgttgaagatgttgtcatagaggaggatgttcagtgctcagatatcttagaagaggcagatgtatctgaaaatgtcatcattcctgagcaagtgctggactcagatgtaactgaagaagtttctttaccacactgcacagtcccagatgatgttttagcttctgacattacttcaacctcaatgtctatgccagaacatgttttaacgagtgaatccatgcatgtgtgtgacattggacatgttgaacatatggtgcatgatagtgtagtggaagcagaaatcattactgatcctctgacgagtgacatagtttcagaagaagtattggtagcagactgtgcccctgaagcagtcatagatgccagcgggatctcagtggaccagca

SEQ ID NO: 7141 - DNA, 527 bp, Homo sapiens
  MAP TO AC010422.6; EXPRESSED IN BONE MARROW, SIGNAL =  71; EXPRESSED IN LUNG, SIGNAL =  58; EXPRESSED IN HEART, SIGNAL =  59; EXPRESSED IN BRAIN, SIGNAL =  13; EXPRESSED IN HELA, SIGNAL =  22; EXPRESSED IN ADULT LIVER, SIGNAL =  60; EST_HUMAN HIT: BG745491.1, EVALUE 0.00e+00; SWISSPROT HIT: P45634, EVALUE 3.00e-99; NT HIT: gi14759683, EVALUE 0.00e+00
cgcatttttgacctggggcggaaaaaggcaaaagtggatgagtttccgctctgtggccacatggtgtcagatgaatatgagcagctgtcctctgaagccctggaggctgcccgaatttgtgccaataagtacatggtaaaaagttgtggcaaagatggcttccatatccgggtgcggctccaccccttccacgtcatccgcatcaacaagatgtcgtcctgtgctggggctgacaggctccaaacaggaatgcgaggtgcctttggaaagccccagggcactgtggccagggttcacattggccaagttatcatgtccatccgcaccaagctgcagaacaaggagcgtgtgattgaggccctgcgcagggccaagttcaagtttcctggccgccagaagatccacatctcaaagaagtggggcttcaccaagttcaatgctgatgaatttgaagacatggtggctgaaaagcggctcatcccagatggctgtggggtcaagtatatccccaatcgtggccctctgga

SEQ ID NO: 7142 - DNA, 500 bp, Homo sapiens
  MAP TO AC005070.1; EXPRESSED IN ADULT LIVER, SIGNAL = 2.6; EXPRESSED IN PLACENTA, SIGNAL = 3.6; EXPRESSED IN HELA, SIGNAL = 1.9; EXPRESSED IN FETAL LIVER, SIGNAL = 1.7; EST_HUMAN HIT: AA506215.1, EVALUE 0.00e+00; SWISSPROT HIT: P19467, EVALUE 1.60e+00; NT HIT: gi14752659, EVALUE 1.00e-44
cagcagcacagaaccttccagccaatactcagcaggcaacttctggaacattatttacacagacaccctcaggacaatcttcagcaacatacagtcagtttaaccaacaaagtctgaacagcacggcaccaccccctccacctcctccacctccttcttcgtcttactatcaaaaccagcagccctctgcaaactttcagaattataatcagctcaaaggtagtctttctcaacaaactgtgtttacatcaggaccaaatcaagcacttcctggcaccacaagccagcaaacagttccaggacaccacgtgactccagggcattttttgccctctcagaaccctaccattcaccatcaaactgctgctgccgtagtcccccctcctcctccaccaccacctgctccaggaccgcaccttgtacaacagccgaattcccatcagcaacactctgtagcacatgtagtagggcctgttcatgcggtcacccctgggtcgcat

SEQ ID NO: 7143 - DNA, 505 bp, Homo sapiens
  MAP TO Z97986.3; EXPRESSED IN HELA, SIGNAL = 0.34; EXPRESSED IN ADULT LIVER, SIGNAL = 1.5; EXPRESSED IN BRAIN, SIGNAL = 1.9; EXPRESSED IN BONE MARROW, SIGNAL = 1.5; EXPRESSED IN LUNG, SIGNAL = 1.3; NT HIT: gi12408291, EVALUE 1.20e-01; SWISSPROT HIT: P93329, EVALUE 7.00e-03; EST_HUMAN HIT: BE512921.1, EVALUE 4.50e-02
ccccaggaggaggctgtccctgggaagcaggctggagcttccgaaggcatcccccagcctgacaaggttctgttcccggagcaggtgggcgtcttgggctcccggttcctggggtggacggaggggctgggcggctgggcatggcggttgggcggctgggcatggcggctggggtccgtcctgagctcagtcgctgggaaagtgggctccaggccacagaggggaactgagacccgagagccagcgcgggggtcctcggggtctccaggagagcctaggctctaggctggggccacagggcagaggccgtgaggggagaggggcaggggccgggggcgctgtgggggcagtgcggcctcctgaccagcttccaccccacagcctgcccaccggctcctctgtgatgctgtggcctgaggacggggatccaggcggccctgagacccccggccctgagggccccctccccctgcagccacggggcccagtgccaggaagcccggag

SEQ ID NO: 7144 - DNA, 505 bp, Homo sapiens
  MAP TO AL022310.1; EXPRESSED IN ADULT LIVER, SIGNAL = 3.7; EXPRESSED IN PLACENTA, SIGNAL = 5.6; EXPRESSED IN BRAIN, SIGNAL =   4; EXPRESSED IN BONE MARROW, SIGNAL = 4.7; EXPRESSED IN LUNG, SIGNAL = 3.9; EXPRESSED IN HEART, SIGNAL = 3.8; EST_HUMAN HIT: BF798833.1, EVALUE 7.00e-04; SWISSPROT HIT: Q9X100, EVALUE 8.00e+00; NT HIT: AL163227.2, EVALUE 8.00e-03
caggagcaatgggcatgagttgcacagcacctggcactgtactccaaactttagagtagaaaaatggctgtcccttcactttcaccttctaaatctcatgcgaactttgccttgttgctacacaggaagaggaattctggggactatacttctagcttggctaacttgtgttagtacaaacccaccacatttcaccccttgtcgacttgacatctatacacacccctttaatcatacctaacatccaaataaagacaatagtaaaatgatgcttctacccaatgatgctgatatccgttgtataatcaaaaacatgttagctctctcctgcaaataagatacaagtttttttatccatctttggatgatgttcattcttcttctagttgagtcatactccctctttgatattctctaacttaagtgataagatataaaatgaattaccattaacactgttaaattagaatgaagaggaatgggagagtggaaggaaagcactggc

SEQ ID NO: 7145 - DNA, 501 bp, Homo sapiens
  MAP TO AL136040.3; EXPRESSED IN ADULT LIVER, SIGNAL = 1.3; EXPRESSED IN HELA, SIGNAL =   2; EXPRESSED IN BONE MARROW, SIGNAL = 1.5; EXPRESSED IN LUNG, SIGNAL = 1.3; EXPRESSED IN HEART, SIGNAL = 1.3; EXPRESSED IN FETAL LIVER, SIGNAL = 1.6; EST_HUMAN HIT: BE179105.1, EVALUE 0.00e+00; SWISSPROT HIT: P16473, EVALUE 1.00e-92; NT HIT: gi16190702, EVALUE 0.00e+00
cggtatgcctgagcctggcgtttacagatgccaaacttgctgagtaggatgaacacatccctctggaaggccttggtgaaaatagcatagaggaatggattggcacaggagttaagtggatagaagagtaccagcaagattttggagttgctaacagtgatgagaggcttgttcagaattgctgacagagcatagaatgagattggggccatgcatatgaagtcggtgaagatcaacacagccatcctcttggcaattttggtatctttgtcccctgggttgtactgcggatttcggactgtgatgtagatcttcacataacagcagcagacgatgacgaaggcaactatgttgagcgtcagaacaaaaacaatatatgccagagcaagaggggtctcggtgtccatgggcaggcagatactgactttggcatagctacttattcccaccaaaggaagcagggcgagaaggaagcagcaaacccagcccccaaccatgatg

SEQ ID NO: 7146 - DNA, 508 bp, Homo sapiens
  MAP TO AL022312.7; EXPRESSED IN LUNG, SIGNAL = 0.98; EXPRESSED IN HELA, SIGNAL = 1.6; EXPRESSED IN ADULT LIVER, SIGNAL = 1.2; EXPRESSED IN BRAIN, SIGNAL = 1.1; EXPRESSED IN BONE MARROW, SIGNAL = 1.2; NT HIT: AF113526.1, EVALUE 8.00e-03; SWISSPROT HIT: P04963, EVALUE 9.30e-01; EST_HUMAN HIT: AW976459.1, EVALUE 1.80e-01
ctgctgggggtgctgcaatgagttatggtatttcctgccttccagaagctccctctccagtgggggacactggggagctgggcctcgaaggagaaaggagggcactccaggttggggggagcagcatgtgcagaggcctggaggcatgagtcagtgagggatagggaaagtgtaactgacctctgaggagcaggtgtgtgccagccaacgaggcccctttgtctgaccaggggaagggaaggttagtgctcctctccctccccagaggaaaacaaaattttagagactgtcagaaatgtgatggagctgtcaggagaacatgaaacagccacgtaccctgggaaacggaagtcacagctctgtttgttctgtgacagtgtgaaaactcacaaccttttcatcgagatgggtaacgaaaacatgagaaaactggaagtgctttggtttggctcagctgaggacattactccaagcccgcccaggctctcccctccggcctggattcgtt

SEQ ID NO: 7147 - DNA, 514 bp, Homo sapiens
  MAP TO AP000344.1; EXPRESSED IN PLACENTA, SIGNAL =   2; EXPRESSED IN BRAIN, SIGNAL = 0.84; EXPRESSED IN HEART, SIGNAL = 1.5; EXPRESSED IN BONE MARROW, SIGNAL = 0.99; EXPRESSED IN ADULT LIVER, SIGNAL = 1.2; EST_HUMAN HIT: BG623981.1, EVALUE 2.00e-04; NT HIT: M24637.1, EVALUE 1.90e+00
acggcgccaagcctggaagagaccactgggtagagcaaggggtgttcagaggttcacttcatttgtttctctgtctttagacagcccagtgtctgtgaacagttactgtgtgtattttgttcatttttctagttgtttacaacatgaaggcagacctggtctcagttgcccagcatgacgtcccagatccacatgtgaggaggagcagcagcatgggggttccgctgcgagctcagggcaggggtctgtattccaggaacttgggtgggcttcatagacccctgtcgttcccagaattataggcagcacggagtgtgcttgtgcacactttcctgggtggagaggcacacggcacctcacgcattgaagcgttgtggcccctcggggagttaagacccagtgggaggaggaccagggcggggggcctggagatggaaccgcaccttcccatgctgcctcgctaattctacaaatactgttgacatcctgtgcgtgtggccttgggcagaggggt

SEQ ID NO: 7148 - DNA, 532 bp, Homo sapiens
  MAP TO AC005795.1; EXPRESSED IN ADULT LIVER, SIGNAL = 3.9; EXPRESSED IN BRAIN, SIGNAL = 4.9; EXPRESSED IN PLACENTA, SIGNAL = 6.9; EXPRESSED IN LUNG, SIGNAL =  12; EXPRESSED IN HEART, SIGNAL =   5; EXPRESSED IN BONE MARROW, SIGNAL =  11; EST_HUMAN HIT: BG684276.1, EVALUE 0.00e+00; SWISSPROT HIT: P21107, EVALUE 3.00e-21; NT HIT: gi14786817, EVALUE 0.00e+00
ggaggcggagacccatgctgagtttgctgagagatcggtagccaagctggaaaagacaattgatgacttggaagataaactgaaatgcaccaaaggggagcacctctgtacacaaaggatgctggaccagactctgcttgacctgaatgagatgtagaacgcctcagtctcaccctgctgctgctcctccctctgaaccagactccgcctgaggccagcctgcccgaagctgacctttaattgagggctgatctttaactggaaggctgctttctcctttcgccgccccctccttccgccgcccgctccttccctgtgtctttttcaccaaactgtccgcctcttcccggagattccagctgggctagaggctgagcacctttggaaacaacatttaagggaatgtgagcacaatgcataatgtctttaaaaagtatgttgtgatgtacacattttgtaattacctcttttgttgttttgtagcaaccttttgtaaaacattccatataataccacagccctgaagcagcga

SEQ ID NO: 7149 - DNA, 504 bp, Homo sapiens
  MAP TO AL163195.3; EXPRESSED IN LUNG, SIGNAL = 0.95; EXPRESSED IN HEART, SIGNAL = 1.2; EXPRESSED IN BONE MARROW, SIGNAL = 1.1; EXPRESSED IN FETAL LIVER, SIGNAL = 1.3; EXPRESSED IN ADULT LIVER, SIGNAL = 1.3; EXPRESSED IN BRAIN, SIGNAL = 1.1; SWISSPROT HIT: Q9WUX6, EVALUE 1.20e+00
aggctcagggtgggcagcagggaagaacatgggtaaaggatacactaaactcttccagtccacatccagagacaaactcagagcagagcaggaaacaaatggatggccaggactacagtacggactacagcagctcttcacttactcctttccagggtaagggaaaggagaggcagagagcttagagaaactaggcatcatcaccttatcctaccatctctaatcctaggaacaaaatgcaagttgggtgacccatagggcaaggaagaattccatctgcatgatacctaagatcaggagaactatatgagaaagaagaagtaaaaaaggaagaggaacaggagaaggtgaagagaaaaaagatgatgagttgcttcattgtccagttggtaactggcgcttcatgtcattacaggttataataatgtgcttttttataacagaagttaggtaattgcagttaggagtgacctggtctggttgggacagctcgcacaatgtcaa

SEQ ID NO: 7150 - DNA, 563 bp, Homo sapiens
  MAP TO AL117259.3; EXPRESSED IN ADULT LIVER, SIGNAL =  37; EXPRESSED IN PLACENTA, SIGNAL = 1.7; EXPRESSED IN BRAIN, SIGNAL = 0.84; EXPRESSED IN BONE MARROW, SIGNAL = 1.3; EXPRESSED IN LUNG, SIGNAL = 4.1; EST_HUMAN HIT: AV658834.1, EVALUE 2.00e-54; NT HIT: M19685.1, EVALUE 0.00e+00; SWISSPROT HIT: P20848, EVALUE 1.00e-21
ggccaggctgagggatgcttgcttttcctgtttgctgaccttgggcttgagtctcacctctctgggctttggtttcctcatgtgtaaaaggaagatagtagcattaccacctcacaggattgttacaagaaagcaatgagttaacacacgtgtgcttagaacagttcttggcataagctaagtaccttacacgtgcttgctatctttcttattctttcaatgatgatggtgtaggaaagtgtttgcaatgggctgggcacatggtggatgtttaataattcatggttgcaatcacacaatgtcagtccctggtcactgggagtcatcatgtgccctgacttggggcctggccctctgcctctgtcttgcaggacaataccattctctgtctcatggggcgtcctcctgctggcaggcctgtgctgcctggtccccagctccctggttgaggatccccaggaagatgctgcccaaaagacggatacatcccaccatgatcaaggggactgggaggaccttgcttgccagaagatctcctataacgtcaccgacctcgcctttga

SEQ ID NO: 7151 - DNA, 516 bp, Homo sapiens
  MAP TO AC007721.10; EXPRESSED IN FETAL LIVER, SIGNAL =   2; EXPRESSED IN LUNG, SIGNAL = 1.7; EXPRESSED IN ADULT LIVER, SIGNAL = 1.8; EXPRESSED IN HELA, SIGNAL =   3; EST_HUMAN HIT: BG002218.1, EVALUE 1.00e-30; SWISSPROT HIT: P38486, EVALUE 3.00e-12
tgtggagatgcccgtgtgcctggggcgtggcctcctggagggaaccagtgtggagatgccagtgtgcctggggcgtggcctcctagagggagtcagtgtggagatgcccgtgtgcctggggcgtggcctcctggagggaaccagtgtggagatgtcagtgtgcctggggcgtggcctcctagagggagtcagtgtggagatgcccgtgtgcctggggcgtggcctcctggagggaaccagtgtggagatgtcggtgtgcctggggcgtggcctcctagagggagtcagtgtggagatgcccatgtgcctggggcgtggcctcctggaggcagccagtgtggagatgccagtgtgcctggggcgtggcctcctagagggagtcagtgtggagatgcccgtgtgcctggggcatggcctcctggagggaaccagtgtggagatgccagtgtgcctggggcgtggcctcctgagggagtcagtgtggagatgcccgtgtgcctggggcgtggcctcctg

SEQ ID NO: 7152 - DNA, 510 bp, Homo sapiens
  MAP TO AC012433.5; EXPRESSED IN ADULT LIVER, SIGNAL =   2; EXPRESSED IN BRAIN, SIGNAL = 2.1; EXPRESSED IN HELA, SIGNAL = 1.7; EXPRESSED IN LUNG, SIGNAL = 2.3; EXPRESSED IN HEART, SIGNAL = 2.2; EXPRESSED IN BONE MARROW, SIGNAL = 2.2; EXPRESSED IN FETAL LIVER, SIGNAL = 2.6; EST_HUMAN HIT: BF918987.1, EVALUE 2.00e-53; NT HIT: X59727.1, EVALUE 1.00e-53; SWISSPROT HIT: P31152, EVALUE 2.00e-13
gggtgggaagcctcagggtgtgtcctgagcacacaggaaggacatgggatggctaagtggacagcagggataagaagatgctagaggcaaattcaccaaccacatagttttcaagccatagaatttagagctggaagaaattttggagatcgtctagtccagcttctgcaggcacagctcagggtgatcaaagccacatagcagagccaagaccaagaaccagatctccctccacgcctccaacaacttttcaggctagtgatcttcctagcaccctccagcctcccctaattactaactctagtcctctgactaccatggagctaggaatagcttgggaatgctgcaagtattcttggggattctgtggaccaccagtatccgccattccagccagacataccttgtgggagtaatgctgatcaacgatccttgccaacccgaaatccccaatcttgagcacgaggtcctctgtgctgatgaagatgttggcgggcttcaggtccctgt

SEQ ID NO: 7153 - DNA, 585 bp, Homo sapiens
  MAP TO AC004597.1; EXPRESSED IN ADULT LIVER, SIGNAL = 1.8; EXPRESSED IN FETAL LIVER, SIGNAL = 1.7; EXPRESSED IN LUNG, SIGNAL =   2; EXPRESSED IN BRAIN, SIGNAL = 1.7; EST_HUMAN HIT: BG189045.1, EVALUE 2.00e-17; NT HIT: gi11427060, EVALUE 0.00e+00; SWISSPROT HIT: O60404, EVALUE 5.00e-26
caggggaatctgaccctgatcatccatgcctgtctctaatggctccaagtattgaaacttttctttatgttagtcagtgttaatggaaacccaattagtagccaacatctgacttggtcatctaatatattgatctcgtttgatctttgtcacattgctgaatgttaagaactattattatttactccatttaacagatgaggaaagtgagacccagaaagttccaccagttgttgaatagcatagagctgttgggtttccatttggtctgtgctagagtctaagttttaaccactgtcacttaattttgtttctgatctcaccagatacagtatccatgcctggtcagaactacagaaccatatctgaatttatcctctctggcttctcagccttcccccagcagctcctgcctgtcttgttcctgctgtacctcctgatgttcctgttcacattgcttggcaaccttcttatcatggccacagtttggattgaacgcagactccacacacccatgtacctcttcttgtgtgccctctccatctctgagattctgttcactgttgccatcacccctcgcatgct

SEQ ID NO: 7154 - DNA, 503 bp, Homo sapiens
  MAP TO AC007326.28; EXPRESSED IN BRAIN, SIGNAL = 2.7; EXPRESSED IN LUNG, SIGNAL = 2.3; EXPRESSED IN HEART, SIGNAL = 2.7; EXPRESSED IN BONE MARROW, SIGNAL = 2.4; EXPRESSED IN FETAL LIVER, SIGNAL =   2; EXPRESSED IN PLACENTA, SIGNAL = 4.2; EXPRESSED IN ADULT LIVER, SIGNAL = 2.8; EST_HUMAN HIT: AW013827.1, EVALUE 0.00e+00; NT HIT: M14123.1, EVALUE 0.00e+00; SWISSPROT HIT: P10266, EVALUE 9.00e-78
tcccaaggacaggccatagttgaaagaactaatagaacactcaaaactcaattagttaaacaaaaagaagggggagacagtaaggagtgtaccactcctcagatgcaacttaatctagcactctatactttaaattttttaaacatttatagaaatcagactactacttctgcagaacaacatcttactggtaaaaagaacagcccacatgaaggaaaactaatttggtggaaagataataaaaataagacatgggaaatagggaaggtgataacgtgggggagaggttttgcttgtgtttcaccaggagaaaatcagcttcctgtttggatacccactagacatttgaagttctacaatgaacccatcggagatgcaaagaaaagggcctccgcggagatggtaacaccagtcacatggatggataatcctatagaagtatatgttaatgatagcgaatgggtacctggccccacagatgatcgctgccctgccaaacctga

SEQ ID NO: 7155 - DNA, 526 bp, Homo sapiens
  MAP TO AC011718.2; EXPRESSED IN ADULT LIVER, SIGNAL = 1.7; EXPRESSED IN PLACENTA, SIGNAL = 1.6; EXPRESSED IN BONE MARROW, SIGNAL = 1.8; EXPRESSED IN LUNG, SIGNAL = 1.4; EXPRESSED IN FETAL LIVER, SIGNAL = 1.4; EXPRESSED IN HELA, SIGNAL = 2.7; EXPRESSED IN BRAIN, SIGNAL = 1.4; SWISSPROT HIT: Q91684, EVALUE 1.30e+00; EST_HUMAN HIT: BI829297.1, EVALUE 0.00e+00
gtcccccaaaactggcacggaagacacctgtggaaaagacaagaccttttcccacagaatttatctttaaagtgtatctagattggcagtttcacaactcttaatccatgggggaaaactgctgtggagggaaacacctctgcattgcagtggatcgtggatgctgccatctaccacaccccagtgtgcctggcatgggttggtgagaggctgccaatcaatagcaccacaccaagggaattgcagatgtcataaatagtccacattggcagatgttcatgtctacatttgattaaactgcagatgacatccataatgcacactggcagatgttcatgtctacatctgattggaaagaagccaggaaagtaacatttctgttcaagacaaagaaaagtgtcttacattggcagcatcttcttttttacagatgtcttgtacagtgtcctcattagcaatgtcatatacagcgtccttattagcgaattcgtatacagcatcctcattagcgatgccatatacagcg

SEQ ID NO: 7156 - DNA, 505 bp, Homo sapiens
  MAP TO AF030876.1; EXPRESSED IN LUNG, SIGNAL = 3.3; EXPRESSED IN HEART, SIGNAL = 3.3; EXPRESSED IN BONE MARROW, SIGNAL = 3.2; EXPRESSED IN ADULT LIVER, SIGNAL = 2.6; EXPRESSED IN PLACENTA, SIGNAL = 3.9; EXPRESSED IN BRAIN, SIGNAL =   3; EST_HUMAN HIT: AI753361.1, EVALUE 0.00e+00; NT HIT: gi14768312, EVALUE 0.00e+00; SWISSPROT HIT: P51608, EVALUE 1.00e-18
atgggggaaaggtttgggcgggaggggaggtgcctggtcaacagcttgtctggtcagtagtatctgcagcaagccttgttgaaggagcctagtttagaaaagtgcaaagctacttctggccctggttaggtcttcaacctgactgtgcttgtcggtaagaaaaacatccccaatgctccaactactcccaccctgaagccacgaaactctaagtttactgaaagaaaaaaaaatattttttatttcagttaatcgggaagctttgtcagagccctacccataaggagaagagacaacagctgcctttattcttgttggtttgctttgcaatccgctccgtgtaaagtcagctaactctctcggtcacgggcgtccggctgtccacaggctcctctctgtttggccttggcatggaggatgaaacaatgtctttgcgctctccctcccctcggtgtttgtacttttctgcggccgtggcggcggtggcaaccgcgggctgagtctt

SEQ ID NO: 7157 - DNA, 531 bp, Homo sapiens
  MAP TO AC004126.1; EXPRESSED IN BONE MARROW, SIGNAL = 1.9; EXPRESSED IN ADULT LIVER, SIGNAL = 1.9; EXPRESSED IN PLACENTA, SIGNAL = 6.2; EXPRESSED IN BRAIN, SIGNAL =   3; EST_HUMAN HIT: AL561970.1, EVALUE 0.00e+00; NT HIT: gi14784758, EVALUE 0.00e+00; SWISSPROT HIT: P03181, EVALUE 2.00e-03
acaaggggcagggcagagggggcctggatgggagtccttgtgggggaccaggcaggggacttggatcaacaagcaccagacgagtggcgggggcaggcgagaggctcagtgggacctccaccctcgttgccccagctggtggctgaccaggtggctgtggagggtcaggagctgccccggatcctctccatgtagttgcgaagctcctcagggtccttcagccccatgtcctcacacacccagcggatgtcctcctcgcctgccacaaggatggactgcacagcaggggcccctacaggctcctcaggtgactgggctggaggggctggcgcaaatgtcacaaactctactcgcttccgccgccccccagcctcctttcgggccagggtgcttgaggagctggtggtgcccccaggagggccaggggccagggtaggggcctcccctcctcccccactctcacaggggcagctcccctcccccttgggcgggccaggggactgccggtccagctggcggctcagttcctcc

SEQ ID NO: 7158 - DNA, 530 bp, Homo sapiens
  MAP TO AF254983.1; EXPRESSED IN PLACENTA, SIGNAL = 4.6; EXPRESSED IN LUNG, SIGNAL = 2.3; EXPRESSED IN HEART, SIGNAL = 2.5; EXPRESSED IN BONE MARROW, SIGNAL = 2.4; EXPRESSED IN ADULT LIVER, SIGNAL = 2.3; EXPRESSED IN BRAIN, SIGNAL = 2.6; EST_HUMAN HIT: AV750850.1, EVALUE 0.00e+00; NT HIT: AL163201.2, EVALUE 0.00e+00; SWISSPROT HIT: P40355, EVALUE 2.90e+00
tgtccccacatgaggaaagcacttcattatgtcctgaggaacagttggttatagaaaggctacaaggagaaaaggaacagaaagaagattctgaactttctactggattgatggactctgaaatgactcctacaattgagggttgtgtgaaagatgtttcataccaaggaggcaaatctataaagttatcatctgagacagagtcatcattttcattatcagcagacataagcaaggcagatgtgtcttcctccccaacaccttcttcagacttgccttcgcatgacatgctgcgtaattacccttcagctcttagttcctctgctggaaacatcatgccaacaacttacatctcagtcactccaaaaaactggcatgggtaaaccagctattactaagagaaaattttctcctggtagacctcggtccaaacaggtagggtgattttaatgatattgacagaaaaagatattggaacaattctataaaatcagaaggtatatgtgtagctttgggtgtggatggcaact

SEQ ID NO: 7159 - DNA, 500 bp, Homo sapiens
  MAP TO AC002472.3; EXPRESSED IN BRAIN, SIGNAL = 1.2; EXPRESSED IN ADULT LIVER, SIGNAL = 1.3; EXPRESSED IN HELA, SIGNAL = 0.35; EXPRESSED IN HEART, SIGNAL = 1.3; EXPRESSED IN FETAL LIVER, SIGNAL = 1.3; EXPRESSED IN LUNG, SIGNAL = 1.6; SWISSPROT HIT: O43246, EVALUE 6.00e-21; EST_HUMAN HIT: AI632325.1, EVALUE 1.00e-102; NT HIT: AB002059.1, EVALUE 0.00e+00
gcctctcaccctgctccccctggagctgctccctccccacccctcagggccaccgagcgggtgagcaggtggggcctcaccaggcctcctttgctgcctgggatgcagacagggcctccaggcttcctgtgacctcctgcccacaggttctgacacctgccccattccagctctccagcaggcccctggtgagggtgtccaggtccccaggtcagggacagagagaggactgggggtggtcagaccaggagggatggaaggctggtcaggccccggctacgcatcctgtcattcccctctggccctagcaggttccagtagctggctcggtgctcttctcggccacctgccatggcccgggggctgcccaccattgctagcctggcacgcttatgccagaagctgaaccgcctgaagccgctggaggactccaccatggagacgtcactgcggcgctgcctgtccacgctggacctgactcttctgggcgtgggtggcat

SEQ ID NO: 7160 - DNA, 530 bp, Homo sapiens
  MAP TO AL163248.2; EXPRESSED IN ADULT LIVER, SIGNAL = 1.9; EXPRESSED IN BRAIN, SIGNAL = 1.9; EXPRESSED IN PLACENTA, SIGNAL = 2.8; EXPRESSED IN BONE MARROW, SIGNAL = 1.9; EXPRESSED IN LUNG, SIGNAL = 1.3; EXPRESSED IN HEART, SIGNAL = 1.6; EST_HUMAN HIT: BG388052.1, EVALUE 1.00e-122; NT HIT: AL163248.2, EVALUE 0.00e+00; SWISSPROT HIT: P19226, EVALUE 1.00e-66
caggggtggtcacaggtttagactgctttttaagttcagcaattacagcatcaacagctaacatcacacttctcttgatttccactggattagcacctttgctaaacttcttgaagacttccttggcaacagtagcagtggtagtgccatccccagcctcttcatttgtgttattggcaacatcttgaacaagtttagccgcaatatttttatatttatcctttaagtcaatggaccttgcaacagtcacaccatcttttgttactttgggacttccccagttctgctcagtaatcactgtttttccctttggccccattgtaatggctacagcagtgagtaaaaggtctacaccttgaagcattaagactcaggcatctgaaccaaaaattgtacatctttggcataaacccgagtgagatgaggagccaggaccctcgacactggtgtcatctgacttaagactgtgggtaattgaatcatttctgcggggcagtggcagggcttgcgcacgctgaccgcaggctgtc

SEQ ID NO: 7161 - DNA, 542 bp, Homo sapiens
  MAP TO AC004624.6; EXPRESSED IN ADULT LIVER, SIGNAL = 1.2; EXPRESSED IN BRAIN, SIGNAL = 1.3; EXPRESSED IN HELA, SIGNAL = 1.1; EXPRESSED IN LUNG, SIGNAL = 1.2; EXPRESSED IN BONE MARROW, SIGNAL = 1.4; EXPRESSED IN FETAL LIVER, SIGNAL = 1.2; NT HIT: M84699.1, EVALUE 5.20e-01; SWISSPROT HIT: Q59140, EVALUE 3.90e+00
ccagcactcggccagcacagaccctctaatgtctgctactaagtgagctgggggttaggggcgtactcagcaggagttgttttgactacggtcgtgcctccctgcggagctcgggtgcccatgggaaatgggctaggcatagcaaggtcccctctggcccagacccccttgaaggacactgttcccaagacctgcactgacgcacccctgggaggcatgggagtgagccagggatagtgaagtcccctccaagatagaataaaagccaatgtgggggtcctggtgacaagactgttggggagaggagtgggaggaggaggtcaggagaggacgagacaggaagaggagagggaaggaagagatgacagagaggagagcagaagcaggaagagagagaagggtgtctgtgagcgagaatcacctccctactcttttcttctaaaactggagcagcagcgtggtgtagggttaaggacacaggcttagacatcttcccactccaacacagcccctggcaattcacttcgcctccctgcacctcg

SEQ ID NO: 7162 - DNA, 543 bp, Homo sapiens
  MAP TO AL008723.8; EXPRESSED IN PLACENTA, SIGNAL = 2.8; EXPRESSED IN ADULT LIVER, SIGNAL = 1.7; EXPRESSED IN BRAIN, SIGNAL = 1.7; EXPRESSED IN BONE MARROW, SIGNAL = 1.7; EXPRESSED IN LUNG, SIGNAL = 1.7; EXPRESSED IN HEART, SIGNAL = 2.3; SWISSPROT HIT: P32687, EVALUE 2.00e-01
ggcttggcttgtggaccttctccttctatgacctctgagtctggaaattaaaaaaaaaagttggctcaatcctgtcccattcaaacaactataatcccaagacaattgtgagttcctttttttctgtttctatgactcaggggccaccattttctgaggattaaattgtggtgaaaaagggaaagaagataagggatctgatcccagtggaacccctggaaggtcatacaatctttgccaaagggaatttttcttgaattgcataaatgataaatggagtgacaaagcaatgagaaaggaacctggagatagaagaatatcaccagtgctccccaagtcttcccacatacagtgacgataataatataatctagcattaatgtgcaatttttacagagagtcttcacatagatcacttacgctgctctcagcctaagtgaggcagatatgagaagcacagttattcttatcttagagagggggaacttgagccttacagagattaagggggcccaaggtcacagtgacagggggagcagctca

SEQ ID NO: 7163 - DNA, 551 bp, Homo sapiens
  MAP TO AF002994.1; EXPRESSED IN PLACENTA, SIGNAL = 3.4; EXPRESSED IN BONE MARROW, SIGNAL = 1.9; EXPRESSED IN LUNG, SIGNAL = 1.8; EXPRESSED IN ADULT LIVER, SIGNAL = 2.1; EXPRESSED IN BRAIN, SIGNAL = 1.9; EST_HUMAN HIT: BG481340.1, EVALUE 6.00e-23; NT HIT: U82671.3, EVALUE 0.00e+00; SWISSPROT HIT: P43362, EVALUE 8.00e-40
gaggtccctggcctggtgggtgggcagggtcctgtgcctgaggaggaggaggctgcctcttcctcctctagtctgatcatgggcaccctggaggagttgtgtgctgctgaggcactgagtcctccccagagtatgcagggagcctcctcctcccccactaccatcgataacactctatggaaccaatccgatgagggctccagcagccaagaaaaggaggagccaatcaccttgcccatcccaagtgtcatggagtccttcctccgagaggcactctgacaaggtgtctgatttagttagtgtcctgctccacaagtttcgaattaaggagtcagtcacaaaggcagaaatggtggatagtgtcatcaaaaatcacgaagactacttcgctttcattttcaaggaatcctccgagtacatgcagctgatctttggcatcgacgtgaaggaagtggtccccaccggccattcctatgtccttgtcacctctctgggcctctcctatgatggcatgctggttgatgacccgagcaagcccaagacgggcctcc

SEQ ID NO: 7164 - DNA, 511 bp, Homo sapiens
  MAP TO AL132642.1; EXPRESSED IN LUNG, SIGNAL = 1.1; EXPRESSED IN BONE MARROW, SIGNAL = 1.2; EXPRESSED IN ADULT LIVER, SIGNAL = 1.2; EST_HUMAN HIT: BI520320.1, EVALUE 5.00e-88; NT HIT: gi14748454, EVALUE 4.00e-88; SWISSPROT HIT: Q06583, EVALUE 4.80e-02
ggcagcgtggtgtgtgggagatggggcaggctgggagtgtgtgccagccccagcaatgccacctgtagctgggtcaccttgggcgacttgcttgacctttctgagccttggctgcaagaaggggcaccagacccaagcaggctgggcgaggctctgctggtgcctgccgcatcccaggtgtgcaggaagtgctcagccacttgcacccacatccctctacccaggactctgtttagggctgagaggtgctggggtggggagactgtttgtagacaggtgctgtggtcttttgggagggctgggtgtggttgcttggagagactccgatggcctgttttgtcccccaggtcagctcggtgcccttccttggagctgccggccaccagcagagcctaccctcttcatggaaagcctcgtgcagtggccccctggtgatggcatccgacagtgatgtgaagatgctgctgaacttcgtgaacctggcgtccagcgacatcaaggcagccctgga

SEQ ID NO: 7165 - DNA, 511 bp, Homo sapiens
  MAP TO AC008151.1; EXPRESSED IN ADULT LIVER, SIGNAL = 1.5; EXPRESSED IN LUNG, SIGNAL =   1; EST_HUMAN HIT: BF791135.1, EVALUE 4.00e-27; NT HIT: AL163246.2, EVALUE 2.00e-15
gggtgggggcaaggttctccagaagcctgtatagctctgagtctgcatccagcatatggtgctctttctcccatagctaggattcaaggatccagaaaccaagaggtggaaatgggggtggcaccactcactattacccttagcaatccactagcaaaggttttacttcctgtacctgtgactttatactctactctcctagaagttttagtttcagagggagaatgcttccaccaggaatcacaacaatgattccactgaattggaagttaagactgccaccttgccactttgggcccgtcatgcccatgaatgaacaggtgaggagggaggtatagtgatagttgggatggttgttccagactatcaaggacaaattggactactactccacaatggaggtaaagaagactgtctggaatacaggagatcccttacggcgtgttttagtattaccatgccctgtgattaaggtcaatgaataactacaacaacccaatccaggcagggc

SEQ ID NO: 7166 - DNA, 547 bp, Homo sapiens
  MAP TO AC009336.2; EXPRESSED IN BRAIN, SIGNAL = 9.9; EXPRESSED IN ADULT LIVER, SIGNAL = 7.5; EXPRESSED IN LUNG, SIGNAL = 6.8; EXPRESSED IN BONE MARROW, SIGNAL = 8.2; EXPRESSED IN HELA, SIGNAL = 2.5; SWISSPROT HIT: P31277, EVALUE 3.00e-41; EST_HUMAN HIT: AL551705.1, EVALUE 3.00e+00; NT HIT: AF154915.1, EVALUE 0.00e+00
gccgccgcgtagtagggagcgtagccccccgcgccgccgccgcccccgccggggccgcccccgctgctgccgccccccgcgctgccgccgccgccgccgccgcggtacggccacttggcgcgctccaggccgtagtcgcggaaggccacttcgcgcacgggctggacgtgcggagccaggttggaagagtaggggaaagtcatctggcaggacgacggttgggaaaggaacgaaggcttgctagcgaagtcagacggggccacatagtaggcgcagcccggcaggtacatgctggctgcgctctggccgcactcgtcaaagtcgttcatgactccgcggcgtgcgcgccagcgagcctctggccgctccccgcgcagccaacctgagccatcgattgcacaagaggcttgggccaggatcaactaagcaaaaatccccaccgggcgctgacgtgcaattcatcttgattgattctggtggtaattatgtcacgtgacgccatgaagagaaatgtccttatatctatatcaacgctcgccaacacgcc

SEQ ID NO: 7167 - DNA, 507 bp, Homo sapiens
  MAP TO Z83844.5; EXPRESSED IN PLACENTA, SIGNAL =   3; EXPRESSED IN ADULT LIVER, SIGNAL = 1.8; EXPRESSED IN BRAIN, SIGNAL = 1.7; EXPRESSED IN HEART, SIGNAL = 1.8; EXPRESSED IN BONE MARROW, SIGNAL = 1.9; EXPRESSED IN FETAL LIVER, SIGNAL = 1.5; NT HIT: gi14742065, EVALUE 4.80e-01; SWISSPROT HIT: Q92618, EVALUE 1.20e-02; EST_HUMAN HIT: BE872026.1, EVALUE 4.00e-27
aggtggaagacggggtgggcagaatacagagcagcgggacaaacgcagccccaggggttctcggccgtgagcagagcctgtgtctctcccttagacaggtatacagggaggggctgggatgccaacctactgggtcccccgactgtggctgtggaaggttctggatcttcagctgtcccaagccccggttggtccacttcctatacctgagaaggggctccgtgggtggagagtgggtcgggagaggtggccaggcagggtggctgtggtttccagctgccactgtcaccgcccactccactgagccatgccacccgttctctgcaggcaaccagacaccttggcctggtgaggcctcgatgtaggggctgataggtaggctcagagccatggcaaccggtggccacctcctccctgccggcgccaggagcggagactgcagagggaccgggacttagatgagagaggtctccccagcaggaagggagggtctggtggttggcaccc

SEQ ID NO: 7168 - DNA, 502 bp, Homo sapiens
  MAP TO AC004080.1; EXPRESSED IN BRAIN, SIGNAL = 1.2; EXPRESSED IN HELA, SIGNAL = 0.53; EXPRESSED IN ADULT LIVER, SIGNAL = 1.4; EXPRESSED IN HEART, SIGNAL = 1.3; EXPRESSED IN FETAL LIVER, SIGNAL = 1.4; EXPRESSED IN LUNG, SIGNAL = 0.99; EXPRESSED IN BONE MARROW, SIGNAL = 1.1; SWISSPROT HIT: P31311, EVALUE 5.00e-46; EST_HUMAN HIT: AL551705.1, EVALUE 0.00e+00; NT HIT: AF071164.1, EVALUE 0.00e+00
agcagtgggccagattgccgcgggggtgccatttagtggcgggctcaatggcgtactctctgaaggtcacttcgcgcacgggttggacctggggcaggttggaggagtaggagtatgtcattgggcgcgaagacggggtctggggcagaaaagaagggaggctggagaaatctggacccgagacgtagtaagtacaacttggcaaatacatgttagaggagcagggaccacgctcatcaaaatccattattgggctaccttgggctctccgcagtagccgagcttaacatgattctccactgcagctgcctctttgaagcggatccgtgaagtagaaatttggagacgtaagctgacgtggaaatctatccccatccttagcagggaggtgctggtcatgtgacccgatgttgaaattgacaagctgctagctagtccgggccttttccccccccctttccttttttttttttcctcctctcccctccctcccggcttcctt

SEQ ID NO: 7169 - DNA, 525 bp, Homo sapiens
  MAP TO AL049732.9; EXPRESSED IN LUNG, SIGNAL = 2.4; EXPRESSED IN PLACENTA, SIGNAL = 2.2; EXPRESSED IN HELA, SIGNAL = 4.4; EXPRESSED IN ADULT LIVER, SIGNAL = 2.3; EXPRESSED IN FETAL LIVER, SIGNAL = 2.7; SWISSPROT HIT: P31553, EVALUE 7.40e-01; EST_HUMAN HIT: AL538603.1, EVALUE 0.00e+00; NT HIT: gi14760403, EVALUE 0.00e+00
tgggtggcagttgcagccagcgagacctcggtggcactagctatggccttatttgcagccttcttagccttggaagctttcttaggcttgatagaggttatcaaggcttgggaactggctgactcattggcaattggagcgtgaatattctgtgagatgactggtagctttaggacctgcaagggtgacttcagctgtatagtgccaccctcatggccagttggggattgggagccttgggctgccttggcagtaactctcttcatcttgttggctttcttaggctgagcagtgactgaagaagcctgagtattggttacctcagtggtaggtaaagcctggctgatctgggtaatgactggcaggtttaaagcctgccaagttattttgggcttgttggtggcaatctcattggcagctgggactggaggggcagcaggtgcagccttagtaatagtctttataggggccttcttggtcttgcttttcttaggccggttgacaactggtgggtccatggccagg

SEQ ID NO: 7170 - DNA, 519 bp, Homo sapiens
  MAP TO AC004231.1; EXPRESSED IN HELA, SIGNAL = 1.3; EXPRESSED IN ADULT LIVER, SIGNAL = 1.2; EXPRESSED IN BRAIN, SIGNAL = 1.2; EXPRESSED IN BONE MARROW, SIGNAL = 1.4; EXPRESSED IN LUNG, SIGNAL = 1.2; SWISSPROT HIT: P35900, EVALUE 1.00e-20; NT HIT: X73501.1, EVALUE 0.00e+00; EST_HUMAN HIT: BG386855.1, EVALUE 1.00e-127
ggcaggcgcatgggctaaaagaatacactttcctgtttccttttattacctgtttaattaaaaaaaaaaaaaagttgcccctgataaaagcctccaagaaatgcctctagtggtattttctggaattgaattaagcatattaacatattgctatacaaagcggggggcgtggaagtaaggcaaggtggactgtggtgccaatcctagtgacatgtcagcagaggaggagtttcttgcctgtggacttcataaaaggctagctcaacaccctccatgagacacactctgccccaaccatcctgaagctacaggtgctccctcctggaatctccaatggatttcagtcgcagaagcttccacagaagcctgagctcctccttgcaggcccctgtagtcagtacagtgggcatgcagcgcctcgggacgacacccagcgtttatgggggtgctggaggccggggcatccgcatctccaactccagacacacggtgaactatgggagcgatctcacaggcggc

SEQ ID NO: 7171 - DNA, 503 bp, Homo sapiens
  MAP TO AC008688.4; EXPRESSED IN ADULT LIVER, SIGNAL = 2.2; EXPRESSED IN HELA, SIGNAL = 0.32; EXPRESSED IN BRAIN, SIGNAL = 1.8; EXPRESSED IN BONE MARROW, SIGNAL = 1.7; EXPRESSED IN FETAL LIVER, SIGNAL = 2.6; EXPRESSED IN LUNG, SIGNAL = 1.9; SWISSPROT HIT: Q9Y5F3, EVALUE 5.00e-63; NT HIT: gi14861873, EVALUE 0.00e+00; EST_HUMAN HIT: AA448114.1, EVALUE 0.00e+00
acctcggcccggaaggactgcagcggctccaccaggactacttcaaagtgcagaacacaagggtcggctttgccacaaagtgactcccgatccagtttctccttcacaaacaaatctcccgtcttgcggtggagccggaaatgcattttgttgccctcggaaaccagccgcgccccgcgcgcagccagcttccctacctccagtcctaggtccttagctacgttggccacaaacgagccgctctccatttcctctgccactgaatagcggatagttgtcgcatcccccacagatatgcacagaaaaatgagaagagatcccacttgcctgttttgcaaagattttctgcgcgtacccgccatcagttctcacaagcgcgctctctgcaatcagagccaactgttgcggatatactttcacttttctgcaacaggttactgcaacagctgctctccgcttcactagcctctaactgcagcaccaccaaaggctagccgagccca

SEQ ID NO: 7172 - DNA, 516 bp, Homo sapiens
  MAP TO AC002094.1; EXPRESSED IN LUNG, SIGNAL = 2.8; EXPRESSED IN HEART, SIGNAL = 2.8; EXPRESSED IN ADULT LIVER, SIGNAL = 2.1; EXPRESSED IN BRAIN, SIGNAL = 4.3; EXPRESSED IN BONE MARROW, SIGNAL = 2.9; EXPRESSED IN FETAL LIVER, SIGNAL = 3.1; NT HIT: gi14760973, EVALUE 0.00e+00; SWISSPROT HIT: P21414, EVALUE 6.00e-49; EST_HUMAN HIT: AA706427.1, EVALUE 0.00e+00
tccggcacctggaggactgtgggtataaggtgtccaagaaaaaagctcagatctgccaacagcacgtacattacttgggatttactatccgacagggggagcgcagcctgggatcaggaagaaagcaggtcatttgcaatctgccagagcctaagaccagaaggcaggtgagagaattcttaggagctgcggggttttgcagactgtggatcccaaactttgcagtattagctaagcctttgtgtgaggtcacaaagtgggggggaccgggaccttttgaatggggatcccagcaacagcaagcctttcatgagttaaaggaaaaacttatgtcagccccagccctggggctatccgatctgacaaagccttttacattgtatgtgtcagagagagaaaagatggcagttggagttttaacccaaactgtggggccctggccgagccggtggcctatctctctaaacaactagacggggttgctaaaggatggcccccatgtttgagggccttggc

SEQ ID NO: 7173 - DNA, 563 bp, Homo sapiens
  MAP TO AP000354.1; EXPRESSED IN PLACENTA, SIGNAL = 3.6; EXPRESSED IN ADULT LIVER, SIGNAL = 1.9; EXPRESSED IN BONE MARROW, SIGNAL = 2.2; EXPRESSED IN LUNG, SIGNAL = 2.1; EXPRESSED IN HEART, SIGNAL = 2.5; EST_HUMAN HIT: BE925962.1, EVALUE 6.00e-85; NT HIT: AL163209.2, EVALUE 2.00e-03
ccaccgactggctaatcctggagtcatcttcacctgtcttgccctagaatattatgcctctggccaactggttaaaaccccacttctggattcaagttaatgtatatcatttaaataacagctttgtagaaatgtaattcacattccataaaatttactcttttaaaaacatgtaaaacaaagtgtataacttatttctccttgataattaaaagatgaatgatcttctggttttgaagaaattgaactttaacagactctaaggcaagattattgtagatctaaatcattgtgtagatcctggatttcatctcattacacctggggcaggaactgtgtattctatgtagccttttattgctgacatttttgccttacattttttgtattaaacacataggcacagcttcttcaaccaagcggagcacttctacaggtaataaagaatccagttctactagagaaagattacgtgaacgtacccgattaaaccagagcaaaaaactaccttctgcaggtcagggagctaatgacatggcattggccaaacgttcccgcagtcg

SEQ ID NO: 7174 - DNA, 536 bp, Homo sapiens
  MAP TO AC007595.3; EXPRESSED IN BRAIN, SIGNAL = 1.1; EXPRESSED IN ADULT LIVER, SIGNAL = 1.2; EXPRESSED IN HELA, SIGNAL = 2.3; EXPRESSED IN BONE MARROW, SIGNAL = 1.2; EXPRESSED IN LUNG, SIGNAL =   1; EXPRESSED IN FETAL LIVER, SIGNAL = 1.1; SWISSPROT HIT: P26007, EVALUE 1.70e+00; NT HIT: U58105.1, EVALUE 2.00e+00
tgatgccatgttggggacaaagaaagaaagaaaacaactcgctttgaccaaattgtccctgagctgatgaattcactgggtaaactacattaattttcctcccgcccagttgtaataggaagataaaatgtcacttcttgcaaccgaatctgtggattatgaaactcacattcactttgctgattattgtttttgtctttttgttttggacaatatggctgcagctggcctgtaagtgagcaaaggccccgctaagagtccctctccccaggctttatgacaccagtgctgagtcatagaggttctgctagtccccaagagaagcactttcacctttcctggtgatgcctttggctccttgagctgagttttgcccgagtggggctcatgagggaggatggagtttcttgggactactcagaccgccagttactgtggtcccaagaaatgctgtggcttgacctcactgccagctgtacaggcgccagtgatccaggaatgctatcagccctactacctgcccgggtaccgctacc

SEQ ID NO: 7175 - DNA, 541 bp, Homo sapiens
  MAP TO AL139008.3; EXPRESSED IN FETAL LIVER, SIGNAL = 1.4; EXPRESSED IN ADULT LIVER, SIGNAL = 1.5; EXPRESSED IN BRAIN, SIGNAL = 1.6; EXPRESSED IN HELA, SIGNAL = 3.3; EXPRESSED IN HEART, SIGNAL = 1.3; EXPRESSED IN BONE MARROW, SIGNAL = 1.5; EST_HUMAN HIT: BI198974.1, EVALUE 0.00e+00; SWISSPROT HIT: P10587, EVALUE 1.00e-04; NT HIT: gi14742076, EVALUE 0.00e+00
cgagcatcctctagttgtcgttcaagcaagagattttcaagttctcgttgacgtattctctcctctgaagagttctgctttccaatggattgactttctttagcttccccatttggatgcatctgcttcatttcctttattcgatgctgcgcttgctttaggtccagctgtacactttctaaagccaatgtcttttccctgagagcatctcttgtctcacggagcttaccttttaaggtattgaacttcacccgagctttatggacctgttcagtaagcaactcattcttatctgttagttgagaaatattagaacccattgtttcatgtctagaaacatcatctgctctccataaaactagttctaggtcttttctttccaaaatttcattgtactcatttatagcagtggccaagttagaatggagggattcaacttcagcttctagtctttctttgttgtgtttttccttctccaattttgaattcagccttgcattctcagctttcagatcattaagctgttgcgaatactgggcca

SEQ ID NO: 7176 - DNA, 536 bp, Homo sapiens
  MAP TO AL121907.2; EXPRESSED IN ADULT LIVER, SIGNAL = 3.3; EXPRESSED IN PLACENTA, SIGNAL = 5.1; EXPRESSED IN BONE MARROW, SIGNAL = 2.9; EXPRESSED IN LUNG, SIGNAL = 3.3; EXPRESSED IN HEART, SIGNAL = 3.4; EXPRESSED IN FETAL LIVER, SIGNAL = 2.7; EST_HUMAN HIT: BG326547.1, EVALUE 1.00e-121; SWISSPROT HIT: P26545, EVALUE 1.30e+00; NT HIT: gi14769949, EVALUE 1.00e-121
cagcgcacatccttgcctgcagcatgagggcatctgtgccttcccctctgtggcgttctacaagagcaagctgaagacgtggcagggcctgaggaggccgcccagtgtcctgggccacgctggcaaggagagctgccctgtcatctttggccacgtgcagggccacgagcggagcctgctggtgtccacggacgaagggaatgagaactccaaggccaacctggaggaggtggctgaggtggtgagtgtctggtgcctgtgagtcagggagggctttctggaggaggtggctgaggtggtgagtgtctggtgcttgtgagtcagggagggcttcctggaggagggcaggagagacaccagggtccgctccacctgccccctcggctcctcaggtccgtatcaccaagcagctgaccctggggaggaccgtagagccccaggacatcgccgtcctcacgccctacaacgcgcaggcctctgagatcagcaaggcccttcggcgagagggcatcgccggggtggccgtgtcctccatc

SEQ ID NO: 7177 - DNA, 546 bp, Homo sapiens
  MAP TO AL033527.26; EXPRESSED IN BRAIN, SIGNAL = 1.3; EXPRESSED IN ADULT LIVER, SIGNAL = 1.5; EXPRESSED IN HELA, SIGNAL = 2.5; EXPRESSED IN BONE MARROW, SIGNAL = 1.3; EXPRESSED IN FETAL LIVER, SIGNAL = 1.2; SWISSPROT HIT: P12524, EVALUE 1.00e-13; NT HIT: M19720.1, EVALUE 0.00e+00; EST_HUMAN HIT: AL558716.1, EVALUE 0.00e+00
ccagatgtcctcgctgggcgccgtggagcggtagaaatcctccccgcagtcatagtcgtagaaatagtgctggtacgagtcgtagtccatgtccgctccctgcgggagggaaggggggacgtgctgaccgggtgccggccgggcgaaggaggtgtccccgggtccctcggcacagtcggctgccgggctctcgttcctccccaaccccaccagcttgcagcctgcgcccagtcctcgcgtcccgggaagccgggccccgggtcagagtggtaggggaagccaatcgcagcgcgcggacccgactgtgggcagcgagttcaaagcaaactttgccagcgccgcccggagcgcagctcccagggcccggcggggccgggcgggggcgcgccgtgcccagaaggcagcctgcagccagcccgcaccgcgggacccgcgcccgtgccctggccacccgcagcctcacctcgctccagccgcccgccacctggagcggaccggctccccgccggctcggggcagcccggcagccagcacacacgcacatgc

SEQ ID NO: 7178 - DNA, 503 bp, Homo sapiens
  MAP TO AC002039.1; EXPRESSED IN ADULT LIVER, SIGNAL = 1.3; EXPRESSED IN BRAIN, SIGNAL = 6.1; EXPRESSED IN HEART, SIGNAL = 1.6; EXPRESSED IN BONE MARROW, SIGNAL =   1; EXPRESSED IN LUNG, SIGNAL = 1.3; EST_HUMAN HIT: BF871291.1, EVALUE 0.00e+00; SWISSPROT HIT: P98161, EVALUE 3.00e-81; NT HIT: U24498.1, EVALUE 0.00e+00
agccctggtggaggtgcaggagcccatgctggtcaccagcatcaaggtcaatggctcccttgggctggagctgcagtagccgtacctgttctctgctgtgggccgtgggcgccccgccagctacctgtgggatctgggggacggtgggcggctcgagggtccggaggtcacccacgcttacaacagcacaggtgacttcaccgttagggtggccggctgcaatgaggtgagccgcagcgaggcctggctcaatgtgacggtgaagcggcgcgtgcgggggctcatcgtcaatgccagctgcacggtggtgcccctgaatgggagcatgagcttcagcacctcgctggaggccggcagtgatgtgcgctattcctgggtgctctgtgaccgctgcacgcccatctctgggggtcctgccatctctttacaccttccgctccgtgggcaccttcaatatcatcgtcacagctgagaacgaggtgggctccgcccaggacagcatc

SEQ ID NO: 7179 - DNA, 509 bp, Homo sapiens
  MAP TO AL022345.2; EXPRESSED IN BONE MARROW, SIGNAL = 6.9; EXPRESSED IN HEART, SIGNAL = 7.4; EXPRESSED IN FETAL LIVER, SIGNAL = 4.5; EXPRESSED IN LUNG, SIGNAL = 7.3; EXPRESSED IN ADULT LIVER, SIGNAL = 5.9; EXPRESSED IN PLACENTA, SIGNAL = 9.1; SWISSPROT HIT: P30645, EVALUE 3.20e-01; EST_HUMAN HIT: AW410812.1, EVALUE 0.00e+00; NT HIT: gi15299301, EVALUE 0.00e+00
cccgtgtgccagagtgccagatcaccacatactattatgttgggtttgcatatttgatgatgtgtcgctaccaggatgccatccgggtctttgccaacagcctcctctacatccagaggaccaagagcatgttccagaggaccacatacaagtatgagatgattaacaagcagaatgagcagatgcatgcactgctggccattgccctcacggtgtaccccatgagtatcgatgagagcattcacctccagctgcagaagaaacacagggacaagatgctgcgcatgcagaaaggtgacccacaagtctatgaagaacttttcagttacttctgccccaagttcctgtcgcctgtagtgcccaactatgataatgtgcaccccaactaccacaaagagcccttcctgcagcagctgaaggtgttttctgatgaagtacagcagcaggcccagctttcaaccatccacagcttcctcaagctctacaccaccatgcctgtggccaagctg

SEQ ID NO: 7180 - DNA, 523 bp, Homo sapiens
  MAP TO AC005849.1; EXPRESSED IN ADULT LIVER, SIGNAL = 1.3; EXPRESSED IN BRAIN, SIGNAL = 0.77; EXPRESSED IN HELA, SIGNAL = 0.65; EXPRESSED IN LUNG, SIGNAL = 1.5; NT HIT: X97267.1, EVALUE 0.00e+00; EST_HUMAN HIT: BG397758.1, EVALUE 0.00e+00; SWISSPROT HIT: P09951, EVALUE 1.40e-01
gcgctcaactgctcccgtggaagattaaagggctgaatcatggtgctgacctggctctttgtgctgcatgcctaggggcagggttgggttggattgtgccaggaggagcccctggtccaggagggaggggtctctgtaggaccacagggccacaggctgaaggagttttatttcaaatggttgcctgatgcctgtggttggggggggccgttcccgtggtgagcggggtacacatggacttgggaactggtagggggtgacagtctgaggcatggtcatgtgggctgggggtccagtccagccatggcatcttgggaagcagaggcacggggagtgagcggctgtgacagggatgggacaccaagaccggcctctacagtgcggtgacatggaggccctggcccccagctgccctggcgctgtcatcccaggctgcgctgccaccacaggcgtgcacgtcactcagcagggcctcagcactgccccctgcgctcgctggtcctggggagccgaggaccaggtc

SEQ ID NO: 7181 - DNA, 501 bp, Homo sapiens
  MAP TO AC004000.1; EXPRESSED IN LUNG, SIGNAL =   1; EXPRESSED IN HELA, SIGNAL = 3.5; EXPRESSED IN ADULT LIVER, SIGNAL = 1.2; EXPRESSED IN BRAIN, SIGNAL = 0.95; EXPRESSED IN BONE MARROW, SIGNAL = 0.96; SWISSPROT HIT: P51881, EVALUE 7.00e-16; EST_HUMAN HIT: BG715746.1, EVALUE 9.00e-59; NT HIT: L78810.1, EVALUE 0.00e+00
gcggagcgagacggaagcagctcaggagacttgaggcgtaggctgcggtccccaaggtgaccgcgccctatgtgggactcgccctaatgcctctgaacctgggtttgaggtaatgacctttctcctaggtctgaaggtcacgggtccgctggaggatgccccctctccactcagaggggtggaggcttaatgctactggtgcagatcacctcttcccctgtgacagcctcagagggttgggagggtccagccagtatgatatacgaagactagatttgagagaggggagcctaccttaaagggcattgatcgagatggcataagctcttctctttcccttccccatggttataactgtccctgttggcttccttcctgtctgttaggtgcagcatgccagcaagcagatcactgcagataagcaatacaaaggcattatagactgcgtggtccgtattcccaaggagcagggagttctgtccttctggcgcggtaacctgg

SEQ ID NO: 7182 - DNA, 580 bp, Homo sapiens
  MAP TO AL022576.1; EXPRESSED IN BONE MARROW, SIGNAL = 7.2; EXPRESSED IN FETAL LIVER, SIGNAL = 6.2; EXPRESSED IN LUNG, SIGNAL =  11; EXPRESSED IN HEART, SIGNAL = 6.7; EXPRESSED IN ADULT LIVER, SIGNAL = 5.8; EXPRESSED IN PLACENTA, SIGNAL =  11; EST_HUMAN HIT: BE563409.1, EVALUE 0.00e+00; SWISSPROT HIT: O95916, EVALUE 2.00e-75; NT HIT: gi14762358, EVALUE 0.00e+00
cggaggccaaggcagcgtagacagaggccctggcacccagcgccccgccgcccgcaagcctcgcgcctgtccgccgcgccccgagcccgccgcttccggtctcagcgcctgccgcagcagctgcggcccagcgagcggcccagatgcaggccatcaagggtgtggtggtgggagacggagctgtaggtaaaacttgcctactgatcagttacacaaccaacgcatttcctggagaagatatccctactgcctttgacaattattctgccaatgttatggtagatggaaaactggtgaatctgggcttatggaatacagctggacaagaagattatgacagattacgccccctatcctatccgcaagcagatgtgttcttaatttgcttttcgcttgtgagtcctgcatcatttgaaaatgtccttgcaaagtggtatcctgaggtgcagcaccactgtcccaacactcccattatcctagtgggaactaaacttgatcttagggatgataaagacaggatccagaaactgaaggagaagaagctaactcccatcacctatccgcagggtctagccatggc

SEQ ID NO: 7183 - DNA, 556 bp, Homo sapiens
  MAP TO AC069278.1; EXPRESSED IN FETAL LIVER, SIGNAL = 1.6; EXPRESSED IN HELA, SIGNAL = 2.6; EXPRESSED IN ADULT LIVER, SIGNAL = 1.3; EXPRESSED IN LUNG, SIGNAL = 1.2; EXPRESSED IN BONE MARROW, SIGNAL = 1.5; EST_HUMAN HIT: AW812382.1, EVALUE 0.00e+00; NT HIT: gi15301654, EVALUE 9.00e-06; SWISSPROT HIT: Q9UL59, EVALUE 5.00e-57
tccacgctggagagaagccctacaaatgcagtgagtgtggcaagtgctttagttcaagctccgttcttcaagtccactggaggtttcacacaggggagaaaccttataggtgtgatgagtgtggaaagggcttcagccaaagtacacaccttcacattcaccagagagtccacacaggggagaaaccatacaaatgcaatgtgtgtggaaaggattttgcgtatagctctgttcttcacactcatctgagttcacactcgagaaaaaccatataaatgcaaagtgtgtggaaagtgctttagttacagttcatattttcacttacatcaaagagatcacaccagagagaaaccatataaatgtgatgagtgtggtaaagacttcagtcagaattcagatcttcgtgttcatctcagagtccacacaggagagaggccctataagtgtaaggcatgtggtaagggcttcagtcgtaattcatacctccttgcccatcagagagtgcatatagatgagacacagtacacacactgtgagcgtggcaaggaccttccga

SEQ ID NO: 7184 - DNA, 544 bp, Homo sapiens
  MAP TO AL132777.2; EXPRESSED IN ADULT LIVER, SIGNAL = 2.3; EXPRESSED IN PLACENTA, SIGNAL = 1.6; EXPRESSED IN BRAIN, SIGNAL = 2.1; EXPRESSED IN LUNG, SIGNAL = 1.7; EXPRESSED IN HEART, SIGNAL = 2.2; EXPRESSED IN FETAL LIVER, SIGNAL =   2; SWISSPROT HIT: Q9UIU6, EVALUE 4.00e-11; NT HIT: AB024685.1, EVALUE 2.00e-68; EST_HUMAN HIT: AI970593.1, EVALUE 4.00e-12
  unsure 328
  unsure 331
  unsure 339
  unsure 343
tggccaagatcaccggcctctccctcacccaggtcagcaactggttcaagaaccgccggcagcgcgacaggaacccctccgagacccagtccaaaaggtgagcgccaactttcctccacctccccttccccccccccacccccttcccggctttcttttcctccaagtgctcgcaaacatggcgcttaccttccccaccagcctggtccggctgcccacccccccccgccccctacctcgctccccggccggcagaggtaggggggggcggaggcggggggcgggggaacaaatctaataaatttttttttcctttctcatatgtttnttntcccccgnctangtctccccccccccccccacctcggctggtccctgctgcccagcctcccccccccctcccgctggctttttcgttgccaccctctccccgtttctggaggggctaacgaagcaaatgtggacaccggcaccgtagctctccctgccgcccgaggcccgcagagactgccggcgccggccggggtctgcacctccgcgaggt

SEQ ID NO: 7185 - DNA, 529 bp, Homo sapiens
  MAP TO AC011469.3; EXPRESSED IN BRAIN, SIGNAL = 1.3; EXPRESSED IN ADULT LIVER, SIGNAL = 1.7; EXPRESSED IN HELA, SIGNAL = 0.95; EXPRESSED IN LUNG, SIGNAL = 1.5; EXPRESSED IN BONE MARROW, SIGNAL = 1.4; EXPRESSED IN FETAL LIVER, SIGNAL = 1.4; EST_HUMAN HIT: H44713.1, EVALUE 2.90e+00; NT HIT: U48470.1, EVALUE 0.00e+00; SWISSPROT HIT: P11716, EVALUE 7.00e-25
tcccagaccatcccagggaccccagaggtatcccaggggcccccagatcccttagggacttccagaaccattgaaagactcctagacccagctccactgccctcacagaaccctaagctaggaggccactggaactccctgctgcagccttcgacactcgtctaagcatctctgcctttctggggtctgtgcctctgtctcccatcttctcccaggatgggtgaattgatagatggaatggtaggggtttgaaggaaagacgaatgaataaatgggtggatagtgatgaaggaaatggaggaagagatggtggcttgactgatgcaggaggctcattcatctgtccctgtctgtttcccacctctgctgcaggtgcatggacatcctggagctgtcggagcgcctggacctgcagcgcttccactcgcacaccctgcgcctctaccgcgctgtgtgcgccctgggcaacaatcgcgtggcgcacgctctgtgcagccacgtagaccaagctcagctgctgcacgccctg

SEQ ID NO: 7186 - DNA, 524 bp, Homo sapiens
  MAP TO AC007220.1; EXPRESSED IN HELA, SIGNAL = 1.6; EXPRESSED IN LUNG, SIGNAL = 1.4; EXPRESSED IN PLACENTA, SIGNAL = 1.8; EXPRESSED IN ADULT LIVER, SIGNAL = 1.2; SWISSPROT HIT: P11675, EVALUE 5.60e-01; EST_HUMAN HIT: BI824409.1, EVALUE 1.00e-119; NT HIT: Z46940.2, EVALUE 0.00e+00
agccaggagtcgggcgagcctcgggggctgcaggatggggtcgcggccgcgatgcccctgaccctcgccggccccacccaggccgccccccgcgcgcggggctcccgcagcacagcctttctccggccctagcccaaatcgcccagaccaggcgcggatcccagcctggccagcaggcggcgggcgcggggcggcgagccggggccggacggctggagccagaaccggctgctctccacgcccccctctcggtgctgcccggaggccggactccgcctccaccgagcccccacccgccgggaagagctccgcggagtacagagcccattttctagctgtgtccactgaggctgaacggatccgcgcggacttggtgctccgtgctcgccccctagggccgggtccgccgggagcgccgccctccggagttgtccggccggcgcacacctgcccggccccgcagcgccccagctcaccgctttgtctctcccgcagcgcacccccggacgctatggcccacccct

SEQ ID NO: 7187 - DNA, 505 bp, Homo sapiens
  MAP TO AL035252.5; EXPRESSED IN HEART, SIGNAL = 1.7; EXPRESSED IN FETAL LIVER, SIGNAL = 0.93; EXPRESSED IN LUNG, SIGNAL = 1.3; EXPRESSED IN ADULT LIVER, SIGNAL = 1.8; EXPRESSED IN PLACENTA, SIGNAL = 1.9; NT HIT: AF294352.1, EVALUE 1.00e-04; SWISSPROT HIT: P38935, EVALUE 9.20e-01; EST_HUMAN HIT: AA339531.1, EVALUE 2.00e-04
agcagctcagtgggggcaggacaagagctccaggccaggccgatgtgagggtccaatctccaccctgccacttcgtggctgtgtccttgggcaactaacttggccccctcagtcagtttccttgtctgtaaaatggaaatgggcttagtgcatattccacaggggtgcggtgagacctaaaggaacaaaggcagctagagctcagtacaagaccagtaaaatcccctgcatggtgctatcgggccgagccttgcctgccctactcacctgcacgccctggtggtgcttcctgcaaacgcctgtaaatgggatttttggcctgagagcccacaagctcacgtggcagctaggagtgccagagagtgaatgcctggccctcaggtgcacatccctcatccctcaggtggacgcccctcagagggacaaccttcaggtgggactcccctcaggtggattcccctcagatggattctcctcaggtggatgcccctcaggtggattcccc

SEQ ID NO: 7188 - DNA, 532 bp, Homo sapiens
  MAP TO AC005296.1; EXPRESSED IN FETAL LIVER, SIGNAL = 1.9; EXPRESSED IN ADULT LIVER, SIGNAL = 2.2; EXPRESSED IN HELA, SIGNAL = 0.53; EST_HUMAN HIT: AA393129.1, EVALUE 0.00e+00; NT HIT: AJ243947.1, EVALUE 0.00e+00; SWISSPROT HIT: O14598, EVALUE 2.90e-02
gagggagctcctggctgggctggtcgctggggccgggtgccgctggcgcgctctccgcctcaggtgccgtcacggccgccatctttgtcgcagcccctttcttcccgcgtctccctctacgaactgcttttcccttcttggccaccttggtagtctggaaggacaacagggagatcacagaagggctccggtttagggacgaggatggaggaggctgggaacagggacgtgtcctcagaagcggtgggggccgggttggggggttgtgccaagtgaggacaggagaggcttcttgtgaggaaggaggcgaggggaagacgaggaggagcttgggagggtcactcaccttcttcttcgggtcactggggctcggctgagaggaggacttcctctttcctgcctccgtggccttggccggaggtcccgaggctctcggctttggactcatcttccgcagctcaacgtctcgcaacggtcggctaactccaggctgcctggcctccctgtatatacccctctcgcgatcccagga

SEQ ID NO: 7189 - DNA, 548 bp, Homo sapiens
  MAP TO AL133372.2; EXPRESSED IN LUNG, SIGNAL = 1.7; EXPRESSED IN FETAL LIVER, SIGNAL = 1.8; EXPRESSED IN ADULT LIVER, SIGNAL = 1.9; EXPRESSED IN PLACENTA, SIGNAL = 3.7; EXPRESSED IN BRAIN, SIGNAL = 2.4; EST_HUMAN HIT: BG955121.1, EVALUE 3.00e-62; NT HIT: AL163209.2, EVALUE 1.00e-101; SWISSPROT HIT: P31792, EVALUE 4.00e-10
caatttgcatttggctggcaaggccaggaatataccttcactgtcctatctcaggggtatatcaactctccagctttgtgtcataatcttgttcagagagatcttgatcacttttcacttccacaagatatcacactattccattacattgatgacattatgttgattggatccagtgagcaagaagtagtaaacacactgaacttattggtgagacatttgtgtgccaggagatggaaaatgaatccaactaaaattcagggccttctagcttagtaaaattactaggggtccaatggtgtggggcctgttgagatattccttctaaggggaaggaaaagttgttgcatttggcccctactacaaccaagaaagaggcataatgcctagtgggcctctttggattttgcaggcaacacattcctcattttagtgtgttactctggcccatttattgagtgactggaaaggcttgagtggggttcacaacaagagaaggctctgcaacaggtccaggctgctaggcaagctgctctgccacttgggcc

SEQ ID NO: 7190 - DNA, 521 bp, Homo sapiens
  MAP TO AL135999.2; EXPRESSED IN LUNG, SIGNAL = 1.2; EXPRESSED IN HEART, SIGNAL = 1.5; EXPRESSED IN BONE MARROW, SIGNAL = 1.4; EXPRESSED IN FETAL LIVER, SIGNAL = 1.3; EXPRESSED IN ADULT LIVER, SIGNAL = 1.3; EXPRESSED IN PLACENTA, SIGNAL = 1.9; EXPRESSED IN HELA, SIGNAL = 1.9; EST_HUMAN HIT: AW890353.1, EVALUE 0.00e+00; NT HIT: gi16162426, EVALUE 1.00e-72; SWISSPROT HIT: O05542, EVALUE 1.60e+00
ttggtttggtcgggcatgggtctctgaggtaaggggcggcctgggccagcagtctggaccactgtggtggtaggcaggaccgaagtggcgaggccgaggaggcctgaggaggctgccgggcctagaaaggtgaaaggaaggatgaaggattagccatctcctgtcccatcattcttcctgccataggccacctccagccacacacacccgttcccagcaccggatttccatgccccttccctcccttctttcccccaagagcctgatgcaaaggaaggccacaggagattgggcatgggaagaatcaggaaggaaaaggaagggcatgtcattagagggggatgttctctgaagtccagctcctcccagcctccctactcacctgaattgaaaggagctaagttgcccagcgggggctgagccagagctgggccagataagaggaccggcgccaggcgaggcaaggttggggcagccccgaggggcatggaggcaggtgtggtggcaggtggggccttgag

SEQ ID NO: 7191 - DNA, 503 bp, Homo sapiens
  MAP TO AL020998.1; EXPRESSED IN PLACENTA, SIGNAL = 2.5; EXPRESSED IN ADULT LIVER, SIGNAL = 2.8; EXPRESSED IN BRAIN, SIGNAL = 2.5; EXPRESSED IN FETAL LIVER, SIGNAL = 2.5; EXPRESSED IN LUNG, SIGNAL = 2.7; EXPRESSED IN HEART, SIGNAL = 2.7; SWISSPROT HIT: Q07017, EVALUE 8.00e+00; EST_HUMAN HIT: BF569630.1, EVALUE 4.50e-02
cgagggcgagatcgagcagggtgagcgccacggaactgcgcccctcccgcggacggcctccggaggacagccccgctccacagccgctcccccttccccacccgcccccggtgatcctctcagccccgcgtggtccgcccacctgcttcccgggtcctaccccaccccctcctcacagccccgcccaattccccgcctactctccctatgacccgcccacctcttccccttccaggccccactctcgccccatcccctcattacaactgtgcctagtgccccgcacaccccacccctccatggcccgcccaccccgccactccccgccatagcccgtccccacctccatggtcagcccacctccttccctgacccagcccccaccctgtgcctgtccacttcccccaggacccgccccccctctcccgtcggcctccaggacccgccccctccgcacagccccgcccactgcccgcccactcgcctctccggcctccaggctc

SEQ ID NO: 7192 - DNA, 504 bp, Homo sapiens
  MAP TO AC016629.5; EXPRESSED IN FETAL LIVER, SIGNAL = 1.1; EXPRESSED IN LUNG, SIGNAL = 1.3; EXPRESSED IN ADULT LIVER, SIGNAL = 1.3; EXPRESSED IN PLACENTA, SIGNAL = 1.5; EXPRESSED IN BRAIN, SIGNAL = 1.4; EXPRESSED IN HELA, SIGNAL = 0.84; SWISSPROT HIT: P28698, EVALUE 2.00e-21; EST_HUMAN HIT: AA251621.1, EVALUE 0.00e+00; NT HIT: gi15308689, EVALUE 0.00e+00
tggctccacctccagcctccgagacccacccacttccctgcatttgctgagaccatcattttccacctagacaatgcccccacgcttgccctacagcccttccaaaaacgattttttccaacctaaatcagacctagaaagctttttcacatagcccagtcttcctccttgtgctgggttctgtctcattatcacctcatcagggaagtctgtacagatagaatccctacccctgcatttgtcgcctccgtctgcctctttggtcagtttcaggtccctgtagttcacactgtgtccccagggatgaagtgggtcccggcacggtgggcattctgtcatgaatgaatggtccccttgtgtatgcagggttcgcgctgcagctaggcagcatctccgcaggtccaggtagtgtaagccctcacctccacgtcccctgggacctcggcatggctggcctttctggccagatccaatcaccctcccgcgaaggtggctttgcgcatg

SEQ ID NO: 7193 - DNA, 529 bp, Homo sapiens
  MAP TO U90094.1; EXPRESSED IN ADULT LIVER, SIGNAL = 1.7; EXPRESSED IN HELA, SIGNAL = 0.62; EXPRESSED IN BONE MARROW, SIGNAL = 1.9; EXPRESSED IN FETAL LIVER, SIGNAL = 1.2; EST_HUMAN HIT: AW960740.1, EVALUE 0.00e+00; NT HIT: gi14737404, EVALUE 0.00e+00; SWISSPROT HIT: P37398, EVALUE 3.70e+00
tctcctgagccaggtggggggtaaaggcaaaggacaggcatcctcccatcaatggcctcagggccaaggtggatctggagacttctgcagggataagggacctgcagaagaggtgagaggtgagggtagggggatcaacaaataaactgtcacagccatacccaagagagcctttattcagccacactgacggctctgagccagagccacctcctggccccactggtacccaggaaacatgcccaggttaaagctgccccccaggggctaggggctgaggtatggtcagtgggctgaggcttgtagactgtcggggcagtctattgaaccagaaagacagttccttgccctggatggcctcagatgtctttttccatccagaatatggggcgccccctcacattttgatattgtgtctccagcaggctttttgaagggggccctgatggaactgggggtgagatggtcaggcactcaggtaggggagggggtggtggcaatggaggtcccttgggaccccttggggcag

SEQ ID NO: 7194 - DNA, 512 bp, Homo sapiens
  MAP TO AP000353.1; EXPRESSED IN ADULT LIVER, SIGNAL = 1.3; EXPRESSED IN PLACENTA, SIGNAL = 1.5; EXPRESSED IN HELA, SIGNAL = 1.9; EXPRESSED IN BONE MARROW, SIGNAL = 1.2; EXPRESSED IN FETAL LIVER, SIGNAL = 1.2; SWISSPROT HIT: P44408, EVALUE 2.80e+00; EST_HUMAN HIT: BF351141.1, EVALUE 1.20e-02; NT HIT: AF003529.1, EVALUE 1.90e+00
agcccctgggctgtcccatccacagcagcccagctggtggcaggatgagggtccttttcacatgctctgcgatgttcctggcaaacttaccccactgttcatgtctgtctgtctgtctttctgtctgtctgtggcctctctgaggtcttcagtcagctgtaccagagaaagtttgcttccccagaagaggaggaatggaggctggggcactgtctgcccaggtagatagagccattctttaagagctttttcattcatcccttttgccctattgacgtgaaagaattgaaacttggtgttctttcagtctgactggcttgaaacttggtatgaaaccttgggttgacttttagtatttgaaatcagggtcattttaaataggctgtgccaaccctttcagacacacaagatctgaaaggagcagaaaatgggccttgggccttgagtcccttttggtggctctcatttgaagagataacacatccctggactccttcctgtggtgctgcccc

SEQ ID NO: 7195 - DNA, 511 bp, Homo sapiens
  MAP TO AC008762.5; EXPRESSED IN ADULT LIVER, SIGNAL = 1.1; EXPRESSED IN BRAIN, SIGNAL = 1.3; EXPRESSED IN HEART, SIGNAL = 1.7; EXPRESSED IN HELA, SIGNAL = 0.81; NT HIT: gi14767924, EVALUE 0.00e+00; SWISSPROT HIT: P16053, EVALUE 3.00e-05; EST_HUMAN HIT: BI024578.1, EVALUE 0.00e+00
gtgtccttgaagcccccgccgcctgaggtcactgacctccccaagaagcccccgccgcctgaggtcactgacctccccaagaagcccccgccgcctgaggtcactgacctccccaagaagcccccgccgcctgaggtcactgacctccccaagaagccgtccaaactggagttgagtgacctctgccaagaagttcccacagctggggccactgccgtttccaaggaagcccctgcagcctgagttcgttgaggcccctttgaaggcctcgctgccggagcctgtgcgccggcccaggaaacccctgcagcccggacgaactcagtcaccccgccagacccccctccgaacccaaatccggcgcattccccaggaagctctggcaacccgaggccggtgaggctaccccgaggtccccgcagcctgagttgagtacctttcccaagaagcctgcgcagcctgagttcaacgtgtaccccaaaaagcctccgcagcctcaggtcggtggcct

SEQ ID NO: 7196 - DNA, 532 bp, Homo sapiens
  MAP TO AC008040.7; EXPRESSED IN ADULT LIVER, SIGNAL = 2.7; EXPRESSED IN PLACENTA, SIGNAL = 3.2; EXPRESSED IN HELA, SIGNAL = 4.9; EXPRESSED IN BONE MARROW, SIGNAL = 2.6; EXPRESSED IN FETAL LIVER, SIGNAL = 2.6; NT HIT: gi6912299, EVALUE 5.10e-01; SWISSPROT HIT: Q9RTP8, EVALUE 2.90e+00
cgacgacatctctgcccccagctctcctcaaagtgtggtgcagttgccgctagcatggggtttccctgaaggtttctgagggtgcttctgtgaaaatgcaggtcaccggcagggagcatgctcctgccatggtaggcagcgggggcagctgggacactggagccatagaggaagggtatccctaggcctgctagtcccttgggattaattttttccattctcctttgctggtaaatagcatacatttccatttctgtcctaaaaacaaaacaatatattttatacagcccaagaaaaccactataaatgtaattttaatgaccccttgtcttccctaaaatagtcctcacactgtttatctgaagtttgtttggtggaaacatgaatcccccacaaagccactgggaaggagagttttgagtaagatctgaagctttgtctgagtctcacaatggaagtccaaaggccagtctttagagtgttacctttaaacagacgaggcaaatttagcagggatggggcttacgcagca

SEQ ID NO: 7197 - DNA, 517 bp, Homo sapiens
  MAP TO AL160060.3; EXPRESSED IN PLACENTA, SIGNAL = 5.7; EXPRESSED IN ADULT LIVER, SIGNAL =   4; EXPRESSED IN BRAIN, SIGNAL = 3.3; EXPRESSED IN HELA, SIGNAL = 1.9; EXPRESSED IN LUNG, SIGNAL = 3.7; EST_HUMAN HIT: T20039.1, EVALUE 1.00e-120; NT HIT: gi15298846, EVALUE 1.00e-130; SWISSPROT HIT: P40222, EVALUE 1.40e-01
tactcggagtcggcctcgggatccagagtcagcccatacttctctgccagctgtcgccttctttctgctttgtaccttgcaattctttcggctttggactccagactgtgggtgtccatggtacccgaaccatagggtgagtcaccgtggacaccggaggtttctgtgcagtatttggatcgagtttgcttttctagagaagaatcagaagtttcctcctcttcatttgatcggcctacaagaaggtcacatggatgagaggtgcagatttcaagtaaagacatgtatttacacacagaatgacactctactgcacacagcacacacctgggtgcccatgctgtgaaggaccagtttctcaccgaggtgtgtttgcctaaactgattatttacctgggctgttgaagaagtctgagatcggcagtgaaatctacaaaggctgtgaatggtgcacgttctgcaagccccgtaaggcgtggctttaacttcagctcagccccttcactccccagagcgc

SEQ ID NO: 7198 - DNA, 518 bp, Homo sapiens
  MAP TO AC006385.3; EXPRESSED IN ADULT LIVER, SIGNAL = 1.6; EXPRESSED IN PLACENTA, SIGNAL = 1.7; EXPRESSED IN BRAIN, SIGNAL = 1.6; EXPRESSED IN BONE MARROW, SIGNAL = 1.7; EXPRESSED IN LUNG, SIGNAL =   2; EXPRESSED IN HEART, SIGNAL =   2; EXPRESSED IN FETAL LIVER, SIGNAL = 1.6; EST_HUMAN HIT: AA465052.1, EVALUE 1.00e-113; NT HIT: AJ245660.1, EVALUE 0.00e+00; SWISSPROT HIT: Q02085, EVALUE 2.00e-45
aagccacacgctgcccttcgcctgcgaaacctgcgggaaggccttctccagaccctggctgctgcggggccatgtccggacccacactggtgagaagcccttctcctgtacccactgcagccgtgccttcgccgaccgctccaacctgcgggcccacctccagacccacttggacgtcaagaagtaccagtgccaggcgtgcgctcgaaccttctcccgaatggccctgctccacaagcaccaagagtcgggctgctcagggggccctcgctgaccctagaggctccctcttcctctccctaccagacaccctgcccccgccaaccaacagcctccccaagctccagaaggaaggagtacaccatgtcctcatgccacagaattccctcctgagcgcccccatttctggatgcatcagccgcacgggactttgatgaaaaccattttccggttctgtttcctctgctggatccttcagtggactctgaaagaggccttcccgtggccatgtctgtgga

SEQ ID NO: 7199 - DNA, 558 bp, Homo sapiens
  MAP TO AC002312.1; EXPRESSED IN ADULT LIVER, SIGNAL = 2.9; EXPRESSED IN BRAIN, SIGNAL = 2.8; EXPRESSED IN BONE MARROW, SIGNAL = 3.1; EXPRESSED IN HEART, SIGNAL = 2.5; EXPRESSED IN FETAL LIVER, SIGNAL = 3.8; EXPRESSED IN LUNG, SIGNAL = 2.7; EXPRESSED IN PLACENTA, SIGNAL = 2.9; EST_HUMAN HIT: AW502890.1, EVALUE 2.00e-94; NT HIT: gi4557364, EVALUE 1.00e-94; SWISSPROT HIT: P54132, EVALUE 1.00e-28
cgcggtattgcagggcttgtgttttcttaataatggtcccaaagcgcaagagaagtgatgcaatattttcagacctcagccggctgcgggtaactgaaacctcagagaatgcaaagctgtggacaaggggaaactcctgtattttcttcatgtataaaatcacagagctatcctggaaactatattagcagactaaaaccttccatttcatcagtacgtcctgcctcaaaaatgtggccaacagattattcaaaaagcaccactaaagaccctaacaaccttaaggacaaaagctctatatattcatgactattcccaatggctagctttgaataaaaaagtacaatgaacatactaaaatgaagataaaataattgttacctctttcatcttccaaatgagttttcagagagtcactttcctgagcatcttcatttatatgcacttcagcaatggggccatcatcgatgcaaatcacatcgctgcttaaccattctgagtcatccttctgttcctcagtcaaatctatttgctcgctttcagaggagggtggaggca

SEQ ID NO: 7200 - DNA, 517 bp, Homo sapiens
  MAP TO AC010389.6; EXPRESSED IN ADULT LIVER, SIGNAL = 3.8; EXPRESSED IN PLACENTA, SIGNAL = 4.5; EXPRESSED IN HELA, SIGNAL = 4.5; EXPRESSED IN LUNG, SIGNAL = 3.7; EXPRESSED IN HEART, SIGNAL = 3.7; EXPRESSED IN BONE MARROW, SIGNAL = 4.2; EXPRESSED IN FETAL LIVER, SIGNAL = 3.7; EST_HUMAN HIT: AW503208.1, EVALUE 0.00e+00; NT HIT: AJ278581.1, EVALUE 0.00e+00; SWISSPROT HIT: P26808, EVALUE 5.00e-28
tcgtgggacaaccccacaaccagtggcatacctaagtaaggaaattgatgtagtagcaaaaggttggtctcactgtttacagttagttaaggcggtggctgtcttagtgtcagaggctatcaagataatacaaggaaaggatttcactgtctggactagtcatgatgtaaatggcatactaggtgccaaaggaaggttatggatatcagacaacacctacttacataccaggtgctactccttgagggaccagtgcttcaaatacgtacgtgcatgcctgtcaatcctgccacttttcttccataggatggggaagcaattgagcatgactgccaataaattatagtccagacttatgctgcccgagatgatcttttagaagtccccttagctaatcctgaccttaacctatatactgatggaagttcatttgtggagaatgggatacgaagggcaggttatgccatagttagtgatgtaaccatacttgaaagtaagcctcttcccccagggacca

SEQ ID NO: 7201 - DNA, 502 bp, Homo sapiens
  MAP TO AC008620.5; EXPRESSED IN ADULT LIVER, SIGNAL = 1.3; EXPRESSED IN PLACENTA, SIGNAL =   2; EXPRESSED IN HELA, SIGNAL = 1.3; EXPRESSED IN HEART, SIGNAL = 1.3; EXPRESSED IN FETAL LIVER, SIGNAL = 1.1; NT HIT: gi14732155, EVALUE 1.00e-16; SWISSPROT HIT: P06201, EVALUE 6.00e+00; EST_HUMAN HIT: BG284381.1, EVALUE 2.00e-16
tggggaacccactgggaggcaagtgcagagcatttgggtctgacactgacactagcagttatctctgtgttcctgcttctgagccttttcttgtcctttgaagcccccagttctttccatctctaggtgtctccgtcaaggacagacttaagactcacccgaaagaaaacgagacttctggtaaagccctagagacctgatctggcatcaccggctttgctctatttgctttgaggaagccatccttccctggtcgtcttcactgcatctgctctgtgtacagaatccttctcattctaatccaccttggtggcagtaagtgcttagataagcaaacttggctcaccaataccatgaggttctttggtgggtgaagagatgtttccttttcccaggtccccttacttcctctccatccccccactaaactcccatcttctctctgtacttctctcaccttgtactcctgcaccacctcctccaatggcaccacgctgtgctg

SEQ ID NO: 7202 - DNA, 532 bp, Homo sapiens
  MAP TO AC003693.1; EXPRESSED IN ADULT LIVER, SIGNAL = 1.5; EXPRESSED IN BRAIN, SIGNAL =   1; EXPRESSED IN HELA, SIGNAL = 1.6; EXPRESSED IN BONE MARROW, SIGNAL = 1.3; NT HIT: AF143426.1, EVALUE 5.10e-01; SWISSPROT HIT: P31638, EVALUE 7.50e-01
gcctggcttctgggaggttgcaggtaacacatgaggagaacagagcctgggggatacctctgtgtgccccttcccaaagagactccaaggaccccctgttcggggcccctcaaaccataaactccaggaatggtgggggacagtatctgggacttgctctctgggaccctggtggcctctctagtctggcctgtcagccaccagagggcgctaaaggaccatgggcagagtctgaggcagtggtggtaacgggtgaaggtgatggtggtggtggtgatgatggtggcagtagtggtggtggtggtgatgatgatattgatggtcatgatggtggtggtgacaatgatcatggggaccgtgctgatggcggtgtttgtgatgatggtggcggtggtggtgatggtggtgggcatgagggtagttggggtggtgatggcattaccgttgatgagggtggtgatgatagtgatggtgatggtggtgggaatgatgacgaagatgatgatgatagtggtgcaaatggcagtggtgg

SEQ ID NO: 7203 - DNA, 502 bp, Homo sapiens
  MAP TO AC012283.1; EXPRESSED IN HELA, SIGNAL = 1.8; EXPRESSED IN ADULT LIVER, SIGNAL = 1.5; EXPRESSED IN LUNG, SIGNAL = 1.3; EST_HUMAN HIT: BG570978.1, EVALUE 4.50e-02; NT HIT: AF062639.1, EVALUE 2.00e-03
gtgggaagctcctgcctcggagggatccatgggtgtctcttcagaaaagggctggagcactgactggggccagaacgtgaggctcagtgatgtcagtcaaaggcacttggccctattctgaaacacccatgggagccagatgaacaatggaaatgggagaaacagacccagggtgaggcaacagggagtggtggggactatggcaaactagccagctctcaggccctgttgaaaggatcctaggtcctttggactgagcaggcactacctggcgttgtctttgatggacaagtacatggaaagcgaaagaaagagagagagagaaggaaggaaggaaggaaggaaggaaggaaggaaggaaggaaggaaggaaggaaggaaggaaggaaggaaggaaggaaagcaagcaggcaggcagggagggagggagggaaggaaagaaagaaaggaaggaagctcacgctagtagcctgggctgtgcagtgggggaggcgagaggctc

SEQ ID NO: 7204 - DNA, 584 bp, Homo sapiens
  MAP TO AC019162.3; EXPRESSED IN HEART, SIGNAL = 4.1; EXPRESSED IN BONE MARROW, SIGNAL = 5.2; EXPRESSED IN LUNG, SIGNAL = 4.5; EXPRESSED IN FETAL LIVER, SIGNAL =   5; EXPRESSED IN ADULT LIVER, SIGNAL = 4.6; EXPRESSED IN PLACENTA, SIGNAL = 4.1; EXPRESSED IN BRAIN, SIGNAL = 4.9; EST_HUMAN HIT: AI150391.1, EVALUE 1.00e-27; SWISSPROT HIT: P03332, EVALUE 1.00e-05; NT HIT: AL161578.2, EVALUE 1.40e-01
tccgggtccaccccaacctccctgtccagcttcggcctctcacttgccccctcctagaaatccttgccttagacaaacccgtctcactcttgcccctccaacaggtgcctagtgaatttgggtccagtgaagtccaggtccccttctctctacaggacttaaagcaatgtaacggggatcttggtaagttttcagataaccctgccagatatatagaggctttccacaatttcacccaaatatttgaactctcctggggagatgttatgttacttttgaatcaaaccctgacagacgctgagaatcaggccactctgcaagcagcagagagatttggggataagctttgcatcacatatagcatcagggaagggggcaaacattatccaactggaagagaagcagtatcaagggatgaccctaaatgggatcccagtgacaagacagaaaactggaagaggagacactttcaggtgtgcataatggagggcttacgtaggactagaaccaagcctctcaattatactaagttgtccatgatcgaccatggatttgatgacaataccactgccttcccggaaatg

SEQ ID NO: 7205 - DNA, 507 bp, Homo sapiens
  MAP TO AF191068.1; EXPRESSED IN BONE MARROW, SIGNAL = 4.1; EXPRESSED IN FETAL LIVER, SIGNAL = 3.4; EXPRESSED IN LUNG, SIGNAL = 3.1; EXPRESSED IN HEART, SIGNAL = 3.8; EXPRESSED IN ADULT LIVER, SIGNAL = 3.4; EST_HUMAN HIT: BI489893.1, EVALUE 1.80e-01; SWISSPROT HIT: O83641, EVALUE 2.10e+00; NT HIT: AY057676.1, EVALUE 1.90e+00
tgagtgctccgtgaaccgggccgccgggacgggggatgctgcggttttgctgttcgtgcagccgtgtcggtgcagatgtgcgggttagaggcagccttgccacacaggcgagtcttcactggtcttcagaaggagattggggtgtgattgatcagagagaaatgatgtgttctagttcattctcaggcccagtgagttgtggatttcatgcttcctcttctttcctctttattcatataaaattatttcttgagacgatgattattttatatatttaatgattcattgttttgtccaagcccaaaagtgtatcctatactgtacgctttacacttagtgcaaagggcgctcgtcatggctgtcggcacggccaagtcactggggctaacatggcaggcacaggtgcaggtgggtgtggcttacagggccgacctcgtatggctcctggctgatttagcacgagcgtaaggaagcttctcttcgggaggcctgcgtgctggtgaggtc

SEQ ID NO: 7206 - DNA, 557 bp, Homo sapiens
  MAP TO AL034380.25; EXPRESSED IN ADULT LIVER, SIGNAL = 1.3; EXPRESSED IN HELA, SIGNAL = 1.1; EXPRESSED IN BRAIN, SIGNAL = 1.7; EXPRESSED IN HEART, SIGNAL = 1.8; EXPRESSED IN BONE MARROW, SIGNAL = 2.8; EXPRESSED IN LUNG, SIGNAL =   2; EST_HUMAN HIT: BG832080.1, EVALUE 1.00e-105; SWISSPROT HIT: O14497, EVALUE 7.00e-19; NT HIT: gi14734376, EVALUE 1.00e-105
ggcatcccgttgatgcaaggactgggaaagccatttttattttattttttttccccaaactcactgtaaacaacagtaactttggttaaaataaaaaaagtcttctatgtaggcagagctttgtcttttcaaagagggtggggtagggtcctgaggggagtaaggtgaggacaaggaacagaaaggcgtgaggtgatggagggaggggaggtggaaggaggagagagaaacaggagagactttttcccaagggagaagctggacagcacagggtaaactggattctgaggtggttttgcataaataaagggcaacagtcagtttctaagttctccacacacgcacacacacacgggggggggaggtgtcccacggctgtcatgactggccaatcaaaaacagtacatcacaaatgacttgtgaaaccaatgagttcatcaacggtgataccgagatgtccaacagccgtgattcgtacagagtaaactctgagtggttctcgtccaccttggccaaggcaagcagcgcgcgggcagcccgccgcatcatgtccacac

SEQ ID NO: 7207 - DNA, 575 bp, Homo sapiens
  MAP TO AL022319.2; EXPRESSED IN ADULT LIVER, SIGNAL = 2.1; EXPRESSED IN BRAIN, SIGNAL =   2; EXPRESSED IN HELA, SIGNAL = 2.1; EXPRESSED IN BONE MARROW, SIGNAL = 2.2; EXPRESSED IN LUNG, SIGNAL = 2.2; SWISSPROT HIT: P08548, EVALUE 3.00e-11; EST_HUMAN HIT: BG121512.1, EVALUE 1.00e-11; NT HIT: AB007955.1, EVALUE 1.00e-08
tgggtgcagcttcgccttcccttcctgcagccctctgccagcaccaccgtttgtacacttagagaacaccttatttattttcacagcaccttacaaacaaccctatgcaaactagtccagagtataaaaaagagcaaatatattccaactcttttgtgagtgtagcatgacctcagaatcagaatatgacaaagagaattttagaaaaaacagccctagctaatttactcatagacatagatgcaaaactcctaaacaaaatattagcaaatcaaatccagtaatacatatcaaagataatatatcacagccaaattcagcttattccaggaattcaaggttattttaatatctggaaatcaactaatttatgaaattaacagcctaaaggagaaaaacctgtaactatccatataaatgctaaaaatggagaaactcaacatatagtcaagataaaactgttaaggaacggagagctgcaaaaacacacattaagcctctatcttaatgacaaaatgtttaaatcattctcattaagtctaggaagtccacgatcacactttcattcagcactg

SEQ ID NO: 7208 - DNA, 519 bp, Homo sapiens
  MAP TO AL022727.1; EXPRESSED IN ADULT LIVER, SIGNAL = 1.3; EXPRESSED IN BRAIN, SIGNAL = 1.2; EXPRESSED IN HELA, SIGNAL = 1.9; EXPRESSED IN FETAL LIVER, SIGNAL = 1.3; NT HIT: AJ302558.1, EVALUE 0.00e+00; SWISSPROT HIT: O76001, EVALUE 2.00e-99; EST_HUMAN HIT: BE831039.1, EVALUE 3.00e-46
tctggggcccggaaaagaccatctcttatgctggttgcatgattcaactttactttgttctcgcactgggaaccacagagtgtgtcctactggtggtgatgtcctatgaccgttatgcagctgtgtgtagacctttgcattacactgtcctcatgcaccctcgtttctgccacctgctggctgtggcttcttgggtaagtggttttaccaactcagcacttcattcctccttcaccttctgggtacctctgtgtggacaccgccaagtagatcactttttctgtgaagttccagcacttctgcgattatcgtgtgttgatacccatgtcaatgagctgaccctcatgatcacaagctccatatttgttctcatacctctcatcctcattctcacttcttatggtgccatcgtccgagctgtactgaggatgcagtcaaccactgggcttcagaaagtgtttggaacatgtggagctcatcttatggctgtatctctctttttcattccggccatgtgca

SEQ ID NO: 7209 - DNA, 543 bp, Homo sapiens
  MAP TO AL034380.25; EXPRESSED IN ADULT LIVER, SIGNAL = 1.2; EXPRESSED IN HELA, SIGNAL = 1.3; EXPRESSED IN FETAL LIVER, SIGNAL = 1.1; EST_HUMAN HIT: BE734000.1, EVALUE 0.00e+00; NT HIT: gi15295469, EVALUE 0.00e+00; SWISSPROT HIT: O14497, EVALUE 7.00e-84
gggaccatatgggggctggcgtgtgccatgggaaggccacgagccttcgtggttggccctctgatctgtgtgcagcatttcatctgttcggttcacgccatgataggcggggccctggggggcagagcccgtgctctgcctgttggcataattataggtcatgtcattacgcccctgccacatggtgccttgctgagcaacctcagctgatgcctgtatggggccgcccatcatttgtggtggcatgttttgctgggcattggtgccagggggtgcagagacacggtctcggccaaactggaatggaaattggttctgggggccgcctgctggtcggcgctcagtagcagctgtggcagtggcaggataggcattgccatactggttgtatacatcttgctgaggggaaggctgggcagcttgttgctggctggcaggctggggctgggctgggggcaactgctgctgctgaggctgcccctgcccagtgctgtatggcacgctgtacatctccccttcgtgccgcttggcaggagggccata

SEQ ID NO: 7210 - DNA, 501 bp, Homo sapiens
  MAP TO AL157687.1; EXPRESSED IN HELA, SIGNAL = 1.7; EXPRESSED IN BRAIN, SIGNAL =   2; EXPRESSED IN ADULT LIVER, SIGNAL = 1.7; EXPRESSED IN BONE MARROW, SIGNAL = 1.8; EXPRESSED IN LUNG, SIGNAL = 2.3; EXPRESSED IN HEART, SIGNAL = 2.4; EXPRESSED IN FETAL LIVER, SIGNAL = 1.6; SWISSPROT HIT: Q9P2Y4, EVALUE 2.00e-73; NT HIT: gi14751677, EVALUE 0.00e+00; EST_HUMAN HIT: BG708567.1, EVALUE 0.00e+00
cgccgaggtgcgaaacttgcctttgcagtaggggcaacggaaggcggacgatgaaggagcctggggccgcgccagaccctcagtggcaggggtggcctgcatgccccctgagcttcgggctctccccagtcgggcctcgcgtagtagcgcgcgctcttccaactccagcaacaggcgtgcagcaggactacgtgggcgctcgggctggtgtgtgcgcaggtgcgagcgcagcagagcccgctgcgccgcgcggtggccgcagtgagggcactggaaggcctgggctcctgggtgcgcccgcaggtgcaaagcaaggatagagttgaagcggaagcgcttcccgcatacagggcaggggaagcgccgttcgcctgcacgactctcagaccagctcaccgctcccatcccgagcgaccctgcgctcacggctggcccgttggagtatcgctgcagatccagctcgccgtcgaaagccggcggcgacggcgctaagtggccgct

SEQ ID NO: 7211 - DNA, 546 bp, Homo sapiens
  MAP TO AC004923.2; EXPRESSED IN HELA, SIGNAL = 4.1; EXPRESSED IN ADULT LIVER, SIGNAL = 1.8; EXPRESSED IN HEART, SIGNAL = 1.6; EXPRESSED IN FETAL LIVER, SIGNAL = 1.4; EXPRESSED IN LUNG, SIGNAL =   2; NT HIT: gi8393008, EVALUE 1.00e-14; EST_HUMAN HIT: BG911468.1, EVALUE 1.00e-76
ggaaggagacatagagcccaaggagctaaccaagagacaaagagtcaccctgtcttgtcattttcttttacacatgtgtgtacattatcttacacttatcactttgttttctttctctcctttaattgcaccctgttgccaaaagttaaaataaaatgaaagtattgagatagctcagtaactgacttttggtcaattgccttttcatgtagtgaacagctgcccaaacgattgtctctgtcactgtgcaaatttgcaagcgtttgcatgatcactcccaatcccccaacacagggctgtgttatagcacaattcagttcagtgttttgctctctgcaacagggaggctctcatccattacaggttgcagtaaaaacagggataccataagcaaccacctctttcctcaacgatgtgatgaaagcaaaagccaagtagctccatatatccaacttaaaaatataaaaagttacgcccgtgggctgcagttggagctatggcggcagcagctgtcactgggcctagcctggggtgtggacctgggga

SEQ ID NO: 7212 - DNA, 568 bp, Homo sapiens
  MAP TO AC008283.3; EXPRESSED IN HELA, SIGNAL = 3.4; EXPRESSED IN ADULT LIVER, SIGNAL =   3; EXPRESSED IN BRAIN, SIGNAL = 2.6; EXPRESSED IN HEART, SIGNAL =   3; EXPRESSED IN FETAL LIVER, SIGNAL = 2.9; EXPRESSED IN PLACENTA, SIGNAL = 3.8; EXPRESSED IN BONE MARROW, SIGNAL = 3.1; EXPRESSED IN LUNG, SIGNAL = 3.2; EST_HUMAN HIT: AA417756.1, EVALUE 5.00e-05
ttgcagaaagtgagagtctgcgatgtaaaataatcctttttgtgtgtatgtgtgtggtagcactagaattaagtaacaagcatgctgatacacacatcagttcactttcattatccctctatgatatctgactctccaagatagggtcttagtaatacctaaaattttatagaaattgtatcctactttcagtaccatgctatgctgataatacatttcctgccactcaactccaaatgcatccttctaccttgccctatgaaaatggatctgggccctttcaatacttttcctttatcagatggcacaatttcaaggtttgcctgcaaatgatgcaagacagacactgaatgagaaaaaggatttttcttccttgttctggtttgtttgctcacaggctcttgcagcatgtgctgctgtctggtgtctgtctcctgcactgtctgtatattctccagagctcagctcctacagtgttgcagtttccccagattgcccacttccagcaacatggccagcttcaccaggctcaggctctaattttgtcacctgtacccctccagccccg

SEQ ID NO: 7213 - DNA, 525 bp, Homo sapiens
  MAP TO AC004166.4; EXPRESSED IN ADULT LIVER, SIGNAL = 1.8; EXPRESSED IN HELA, SIGNAL = 1.4; EXPRESSED IN BRAIN, SIGNAL = 1.5; EXPRESSED IN HEART, SIGNAL = 1.5; EXPRESSED IN LUNG, SIGNAL = 1.8; NT HIT: gi14149895, EVALUE 0.00e+00; EST_HUMAN HIT: BI225384.1, EVALUE 0.00e+00; SWISSPROT HIT: P04723, EVALUE 2.80e+00
tcgtggagaacggggagctgaacagagtcagttcgctttcgtagagtttgaaatcagacagccttttctggaattcggtcttgagttccgcgattttgggaatgtagttcaggccatcgctttcatttctggaagccaatttcagggtgggaaagtgggccagattattcctcgtcaaatgagtctcccagaggcacagttttgctaggaacgcccggatcaggtcatacatctgcgtgacgatttgggagtgtccttggagagagatgttcaaagcgttcagatgcatcgtcatgtcaaccaagaaggccaggtctcggatccaatctatggagctcagttgaggcaggggtttccctctggatgacatgaaggagtcgatttcttccaaggattcgaaaaatctctttagcacgagcccgcgactgagccacttaatctccgtgtagtacaggaggctaccatactggctgtccagctcatagagcaaggttgtgaactcactgtggttcagtccccgggagc

SEQ ID NO: 7214 - DNA, 521 bp, Homo sapiens
  MAP TO AL121796.1; EXPRESSED IN BRAIN, SIGNAL = 1.3; EXPRESSED IN ADULT LIVER, SIGNAL = 1.2; EXPRESSED IN HEART, SIGNAL = 1.3; EXPRESSED IN BONE MARROW, SIGNAL = 1.2; EXPRESSED IN LUNG, SIGNAL =   1; NT HIT: AL139794.3, EVALUE 7.70e+00; EST_HUMAN HIT: BF212340.1, EVALUE 7.30e-01; SWISSPROT HIT: Q12986, EVALUE 3.70e-02
tgtgcagtggagaccgcgtggggccgccgtgtgtcacagtcttgccttcaccatggcacagctgcaatgtcgcgtgcctgtgcagtggacaccgtgtggggccgccgtgtgtcacagtcttgccattgccacggcagtgctgcaatgtcgtgtgactgtgcagtggacactgcgtgcggccgccgtgtgtcacagtcttgccatcaccacagcagtgctgcaatgtcacgtgactgtgcagtggacaccgcgtggggccgccgtgtgtcacagtcttgccgttgccacggtggagctgcaatgtcacgtgactgtgcagtggagaccgcatgcggccgccgtgtgtcacagtcttgccgtcaccatggcacagctgcaatgtcgcgtgactgtgcagtggacaccgcgtggggccgccgtcacagtcttgccgtcaccatggcacagctgcaatgtcgcgtgactgtgcagtggagaccgcgtggggccgccgtgtgtcacagtcttgccattgccacggc

SEQ ID NO: 7215 - DNA, 502 bp, Homo sapiens
  MAP TO AC011811.36; EXPRESSED IN HEART, SIGNAL = 1.8; EXPRESSED IN BONE MARROW, SIGNAL = 1.5; EXPRESSED IN ADULT LIVER, SIGNAL = 2.1; EXPRESSED IN BRAIN, SIGNAL = 1.4; SWISSPROT HIT: P06865, EVALUE 1.10e-01; EST_HUMAN HIT: AI200961.1, EVALUE 0.00e+00
gcctggtgggaagcgtcagctcggccttctcctctgggctggtgtcagggaccagctcagccctgcgcaccatcacccgtgtgctggagacagtggagcagaggaccgtggagggcatccgctcagccatgcgctacctgaccagccacctcaccccacgccaggcccaggctgaccccaactatgattagagccctgcacagggacccccgaagggctggttcagtggcctccagagatccctgggaccctcacgccctgctcccttgcccattcttgctctggacggttcccccagcccatgcaataaatcaccagtgagcatttatttctaagcaccagcctcctcccttggggtgcagtgagcaacacggtgacaggacaggagggctcggggtgcggtggaaacagcgtcccctgagggtttctcaggctgtcccattcaggggctgggggcaaacgtgcagagaagaacctggacagagctggaggcagtgtggcg

SEQ ID NO: 7216 - DNA, 507 bp, Homo sapiens
  MAP TO D88268.1; EXPRESSED IN BRAIN, SIGNAL = 0.98; EXPRESSED IN ADULT LIVER, SIGNAL = 1.2; EXPRESSED IN HELA, SIGNAL = 0.78; SWISSPROT HIT: P10220, EVALUE 8.00e+00; NT HIT: AB040102.1, EVALUE 4.80e-01; EST_HUMAN HIT: AA743646.1, EVALUE 1.00e-119
tctcccaacagcccccagagctgttcagacctccagtgcacagctcatgtccaaaggtggggaagtcagctaaggacccacttcattctacccagaagcataagacaaagagaaactgagtgagtggccagaagagggagtgttcgccagggagggctggacctctggggtctctggtgatctggcggtagagccacctggataacgtgtgccgattgaatgaacaggtgaaacaggccaggctttcgactggggaaggggagcgagaggaatgaagaaagcgccagatagttcccatggaagtttattttatgttccttgcaaacaacatgtggcctcagctgtgattccagctgccctctctgacttctgttccctgagcctggctcctgttcttcattcaaactgcaccagctgcataagcaaagacagtggaggggctccactgcatgtcagcctgctgcatggcttgcagctgcttctgtatctcggcctgcaactggcaca

SEQ ID NO: 7217 - DNA, 517 bp, Homo sapiens
  MAP TO AL049870.3; EXPRESSED IN BRAIN, SIGNAL = 1.5; EXPRESSED IN HELA, SIGNAL = 1.9; EXPRESSED IN ADULT LIVER, SIGNAL = 1.6; EXPRESSED IN HEART, SIGNAL = 1.3; EXPRESSED IN LUNG, SIGNAL = 1.6; EXPRESSED IN BONE MARROW, SIGNAL = 1.6; EXPRESSED IN FETAL LIVER, SIGNAL = 1.6; SWISSPROT HIT: Q9Y2M5, EVALUE 3.00e-17; NT HIT: gi14747448, EVALUE 0.00e+00; EST_HUMAN HIT: BI222474.1, EVALUE 0.00e+00
tccacaatggcctggagagcagtttcatcaatgcattgaaactcaacctcactgttctctttttcagaaaggtttccagtgaacatagctttgaaatacgggctgacgctggcaagtaccactttgtgagcatgaattttaacatcacctactcgaagaatgatgtcacagagttcgtgatgttggcgaagaagattcaagccctgcagaagttgttcagaatgcaagtgggttaagttagcaagcatgtaggtcggggatgtgtggtccatctacagaaaaataaaaaagcatagacagttatttcaaagtaaacttgtcaaaaacactgcttttcaaatagtacagaataatcagatttgtaatttatttgtctgttcattggtttttaaatacttcatagtaaatactagaactagaggctttcagagttagaagagatttaacaatcacatcattcaacttatttattatagatattaggaaatggaagcccaaaaggttacatgagatgccc

SEQ ID NO: 7218 - DNA, 512 bp, Homo sapiens
  MAP TO AC000353.27; EXPRESSED IN LUNG, SIGNAL =   1; EXPRESSED IN FETAL LIVER, SIGNAL = 1.1; EXPRESSED IN ADULT LIVER, SIGNAL = 1.2; EXPRESSED IN HELA, SIGNAL = 0.67; EXPRESSED IN BONE MARROW, SIGNAL =   1; EST_HUMAN HIT: BE613745.1, EVALUE 1.80e-01; SWISSPROT HIT: Q63767, EVALUE 1.40e-01; NT HIT: AJ242871.1, EVALUE 1.00e-04
gccaaagccagaatcggggctcccgaacatgcctcggtgtcctctggaggaaagggaaggtgatggtgctccattcactgctggggtcctgtcggtgagggcagtgggcagggcggccagacctgcggatatgggtggtaggctgtgactcagccctcggggtgagagatggagagagctagagaaagggcatgggggaggggagccctgcagatgtggggacacctgaaccctcctatggggtgtaacctgagccctccgacacagggtgcacaggatgtctgcagtcctcacccctggcctgttcctccccctcccagggcccctcccggcctctctacataaagccgggggtactgggcctcaggtcaggcctatggccatggccttcacagacctgctggatgctctgggcagcatgggccgcttccagctcaaccacacagccctgctgctgctgccctgcggcctgctggcctgccacaacttcctgcagaacttcaccgccgctg

SEQ ID NO: 7219 - DNA, 563 bp, Homo sapiens
  MAP TO AC006137.1; EXPRESSED IN LUNG, SIGNAL = 1.2; EXPRESSED IN BRAIN, SIGNAL = 1.1; EXPRESSED IN HELA, SIGNAL = 0.41; EXPRESSED IN ADULT LIVER, SIGNAL = 1.3; EXPRESSED IN BONE MARROW, SIGNAL = 1.1; NT HIT: AF211942.1, EVALUE 0.00e+00; EST_HUMAN HIT: BF933619.1, EVALUE 3.00e-03; SWISSPROT HIT: O95918, EVALUE 7.00e-42
ggggatatggcaagggaggggaattaaaaatggaagtgataaaggtaggaacatgactatggaggcgaagacttaaagtagaaaaaaatataaaatatacttgatgcctataatttttcgcataaagatacctccctttactacatttcagtcgctgtctcttgcacacatacatgcacacacacagacatgtggctttcatccattcccacaatgtaatgggtgtgaagaaggcagaggggcagggaactcaaactttctgataaaagcacatagaatctcctctcttttaaagcacattaagcagctctccctcagctttgtgtgagccccatttccttccccagcaatctcctgaatgccctggttacctccttgttcctcagggtgtatatgagagggttaagtgaaggagtgcccactgcatagaagagaccaaagaacttgcccctctcttgggcatagggatttttgggctggaggtagacagcaatgactgagctgtagaagagggtgaccacagtgagatgggaggagcaggtcccaaaagctttcctccgccc

SEQ ID NO: 7220 - DNA, 500 bp, Homo sapiens
  MAP TO AL138811.1; EXPRESSED IN ADULT LIVER, SIGNAL = 1.2; EXPRESSED IN HELA, SIGNAL = 1.5; EXPRESSED IN LUNG, SIGNAL = 1.1; NT HIT: AL139075.2, EVALUE 7.40e+00; SWISSPROT HIT: Q10076, EVALUE 6.00e+00; EST_HUMAN HIT: BF773479.1, EVALUE 1.80e-01
gccggatttctggtgtgggtgaagggacagataaaaatagaaaaattaaggaaagggagagaaaattgggcaaagaaagacaacataggagagaaactaaaatgttctaagggaaggaagtttttaaggatgaatgaagagcatatagaaagaagagcaataaatattcacacttggcagaagccttaactacttcactgtatttgctctaaaagttaaaaacaaaagaatattaagttgttcctaatttaaaataagacgaacttttaaaacaaaatttacaaaatatgactgtacacatttatcaagaataagtagaaaaatattttgagaattaaaacattactttgttttcttacctggtccaatatcctttccaacatcatccacaccaatatttttacaaagagccattgaaatgatctttttgttttctgatggatctagtggtctctccttcagcaacaaagaaatgcaaggggtcgaactgctcgctgttt

SEQ ID NO: 7221 - DNA, 579 bp, Homo sapiens
  MAP TO AC004448.1; EXPRESSED IN PLACENTA, SIGNAL = 3.2; EXPRESSED IN FETAL LIVER, SIGNAL = 2.2; EXPRESSED IN ADULT LIVER, SIGNAL = 1.7; EXPRESSED IN HELA, SIGNAL = 2.6; NT HIT: gi14775573, EVALUE 0.00e+00; EST_HUMAN HIT: AL524274.1, EVALUE 0.00e+00; SWISSPROT HIT: Q13164, EVALUE 6.00e-20
ggctgggctacagggccaggaggaggactggtaggttggactggggttggggttggcgttggcgctggggcaggggccggcacagaggtgagggctggggctgcgggccgggccattcgagtccagcgttccaacaggcttctgtcattgtcactgagcactagtccagccaaggggtcagtggaggggcccccagaggccccagccccccgttcctttcgctcccgctcctgccgccgtttctcccgctccttggctcgttcttgccgcctccgccgcttctcctcccgctcccgctggcgctcctgggctgtcaccggcttccgaggctcaggagcctccaggggtgcgctggggccatctgcggggaagttgggcaggggagaaggtaaaagcctgaagccttgtccaagtccaagtctcccctctgcccacccgacctgcccacaaggcacctctgagccggctcctcaaagacttgagcagggcagctttaagggcagccttagtattgtctgagatggcaccatctttctttggtggggcaggctcactgactggtggaggtggctgcagggt

SEQ ID NO: 7222 - DNA, 549 bp, Homo sapiens
  MAP TO AL135998.2; EXPRESSED IN BRAIN, SIGNAL = 1.6; EXPRESSED IN ADULT LIVER, SIGNAL = 1.5; EXPRESSED IN PLACENTA, SIGNAL = 1.8; EXPRESSED IN LUNG, SIGNAL = 1.8; EXPRESSED IN BONE MARROW, SIGNAL = 1.7; EXPRESSED IN FETAL LIVER, SIGNAL = 1.3; NT HIT: AB031529.1, EVALUE 0.00e+00; EST_HUMAN HIT: BE280337.1, EVALUE 0.00e+00; SWISSPROT HIT: Q9UM01, EVALUE 2.00e-71
cattggttggtgagctgcccgtattaccctgtgttggaggcgggtagaggttctatgtaattgccaaccacctaatctatagcatcatctttcttccttaaagggcaatgccaggaagctggtgaagggtttcctctcctccaccatggttgacagcactgagtatgaagtggcctcccagcctgaggtggaaacctcccctttgggtgatggggccagcccagggccggagcaggtgaagctgaagaaggagatctcactgcttaacggcgtgtgcctgattgtggggaacatgatcggctcgggcatctttgtttcccccaagggtgtgctcatatacagtgcctcctttggtctctctctggtcatctgggctgtcgggggcctcttctccgtctttggggccctttgttatgcggaactgggcaccaccattaagaaatctggggccagctatgcctatatcctggaggcctttggaggattccttgctttcatcagactctggacctccctgctcatcattgagcccaccagccaggccatcat

SEQ ID NO: 7223 - DNA, 500 bp, Homo sapiens
  MAP TO AC011382.1; EXPRESSED IN LUNG, SIGNAL = 1.6; EXPRESSED IN ADULT LIVER, SIGNAL = 1.4; EXPRESSED IN BRAIN, SIGNAL = 1.4; EXPRESSED IN BONE MARROW, SIGNAL = 1.2; NT HIT: gi16157445, EVALUE 0.00e+00; EST_HUMAN HIT: BI255524.1, EVALUE 0.00e+00; SWISSPROT HIT: O00321, EVALUE 1.20e+00
accgccttggggttgctcagatcaagacagagacagaggaggagggtgaggaagaggaggtggccgcagtggcagaataagccaggctgttgtacagggactacaccatctctcaagccatagtaaggcccttgcctgaggcagagctatccaggggacctgcagaagtggtctcctgtggggagggcctctgactgctgggactgaccaaagagcttccattccctgagcatggtgggacccagggtcctcagttctcaaccctccaggggtcaggagtggtaccaggaaacctcttctggccccgagagagcacttgggggacacggtatgtttaatggaggggaggctgagggaaaggctcgtagctggtgggttccgtggggcctgcggtgtgggtcagggtggaggtcctgggtgggctaaggcgtgagccccagcactaggtgggaaggctgctgaggtctctcccacccctgaggagccctggtttcagcccc

SEQ ID NO: 7224 - DNA, 534 bp, Homo sapiens
  MAP TO AC004660.1; EXPRESSED IN PLACENTA, SIGNAL = 1.8; EXPRESSED IN BRAIN, SIGNAL = 3.9; EXPRESSED IN HELA, SIGNAL = 2.1; EXPRESSED IN ADULT LIVER, SIGNAL = 2.3; EXPRESSED IN HEART, SIGNAL = 2.4; EXPRESSED IN FETAL LIVER, SIGNAL = 1.7; EXPRESSED IN LUNG, SIGNAL = 2.4; EXPRESSED IN BONE MARROW, SIGNAL = 2.1; SWISSPROT HIT: Q14938, EVALUE 2.00e-26; NT HIT: gi16176317, EVALUE 1.00e-116; EST_HUMAN HIT: BG483877.1, EVALUE 8.00e-81
tgtcatgggcgcgacagagcctggcggggataccagcagcgtgtgtgtgtggacggcaacgttgtctgtgcgcgtgtgtgtgagtgagtgagggagagagagagagaataggtgtgtgtagaggctcccggtgcctctgtctggctgctgaggctgagatgggagcaagtggctggcgaagctggtggtggcttcaaaccacactttcgtagaacaatcgcaagagaaaattgttggggggagggaggaggaggagaaggcggttttccttgtgcccccccttctaacgctgcttttctccttctctctttccccctcatcccgtcttcccctcctcccgtcctccctcgccccgcatgctcccggcttgccgcctgcaggatgagttccacccgttcatcgaggcactgctgcctcacgtccgcgctttctcctacacctggttcaacctgcaggcgcggaagcgcaagtacttcaagaagcatgaaaagcggatgtcgaaggacgaggagcgggcggtgaaggacgagctgc

SEQ ID NO: 7225 - DNA, 500 bp, Homo sapiens
  MAP TO AL137818.2; EXPRESSED IN ADULT LIVER, SIGNAL =   2; EXPRESSED IN BRAIN, SIGNAL = 1.8; EXPRESSED IN HELA, SIGNAL = 2.1; EXPRESSED IN PLACENTA, SIGNAL = 1.7; EXPRESSED IN BONE MARROW, SIGNAL = 1.8; EXPRESSED IN LUNG, SIGNAL = 1.8; EXPRESSED IN FETAL LIVER, SIGNAL = 1.8; EST_HUMAN HIT: BG194789.1, EVALUE 1.00e-54; SWISSPROT HIT: P23960, EVALUE 8.00e-02; NT HIT: AB038490.1, EVALUE 9.00e-52
gcccagactggtctcaagcaatcctcccgcctcagcctcccaaagtgctgagatttcagatgtgttacagcacctggccgtctttggctttttaatgtgcattagtgatttcatgattgatttataatacttctgattcttcaaagtgatctatatataaaggccttggtttaaattatggacccattagcaaaaatttcagaaaggtcttccttataaacaaaacttcatcaaagaatggttttcctccttttttgccatcattactgtattatggaatctaaactggaaatattaacaatgtgataaaatccctatttgttgtctaatatttcattgtcatatgattccctaggaagcagcaatattcccattcatttatattttttatttccagtgaaaactcaaatgcagcatggattaatctctatagcagcccgcactgttattacacatctggtaaatcacctgggccattatccaatgagcggtggtcctgc

SEQ ID NO: 7226 - DNA, 523 bp, Homo sapiens
  MAP TO U07000.1; EXPRESSED IN ADULT LIVER, SIGNAL = 3.2; EXPRESSED IN HELA, SIGNAL = 0.89; EXPRESSED IN LUNG, SIGNAL = 3.4; EXPRESSED IN HEART, SIGNAL = 4.4; EXPRESSED IN BONE MARROW, SIGNAL = 3.5; EST_HUMAN HIT: BG163329.1, EVALUE 0.00e+00; SWISSPROT HIT: Q9UKB7, EVALUE 7.00e-25; NT HIT: AK024483.1, EVALUE 0.00e+00
tgtgggaccggcaccaaagggcctgcccgcacaccttcccgctgacgtcgacccgcctcggcagccctgtgtactgcctgcatctcaccaccaagcatctctatgctgcgctgtcttacaacctccacgtcctggatattcaaaacccgtgaccgtcagggccacccctgcctgtgggccaaggagaccagtgagtcagggacctctcttgcatgaagggtgcagtgatagttcctccccactgccccactgtgctcctgggcctgtgaccccagtgctcaggcaccttgcagtagaggcttctgactcctggagctttgtggcttaccagagatgcagtccctcccaggaacctgttggagaggcaggacctgctgctttagaggagtgcagctgaacctcggccctgcgactctgtttggccagagcaaggatctggcctggagaggcccatcctacaccccttattagagccgtgatagcctacagagtgaggtgaggttctcccgccttcccaggtggt

SEQ ID NO: 7227 - DNA, 506 bp, Homo sapiens
  MAP TO Z68328.1; EXPRESSED IN ADULT LIVER, SIGNAL = 1.4; EXPRESSED IN HELA, SIGNAL = 1.1; EXPRESSED IN BONE MARROW, SIGNAL = 1.2; EXPRESSED IN LUNG, SIGNAL = 1.4; NT HIT: gi11225606, EVALUE 0.00e+00; EST_HUMAN HIT: BI014579.1, EVALUE 1.10e-02; SWISSPROT HIT: Q31952, EVALUE 3.60e+00
cagccacgaccttgccagtaccttccttaggcaaccaccatacttattgtaacctgcctctgacgctactcaacggacagctaccccttaataacaccctgaaagatacccaggaatttcacaggaacagttctttgctgcctttatcctccaaagagcttagctttaccagtgatatttggtagtgaaaaatctgaattcctctgaacagctagataagcatagagaatttctgttataccaagcataaagtacacctaataacgttgtgttaaaaaagtgtttgaagaaaaaggtacaaaaatggcttttatacttaaatatttttgtttacatttccagaatagtggggggaaagaaggacctgcttttgtagtatggcaccttgttccaatgtacagttttgatttcttcctgaaaacaaaaattttaaaatcctgttgtcttagagtagcttttatgatagcacatggactgcatgcttagtaggtgagctgtcttgccca

SEQ ID NO: 7228 - DNA, 578 bp, Homo sapiens
  MAP TO Z95327.1; EXPRESSED IN LUNG, SIGNAL = 2.9; EXPRESSED IN PLACENTA, SIGNAL = 2.4; EXPRESSED IN BRAIN, SIGNAL = 3.9; EXPRESSED IN ADULT LIVER, SIGNAL = 2.9; EXPRESSED IN BONE MARROW, SIGNAL = 2.9; EXPRESSED IN HEART, SIGNAL = 2.3; NT HIT: gi5453993, EVALUE 0.00e+00; EST_HUMAN HIT: AU130905.1, EVALUE 0.00e+00; SWISSPROT HIT: Q58403, EVALUE 1.40e+00
ccccctgccctctctgaggcagaggtaatgttgccagagcagcctgcacatgatgatatacgggtgaggatgataatacatcaatgggtgggcctgatagtcctgattcagtgaatcctgttgaaccagccaactatgactgatcaaacaacacttgttccaaatgaggaagaagcatttgcattggaacctattgatataactgttaaagaaacaaacgccaagaggaagaggaagctaattgttgacagtgtcaaaaacttggatagcaagacaattagagcccagcttaatgattattctgatattgttactactttggatctggcaccacccaccaagaaataggtgatgtggaaagagacaggagtagtagaaaaactgttttctttacctgctcagcctttgtggaataacagactactgacgctctttacatgctgtcttacaccacttgtaccagaagaccttagaaaaagggggaaaggagggacagataatttggatgagttcctcaaagaacttgaaaatccagaggttcctagagagaactagcaacagctacaccagcagcatga

SEQ ID NO: 7229 - DNA, 555 bp, Homo sapiens
  MAP TO AL355075.2; EXPRESSED IN BONE MARROW, SIGNAL = 3.7; EXPRESSED IN ADULT LIVER, SIGNAL = 1.9; NT HIT: D13370.1, EVALUE 0.00e+00; EST_HUMAN HIT: AA845482.1, EVALUE 0.00e+00; SWISSPROT HIT: P27695, EVALUE 5.00e-47
ccccacgaaggggtaagacacgaagacagcaaggctgaaactatggctctttattttcatgtggataattcaaacaaagtcattagtagtctttgttcaatttttttttaaaaaacaaaaaaccctcaaataaaaaatcttgggcttaaaagaactctatcacaggagcctggttggaggattcctagttttatacatgagaaatagaatgcagatttctctgaagagtgtttaaagaaggaatggtagttgagggggcttatttcccaggctcaaagtgatttaggggtggtgtcacagtgctaggtatagggtgataggacagtgatcactgccgagggccttggaacggatcttgctgtcacacaatgcaggtaacagagagtgggacaacaaaaagtaatcaaggcgccaaccaacattcttggatcgagcattcatcatataagtccaaaaggtgtaggcatagggtgtgttggggtagaggtgcctaaagctgtcagccagtggcacagcctgcagtaattccccgaagccttggcgctcttgtggcgt

SEQ ID NO: 7230 - DNA, 534 bp, Homo sapiens
  MAP TO AC007445.1; EXPRESSED IN ADULT LIVER, SIGNAL = 1.4; EXPRESSED IN HELA, SIGNAL = 1.1; EXPRESSED IN LUNG, SIGNAL = 1.1; EST_HUMAN HIT: AL538818.1, EVALUE 0.00e+00; SWISSPROT HIT: Q9NYT6, EVALUE 8.00e-15; NT HIT: D89859.1, EVALUE 0.00e+00
  unsure 177
  unsure 188
  unsure 258
  unsure 460
cacatgtggcacgcaaacggtctttcattactgtgaactctctcatgcttctttaagtctggggcacggataaatgattttccacacacctcacagctatagggcttatatcctgtgtggatttttaggtgttctttcaggtgggcctgtgtggtgaaaccttttgtgcacatttcnacaaacaaatnggcctgtccgccgtgtggagtttctcatgcttcctcaatctgccttcatcagaaaacgtcttcccacacngcctggcaggcaatctgctcccgatggtgaccataaagcaaatactcaaacttcatgtcactggcggctgttgtccagcctggtgtctgttcatctttcacttcactcatcccatcattaaatgttaaggcttgaggggtctgggaccccaagtcttttgattctggggtctccatggattctacttcctggccgtagcaanttgaccttccgaacttcctcactccccagctctttcaggatcgcttcctgaaccctgagcgttgtggtgggcga

SEQ ID NO: 7231 - DNA, 511 bp, Homo sapiens
  MAP TO AP001708.1; EXPRESSED IN ADULT LIVER, SIGNAL = 2.9; EXPRESSED IN HELA, SIGNAL = 5.5; EXPRESSED IN LUNG, SIGNAL = 2.6; SWISSPROT HIT: P14728, EVALUE 1.00e-03; NT HIT: gi13386207, EVALUE 6.00e-19; EST_HUMAN HIT: W76571.1, EVALUE 7.00e-69
cccagccaaaacaggagcagatgtataaatcatgggcagagaaaataagaggggttttcctggacataatggagtagggactaatcacatactgtcatagcatttgtaacataaatgcatttcattgacgcagagctgtaaaaacaaaaggagttcttccataaatataagatgaagggtgttagttaactgcaatgacaaagaagattactaagttgcttatatgaaatgtgggagcttaaatgtgtgaaggatgaccctgtaaggtgccacacccacggctgaacgtatataaatggtcctgtccagatgtggcatgcaaactcagaatcttctcagtgtaactcagctgaactcacatctcccatcaacatgtcctacaactgctgctctggaaacttctcctcccgctcctgtggtggctacctgcactacccagcctcctcctgtggcttttcctaccccagcaaccaggtctacagcactgacctctgctctcccagcacgtgcc

SEQ ID NO: 7232 - DNA, 511 bp, Homo sapiens
  MAP TO AC011311.11; EXPRESSED IN BONE MARROW, SIGNAL = 0.88; EXPRESSED IN BRAIN, SIGNAL = 0.86; EXPRESSED IN ADULT LIVER, SIGNAL = 1.2; EST_HUMAN HIT: BI827630.1, EVALUE 0.00e+00; SWISSPROT HIT: Q03500, EVALUE 7.10e-01
tggagccgcatgcagggaacgggggacacggcgggatgcgggctgcaggtctggggcacacggcgcaggttttcacggggctgcgcgcgcgcgtgtgtatgtagtgggtggaggtcccggtgccaccgtgacacaagggcctgagtgacttaggcctgaggggtggggggaggagggaccacacctactgtgacctccccaccgcgatccctgcctggcctaggcctcagccaccaggtccaccagcctcttcggtctttgcaagcctgcccactgtcccaaccatctttgagaacccagactagacggtcaggaccccgacccaaaacccttccacaggtcccatggctaaatcccaggttccccaccctcccggcaggcccgcaggaatgccggccccgcctctccatgccggccgcccccctgtgctcctttagctgtcatcgcaagtggtcccgtcccccagagcttcgtccctgggtcgggtcatgctgttggggacgccctgagc

SEQ ID NO: 7233 - DNA, 586 bp, Homo sapiens
  MAP TO AL133543.2; EXPRESSED IN BRAIN, SIGNAL = 1.2; EXPRESSED IN ADULT LIVER, SIGNAL =   2; EXPRESSED IN LUNG, SIGNAL = 1.3; EXPRESSED IN BONE MARROW, SIGNAL = 1.2; SWISSPROT HIT: P15924, EVALUE 2.00e-86; NT HIT: gi15300899, EVALUE 0.00e+00; EST_HUMAN HIT: BG678877.1, EVALUE 0.00e+00
ggtgtcggcaccagcagcagcatgggcagtggtgtcagcgatgatgtttttagcagctcccgacatgaatcagtaagtaagatttccaccatatccagcgtcaggaatttaaccataaggagcagctctttttcagacaccctggaagaatcgagccccattgcagccatctttgacacagaaaacctggagaaaatctccattacagaaggtatagagcggggcatcgttgacagcatcacgggtcagaggcttctggaggctcaggcctgcacaggtggcatcatccacccaaccacgggccagaagctgtcacttcaggacgcagtctcccagggtgtgattgaccaagacatggccaccaggctgaagcctgctcagaaagccttcataggcttcgagggtgtgaagggaaagaagaagatgtcagcagcagaggcagtgaaagaaaaatggctcccgtatgaggctggccagcgcttcctggagttccagtacctcacgggaggtcttgttgacccggaagtgcatgggaggataagcaccgaagaagccatccggaaggggttcatagatggccgcgccg

SEQ ID NO: 7234 - DNA, 551 bp, Homo sapiens
  MAP TO AC008427.5; EXPRESSED IN LUNG, SIGNAL = 1.8; EXPRESSED IN PLACENTA, SIGNAL = 1.9; EXPRESSED IN HELA, SIGNAL = 5.3; EXPRESSED IN ADULT LIVER, SIGNAL = 1.5; EST_HUMAN HIT: AL517791.1, EVALUE 0.00e+00; SWISSPROT HIT: O08717, EVALUE 6.80e+00; NT HIT: gi14726715, EVALUE 0.00e+00
tcaccgggaccctcctgtgggcggagggggacaaaagtgtctctcaatccagcacatgcacattgaagcaagttaaaggatttaatatgaagcacagaagccgacagtgccaaacagcaagcagtagttggtacacatttggtgagtggggcagcatttccttctcccactgctgctgagatggcagaaattagtcgaattcgtacgaaatggaatatactgaaggcattagtcagcgaatgagggtcccagaaaagttaaaagtagcaccgccaaacgccaacctggaacagggattccaaaaaggagttccaaatgctagcgtgataataatgcaagttccagagaggattgttgtagcaggaaataatgaggatgtttcattttcaagaccagcagatcttgaccttattcagtcaactccctttaaactcctcgcactaaaaacagcacctcgtgtacttaggctaagtgaaagaccactagattttctggatttagaaagacctcctacaacccctcaaaatgaagaaatccgtgcagttggccga

SEQ ID NO: 7235 - DNA, 511 bp, Homo sapiens
  MAP TO AC007324.38; EXPRESSED IN BONE MARROW, SIGNAL = 2.6; EXPRESSED IN FETAL LIVER, SIGNAL =   3; EXPRESSED IN HEART, SIGNAL = 3.2; EXPRESSED IN ADULT LIVER, SIGNAL = 2.6; EXPRESSED IN PLACENTA, SIGNAL = 5.4; EXPRESSED IN BRAIN, SIGNAL = 2.3; SWISSPROT HIT: P28481, EVALUE 8.00e-04; NT HIT: gi14756466, EVALUE 6.00e-90; EST_HUMAN HIT: AL110383.1, EVALUE 9.00e-59
cggcgtcctctttggcgatgccctgggcggcgccctcgttggcgatgccctgggcggcgtcctccttggcgatgccctgggcggcgtcctccttggcgatgccctgggcggcgtcctcgttggcgatgccctgggcggcgacctcgttggcgatgccctgggcggcgtcctcgttggcgatgccctgggcggcgacctcgctggcgatgccctgggcggcgtcctcgctggcgattccgtgggcggcgtcctcgttggcgatgccctgggcggcgtcctcgttggcgatgcccttgtcggcggcctcgttagtgatatcgtgtgtggcatcctcgttagtgatgttgtgtacggtgtcctcatggggagctagaaaaacacagagttaaggtcagtgccctggtggtggagactgtgaatcacccaggggcttgcttggtgtgatgcatggaggtggctgatcacagcatgtgtcaagctgatgctgggacatcctcccaggtggacctgc

SEQ ID NO: 7236 - DNA, 527 bp, Homo sapiens
  MAP TO AC010474.2; EXPRESSED IN ADULT LIVER, SIGNAL = 1.3; EXPRESSED IN LUNG, SIGNAL = 8.1; SWISSPROT HIT: P26038, EVALUE 6.00e-55; NT HIT: gi4505256, EVALUE 0.00e+00; EST_HUMAN HIT: BE409045.1, EVALUE 0.00e+00
tcgccccgacgctagtgagggacccaatctgagtccccggccagccgaatcccagccgtgtgtactgcatgctcagcactgcccgacagtcctagctaaacttcgctaactccgctgcctttgccgccaccatgcccaaaacgatcagtgtgcgtgtgaccaccatggacgcagagctggagtttaccatccagcccaacaccaccgggaagcagctatttgaccaggtggtgaaaactattggcttgagggaagtttgtttctttggtctgcagtaccaggataccaaaggtttctccacctggctgaaactcaattaagaaggtgactgcccaggaagtgcggaaggaaagccccctgctctttaagttcagtgccaagttctaccctgaggatgtgtccgaccgaggaattgattcaggacaccactcagcgtctgttctttctgcaagtgaaagagggcattctcagtgatgatatttactgccggcctgagactgctgtgctgctggcctcccatgctgtcc

SEQ ID NO: 7237 - DNA, 519 bp, Homo sapiens
  MAP TO AL132826.15; EXPRESSED IN BRAIN, SIGNAL = 1.4; EXPRESSED IN ADULT LIVER, SIGNAL = 1.5; EXPRESSED IN HELA, SIGNAL = 1.2; EXPRESSED IN LUNG, SIGNAL = 1.7; EXPRESSED IN BONE MARROW, SIGNAL = 1.4; EXPRESSED IN FETAL LIVER, SIGNAL = 1.2; EST_HUMAN HIT: BE149252.1, EVALUE 0.00e+00; SWISSPROT HIT: O94991, EVALUE 6.00e-15; NT HIT: gi14786578, EVALUE 0.00e+00
ccctggggtttgcccaggactatagaagaactacgcttggatgataatcgcatatccactatttcatcaccatctcttcaaggtctcactagtctaaaacgcctggttctagatggaaacctgttgaacaatcatggtttaggtgacaaagttttcttcaacctagttaatttgacagagctgtccctggtgcggaattccctgactgctgcaccagtaaaccttccaggcacaaacctgaggaagctttatcttcaagataaccacatcaatcgggtgcccccaaatgctttttcttatctaaggcagctctatcgactggatatgtccaataataacctaagtaatttacctcagggtatctttgatgatttggacaatataacacaactgattcttcgcaacaatccctggtattgcgggtgcaagatgaaatgggtacgtgactggttacaatcactacctgtgaaggtcaacgtgcgtgggctcatgtgccaagccccagaaaaggttcgtggg

SEQ ID NO: 7238 - DNA, 531 bp, Homo sapiens
  MAP TO AC005041.2; EXPRESSED IN LUNG, SIGNAL = 1.2; EXPRESSED IN HELA, SIGNAL = 1.6; EXPRESSED IN ADULT LIVER, SIGNAL = 1.3; EST_HUMAN HIT: AU136971.1, EVALUE 0.00e+00; SWISSPROT HIT: Q13724, EVALUE 2.00e-49; NT HIT: gi14738502, EVALUE 3.00e-98
tgccctccctttggtctccctgttcttctatgtggtgacagatggcaaggaagtcctactaccagaggttggggccaaggggcagttgaagtttatcagtgggcacaccagtgaacttggtgacttccgctttacacttttgccaccaaccagtccaggggatacagcccccaagtatggcaggtaactgggggaaaagaatgttgggggatggaaggggtggttattcccattttcaccagtctccatgtcccctgcctgagacctcccaacctgactcctgaacactttgtatttctctttataatgcccactgccttctcttgaataatatttcctatttatcttctccccttcaagctacaatgtcttctggacctccaacccaggactgcccctgctgacagagatggtaaagagtcgcctaaatagctggtttcagcatcggcccccaggggccccccctgaacgctacctcggcttgccaggatccctgaagtgggaggacagaggtccaagtgggcaagggca

SEQ ID NO: 7239 - DNA, 518 bp, Homo sapiens
  MAP TO AC016656.5; EXPRESSED IN LUNG, SIGNAL = 1.8; EXPRESSED IN ADULT LIVER, SIGNAL = 1.5; EXPRESSED IN HELA, SIGNAL = 5.1; EST_HUMAN HIT: BF341883.1, EVALUE 0.00e+00; SWISSPROT HIT: O75962, EVALUE 2.00e-08; NT HIT: gi16170983, EVALUE 0.00e+00
aaggccatgggagtggccgccacctaggtgcgtcttccccagagacgcacagtatctttgttcattaacaccagtggttgaacataggcattttgtttccttgaataaatcttgaaaacgttaaatttgcaaaattctattcatgtttgtttaaaaaagttatctttttatttttttgcagaaacctgaataaaatactgtgatacagcaatgcgacctctgccttgggcagagtgtaagtgacggtcctccaccccagcgcagcttgcagctctgtgtccaagcactgctgagcacagctcacttggaatgcaatttcacacgatgaacataccggcagctgatcagttatgtttgcttgttttctcttgaaaattcagattaacagctgattggcaggtgaaagagaatgagaaagaacttctggataggtcaaactctaggcagaagcctgctctgcagaaagtttttaatgctacggataggtcgaacatcattctggtgtttgcgccgctcaa

SEQ ID NO: 7240 - DNA, 563 bp, Homo sapiens
  MAP TO AC011406.1; EXPRESSED IN FETAL LIVER, SIGNAL = 1.9; EXPRESSED IN ADULT LIVER, SIGNAL = 1.8; EXPRESSED IN HELA, SIGNAL = 1.7; NT HIT: gi16157445, EVALUE 1.00e-109; SWISSPROT HIT: Q12766, EVALUE 1.00e-32; EST_HUMAN HIT: BE888830.1, EVALUE 1.00e-104
acagatggggcagctgaggcctcaggaggggaaaggatttgctcaaggctatgccagacctcaggttctagctcacagtttcatatggcaagaccagtgctctttccagagttcagtccatgctgtttcctgtgtgactgagtgaataagctacattggctaaagtgtgattcaaatgaagatgacactgctgttgacaggggctgaccttatctgaattaggtcaagagagtagagtttttccagtcccttttgcaggaaaaaaaaagaacttacacatatatatatatctttctctctccatgtggtcttagtccatttatctctgcttgtctcccccttcctggcttcctcatcctcagaactctaagctctctgcactgactgctgtggttccggacatcccaggtttccgcaagatcctcccacgctcagattatatcatcatccccaagagcagcctgcaggaggaccggagctgccctcagctagagctatgtgtggctcagaaccagatgtccccgaaaggacctcctcttgtgtccaacactgccccggagaca

SEQ ID NO: 7241 - DNA, 514 bp, Homo sapiens
  MAP TO AC002472.3; EXPRESSED IN FETAL LIVER, SIGNAL = 1.3; EXPRESSED IN BRAIN, SIGNAL = 1.7; EXPRESSED IN HELA, SIGNAL = 0.42; EXPRESSED IN ADULT LIVER, SIGNAL = 1.5; EXPRESSED IN HEART, SIGNAL =   2; EXPRESSED IN BONE MARROW, SIGNAL = 1.8; NT HIT: AB002059.1, EVALUE 0.00e+00; SWISSPROT HIT: O43246, EVALUE 2.00e-09; EST_HUMAN HIT: BF092112.1, EVALUE 6.00e-57
cctgggggctcaccagcaacagtatcgggaagacttatttcaggtacctcccctagccaacacccactcacactcggcccaggcagctgcctccccttcccccactaccatcccagaatgaacaagtctcacggggctggggaggaccacacacccatcccgcacccctttctgcatggtgagtgagcacatgtctccacaatctcccgtgaggaacaaaggctctatggattcccgagaaagtgagccctgggctggcagatctttcctgcagcccggcccagccctgccctgcctctgcctcctcagatccccatggttcccctgattccagccctgagcatcgtcctcaacatctgcctcatgctgaaacttagctatctgacctgggtgcgcttctccatctggctgctgatgggtgagtgggggccaggctgggaccggggtcaggaggagggcaaagaggacaggaagggctggaacctgtacctcaggctcatgccctgcctcctgc

SEQ ID NO: 7242 - DNA, 560 bp, Homo sapiens
  MAP TO AL079302.4; EXPRESSED IN BRAIN, SIGNAL =   4; EXPRESSED IN BONE MARROW, SIGNAL =   2; EXPRESSED IN FETAL LIVER, SIGNAL = 1.9; EXPRESSED IN HEART, SIGNAL = 2.6; EXPRESSED IN ADULT LIVER, SIGNAL = 1.9; EST_HUMAN HIT: BI222663.1, EVALUE 0.00e+00; NT HIT: gi14748376, EVALUE 0.00e+00; SWISSPROT HIT: P44701, EVALUE 9.30e-02
gggtgtgggtgtgttccggcaaaactttatttataaaaccagacagtttgctaatccctgccctgagcatctactgtatccaataaatttcctatgcatccacaatggcaccaaccatgtattatccttgagggaactgaaaaaatgtcactatatcaattttctgtagggcttaattgtctggcttatagatgagagtggcttaccctagagggcaggagccacagctcattcatctttaccaacgagcatttgggatttacctagaaaatatttattaaatggaactaaacctcacctgtaaacctggccacagcatcaatgtgctgtttgacctggacggccagctctcgagtgggagtcagaaccagtccaagcagaggacgctttggatatgccttacaggtggcgcttttgtcatccaactcctgttttagatttccagtctgctctttatcaagattttcctcctcattctcattctgtttgggaacaggtttctccctgatcagggaagaaggcccttcaccagcatcatcgtcaccaaagagcaacgcctg

SEQ ID NO: 7243 - DNA, 525 bp, Homo sapiens
  MAP TO AL163300.2; EXPRESSED IN ADULT LIVER, SIGNAL = 1.7; EXPRESSED IN HELA, SIGNAL = 1.1; EXPRESSED IN BRAIN, SIGNAL = 0.96; EXPRESSED IN BONE MARROW, SIGNAL = 0.97; EXPRESSED IN LUNG, SIGNAL = 1.4; NT HIT: AL163300.2, EVALUE 0.00e+00; SWISSPROT HIT: P26371, EVALUE 4.00e-03; EST_HUMAN HIT: W70177.1, EVALUE 2.00e-19
gtgtgcaggcccacctgctgcatgcccgtcccctcctgttgtgcacccgccttctcctgccagcccagctgctgccacccagcctcctgcgtgtccctcctctgccgccgtgtgtgctcccacctggcctgctgaggcctctgctcaggccagaagcccagctactgacgggcacgtcccccagggccagccaggctcaggttccccccaacctctcccactgctgacctctcagcacacgcactagtacacaccgcactggtacacaccacagtgtgcaagctggctgacctcataccctacaaccacggcttacctatccactacctccaagccaggcccaggaaaccatgagacagccctctcctattattgaagggccccgggtgttccctggtggaatattcccccatagccacaggaggtccctggccccccctgcccttctcctccaagccattggccgcccttgcccaccacgtgccttgcacaatgaataaactggccttccctgcctctgcgtgc

SEQ ID NO: 7244 - DNA, 531 bp, Homo sapiens
  MAP TO AC010487.4; EXPRESSED IN ADULT LIVER, SIGNAL = 1.3; EXPRESSED IN HELA, SIGNAL = 0.89; EXPRESSED IN HEART, SIGNAL = 1.4; EXPRESSED IN LUNG, SIGNAL = 1.2; EXPRESSED IN BONE MARROW, SIGNAL = 1.2; NT HIT: gi8922743, EVALUE 2.00e-65; SWISSPROT HIT: P51522, EVALUE 1.00e-52; EST_HUMAN HIT: AW875795.1, EVALUE 0.00e+00
cgagcgaaggtcttgccacactcattacatttgtaaggtttctctccagtatgcagtctatgatggtacacaaggtgtgatgtctgactaaaggtcttgccacactcattacacttataaggtttctctccagtatgacttctatgatgacatgcaagggttgctttttgatcaaaaaccttgccacattcattacatgtgtaatgtttgtctcccctgtgaattctagtatgttttgccaggtgtgaatcatgcttaaaagccttgtcgcaaaccttacatttgtatggtttctctccagtatgaattatcctatgtatttcaagatgtgatttgcaactgaaaactttctcacattcttcacatttgtaaggtttctctccagtatgaattctcctatgtcttcgcaaatgcaaatgaaatcttgattcaagctgacctttaataggcttgtttccagcatgcctttgatcatatcggtctgtactactagtcaacttttttatttctgtcatgggtgcttcatggtca

SEQ ID NO: 7245 - DNA, 501 bp, Homo sapiens
  MAP TO Z84488.1; EXPRESSED IN BRAIN, SIGNAL = 1.3; EXPRESSED IN HEART, SIGNAL = 1.7; EXPRESSED IN LUNG, SIGNAL = 2.4; EXPRESSED IN ADULT LIVER, SIGNAL = 1.7; EXPRESSED IN HELA, SIGNAL = 0.97; SWISSPROT HIT: P45262, EVALUE 9.10e-01; EST_HUMAN HIT: AI927761.1, EVALUE 0.00e+00; NT HIT: gi14756954, EVALUE 0.00e+00
caccatgcacctccgaagtcccatcaccagggcagcttacctcttcatagggccatctatagatgttcagagcttcactgtccacggagactctcagcaactggatgtgttcatagccaccagcaaacatgcctacgccacatacctgtggacaggtgaggccacaggacagtctgcctttgcacaggtcattgctgatcgtcacaaaattctgtttgaccggaattcagccatcaagagcagcattgtccctgaggtgaaggactatgctgctattgtggaacagaacttgcagcattttaaaccagtgtttcagctgctggagaagcagatactgtcccgagtccggaacacagctagctttaggaagactgctgaacgcctgctgagattttcagataagagacagactgaggaggccattgacaggatttttgccatatcacagcaacagcagcagcaaagcaagtcaaagaaaaaccgaagggcaggcaaacgcta

SEQ ID NO: 7246 - DNA, 500 bp, Homo sapiens
  MAP TO AL117352.3; EXPRESSED IN PLACENTA, SIGNAL =   2; EXPRESSED IN BRAIN, SIGNAL = 3.1; EXPRESSED IN HELA, SIGNAL = 1.8; EXPRESSED IN ADULT LIVER, SIGNAL = 2.5; EXPRESSED IN LUNG, SIGNAL = 2.8; EXPRESSED IN FETAL LIVER, SIGNAL = 2.6; NT HIT: AF032669.1, EVALUE 3.00e-76; SWISSPROT HIT: Q92574, EVALUE 2.60e+00; EST_HUMAN HIT: AU128449.1, EVALUE 4.50e-02
cagtcggatggggaccgggacctccaggagcaccggcagcgcatccaggcgctggcggaggagacggcgcagaacctgaagcgcaacgtctaccagaactaccggcagttcatagagacggcccgcgagatctcctacctggagagcgagatgtaccagctcagccatttgctgaccgagcagaaaagcagcctggagagcatcccgcttacgttgctgcctgccgctgctgccgccggagccgccgccgcctctggaggggaggagggagtcggtggggcggggggccgagaccacctccgaggccaggccggctttttctccacccccgggggtgcctcccgcgacggctccggtccaggcgaggaaggaaagcagcgcactctcaccaccctgcttgagaaggtggaaggctgcaggcatctgctggagacgccgggacagtacttggtgtacaatggggacctagtggaatacgatgcggaccacatggcccaact

SEQ ID NO: 7247 - DNA, 568 bp, Homo sapiens
  MAP TO AC011536.5; EXPRESSED IN FETAL LIVER, SIGNAL = 7.9; EXPRESSED IN LUNG, SIGNAL = 6.4; EXPRESSED IN PLACENTA, SIGNAL = 3.8; EXPRESSED IN HELA, SIGNAL = 9.3; EXPRESSED IN ADULT LIVER, SIGNAL = 6.3; EST_HUMAN HIT: BF303619.1, EVALUE 1.00e-127; NT HIT: gi13651412, EVALUE 0.00e+00; SWISSPROT HIT: P57999, EVALUE 8.00e-12
gggctgaggtgggaggattgcttgagcccagcaggttgagcctgcagtgagctgtgatcacgccaatatactccagcctgggtgacagaacaagaccctgtcacaaaacaacacaaaaatctcccacggtgggaccattcaccaaaccttccagggtaggtaccagagttcccatgttagaggaatgtccctctcatacctacagggtggggtcgtgtctccctcagaaccccctagatggggctgtgttgccttcagacccccagggcaggctcacatggactcacctgctgcccctgagctaggctcacaacctggccagccacagtaaccaggaggcgttggagatctccagctgcattcttctcaagcacgatggaaaagtcctcgtccccaggctttgggtggcagacttgggccaagacataggagcaggagccatgcaggtcgtagacacggccatcaagggtgatgtagtggatgcccccgttggccaggcagcggccacagcctgtggcatgacaggcctggacaccatcctctaaccggcactcctcatggggcccac

SEQ ID NO: 7248 - DNA, 501 bp, Homo sapiens
  MAP TO AC005225.2; EXPRESSED IN ADULT LIVER, SIGNAL = 1.7; EXPRESSED IN HELA, SIGNAL = 0.95; EXPRESSED IN HEART, SIGNAL = 1.7; EST_HUMAN HIT: BG739855.1, EVALUE 1.00e-112; NT HIT: AY005822.1, EVALUE 1.00e-112; SWISSPROT HIT: P49753, EVALUE 2.00e-33
gccatctttggtcaccttgatgcgatttctgttgacgcccacagggggcagggtctcgcccttgtagcgtaaggttcccccaacattggccacagagccgttgatgacgacagcagccgtgatgcccttcaggaaagaggccatggaaaggcagagctcaccccctttggaaattccaagcagcccaactcctggaccttttacctgagaaagggacaaaggaaaaagaagaagaatggctccacaaacagtggaatatggtgagttgtgcccaccctggaagttagttgaacctgagtctgaatctgggttctaccatttacccagatttgcagctttgggaatttacctcccctctatctcttcctttccacaatttgtccatcaccactcttggtgataaccatgtggaagatctatcaattactctggtttctcagttccttaatctcattatctcccatgatctttttctgtctcccacctgagccacccattccc

SEQ ID NO: 7249 - DNA, 545 bp, Homo sapiens
  MAP TO AC008151.1; EXPRESSED IN FETAL LIVER, SIGNAL = 1.7; EXPRESSED IN BRAIN, SIGNAL = 1.8; EXPRESSED IN ADULT LIVER, SIGNAL = 2.2; EXPRESSED IN LUNG, SIGNAL = 2.3; EXPRESSED IN HEART, SIGNAL = 1.9; EXPRESSED IN BONE MARROW, SIGNAL = 1.9; EST_HUMAN HIT: T70146.1, EVALUE 0.00e+00; NT HIT: gi14572198, EVALUE 5.20e-01; SWISSPROT HIT: P00101, EVALUE 6.70e+00
atgggccagggctgtgcttgagctgtccttgaattcctagtgttagaaaagggcacagcctgtgggagccccggatgaatgtgctggaccaaatggcagagctagagtccaaaccctgctctcactctgtccacacccagggctctttctattctactgtcagttccctggctgagcagagctacaggcccatgggagaggactggggaatgactgcaccatgcctggcctgaaatatttagaagaatggccatatctggggttgcaccatagtacccccaaacccacccctggggcaggagagggtgttgaaaggagagtccagcaaaacacatatagaacaggcttgctgttaggatgtagcatctgttcccacatggttttggcctccccttctgtgggggtttggttggtgataacagagaagcaataaggtgtgaagtgacagtgccagcccatctgaagataaagctgctggacaggcaatttgcacctaggaaaggaagggcccctgtaactgccagactccccatccgtctggccaa

SEQ ID NO: 7250 - DNA, 511 bp, Homo sapiens
  MAP TO AC010680.3; EXPRESSED IN ADULT LIVER, SIGNAL = 2.2; EXPRESSED IN LUNG, SIGNAL = 1.9; EXPRESSED IN BONE MARROW, SIGNAL = 2.1; EXPRESSED IN FETAL LIVER, SIGNAL = 1.8; SWISSPROT HIT: Q05623, EVALUE 4.00e-19; EST_HUMAN HIT: Z25100.1, EVALUE 0.00e+00; NT HIT: gi16157781, EVALUE 0.00e+00
tgcagttttccacagtgagggtgctgaaggaatctgttgtatggatatcagcccgaaggctaaggttagagtctggtttgctccacacagctgtaggagtaggtctaccttggtaggcaatgaagaggcgaatactggccccagctctaacaacatgagtctgtttgaagtttgcatctatgtctaactcaggagctgttaaccggtcaactgctttaattgtgccagtcacttcacagctgtcgccttttccagcaccattgatagcactaactcggaatttgtattcttcacctgcttgtagatcagtgactgtatatcttgttttcacacatgcctctgcattcaccttgtgccagtctcctaagtcggccttacacatttcaataatatacccaattatttccctgccaccatcaaacactggtttggaccattctaagctcacagttgtctttgatgtgtctgttactttgaccactgtgggaggacctggtgggttgacgggctc

SEQ ID NO: 7251 - DNA, 520 bp, Homo sapiens
  MAP TO AL022334.1; EXPRESSED IN HELA, SIGNAL = 0.6; EXPRESSED IN ADULT LIVER, SIGNAL = 1.4; EXPRESSED IN LUNG, SIGNAL = 1.4; NT HIT: AF279143.1, EVALUE 0.00e+00; SWISSPROT HIT: P33485, EVALUE 5.50e-01; EST_HUMAN HIT: BI256019.1, EVALUE 0.00e+00
agggaggtggccccagatgcccactgtgcgcatctccccaccgaggccccggcagcagtcttgttcacagaccttaggcaccagactggaggcccccgggcgctggcctccgcacattcgtctgccttctcacagctttcctgagtccgcttgtccacagctccttggtggtttcatctcctctgtgggaggacacatctctgcagcctcaagagttaggcagagactcaagttacaccttcctctcctggggttggaagaaatgttgatgccagaggggtgaggattgctgcgtcatatggagcctcctgggacaagcctcaggatgaaaaggacacagaaggccagatgagaaaggtctcctctctcctggcataacacccagcttggtttgggtggcagctgggagaacttctctcccagccctgcaactcttacgctctggttcagctgcctctgcaccccctcccacccccagcacacacacaagttggcccccagctgcgcctgacattgagcc

SEQ ID NO: 7252 - DNA, 507 bp, Homo sapiens
  MAP TO AC022154.3; EXPRESSED IN PLACENTA, SIGNAL =   3; EXPRESSED IN HELA, SIGNAL = 0.6; EXPRESSED IN BRAIN, SIGNAL = 2.5; EXPRESSED IN ADULT LIVER, SIGNAL =   2; EXPRESSED IN HEART, SIGNAL = 1.9; EXPRESSED IN BONE MARROW, SIGNAL = 1.6; SWISSPROT HIT: P21138, EVALUE 1.80e-01; EST_HUMAN HIT: BE902937.1, EVALUE 0.00e+00; NT HIT: gi14760428, EVALUE 0.00e+00
cgatgcaggggtgagtgggccatgggcggggctgggtctggggttagggtcagctccgacttggcacgaggcaggctatgggcaggggtgggcgaggcaggttccacagtggcggggaggtaggagaggcgtccgcggtaggtgtgcagtgtggcgaggcccagcaccgtgcccagtgtgaagcgggcactgcccaaggccctgaagcgctcgctctggatatccacatctgacacgaagccccaggccacagacaggaaggagaaacagcgggagcccgaggccagcgtcacggagagcaggtccagtgggtggccaccaccccggcacagcaacagtgagcagttgagcaacaggtcgaggcccagggctggctcaaatcttcacagccggagatggacggacacacagaaggaaggagcaaacaggggttggggaaagagacaggtaggaaagcagctggcaatgagaccacgaaggccatggcccaggcccaccacagccgtg

SEQ ID NO: 7253 - DNA, 502 bp, Homo sapiens
  MAP TO AC007262.4; EXPRESSED IN PLACENTA, SIGNAL = 1.5; EXPRESSED IN BRAIN, SIGNAL = 1.5; EXPRESSED IN ADULT LIVER, SIGNAL = 1.7; EXPRESSED IN BONE MARROW, SIGNAL = 1.8; EXPRESSED IN FETAL LIVER, SIGNAL = 1.7; EXPRESSED IN LUNG, SIGNAL = 1.6; EXPRESSED IN HEART, SIGNAL = 1.7; SWISSPROT HIT: O42237, EVALUE 6.00e+00; EST_HUMAN HIT: AA176589.1, EVALUE 2.00e-04
tcaagggttcatgctatccacatgtcctatcactgatgttgttgacattgatcacctggctgagatgctgtttatcaggtttctccactttctcccataatattactcttttctccttctttccatactgtattctcacttacagaatgggaagtttaggacttcacatgttatttgtaaaacagcaggactggattagtccatttctaagtcatctctagtttgttccttataatcaatgagaagtactgtcctgattgaaaaggaaatctgtattcacagaacagggtgagagagcaggatcacttaggttcaaacccttagttttaaccgtcttagcgttctttctgaacagagggactacaaaaaaccattgtgaatgtagcaatttaatgatctacttttttgcaagttggcaccatattatgtattgatcagccttggacagatcactgtgtccagactcaattctgaaaacttgtggagggttggagagtagggg

SEQ ID NO: 7254 - DNA, 523 bp, Homo sapiens
  MAP TO AC004687.1; EXPRESSED IN ADULT LIVER, SIGNAL = 2.4; EXPRESSED IN HELA, SIGNAL = 3.8; EXPRESSED IN FETAL LIVER, SIGNAL = 2.4; NT HIT: gi14769775, EVALUE 0.00e+00; SWISSPROT HIT: Q9Y5V3, EVALUE 6.30e+00; EST_HUMAN HIT: AA325497.1, EVALUE 5.00e-45
tccaccagtcccagcccgaccccttttgtgagactgacagcgatgaggagatcttggagcagatcctggagctgcccctccagcagttctgtagcaagaagctctttagcatcccggaggaggaggaagaggaagaggaggacgaggaggaggagaagtcaggggcaggctgttcttcccgagaccctggcccgcctgaacctgcattgctggggctgggctgtgacagtggtcagccccgaagacctggccagtgtcccttgtctcctgagtcctccagggctggagactgcctggaagacatgcctggattagttggtggaagcagccggaggagaggagggggctcccctgagaagcccccaagccgcaggcggcctccagatccccgagaacactgcagccgacttctcagcaacaatgggccccaggcctctggacgactgggccccacacgggagaggggtggcctccccgtaattgagggccccaggactggactagaggctagcgggagaggccg

SEQ ID NO: 7255 - DNA, 500 bp, Homo sapiens
  MAP TO AP001620.1; EXPRESSED IN PLACENTA, SIGNAL = 2.7; EXPRESSED IN ADULT LIVER, SIGNAL = 1.2; EXPRESSED IN HELA, SIGNAL =   1; EXPRESSED IN FETAL LIVER, SIGNAL = 1.2; NT HIT: gi13446224, EVALUE 0.00e+00; SWISSPROT HIT: Q9ULJ3, EVALUE 2.00e-82; EST_HUMAN HIT: AL544048.1, EVALUE 0.00e+00
cttctcgcagggccacaggctggcttctttgctaggacccgcttctttgggggctgtgctggcctcgggtgcctcttcttcagcctcctccacaggctcctctttgacttggattttcagttgcttggaaagactaaggtcttcgggaagacaagaggaatcttccgagtcgaagttaacttgttctgaagaatcactgaacacgttgtcgtcttttgtggtgacgatgtggtttactttgttgggctcaggctgggattggggccttgaagaaccagtcacatcaccattgtggtccaaaacgggcaaagaaaagttttcggtgggtgccatgttgttctgattatggacttcaacctggtgccgccagatgctgaaagaggacttgaaggtgcgcatgcactcgaggcaggtcagcttcttatactcacacttgctctcgtgttcttgcttcagctcgggcgagaaaaacctgaggctgcagtaagggcagacggccg

SEQ ID NO: 7256 - DNA, 580 bp, Homo sapiens
  MAP TO AC003682.1; EXPRESSED IN BRAIN, SIGNAL =   2; EXPRESSED IN HEART, SIGNAL = 2.1; EXPRESSED IN FETAL LIVER, SIGNAL = 2.4; EXPRESSED IN ADULT LIVER, SIGNAL = 2.2; EXPRESSED IN PLACENTA, SIGNAL = 2.1; SWISSPROT HIT: P39188, EVALUE 1.00e-14; NT HIT: AF288742.1, EVALUE 2.00e-16; EST_HUMAN HIT: BI001974.1, EVALUE 1.00e-98
cctgggtgcaatggctcgtgcctataatcctagcacttggggaagctgaggtgggaggatcacttgagctaaggaatttgagaccagcctcgacaacataatgagacctgtatctccacaagaaattctaaaaaaaaattagccaggtatggtggtatatgcctgtagtcctagctacttgggaggctgagatgggagtgtcactggagcttggaaggtcaaggctgcagtgagatatgactgcaactgcactcccatctgggtgacagagcaagaccctatctcaaagaaaaaccatggactcgtccctccctgtgttccacaggtatttgtaatggagctgttcccttctaccaaagtctgcatatacttcacttgcatttttatgcttttaggttgtttgcatggaatagaggctgaggaggccccttctgagcagactctttctgcgcaaggagtgtcacaggccaggactccaaagctaggtccttccatcccaaatgctcattcttgtgagatgtgtatcctggtcatgaaagacattttgtacctcagtgagcatcaggggacacttccctgg

SEQ ID NO: 7257 - DNA, 594 bp, Homo sapiens
  MAP TO AC004493.1; EXPRESSED IN ADULT LIVER, SIGNAL = 2.9; EXPRESSED IN PLACENTA, SIGNAL = 5.5; EXPRESSED IN BONE MARROW, SIGNAL = 5.2; NT HIT: gi14777924, EVALUE 0.00e+00; EST_HUMAN HIT: BF881262.1, EVALUE 0.00e+00; SWISSPROT HIT: Q95107, EVALUE 1.50e+00
cttggccccggtggagtttgggcctttactttggggtatggtgaaatagaccctgagtgactttgtcttggcggtgtttcaggtttcactttggtatctggtgaggaggacccagaatgactgtatcttggcaacaatctggattccacattggagcagggagatactgatctgcttcgccgtggagttgttctcgacgtcaccctactaggacttggagaagaggagccagaatggcttctttgtcttggtgatattattgccttcactttgggttgtggagatgatgacctagatgggctctgtctgggaggtgtgctagatttcactctaggaggagaggaccctgagcagctatgtctagaaggggtcctagatttcaactcagggtcaggtgatgattcaaaacagctccgtctctgtggcgttacagattgctcattggcctggggacttgttatggacccttgcctcggtggtgttccagatttcactttaggatgaggagatgaactggaatgactttgtcttgatggtgtcttagatttctgtttaggtggcggagaagaactggagcgactgcgtctgggtggc

SEQ ID NO: 7258 - DNA, 519 bp, Homo sapiens
  MAP TO AF099810.1; EXPRESSED IN ADULT LIVER, SIGNAL = 1.7; EXPRESSED IN HEART, SIGNAL = 1.9; EXPRESSED IN PLACENTA, SIGNAL = 1.6; NT HIT: AF099810.1, EVALUE 0.00e+00; SWISSPROT HIT: Q9H4G0, EVALUE 4.20e-01
ctccctgtccctggcctccctggctggggcatttgggggtccgctgggaggagtgcatcgctgaaggcttcttcctactctcctgcaccttctcctccttgagtcaaggcctccggatccacatggatagctgagatcttttcttggagaaagacgctttcctctttactccagtccctcacttccccacctgattttcctcctcttctgctggtcctgtctttttctactgcctctttattcaatttcttgcttgtgtgcccctctgggactctcttgtacactttcctccatctccactatctcaggatctgtgtgtgtgctgccttcctcctgtgtgctttctgtccccccatctctgtcttgtctttcccacttctattgccaaagggagagatcctctccgggctgttccctggcctgtctgctcctccgggctctgtcccagcagcgacaatgagctccacactccactcggttttcttcaccctgaaggtcagcatcctgctggggtccctg

SEQ ID NO: 7259 - DNA, 513 bp, Homo sapiens
  MAP TO AC004235.1; EXPRESSED IN ADULT LIVER, SIGNAL = 2.5; EXPRESSED IN BONE MARROW, SIGNAL = 2.4; EXPRESSED IN LUNG, SIGNAL = 2.2; EXPRESSED IN HEART, SIGNAL = 2.8; EXPRESSED IN FETAL LIVER, SIGNAL = 2.9; NT HIT: gi4758927, EVALUE 2.00e-86; EST_HUMAN HIT: AU136869.1, EVALUE 0.00e+00; SWISSPROT HIT: P47810, EVALUE 7.00e-06
cctcctcccaggcctgctccagccgcacgcagcatgggtgctgccccaccttctcgtggctgcccacctcggccaacttgcgggcccggtccttggggccccggaatggtgacatggaacgctttaccgcatagagccggccgtcctccttggagcgcacctggaagggaggtggtacccacgcacacagtgagggtgagccacaagtggcacaatcacatagggggacaacctggcagaccccattaagggttcacacacggggcacggtggtgtagctggcatctgtctcagacccctgcccagggtaataacaaaaccagacaaacctccatccctcgggctgggtctgtggagacccagcgacggaggagccagggccgacctgcactgaccccaggggacctcttggatgtgtcacgaggtggaaaaagcagctgcagagcaacacaggcagcccaggctgtggtgtgaaaagtgggctcccctgtgagaaagctgacctgggggcca

SEQ ID NO: 7260 - DNA, 527 bp, Homo sapiens
  MAP TO AC011248.8; EXPRESSED IN BRAIN, SIGNAL = 1.2; EXPRESSED IN HELA, SIGNAL = 0.56; EXPRESSED IN ADULT LIVER, SIGNAL = 1.2; EXPRESSED IN FETAL LIVER, SIGNAL = 1.2; SWISSPROT HIT: P42350, EVALUE 2.20e+00; EST_HUMAN HIT: BI827612.1, EVALUE 2.90e+00
ggagcagtgttccctggggcttcagctgccatcccatcagagggcaaagcctcctacaagcccctggcctccagagaggtttgcagaggtacacagtgatgatgtcctcggtccccagctagaggaagctggatgcacaggctgccctgctatatgcaaggcctgcgccatggcctgcgtgctttgtctcccgcagctgaggcttcctgcggcatggtgcctgttcagaaggtgcagcccctccttctcagcatctgccttcctccaggaatttcttccccttccctcccacaggctctgcagacatcctgtcccaacaggcttgcatgacttcaaagcggcctcctctggtagtagcaatattcaaaagctggaagattcccaaccagcctcccatctggtttctgccccggctgccgtattgcatcctagaaaccctgggactcccccagaatgcattgctctcacgcccccgaatccttccatctggaactgtctctcctccttctcaccagcccccacctcca

SEQ ID NO: 7261 - DNA, 534 bp, Homo sapiens
  MAP TO AC005877.2; EXPRESSED IN ADULT LIVER, SIGNAL = 1.6; EXPRESSED IN BONE MARROW, SIGNAL = 1.5; SWISSPROT HIT: P37275, EVALUE 2.00e-98; NT HIT: gi13540478, EVALUE 0.00e+00; EST_HUMAN HIT: BE889791.1, EVALUE 0.00e+00
gctgcagggagtggaggaggctgagtaggctgctttaggtcatagtgctttaattctggaagtgcattaatatctcctggacaatcatcacacagaagacaagtgctatcattcacccccccttcaaagcttttgtccttctcagacttaacagtaagatcttctggtaacttttcacttttacaactgtttgtagcgactggattttctttttttaaattttgaggaacaacttgaagttggctaggctgctcaagactgtagttgatgataattttggttgttccatcttgatcaaccaaaggaagactgatggctgaaataacagaatggccaccttgttgtatgggtgaagcattgattgtttcttgttctttggatgcaagattggcttgattattctccaacacttgccttattacattaccatctaccgccactttaagtacattctgaatatcacttaaattgatacttatgggagacaccaaaccaactgttggcagaacaacagcttgcaccatgccctgagga

SEQ ID NO: 7262 - DNA, 520 bp, Homo sapiens
  MAP TO AL118502.29; EXPRESSED IN ADULT LIVER, SIGNAL = 3.4; EXPRESSED IN BONE MARROW, SIGNAL = 3.4; EXPRESSED IN HEART, SIGNAL = 3.4; EXPRESSED IN FETAL LIVER, SIGNAL = 3.1; EXPRESSED IN LUNG, SIGNAL = 3.2; NT HIT: gi15529987, EVALUE 1.00e-54; EST_HUMAN HIT: BI828913.1, EVALUE 1.00e-54; SWISSPROT HIT: Q14296, EVALUE 7.20e-01
ccacgaaggggtatctgaaccaggaagagaaaggtgatggcctttatcacccgaggaacttttatctgcataacagtgcaatgtttattcaccataagtttcctcccttcactctcccataatttgtctccaccatcctgcagtagcctcaagcccctattcccttttgtagctcaggatgctatagaagctgaaatcatctggcccttttttgagtctcatattttttggggactcccatgcgtatgtatgtaagtaattaaaatgagtttcctgctgttgatctgccttatgtcagtttaactcataggccgaccaaagaacctagaaggatggaggtgagcagtttttccctcccctacatttgtgataaagccaagtgctgagatggctccgggtgatgctgggtacctgtgcgatgtcagtctccctcgtgggtacagggcttggtacgctgtctgatatctcagtgacattgacgcaggtagtgagaccggagccctgggcaagagccaccagg

SEQ ID NO: 7263 - DNA, 528 bp, Homo sapiens
  MAP TO D87016.2; EXPRESSED IN HELA, SIGNAL = 0.58; EXPRESSED IN ADULT LIVER, SIGNAL = 1.4; NT HIT: X59707.1, EVALUE 0.00e+00; EST_HUMAN HIT: BG758331.1, EVALUE 8.00e-84; SWISSPROT HIT: P04208, EVALUE 2.00e-10
tgtgtcctccccaccccctgggaccacaaagctccacccctgccacaccctgacatactcaagcccaggagcctgacccagggctcagggtggggtcaaaaaccggggggatctgatttgcatggatggactctccccctctcagagtatgaagagagggagagatctgggggaagctcagcttcagctgtggtagagaagacaggattcaggacaatctccagcatggccggcttccctctcctcctcaccctcctcactcactgtgcaggtgacaggatggggaccaagagaggggccctgggaagcccatggggccctgctttctcctcttgtctcctttcgtctcttgtcaatcaccatgtctgtgtctctctcacttccagggtcctgggcccagtctgtgctgactcagccaccctcagcgtctgggacccccgggcagagggtcaccatctcttgttctggaagcagctccaacatcggaagtaattatgtatactggtaccagcagctcccaggaacggc

SEQ ID NO: 7264 - DNA, 513 bp, Homo sapiens
  MAP TO AL033375.2; EXPRESSED IN FETAL LIVER, SIGNAL = 1.2; EXPRESSED IN ADULT LIVER, SIGNAL = 1.2; EXPRESSED IN HEART, SIGNAL = 1.4; EST_HUMAN HIT: BE147676.1, EVALUE 1.00e-11; SWISSPROT HIT: P14283, EVALUE 8.20e+00; NT HIT: gi11560033, EVALUE 3.10e-02
gaccgtggcagccctgtgtgtttcagccggttccagtgcactggaactctctgacagtcaggtgcagtctgccagcaaaggagctatggtaaagttttccaggaagcaccctgtttgggcatctgaggctgcactgcaagtgggtgcaaccagtctggagccctaggagaggccagaagacagggtagtgctcagatcagactagccccatctcacaaggaagaccaccctgctgtgtccaggtatgacagtcacccctaggctaatgtctcctagaggagcgtaggtgtccctggctgtgctccattgcagccactcccatgccaaactctctgagctgtgcactggctggagtcctgctcctgccacctctcctggcagctctccctgccagggtaagtgtttgtggaggtcatggggtctcctgctgataggattctggagatccaaggtgagagcaggccataccttggctgttcatctcactccttccccaggagacgctggagccca

SEQ ID NO: 7265 - DNA, 518 bp, Homo sapiens
  MAP TO AP001754.1; EXPRESSED IN ADULT LIVER, SIGNAL = 1.1; EST_HUMAN HIT: AI422737.1, EVALUE 5.00e-05; NT HIT: gi14780716, EVALUE 3.00e-82; SWISSPROT HIT: P06914, EVALUE 5.50e-01
ccatgttcggctggttcgccatggtgatcgcctacgtcgtgtactatgtgcgccacaaccaggaggatgcccggaggcacctggagtacctgaagtctctgcccagcgcccccgcctccaaggaccccatcggcccggggccctagcgcctgttccggcagacccccgccggtggctgctgtcacttttgtagtaggtggtgactgatgctgcttttgctcttccctgaggcaggtgtcacagccatgtgtgctccccactgttgcactcaggcacagcagcacctccaggctgggtggttttgccacacatccgtgtgacggatgaggaacctgaagcttagaggaacggaatgactgcccgtgacgataccatcaggaaattatcccagtggaacttcaacccgggctgtccatcgtgacattccgcctccttccaccatgccagcctctcccacacggggccctgcaggctgtggatatgcactcagaggactaagggggtgctctgcaagcgag

SEQ ID NO: 7266 - DNA, 533 bp, Homo sapiens
  MAP TO Z98750.1; EXPRESSED IN FETAL LIVER, SIGNAL = 2.2; EXPRESSED IN PLACENTA, SIGNAL = 2.1; EXPRESSED IN HELA, SIGNAL = 3.6; EXPRESSED IN ADULT LIVER, SIGNAL = 1.6; EST_HUMAN HIT: AW954907.1, EVALUE 8.00e-84; NT HIT: AF049793.1, EVALUE 0.00e+00; SWISSPROT HIT: Q99972, EVALUE 2.00e-27
gcggacatccgtgccaactgtgtcgattctccacgtggtctcctgggtgtaggggtaggtgggcttggggtctcgcatccacacaccatacttgccagtaattgtttctgctgttctcagcgtgagaggctctcctacccaaactagttctccacatcctggtaaattcagaaaagaaaacgaagcaccacttaatccataatctttccaaacacagacaatgatcatgcggaagcttggcagagccagtagatgtgacagccctggagacaaatcgtctgggtttaaagctaggctctaccacccgctggctgtgtgactttcagtaagttacttagctctctacgcctcagttatcgcatttgtaaaaggggatactaatagtgttttgggtagtagggctgttgtaaattttaaatgtaattatatatgttaagtgcttggtatagagtaaatatatggtaaatgctatatgatcaatctgtgtttcatgttattgacaattattgctatcactgaggggcatgcatggg

SEQ ID NO: 7267 - DNA, 539 bp, Homo sapiens
  MAP TO Z82188.2; EXPRESSED IN FETAL LIVER, SIGNAL = 1.5; EXPRESSED IN BRAIN, SIGNAL = 1.3; EXPRESSED IN ADULT LIVER, SIGNAL = 1.4; EXPRESSED IN LUNG, SIGNAL = 1.2; EXPRESSED IN BONE MARROW, SIGNAL = 1.3; SWISSPROT HIT: Q03211, EVALUE 6.60e+00; NT HIT: U91328.1, EVALUE 9.00e-06; EST_HUMAN HIT: AW796604.1, EVALUE 9.00e-16
gccattgctatgggggccaagacacgttacaaaagaaaatcgtctttttccatttcatggaaccacaggcaaaagcctcttaattttgtaagatgctgtccaacaggctgcatggggaaaccaaattaacattttccattccaggagactagccaccccactcagtgcccaacatcaacctggcaaggctcaaacttgctcccgatggcccttgtcatctttgatccactccaagtgaggtggaatgccctccaaccagaagtttcaacatatggtagctgggcaagatggaagagtggagagtcaccctgagtgacagaaaagatagaaaagagaaaggagagaggaagaaaagcattgcctgccggggggtggagaagctgaggagctcagggaggccagaggcctccattccattgacactggatcaatagttcaggaggtcgcttgtcagtagcaaaggtatcttttccagcaatctcatcatctctaaagtttccccctttggggagaagaaagctccccatgtcccatgatcc

SEQ ID NO: 7268 - DNA, 586 bp, Homo sapiens
  MAP TO AL031588.1; EXPRESSED IN BONE MARROW, SIGNAL = 1.5; EXPRESSED IN FETAL LIVER, SIGNAL = 1.7; EXPRESSED IN LUNG, SIGNAL = 1.2; EXPRESSED IN ADULT LIVER, SIGNAL = 1.9; SWISSPROT HIT: O60241, EVALUE 9.00e-03; NT HIT: gi14776961, EVALUE 0.00e+00; EST_HUMAN HIT: BE048770.1, EVALUE 1.00e-122
tgtgtgaaccccgggcagtggttccagcagcggggcggacgcgagacagccccatttgagttttgctgctagatggcacgtagaacttgaacttcagagggtgctccttggaggccctgaccagacacagaagggaagggagactgttcccatggtcctgcctccgcggcagtgaggctgctcttcttacagccaggtggctcttgtcttcggtgtagggggctggtgaggaacacggtggggagcagcctgcgagggcgctgggctttcagcactcacggcacctgctgtttggtttggccaggatggcctgggagcccccagggctgggcaaaggctgccctttacagactcatgggcagagggaaccgtcttacccctgccccttctctgtcctctccgcagcgttggtgggacgggagggtggtctgcccggggctgcgagctcctgtccaggaaccggacacatgtcgcctgccagtgcagccacacagccagctttgcggtgctcatggatatctccaggcgtgaggtgggcatcctcccgtggccactgtgccctctgggcctaccgccaaacctgccc

SEQ ID NO: 7269 - DNA, 540 bp, Homo sapiens
  MAP TO AL137070.3; EXPRESSED IN BRAIN, SIGNAL = 1.5; EXPRESSED IN ADULT LIVER, SIGNAL = 1.8; EXPRESSED IN BONE MARROW, SIGNAL = 6.5; SWISSPROT HIT: Q99439, EVALUE 2.00e-30; NT HIT: gi14765608, EVALUE 9.00e-49; EST_HUMAN HIT: BE867826.1, EVALUE 1.00e-48
caggtgggcatgacggctcccgggaaccagtggcacatctatgacaccaagttgggaatcgacaagtgtgagaactcctccatgtccctgaagatgggctacacgcaggtcgccaatcacagcagacaggtctttggcctaggccggcaaatatatgaacccaagtaccagccgggtggcccagtggcccacggggctccctccgccggcaactgcccagggccaggggaggccccttagtaccaggaggagaccagctactgaggctcccagcacgctctctccacacatggtctccccgtctgggtgttgggtttttctgtgttttcatcttttttttttttaacctgttcagtgctgccagtcaaccgagggtctgtgagcggcagcgtgggatcaggcagcagggttttttcccccacctccccttgctttggttccttcgcaggactgagccaccgggctgtgggggaagggatcaaggccgtatcctgatgcgtgtagggtgaaggtccccgctggcacttccaggctgtgggc

SEQ ID NO: 7270 - DNA, 501 bp, Homo sapiens
  MAP TO AL078621.19; EXPRESSED IN PLACENTA, SIGNAL = 2.3; EXPRESSED IN ADULT LIVER, SIGNAL =   2; EXPRESSED IN HELA, SIGNAL = 4.2; NT HIT: gi14725103, EVALUE 0.00e+00; EST_HUMAN HIT: BI089073.1, EVALUE 0.00e+00; SWISSPROT HIT: P57784, EVALUE 7.00e-88
tcaagctgacggcggagctgatcgagcaggcggcgcagtacaccaacgcagtgcgcgaccgggagctggacctccgggggtataaaattcccgtcattgaaaatctaggtgctacgttagaccagtttgatgctattgatttttctgacaatgagatcaggaaactggatggttttcctttgttgagaagactgaaaacattgttagggaacaacaacagaatatgccgtataggtgagggacttgatcaggctctgccctgtctgacagaactcattctcaccaataataggctcgtggaactgggtgatctggaccctctggcatctctcaaatcgctgacttacctaagtatcctaagaaatctggtaaccaataagaagcattacagattgtatgtgatttataaagttccgcaagtcagagtactggatttccagaaagtgaaactaaaagagcgtcaggaagcagagaaaatgttcaagggcaaacggggtgcac

SEQ ID NO: 7271 - DNA, 553 bp, Homo sapiens
  MAP TO AC006512.12; EXPRESSED IN ADULT LIVER, SIGNAL = 3.2; EXPRESSED IN PLACENTA, SIGNAL = 3.8; EXPRESSED IN FETAL LIVER, SIGNAL = 2.4; NT HIT: gi14784128, EVALUE 1.00e-114; EST_HUMAN HIT: BF921802.1, EVALUE 0.00e+00; SWISSPROT HIT: P54259, EVALUE 2.00e-35
accaagggcttgggggatggaggatggttaaagtggtggttatgagatggtggaagacagggagttggagtcagctgtgggtagagacaaggtgcttgagatggatccttgaggaaggaatagggttttacaggcgggaaacaagactggctgctagggagcagccaagaatgtgaggaaagtgagaaatccccagatggtaagaggtgggcttgagcaagagtactcaccacatcacagtacaacagtgtgctgtgaggggaaatgattttatgcaagagaggccccaaatctcagggaagcaggaaaggaaaagagaaaaaatgagtcttcccttttctacagcaggaactccctcggccacagtctccctccgatctggatagcttggacgggcggagccttaatgatgatggcagcagcgaccctagggatatcgaccaggacaaccgaagcacgtcccccagtatctacagccctggaagtgtggagaatgactctgactcatcttctggcctgtcccagggcccagcccgcccctaccacccacctc

SEQ ID NO: 7272 - DNA, 503 bp, Homo sapiens
  MAP TO AL096870.3; EXPRESSED IN ADULT LIVER, SIGNAL = 1.2; SWISSPROT HIT: Q15722, EVALUE 8.10e-02; NT HIT: AB008193.1, EVALUE 0.00e+00; EST_HUMAN HIT: BG739753.1, EVALUE 0.00e+00
gccagcgccactgacagcaggatgatagccagcagagagatgaactctacacctagtgaggggggtgctgcagaagatgtagtgttcatggccgtcgggaggacctggagagtgagggcggacacacgcatgagagtagaggaccaagggtttcctgacgccatggacacacctaggctgagaactctagtctatctccagggtcagcagcatcagaggtccccctgaaatatactgcccccatcgctgcagactgacaacttaaagggatctggttgagtacaaagactagtttcctaactgggtcatgcggccccttcctgtccacagacccaattgcaaaatatacagtgaccacagcagcagcagcatttccagaccttttcagtctcctccccttaggagaccctaaagcccagaaccaaacagagttcctaccaatgctgcaccccttgaaaggccagtctttttgccccctgccaggccctcagcccctcaatccc

SEQ ID NO: 7273 - DNA, 531 bp, Homo sapiens
  MAP TO AL163636.2; EXPRESSED IN ADULT LIVER, SIGNAL = 6.6; EST_HUMAN HIT: AW967096.1, EVALUE 8.00e-81; SWISSPROT HIT: P03950, EVALUE 2.00e-09; NT HIT: gi14751803, EVALUE 0.00e+00
tgcctcaggacctagcacagtccctggtacccagtagagacctatgtaatgttcattattcaattaataaatacatgaattaaagagtgagagtggattttgtaatgttacgactgatagagaaatactcagtgattctaagggatggggaagaacggttggagctagaggttgtgctcaggaaactattaaatagacgttccgcaggaagggattgacgaagtgtgaggttaatgaggaagggaaaatagaatataaaatttggtggtggaaaagatctgattcatgatgccgtgtcagagagcaaagctcctgtccttttggcctaatttggtgatgctgttcttgggtctaccacacctccttttgccctccgcaggagcctgtgttggaagagatggtgatgggcctgggcgttttgttgttggtcttcgtgctgggtctgggtctgaccccaccgaccctggctcaggataactccaggtacacacacttcctgacccagcactatgatgccaaaccacagggccg

SEQ ID NO: 7274 - DNA, 519 bp, Homo sapiens
  MAP TO AC005829.1; EXPRESSED IN ADULT LIVER, SIGNAL = 1.3; EXPRESSED IN FETAL LIVER, SIGNAL = 1.1; EST_HUMAN HIT: BE799992.1, EVALUE 1.00e-100; NT HIT: gi13639211, EVALUE 1.00e-117; SWISSPROT HIT: P17930, EVALUE 4.20e-01
gcccgaaggactcggcactggaggagcgggagcggccactcatgaagatgttcaggaacttcttggagaaatggacgtcgggttcgtcaggcgtggagtccttggagaggcaggcaggaggctggggccgggaggcctcctcatattcctctccgatggctgactcatagggcgaggagacggaggcacagttgtcgtagacgatggccgagtcactctcgtcactgtagtctctgaagcacggccgcaggctcaccagctccagcagcgtgggctgttggtggaggtgcctcgatctgtggtgggggcggggctgctctgggggggcagctcatcgctcaggcaaatgggttcatgcggtggtgtctgctcccctgtcttcaggggtgaggatgatcgagacacccgatcctgccaactgtactttttgcccagagaattattattcagtgtgtcctgagacaactgcacctgcggaaagaggttgagcgtggtgggccgcttgggccggtacgtgtc

SEQ ID NO: 7275 - DNA, 500 bp, Homo sapiens
  MAP TO AL121907.2; EXPRESSED IN ADULT LIVER, SIGNAL = 2.5; EXPRESSED IN FETAL LIVER, SIGNAL =   2; NT HIT: gi15595198, EVALUE 4.70e-01; SWISSPROT HIT: Q48919, EVALUE 2.00e-04; EST_HUMAN HIT: BE062855.1, EVALUE 1.00e-104
tcgggccccatctcaccaaccaactatcggcagaggatgcaccagtttctctatgaggaggaggcggctcagcagcagctggtggccaagtgagctgggggcaacaggagcagctggggtagcaggagcagctggggcaatgggagcggctggggcaacgggagcggatgggggcgtggacttggcagcggggctggcagctgtggccccatgagctgacccaggccatcctgccaggctgaccctgcggggccaggtgttcctgaagacggcattgcagacgccagcgctgaacatgctcttcgcgcctccgggagcactgtacgcagaggtccccgtcccctcctccctgatgccagacacagaccagggcttcctgctgggccgggcggtcagcacagccctggtggcccctgtacctgcacccgacaatacggtgttcgaggtgcggctggagaggcgggccagctcagagcaggcgctgtggctgctgcttccgg

SEQ ID NO: 7276 - DNA, 558 bp, Homo sapiens
  MAP TO CHR14.3; EXPRESSED IN BRAIN, SIGNAL = 1.5; EXPRESSED IN ADULT LIVER, SIGNAL = 1.4; EXPRESSED IN PLACENTA, SIGNAL = 1.3; SWISSPROT HIT: O66534, EVALUE 5.30e+00; NT HIT: AJ298878.1, EVALUE 1.30e-01
taaaaatggaacaggtccgccctcacactatcagggactcaagtccttcagcaaatcactcaccctctggagggcactggcaaagaacgcgaaacaagtaaaagggtagtggacattatgtttacaatgtttacaagagatgtacagagtattcgactgagaagtttttccagagactaaagtcccttggccctctggtggtatttcgtcatggatctttccacgcctggctctcccttggctaatgtcgggacaaagcttctcccatgcacattttgctgaagatcacgggacttttcttttggctgcgtacgtacttggcttcagagagcctggaacacctggcagcgtcacagagacttgcctggagagtcccaggggtctctgtcaaggccttctcctcatccttgtcctcttcctcctcctgctcctcttcttcgccttggactttctcccttttaaagtggctccctagcttacacaagctaaacatttccactctcatagacgaggctctcccatagatttttttactcgaggttctcaagcaaaattgcc

SEQ ID NO: 7277 - DNA, 514 bp, Homo sapiens
  MAP TO CHR18.3; EXPRESSED IN ADULT LIVER, SIGNAL = 1.2; EXPRESSED IN PLACENTA, SIGNAL = 1.4; EXPRESSED IN HELA, SIGNAL = 1.3; NT HIT: AF223391.1, EVALUE 7.60e+00; SWISSPROT HIT: P07947, EVALUE 3.20e-01
cagcagttcccttttcttgggagatgtatgcacctcatgaggcttgttgagaaatagaagcaagcaggactcttgggaaagggtcattcttagtcctgcatatcaaagtgatgtgacgtttactacctatccataatgtgttggacaccatggacaataaagaggagagacgtggccttttgcctctgggaatttcacatgtaataaaaaatagatttttcaaacagcggtgtatttgcataaaagaaaaatatcagccaacctacaaactgcctcctctctcacccgcagaatttccacaggcacaatagagggcactacgtgccagatgtactgtgagccctctcttccttctgtctggtggtgttctaggttcagtactggcaaagcttcaatggtttccaaataaggtcgggaacgcccctctgcccccacctctttccgtctgtgcaagtgaagagaacttgtatgaagtccctttcctttgtcctgcagaaaaggttggggatgaggt

SEQ ID NO: 7278 - DNA, 587 bp, Homo sapiens
  MAP TO CHR18.3; EXPRESSED IN HEART, SIGNAL = 1.8; EXPRESSED IN LUNG, SIGNAL = 1.3; EXPRESSED IN FETAL LIVER, SIGNAL = 1.6; EXPRESSED IN BRAIN, SIGNAL =   1; EXPRESSED IN ADULT LIVER, SIGNAL = 1.1; EXPRESSED IN HELA, SIGNAL =   1; NT HIT: AL163218.2, EVALUE 3.60e-02
aatggaaattcctgtccagcacttgacagagtaggccatacaggtatgtttatagctaattttcttatatattaaagtctgtgcatccttttataagctggaagttgctactaggtaaaaggcggtatattaattagaccccataataagatatttaaactctaacatacttccttttagtcaaattttgataaaaacaacttttgggaaggcagaaaagaaaaggaaatatgggcccagttgcatgtcgtaaatgaaaaaaattcttcagtcatttaaagagattaaatcatgttctctaaagaggacctatatttcaacctttgagacattgcttcacagatgaaaagtttttaagcaaaaacaaaaaattttgtgttaaagttccccaaatagaagcacttgcttgtatctgagtgtgtcctgcagttggccctcctgcgcctctcctcccagcacagcctccatcaaacagaagattaatatttcagaagttgtcatgagcagttccgtcgactctgtcgctgccgatgtctgacaagctatttatcatgtcgctaagtgccagcattaaattatccccgctg

SEQ ID NO: 7279 - DNA, 531 bp, Homo sapiens
  MAP TO CHR14.3; EXPRESSED IN PLACENTA, SIGNAL = 2.9; EXPRESSED IN HELA, SIGNAL = 2.6; EXPRESSED IN LUNG, SIGNAL = 3.2; EXPRESSED IN FETAL LIVER, SIGNAL = 3.2; EXPRESSED IN BRAIN, SIGNAL = 2.2; EXPRESSED IN ADULT LIVER, SIGNAL = 2.5; EST_HUMAN HIT: AI267201.1, EVALUE 1.90e-01; NT HIT: AF234171.2, EVALUE 1.30e-01; SWISSPROT HIT: P09279, EVALUE 1.70e-02
aggagaggaatgcacacaggctgaagggagagaagagacaaaatggacatagcacgtctcacaagccaatgggaggagctgggaacccagcattagctggaaggtgctcaccttccctcttgatggttgactcagtgccgacacagactttagctgtcagcctgaaagcaatcagctcatcattgcagcctctttattgtctaaatttttctgaaagcatgagaagccactggcctttcaacagggctaccgaggacctggggaagagaagggcagggaagcagagacagaggccaaacacaagtgcttctgccagcagggttcagagcacatctggcaaccccagctcccagccctgaagcaggcaccaggctacaaggacagacatagaccagggacaaggaaaaggaagggccagccccaaagcccttgggatgccttgtcaacaggccagtgtcctttggaaaacactccaaaggaaacaacaaatgtgagacaaaggatttccttcctcttccctcatgtcggaaa

SEQ ID NO: 7280 - DNA, 583 bp, Homo sapiens
  MAP TO CHR16.3; EXPRESSED IN BONE MARROW, SIGNAL = 1.7; EXPRESSED IN ADULT LIVER, SIGNAL = 1.7; EXPRESSED IN HELA, SIGNAL = 4.8; EST_HUMAN HIT: T09054.1, EVALUE 0.00e+00; NT HIT: gi15317796, EVALUE 2.00e-74; SWISSPROT HIT: P02457, EVALUE 1.20e-01
aggtgtctggtttgtagcggccgaagatgggttttctggaacaatatggaggaagcgctcacgaggggtctcagtgaggagactgagatgaaggaagcacccaggaacacgtccgcccctcagtctcccatggccacatctggaccagggcccaggacacggagccgacgtctggggcaaggggcaagtaccagagacaggcaagaagcccgggcagcagcacacggcctccggccccacccccagcgctgtctcctcgccagccaacgggatgtgcccgggatgccgggaaggggtgcagcacctgcgcggtccttggggaaaccctgtacctcaggacatgggctgccttgggtgtccagcgaggcgtcagctcctgcccgtccagcagcacgaaggcctctgagcccacaagaagcacatctgcaccggcgttccctgggacatgcatcaggtagcgcactgctccagagctagacaggagagtgggagaaaggggcgccgggtccccggggcggcctcaggcacccagtggaggctctggcaccgcccgtctcagggtgctcctcttaggcccccataa

SEQ ID NO: 7281 - DNA, 507 bp, Homo sapiens
  MAP TO CHR19.3; EXPRESSED IN ADULT LIVER, SIGNAL = 2.1; EXPRESSED IN PLACENTA, SIGNAL = 2.1; EXPRESSED IN HELA, SIGNAL = 1.5; EXPRESSED IN HEART, SIGNAL = 4.8; EXPRESSED IN LUNG, SIGNAL = 1.7; EXPRESSED IN FETAL LIVER, SIGNAL = 4.4; EXPRESSED IN BRAIN, SIGNAL = 2.1; EST_HUMAN HIT: AA205278.1, EVALUE 0.00e+00
cacctagaagtgttcccatatgactaattgtttactacatgatttttaatgaaaacaatacaataatagatatattttcataaaggagtagatacttttgctttttttattgaggtataaaatgtaagtaccttaaaatttccttcccttatatgaacactgtgtttgagtaattttgctggatttttcaaacacgtagtttcaaaaaccaagtgagtaactctaacatggaaactaaagcttgagcccagtgtctcagagctaaggctaatattgagcctacaaaaggaggttattaaaggaccagctagtttatttatgggggatgctcccctgcagatgtccagtctgctcaccccagccatggaagaagcctttctgctgacagagccctggaaagctgaggacccacaggcaaatgcagttaaggttaagatgaaaggggactgagagggtcttactgatgataaagttgttattgttttgaggcagtttctaggctttgga

SEQ ID NO: 7282 - DNA, 538 bp, Homo sapiens
  MAP TO CHR16.3; EXPRESSED IN LUNG, SIGNAL =   9; EXPRESSED IN FETAL LIVER, SIGNAL = 6.5; EXPRESSED IN BRAIN, SIGNAL =   8; EXPRESSED IN HELA, SIGNAL = 9.2; EXPRESSED IN HEART, SIGNAL = 4.4; EXPRESSED IN BONE MARROW, SIGNAL =   7; EXPRESSED IN ADULT LIVER, SIGNAL = 6.9; EXPRESSED IN PLACENTA, SIGNAL = 8.2; EST_HUMAN HIT: BI765770.1, EVALUE 0.00e+00; SWISSPROT HIT: P15396, EVALUE 2.00e-04
ctattttctcaggccctcccacccccaggccccatcctggggcagtactcaccggtgaccagggtgaagtggcaggggctggtcatggtgacaaaggcgggggtcatgtagcgtgccttcaccccatctcgggccatggcgtccaggttgggggtgtccacgtcctgctcgtagttccagcggaagctgtcgaaggacaccaggagcagcttgttccgggagccctgactttgtaccggtgccccggccctgggagccaggagcgtgggcagagccacagtgaggaggacggtcgggcctctcatgctgggccttccagatggacaggcacacagggtgcacagggctggctcctgccgaagagggcaaagtcccagggtcacctgggctgatctcatcccgtgtgtctttggaatgtggctgtgcacatccccgggtcatacctccggagtgggctccccagccgtgtcagtgccacccctggacccagcctcaagtgcgtgggacggcatcaacttgagcatctgcctttattgcc

SEQ ID NO: 7283 - DNA, 525 bp, Homo sapiens
  MAP TO CHR16.3; EXPRESSED IN FETAL LIVER, SIGNAL = 1.5; EXPRESSED IN BONE MARROW, SIGNAL = 1.4; EXPRESSED IN ADULT LIVER, SIGNAL = 1.4; EXPRESSED IN PLACENTA, SIGNAL = 1.4; EXPRESSED IN HELA, SIGNAL = 1.5; SWISSPROT HIT: Q95209, EVALUE 8.40e+00; EST_HUMAN HIT: BF509789.1, EVALUE 1.00e-106
aggcactgtttcacacctccttacaactccagatcaaagcgtttcaacattttattatgaaatcatggaaatcctcctctagtttgcatatgaattgtagccttttttaaaactgcctatgtaccccagtgacagtggcttttgaaccgcaaaagggaacaaggtgttagatatttattccttgaaggctgtgctagccggataatcttgccgaatgcttttcgccagggtactgtccaagatccagcaaacacaaaagcttgcaggtggggggaccctccatgtcacgcagaggccaacgatttctccttctcttgtcaggaaacaaaatgtggtgtgaaagcttccctgtgggagagaagaagaaagaaaagtttatgcaccttgcaatttcaagctaaacaaaaaaaaaaagccatctttgccttcctaaaataaaataaaatccttacccagtggttggagtggtggctgtgtttactataggtgatggcctctgaggtgtcactcagatttttgcccaca

SEQ ID NO: 7284 - DNA, 578 bp, Homo sapiens
  MAP TO CHR18.3; EXPRESSED IN LUNG, SIGNAL = 1.9; EXPRESSED IN BONE MARROW, SIGNAL =   2; EXPRESSED IN ADULT LIVER, SIGNAL =   2; EXPRESSED IN BRAIN, SIGNAL = 2.2; EXPRESSED IN PLACENTA, SIGNAL = 2.1; EXPRESSED IN HEART, SIGNAL = 2.5; EXPRESSED IN HELA, SIGNAL = 2.1
acatttggtttggacttgccatggattctagaaagtatagttcataggaaagaaagagatttttcaaatttctctgggtactaattttttgtgatctagtcctggtaaagtagatcaaatgcttcccatatattccaggagaactcaggatatgaattggagtcacggtcagatcatctcttctgggtctactgtctatgagaagaagggagaaggagatagaactagaaagccaaaaacaaacattctagtcattctccacccctgcctcagggccaacaataaggtattgggaaaagagggatttgaaacatctaaagaggtatgaaggaaccacagaatattagcgtaagtagcacacttatcatgagttacatgggaaagctaaacaagagcaaagatttttgtctcaaagcacatctaacatagcatggaatatgaagtggtggcagtgggcatttaggtaatgaagctgaatcagatcccatcatctttgactttgccttatacaatatttatggaatcgagaagtttgatccgttcttttgaaaaggtatagaggagctggagagagaggg

SEQ ID NO: 7285 - DNA, 580 bp, Homo sapiens
  MAP TO CHR14.3; EXPRESSED IN HELA, SIGNAL = 1.4; EXPRESSED IN PLACENTA, SIGNAL = 1.2; EXPRESSED IN BONE MARROW, SIGNAL = 1.6; EXPRESSED IN BRAIN, SIGNAL = 1.1; EXPRESSED IN ADULT LIVER, SIGNAL = 1.1; SWISSPROT HIT: Q08392, EVALUE 9.60e+00; NT HIT: gi14749539, EVALUE 0.00e+00; EST_HUMAN HIT: BG955187.1, EVALUE 0.00e+00
gcacattgtgtttttgcaggatatgaatatagaatatgcgtgatttctggagtttgctacaatttgttaatgaatattctaaggcaaatccatcacatactttcaattgcaataaaatatgtatttttttctaaatcttatgtgtccttgcattcatttttcccactttctggttttccccctttgtaaagctctctctctctctctaaggtacctactgtcaacaacgggaagtggaggccattactgaaggtgtagaggaagatgaaggattttgctgttgtgaacctggccatattcctcacatgctttcatttaatgctgcatttagccagcgatggctagcttgggaagtgatagtcacaaagtacattctggagggttatagcatcactgataacagtgctgcttctatgcttcaagtctttgatcttcggaaagtactcaccacttactatgtcaaggtaggagtatgtgcctacttagatctttagataatcagagtttcttcttgggaatgacatatataagtatatatatatgtatatacttttttttaacgtatgctttgcttccaagt

SEQ ID NO: 7286 - DNA, 576 bp, Homo sapiens
  MAP TO CHR16.3; EXPRESSED IN BRAIN, SIGNAL = 4.9; EXPRESSED IN ADULT LIVER, SIGNAL = 2.7; EXPRESSED IN HELA, SIGNAL = 2.5; EXPRESSED IN HEART, SIGNAL = 2.7; EXPRESSED IN BONE MARROW, SIGNAL = 3.1; EST_HUMAN HIT: AL539381.1, EVALUE 0.00e+00; SWISSPROT HIT: P34036, EVALUE 9.50e+00; NT HIT: gi14778274, EVALUE 0.00e+00
tgggttccattttcttggagcagcctattagttctggtggggttgccgtgtgtcggatgcagccctgaggggcagctcgtgcctgcagcccggcagctcgttctcctgttctgctgtgctgtgggctggcactcgatacctctggcaagaggatgattatctacctcactgataagaggcatcgcatggacgttctctggtctgtagtggagacaagcagttaacctagcaccatcctcatcctccctgcagaagccattagcagacctttgggccagggcagcctccctataattttcttcatctcttgctaatctctataataaggttgctttttctttcttagttgagtaaacaagtaagccacagtgtttgaaagggaaaaaccatattgccttgtgtgttgcttttcccagtcaaaagggtctgaccttagaaagtccccaccagtgatgctgagtgttctgctatggaaacaatgctgcttttctctcagctgtccaaagttcagccgttcctccttccccttctcccagtgcgtttgactttgtcaggtcagcctcacttgtccctttc

SEQ ID NO: 7287 - DNA, 537 bp, Homo sapiens
  MAP TO CHR19.3; EXPRESSED IN BRAIN, SIGNAL = 2.9; EXPRESSED IN ADULT LIVER, SIGNAL = 2.8; EXPRESSED IN PLACENTA, SIGNAL = 3.6; EXPRESSED IN HEART, SIGNAL = 3.2; EXPRESSED IN LUNG, SIGNAL = 3.9; EXPRESSED IN FETAL LIVER, SIGNAL = 3.1; NT HIT: M14949.1, EVALUE 0.00e+00; EST_HUMAN HIT: AA315712.1, EVALUE 2.00e-56; SWISSPROT HIT: P10301, EVALUE 6.00e-30
cctctcctgaggacacttgcatgctaggccctctgctcggtgatgccggggaccctgaaggtccagtttgggggtaacccatctaggtgagctgtgtgacagtggcagtcgcagcactgcaggaacagaggaggatgctgatgggggacaggtgtgctggaaggagcctcccagactgagatggggtccccagaaagaggggtgtcccgaacctggcgctgtgactccagatctgccttgttcccgaccaacacaacggggaagtcgtcgcggtccttgacccgcagaatctgcgtgaagagcttgcccacctcgttgaaactgcgagtgaagccggaggcatgaggtccagccagctgcagagcccaggtcctccccacacccacccactgctccgccaccagcaacccctgtcacctctgccggtcgttaatggcgaacaccagcaggaagccgtggccagcacgcatgtactgctctctcatggccccgaactcttcctggcccgcggtgtccaggactgcagagacagggaga

SEQ ID NO: 7288 - DNA, 522 bp, Homo sapiens
  MAP TO CHR14.3; EXPRESSED IN PLACENTA, SIGNAL = 1.2; EXPRESSED IN HELA, SIGNAL = 2.7; EXPRESSED IN HEART, SIGNAL = 1.6; EXPRESSED IN LUNG, SIGNAL = 1.4; EXPRESSED IN BRAIN, SIGNAL = 1.6; EXPRESSED IN ADULT LIVER, SIGNAL = 1.2; NT HIT: AY052369.1, EVALUE 0.00e+00; EST_HUMAN HIT: BI091884.1, EVALUE 1.00e-109; SWISSPROT HIT: Q28651, EVALUE 5.00e-34
cagtgctctcaacatggtttgaaagagttaaaaagcataaaaacttcctcataccaaacatataatatgaccagcgactagctgggttttttcgttttattttctttaaggaatagcctttgtttaccccacccatctccttttttcttgaatctctattcaaaataaaaatagaagaaagcttaaatgtgtttcacaataactttgggttaagcacttttgtgatcaatatactttgctttctgcttttcagatgttcctcctgctgatcaagagaagctttttatccagaagttacgtcagtgttgcgtcctctttgactttgtttctgatccactaagtgacctaaagtggaaggaagtaaaacgagctgctttaagtgaaatggtagaatatatcacccataatcggaatgtgatcacagagcctatttacccagaagtagtccatatggtaagtgattacagtttaaccagtgtgtcccagttctgatttataaacaggacaggccaagatctctga

SEQ ID NO: 7289 - DNA, 576 bp, Homo sapiens
  MAP TO CHR14.3; EXPRESSED IN PLACENTA, SIGNAL = 2.4; EXPRESSED IN HEART, SIGNAL = 3.1; EXPRESSED IN LUNG, SIGNAL = 2.3; EXPRESSED IN BONE MARROW, SIGNAL = 4.4; EXPRESSED IN ADULT LIVER, SIGNAL =   5; SWISSPROT HIT: P17350, EVALUE 2.50e+00; NT HIT: gi14748462, EVALUE 1.00e-91
aggtggattacaaagccctgtgtaaaggagagtgatagtctctttaattccttttgcaaagccataactgctgtgaggaccaatgttgctaacctcagcgatgcagccttatggaagatcaagagagctcgctttgcaagaaaccgccagaagagtgtacgttccctgagggacagcgtgaaagggcctgtggaatccaagagggcgctctccctccatgagaccctgacctccaaaattcgttgagtatcttctttcatccttccgttaaatctgtttaatgtctttctgaggctgacttgtcttgttgaatgttcacagagagtatagcatgtttagcaaactgagtttgttcaataagtttggctttcagattccctagagaatcacttcaggggtataaatgcctagggttgcttttcctagtttgctggggtagcaaagccctgatccaacagtagatgtttttgaaatgtaaaaggcagcaaatgcattgatgcttggcatgcaacttagaagaaacatttgctcctaagtcctaggacaccaaagtttgcaccaccagccttgtatcct

SEQ ID NO: 7290 - DNA, 549 bp, Homo sapiens
  MAP TO CHR18.3; EXPRESSED IN BONE MARROW, SIGNAL = 1.3; EXPRESSED IN FETAL LIVER, SIGNAL = 1.8; EXPRESSED IN ADULT LIVER, SIGNAL =   1; EXPRESSED IN PLACENTA, SIGNAL = 0.88; EXPRESSED IN HEART, SIGNAL = 1.5; EXPRESSED IN LUNG, SIGNAL = 0.99; EST_HUMAN HIT: BE695018.1, EVALUE 4.90e-02
aattcatggcatttgtgcagcggttacttgggagttgattttgagtggcacactcattgataatacaaataacgtctgaagagaggggaggaacatccatctgggttagcctggatctacaaatatgatagaggctgagagggctggaatgggacagggaccttcctgtccttacataaagtcaagatggtgaggaagagagaagaggagattgatcttcttgatatgctctttttgattgtctgtctttagctactctttataacttatccatcaacagactacatactctatgatgagcatgatgccacactttgggatacagagtctatttcaagtaatctgttctctgacgtctttaaatatctagatatagacatagatagattcatccgttccagtgtatggttgagaaaatgtggaaatggtaatcgtatcacattgcaagagtgtcttcctactgcagatggtattgtcctttctgtacaaaaactgaccaactgactcctacagaagtatctccaaaacatatttttggaaacaggaggg

SEQ ID NO: 7291 - DNA, 554 bp, Homo sapiens
  MAP TO CHR14.3; EXPRESSED IN FETAL LIVER, SIGNAL = 3.1; EXPRESSED IN LUNG, SIGNAL = 1.7; EXPRESSED IN BONE MARROW, SIGNAL = 1.7; EXPRESSED IN BRAIN, SIGNAL = 1.7; EXPRESSED IN ADULT LIVER, SIGNAL = 3.7; EXPRESSED IN PLACENTA, SIGNAL = 3.6; EXPRESSED IN HELA, SIGNAL = 3.1; SWISSPROT HIT: P04821, EVALUE 7.90e-01; NT HIT: gi14748798, EVALUE 1.00e-104; EST_HUMAN HIT: BE178092.1, EVALUE 1.00e-104
aaaccgtatgccatcacaccttccaagcaaataatcattttgtcaagaaataagaataaatctagagtaagaaagccttaattttctcttgcccatttttttccaacatacatttcttcctttccatgaatttacttattggatccataatatcatcatcatttttagttttgtcagatggagacactacagcttctccatcttccatgtcatcttcatctgtgttaaaccacatctcttcttcatcttctagtgttctggcatctcttcgatatctgtgattcctcaaaatggaacgcatactatgagtagggaagaaagagtaaatacaatcatatatggacttaattgtactgttacagatgacttattaaacttgttaacatagggaattaacatgaaatttacaaatattaaagtatcaatgtaaatccaggtatttagattaatgtacaaaattttaaataataatttgtaaccttagtaacttgtaaattcaaagcaagtaatataatcctctgattttatttggaacacatgaagcctcacttcca

SEQ ID NO: 7292 - DNA, 571 bp, Homo sapiens
  MAP TO CHR18.3; EXPRESSED IN HEART, SIGNAL = 1.5; EXPRESSED IN LUNG, SIGNAL = 1.2; EXPRESSED IN BONE MARROW, SIGNAL = 1.7; EXPRESSED IN FETAL LIVER, SIGNAL = 1.5; EXPRESSED IN BRAIN, SIGNAL = 1.5; EXPRESSED IN ADULT LIVER, SIGNAL = 1.3; EXPRESSED IN PLACENTA, SIGNAL = 1.2; SWISSPROT HIT: P35549, EVALUE 1.90e+00; NT HIT: X87344.1, EVALUE 8.50e+00; EST_HUMAN HIT: BF031724.1, EVALUE 8.00e-01
atatgtggttcctgcaagggcctgatttgctgttagctcccttggcctaggaacgagaggctcttgactttatcccaagagggcttatctaacatgctggtagactttaccctgaatgacaagatctctatgcaggcgtatggagccaaggagaggtgggctgtcacgggaggctgggggcagagggcagtctagaagggatgaaatggtagtggtttgccaaggagaaaggggtgctaagggattcagaacaggtacagggcttggtggcaatacccagagagcagaaggaggagaaggagctctggccttccaccccgtgtggccttacagcctgccttggagggtcgtggcctagctccaggaccaagcacctcttccctcaggcactctgagcacccgatagcatttacaagcaatattttgcatgctggtaactgggtttgtgcagttatgctgtggcctggggtaagacttcccagttgctagcagcaatgcctgtggtcacacaggatcagaggccgagggagcaccactgcccttccctgcaggttccccagctacgtggtta

SEQ ID NO: 7293 - DNA, 543 bp, Homo sapiens
  MAP TO CHR14.3; EXPRESSED IN ADULT LIVER, SIGNAL = 2.6; EXPRESSED IN PLACENTA, SIGNAL = 1.7; EXPRESSED IN HEART, SIGNAL = 2.2; EXPRESSED IN HELA, SIGNAL =   6; EST_HUMAN HIT: BE793662.1, EVALUE 0.00e+00; SWISSPROT HIT: P23023, EVALUE 7.70e-01; NT HIT: gi14750860, EVALUE 1.00e-105
ttatccctggctctcacctgatcatcatcttcctcttcctcctcctcgtcagtatcctgacaggctgtctacaagaagtagctcaacttagcggagctttcacgccccttctcttttcatgggggtagggggtggacttgtagccagtccccaaccgaggcccagcacctctccttcccgaagcccacctgccctgctcaccttcctctgcagcacagccttgagcacgccacagagctcagcgaggcgcccagggggcttcagtgtgagggtcccacagctgcggagcacccctgtcagggcctccagcacggccatcaccacctggcgttcccgctccctgttcactgcctgcatgtaggatggcacgactcgggccagggcagcctgcaaagctggggacattattggctgaagcaccagtcaggccctgcccctccccaagaacccccagcctggcccagcctctcctcaccagcagtgttgggttccgaggggcagctttgacaggccttgtgcagtgcacagcaaaactgacccaga

SEQ ID NO: 7294 - DNA, 597 bp, Homo sapiens
  MAP TO CHR14.3; EXPRESSED IN FETAL LIVER, SIGNAL = 2.3; EXPRESSED IN BRAIN, SIGNAL = 1.7; EXPRESSED IN ADULT LIVER, SIGNAL = 1.3; EXPRESSED IN PLACENTA, SIGNAL = 1.5; NT HIT: gi13654882, EVALUE 7.00e-53; EST_HUMAN HIT: BG476546.1, EVALUE 3.00e-90; SWISSPROT HIT: Q02388, EVALUE 3.00e-01
aaggcgtaaagggaaagctctaagtagcgcatcctgggaaatgagcagatcagggaaggggtgttagacctggtattatgtctaaagacgattttcatttaaaggaggatcttcccccgggcagctcaaggtcacatcgtaaataccttatagtctaattcagtgtcccaaaacaggaccccgactccccagatccgggttgggggtggctcagggcctaaagttcctaccctcgcccaggtgacaccatctccaggaaggtctgcacccgacccggcgaagcgctgtcccgcttcgcaccccccactgctccaggtacgtgcggcggcctcctcgggagaccccgccactttcctggagcgtagcctgccaccccccgtccgggaaccccggattctcacggcagagaacagacaccatacttaagcacaggctctcgcatccgacatcagtacaaggctgggggttgttgggggacggttgagccttgggagggagggtcagggtctggacaggagccgcggccgccagatgggaaagaacacgtgggagcagtaatgtcaagtgacacttaaacccttagacgccgattcgtta

SEQ ID NO: 7295 - DNA, 545 bp, Homo sapiens
  MAP TO CHR14.3; EXPRESSED IN HEART, SIGNAL =  21; EXPRESSED IN HELA, SIGNAL =  25; EXPRESSED IN LUNG, SIGNAL =  18; EXPRESSED IN BONE MARROW, SIGNAL =  33; EXPRESSED IN FETAL LIVER, SIGNAL =  25; EXPRESSED IN BRAIN, SIGNAL =  40; EXPRESSED IN ADULT LIVER, SIGNAL =  25; EXPRESSED IN PLACENTA, SIGNAL =  27; NT HIT: U62293.1, EVALUE 2.00e-13; EST_HUMAN HIT: AA831527.1, EVALUE 9.00e-10; SWISSPROT HIT: P39195, EVALUE 2.30e-02
tcccaaagtgctcggattacaggcgtgagccaccgtgcccggcctatttgcaccttttttacttcatatgagtgcacacttgggttcttcatttaagttgaagaaaagaatgtacaggtttttcgggtattgtttattgtggaagcaaatttctacagctttttcacttttcttcttcctccagcagccctctcctctctgcctctgaggggagaaagggaatgacatccaggacaagaacaaagaatagaagaggaaaggtgctgctacaagttggaaagaagcagacagaggcacgtggttgagtaagaacctgggggatggtgaaggagagcagtcaatggtggagtgcttaagaaactttgatgaaacttctagttatattgagagaggttctctgccaagtcagtgattagttggcacctttggtattacctttgagcaggaggtacccctccttggggtaaaggccatcactgctcaaagagctcttgtctaaattcccaaggcagctccatgatgagaggagaccatcatccttggaa

SEQ ID NO: 7296 - DNA, 500 bp, Homo sapiens
  MAP TO CHR14.3; EXPRESSED IN FETAL LIVER, SIGNAL = 1.2; EXPRESSED IN ADULT LIVER, SIGNAL = 1.4; EXPRESSED IN BRAIN, SIGNAL = 1.9; EXPRESSED IN PLACENTA, SIGNAL = 1.5; EXPRESSED IN HELA, SIGNAL = 1.7; EXPRESSED IN LUNG, SIGNAL = 1.6; NT HIT: Y08017.1, EVALUE 4.70e-01; EST_HUMAN HIT: AA948040.1, EVALUE 1.80e-01; SWISSPROT HIT: Q9Z7I4, EVALUE 6.00e+00
tgagttcttccctcagctgtcttctttattgaatacagagaatacctataaattctcaccccctttcaggatttcactgattctcaggtcaatagctctatcttacatcctgtcttctgtttccagacctgcactaaagctgcaaactgacatctctaagtgaaactcattttctttgtctccgaaatactgtggccttggtaagtgttcagtatgagctaatgtgcagacagggaaaggaagtctccctgcaggcctgggacaatgatccctctaccccaaattttccacctttccctgacctcccccaccacccaccctccccaccacctgtagctccccaccatcacagttatggagcaagaagccatgttgatcaaaagaaaaggtgagagagaactaataaacccagaaagaagggttggtaggatgcaagagcaggagcttgggcagcagaacatgacaactcagtgtgtgccgtgtgggtattgatgatttca

SEQ ID NO: 7297 - DNA, 559 bp, Homo sapiens
  MAP TO CHR14.3; EXPRESSED IN HELA, SIGNAL = 2.1; EXPRESSED IN PLACENTA, SIGNAL = 2.2; EXPRESSED IN HEART, SIGNAL = 2.3; EXPRESSED IN FETAL LIVER, SIGNAL = 1.9; EXPRESSED IN BONE MARROW, SIGNAL = 2.9; EXPRESSED IN LUNG, SIGNAL = 2.4; EXPRESSED IN BRAIN, SIGNAL =   3; EXPRESSED IN ADULT LIVER, SIGNAL = 3.2; SWISSPROT HIT: P22199, EVALUE 4.00e+00; NT HIT: gi14767295, EVALUE 8.30e+00
tgaaaggtcacatccagcactggaaagcgctggagggtgatgtgttggtctcagtgtaacctgcatttgcatgtggatttcaagcatcctcctaaacaagccaaatgtccaggaatggatagactccacagtaagattttgtgattttggtgtctaaagctgtcttcattttttttttttttattccacctcgtccacccactccagccagctgaaattccctgtgccaaaagtatggagagaagatgtcaggaacgtgtgagaactcccccagacggtcttttggagtcaccctgccctccagacaattttggtgccggctgcctccaggaacctgactctctcagtctcttactgtttcgctccgtgggtcaagtctctgcaaagccttcacgctgagccttgccttgcaggcagcctttgtgaggcagtcatcatggctcagctaactgcagcaggaagaggcagacatggagctaaaagcacagcagctgggattccaggaaagcaggaagttctgcagttagcatcaggttagtctaccagcgagagtggagct

SEQ ID NO: 7298 - DNA, 584 bp, Homo sapiens
  MAP TO CHR18.3; EXPRESSED IN FETAL LIVER, SIGNAL = 1.6; EXPRESSED IN BRAIN, SIGNAL = 1.3; EXPRESSED IN ADULT LIVER, SIGNAL = 1.5; EXPRESSED IN PLACENTA, SIGNAL = 1.3; EXPRESSED IN BONE MARROW, SIGNAL = 1.7; NT HIT: AF324836.1, EVALUE 3.60e-02; EST_HUMAN HIT: BF208832.1, EVALUE 8.20e-01
cctcttgccctagcactccttataatgacagataaaagctcttctattactcccatattatgccacaaatttagacaaatccatttgtttttgttatttaggaacatgcaaccagatatcccaggtccaaagaacatcgaaaaaatctttgcaaatgccacacactttctttttatcaccatcataaaatcaataaaaataaccatcagaatggctttagcaatccagaatatgcagaccatgtgtgcagtacaatgacctattgtctctggataaattaggtacaaatatcctcagattagtttgtaaaagcttcagagcactgtcttcaaaaggtgcttgaactttaaagatatgaagtgagaaaaagcaatgtagaaaaatcctgacttcaaaaccagactttggtcctttctctttttttcttttttagtaataaactcagaagagttttctgttagaggaattttcaggaacacattttagttggcctctgtttatgtctttcgtctttatccagggcaaaaatatctctcttatattttccagcgaaattctcccaaccctccagacttgggtcacat

SEQ ID NO: 7299 - DNA, 593 bp, Homo sapiens
  MAP TO CHR19.3; EXPRESSED IN HELA, SIGNAL = 5.1; EXPRESSED IN HEART, SIGNAL =  49; EXPRESSED IN FETAL LIVER, SIGNAL =  40; EXPRESSED IN ADULT LIVER, SIGNAL = 4.8; SWISSPROT HIT: Q05481, EVALUE 7.00e-58; NT HIT: gi16163770, EVALUE 7.00e-90; EST_HUMAN HIT: AW272732.1, EVALUE 7.00e-97
tgtgaagagtgtggcaaagctttcacagactctgcaacccttcctaaacataagagaattcatactggagaaaaaaaccatacaaatgtgaagactgtggcaaagcttttaacgaatcctcaacacttactgcacataagagaattcatactggagagacaccttacaaatgtgaagaatgtggcaaagcttttaaccattcctcacaccttactacacataagagaattcatactggagagaaaccatacaaatgtgaagaatatggcaaagcttttagccaatcttcatcacttactaaacataagataatttatactggggagcaaccttacaaatgtgaagaatgtgacaaagcttttaacctatctgcaagccttattaagaataagaaaattcataccagggagaaactctacaaaaccagaaagtgacaatgattttgacaacacctcaaaccttttctaaatataaaagaaattgtactggtgacaaatcctagaaatgtgaagaatgtgacaaaacctttaaaagattgtcccacttatttttaagtaagataatttttactggagaaaacacctacaagagtg

SEQ ID NO: 7300 - DNA, 588 bp, Homo sapiens
  MAP TO CHR14.3; EXPRESSED IN BONE MARROW, SIGNAL = 1.9; EXPRESSED IN BRAIN, SIGNAL = 2.6; EXPRESSED IN ADULT LIVER, SIGNAL = 2.1; EXPRESSED IN PLACENTA, SIGNAL = 1.7; EXPRESSED IN HELA, SIGNAL = 1.7; EXPRESSED IN HEART, SIGNAL = 2.1; EXPRESSED IN LUNG, SIGNAL = 2.5; SWISSPROT HIT: P22506, EVALUE 7.50e+00; NT HIT: AF129002.1, EVALUE 9.00e-03; EST_HUMAN HIT: BI907343.1, EVALUE 2.10e-01
gtcgagctggcagtaggaaggggtggcccaggccctctgataaatcctcaaagttttcctggtaaccatgcaaatgtaagtgaccaaacatagaaggattccaaggtcctggggctgattctcaggcaaacctgtccccagggttgttgttctaggcacctgtaagagcagggtgcgtgtgagggacccagcgtatagcaatagcatgatgctttatcacatgccttggtgtccatgttgcctcctgtccacacagcggcagagactgatcaactcggccaatggtgtgagcagtaagccgcttcaaaacgggaggcacgagaacattgagaacgggaatgttcctgtggaaaaccccgaagaccctcagcagaatcaggagcagcagccgccgccacagccaccaccgccagagccagagccggtggaggctgacttcctgtcccccttctccgtgccgggtgagttctgggggtactggactctcgggctacatttttgggggctccattaggaccaagcccaggtcttcaggatggaggcatggacttgtaagggcggcagagggctggtgcaaagggtcgatat

SEQ ID NO: 7301 - DNA, 559 bp, Homo sapiens
  MAP TO CHR19.3; EXPRESSED IN HELA, SIGNAL = 3.1; EXPRESSED IN LUNG, SIGNAL = 3.7; EXPRESSED IN ADULT LIVER, SIGNAL = 3.3; EXPRESSED IN BRAIN, SIGNAL = 1.5; EXPRESSED IN PLACENTA, SIGNAL = 4.4; EST_HUMAN HIT: AW393076.1, EVALUE 9.00e-53; SWISSPROT HIT: O15444, EVALUE 5.00e-38; NT HIT: gi13630697, EVALUE 5.00e-69
atccagggataaggggtgagccaggaggctttttctttcctaaggctgttcctcagcctctgccgggcctggaagggttgtggtatgagcagacaggtatgcagacaggtgcccttgcctgtggctggccctgccaagttaacatgcaagggtgcgagtatctgggcggctgtgtggttgcaggtgtctttgaggactgctgcctggcctaccactaccccattgggtgggctgtgctccggcgcgcctggacttaccggatccaggaggtgagcgggagctgcatctgcctgctgcgatgtgagtgcggcccgtggggtctgggcgtgtggggtgcacacacagccttgctgccagcctacaccctaacctgggcacccccctctgctcaccacagattctacctccccaagagacacaggaaggtgtgtgggaaccccaaaagcagggaggtgcagagagccatgaagctcctggatgctcgaaataaggtttttgcaaagctccaccacaacacgcagaccttccaaggtgggcaagacctctgctgggcatctag

SEQ ID NO: 7302 - DNA, 576 bp, Homo sapiens
  MAP TO CHR18.3; EXPRESSED IN LUNG, SIGNAL = 1.7; EXPRESSED IN BONE MARROW, SIGNAL = 1.7; EXPRESSED IN FETAL LIVER, SIGNAL = 1.8; EXPRESSED IN ADULT LIVER, SIGNAL = 1.8; EXPRESSED IN BRAIN, SIGNAL = 1.6; EXPRESSED IN HELA, SIGNAL = 1.4; EXPRESSED IN PLACENTA, SIGNAL = 1.9; EST_HUMAN HIT: BI199359.1, EVALUE 3.00e-03; SWISSPROT HIT: Q62066, EVALUE 9.60e-02
ataagggccaccctgagaacagggttcatctcctcaaggagctggaggaagggaatcctggcttgccaaatctagggctgatttttcaaattcccgcctgattccctgacctagtcctttcatggctgggagtgttgctcccatggaaggttcttctcaatgtggagagccaggggcagggagtggggggcagggaagagctgcctggctgctcctgccctcatggagcccacagatgaccataggaagggcactttgtgttccctgctccccacaagtgcatttcttctgagttttctgtttccagtgacacagcttgaggtgactgtagttgatcagtgaggggctaatgtgcttggatgggatgatgcagattgcttacagataatgtagctgtgcctttatatttgaaggtcagtgtcctctgggacgacagcactctaaagaacgtgtttacttccttgtacatgtgtctgtccaggtcccagagcatccagagcaggcctgtgttgaggaagtaccttttgggatggtgggtgacgctgggggtctgcgggatggcaggaaggcagtaaa

SEQ ID NO: 7303 - DNA, 501 bp, Homo sapiens
  MAP TO CHR16.3; EXPRESSED IN LUNG, SIGNAL = 2.4; EXPRESSED IN BRAIN, SIGNAL = 1.9; EXPRESSED IN ADULT LIVER, SIGNAL = 1.5; EXPRESSED IN PLACENTA, SIGNAL = 2.1; EXPRESSED IN HELA, SIGNAL = 2.4; NT HIT: gi14777947, EVALUE 0.00e+00; EST_HUMAN HIT: AW383305.1, EVALUE 0.00e+00; SWISSPROT HIT: Q16651, EVALUE 1.00e-10
tgagtgtctgccatcctctgtccccatctgcccccaaccaccttggagaggaagaagccgcacctccatcttggatgctcccccagcctgagatccagcagtgggtgtttggagggaggtggatagaggcatcaggtaggcagatgggcaggacccgctctgagaactgtatggagcgctcgagacgcaccagggcaatgtctgcacaggcaccttccttccaggaatacacagggtggggctccacccaggcaacacccaccttctgggaccgagagccagggttccccagctgccaggcccccagcagcacagagaacaggtatggtttgttcaggttgctggaaggaaagggaaggggaggatcagccaggcctggtctgggaggaggtacctgggggaacagcatgggtgtgaaggcccctgaaggcaggagaggcttctaggtagaatcgaggggcaccaagattgaacagaggcccggaagcagagcctgtaaag

SEQ ID NO: 7304 - DNA, 503 bp, Homo sapiens
  MAP TO CHR16.3; EXPRESSED IN HELA, SIGNAL = 5.1; EXPRESSED IN HEART, SIGNAL = 3.9; EXPRESSED IN LUNG, SIGNAL = 3.1; EXPRESSED IN BONE MARROW, SIGNAL = 2.5; EXPRESSED IN BRAIN, SIGNAL = 6.8; EXPRESSED IN ADULT LIVER, SIGNAL = 3.9; NT HIT: gi14785654, EVALUE 2.00e-93; EST_HUMAN HIT: BG253127.1, EVALUE 1.00e-91; SWISSPROT HIT: O43237, EVALUE 8.00e-28
cctaggccatgagcaaactgactagtcatgtttcctgcatttaaacttccaatttacatgataattttttctgtcttgacatattcaatgtaccttaatgaatctcaaataagcccaagtctcccttgggaaaaaaacgtcaacagtttctcaaactttcagatggtgactgttcaccacccgaacccagccaagccaacaaccccctggcacacacctttgtgcacaccaccaacaccgggatccccaggttatgagtcagcacattgtcacccagaggcagggcaacattttcttcatcggagcctgaggtcagagggcctcttctctgtggggaaccttgacaaccttcttcaggttccatatagtcttgaaaatctttcacaactgggggaaaaagaggaaaaaaaatcacatgcacataaataaaaatacatgttagctttagaacactgaaaagaaggcaataataagcacaaaacacaggcagttgtgtgtgacaa

SEQ ID NO: 7305 - DNA, 590 bp, Homo sapiens
  MAP TO CHR14.3; EXPRESSED IN HEART, SIGNAL = 1.7; EXPRESSED IN HELA, SIGNAL = 3.6; EXPRESSED IN PLACENTA, SIGNAL = 2.4; EXPRESSED IN FETAL LIVER, SIGNAL =   2; EXPRESSED IN LUNG, SIGNAL = 3.1; EXPRESSED IN BONE MARROW, SIGNAL = 2.7; EXPRESSED IN ADULT LIVER, SIGNAL =   3; EXPRESSED IN BRAIN, SIGNAL = 1.5; SWISSPROT HIT: P56182, EVALUE 1.90e+00; NT HIT: Z74755.1, EVALUE 1.40e-01; EST_HUMAN HIT: AW978688.1, EVALUE 3.30e+00
attccagacacgtccaggtccacctgaatcaaactgggaccctcacatcagagtggcatatcgaatgtacccatcacattttagctagtattataatacatggtcaggcaccattcctagcacaaaaggctcaaaaaaattagtcagctctttctgcttcctttatatgtgtagggagtcacctccttctacctgttaggtctgggctgtaacctaggggagctgagctaggaggtagagaaaattctagataagcagctatgaactgatttgttccctaaaagtcagtttctacttttgcttcccctttaggatgctgctgggccagatcccaagctcatcaacacttcctgtgtagctgtgggagtgggagtcccaaaggaagatgataaagcctctatcctcagtggtactttgccaaacggggactaataacaccaaatgatttgtgttgggactgggagagtcccaggagcaccatgtcagctcaaaccatcgctccaacaattcactatgaccctctgaggtctgacttgtcccaaatagcccataggtttcctgggttacctaccttggacctcaggactcag

SEQ ID NO: 7306 - DNA, 508 bp, Homo sapiens
  MAP TO CHR18.3; EXPRESSED IN ADULT LIVER, SIGNAL = 1.3; EXPRESSED IN HELA, SIGNAL = 1.9; EXPRESSED IN FETAL LIVER, SIGNAL = 0.86; EXPRESSED IN BONE MARROW, SIGNAL = 0.93; SWISSPROT HIT: Q06136, EVALUE 2.00e-11; NT HIT: gi14761872, EVALUE 2.00e-46; EST_HUMAN HIT: AV691456.1, EVALUE 3.00e-46
tatcagcatggatttgctgctgagtggtttttcttctctgtttcttaatgcctgctctgctacatttttctaggcacaggagaaactgggtccagtggacatgctggtaaattgtgcaggaatggcagtgtcaggaaaatttgaagatcttgaagttagtacctttgaagtaagtaaaaatgtttgctcactgcagtagcacatatgctaaaagcagagcaagctacgggtaaaagctttaagaatcaattagatgaatgcattcagatgtccatggaagctttagaagactctagaggaaggctgaacaaggtgaagctgaacaaggttttcatcccagtgtcaggaccattgaagcttaagagtttagacattttacagctgagaaaaccagctaaaatgggaatggaccttctaatctgacacagattactgtagcagttcactgaggtcatattttcaagagaacactttgtaacctaagagatgccggatgttcctatcaaac

SEQ ID NO: 7307 - DNA, 547 bp, Homo sapiens
  MAP TO CHR19.3; EXPRESSED IN HELA, SIGNAL = 2.9; EXPRESSED IN LUNG, SIGNAL = 3.1; EXPRESSED IN FETAL LIVER, SIGNAL = 2.5; EXPRESSED IN BONE MARROW, SIGNAL = 3.2; EXPRESSED IN BRAIN, SIGNAL =   3; EXPRESSED IN ADULT LIVER, SIGNAL = 5.3; EXPRESSED IN PLACENTA, SIGNAL = 2.7; NT HIT: gi7705906, EVALUE 6.00e-50; EST_HUMAN HIT: BG709476.1, EVALUE 2.00e-57; SWISSPROT HIT: O15265, EVALUE 5.10e+00
cttgtttctgctgaggctcctgaacccccgttcgtggcttccggagcaaactccacgactgacagagccattcctcaaaccactggttttgtagctacaccaacagacccagagaaaggggccactgccttcggagaccctgccagactcagccctagcctacagcgccacacgcttactttagcctgcaaattggcttttataatatcagaatcctggctgcagtactggagtccctattttccgcccccatcaccccgcccccatccttcctttctcacactccacagctcccagcagtcagacccggctcaccgaaggcgcgcacgatcccagctccgatgccgcgcccgcccccggtcacgaccaccaccttcccggcatagcgcgttcccgtagccatcccgtgtacgtcggtctctctctctctctactctgggcctctttcacctccaaagccccgtgaggccgtcgcatcaaatcctcaatagaggctggatcctggaagtccggcctcggggggcgttgccaggaaggctagagacct

SEQ ID NO: 7308 - DNA, 569 bp, Homo sapiens
  MAP TO CHR16.3; EXPRESSED IN HELA, SIGNAL = 3.4; EXPRESSED IN HEART, SIGNAL =   2; EXPRESSED IN LUNG, SIGNAL = 3.3; EXPRESSED IN FETAL LIVER, SIGNAL = 2.4; EXPRESSED IN ADULT LIVER, SIGNAL =   2; NT HIT: gi14774701, EVALUE 0.00e+00; EST_HUMAN HIT: BF850937.1, EVALUE 0.00e+00; SWISSPROT HIT: P08122, EVALUE 4.80e-01
tcacatctacccaaaccaagccctgcctcctgcccgagggagcccagagtcccggaggtgggcacccacctatactgacgttgcgcatctcctgggtgacctgtacttccatgttgcggctgtcgcgcttctcccgggcacgcttgctgttcttggagcccacgccatagtcccccaggggctgcaggctctcgttgaggggtgtgacggcggccgagggcacggaggatgtgggcgtgttggacttggtgcctgtggtgctgggtgtggcggccgccgaggactggcctgactcggacatttcatcctgtggacactaaggccaaacacagggaggagggagagcgagtcactgcaggtccctggcctgcggctccgccgtggctgcctgaggccccgcgcaccaatgctttgcactttgcctcgcccgacaccctgcgggccagagctcctctgccgcccaccgggctaacccttccgggcctcaccactcccgagtggctctgcttatccggccactgactccggctcctcggaagcagggccaccctcctgaaatggcttggaac

SEQ ID NO: 7309 - DNA, 532 bp, Homo sapiens
  MAP TO CHR14.3; EXPRESSED IN FETAL LIVER, SIGNAL = 1.3; EXPRESSED IN BRAIN, SIGNAL = 4.1; EXPRESSED IN ADULT LIVER, SIGNAL = 5.2; EXPRESSED IN PLACENTA, SIGNAL = 4.7; EXPRESSED IN LUNG, SIGNAL = 7.7; NT HIT: gi14916458, EVALUE 1.00e-118; EST_HUMAN HIT: BE297173.1, EVALUE 1.00e-118; SWISSPROT HIT: P46060, EVALUE 1.30e+00
aggacctgcaaaggaacaagtctatttcagtactttgtgttttgtttctgtgattcttcaaaacaggcttagaaattggattattcttttaatgctctcacctgctgccctccttctaatttcttgttcaacttctgcagttgggtaaaaatctggaggttttcttgctgtagcttctgttgttcagccagacactttaacaccagaccctgcaatctctcaacctccacctgcagagagctgcacgcacacgcaggaggagtcagtggtgttcccttcccagcacaggttactgcaggattcagccgaggtgactagagagacaagaaggagattgcaggaggttctgcccaggtgtcatagctcctcaatccaaacttcctctaagtgcaatcggattttacttttaaattaacaagataaatcatatatacacatgaatatatgtacgagaaacagaaatgctaggattataacagcgatgggcactgacataacatggaaagtgaactctctgcctcagtccccatta

SEQ ID NO: 7310 - DNA, 575 bp, Homo sapiens
  MAP TO CHR14.3; EXPRESSED IN HELA, SIGNAL = 2.9; EXPRESSED IN HEART, SIGNAL = 2.6; EXPRESSED IN LUNG, SIGNAL = 2.5; EXPRESSED IN FETAL LIVER, SIGNAL = 4.4; EXPRESSED IN BRAIN, SIGNAL = 3.8; EXPRESSED IN ADULT LIVER, SIGNAL = 3.6; EXPRESSED IN PLACENTA, SIGNAL = 3.2
cacccacccatttttgaaaccttgacctcgagaagaaagagagaaagcttttaagtttttaaaacagctggaaaatcataccatctgtgcatttttacccagccatactccaaacccagctctctattttatatacctgtttttttcttgtgattatctcactgttccttgcaagaatgagccgataatttgatactccagagggaagttcaatttctcagctgaagatgaagactcaggggtggcctccttcaggaattgtaaagttcaggggagaacggcaatccatttttatatgctaatactttgtatttagttaatttgattaagtggtaggaaatgataccttgctcgtagatggatcgttcgcacatttgcagtaaaacctaaatgccaaattttcctccttcaagttcttgagagagttattttcatcactttcatttcttcctgtaccacagccattgctcatctctttgttccctgaagagctttaaaagtagctgtgttcatgtcatttttatcttgttactttaatcatgtgcttattgacaagagcggaatttgtcatcctc

SEQ ID NO: 7311 - DNA, 500 bp, Homo sapiens
  MAP TO CHR14.3; EXPRESSED IN HEART, SIGNAL = 3.2; EXPRESSED IN HELA, SIGNAL =   3; EXPRESSED IN LUNG, SIGNAL = 2.1; EXPRESSED IN ADULT LIVER, SIGNAL = 2.3; SWISSPROT HIT: P40535, EVALUE 7.00e-01; NT HIT: gi14748360, EVALUE 1.00e-114; EST_HUMAN HIT: W52706.1, EVALUE 1.00e-117
catgacagggcagtctaggagagagggagaactggaaacctccagctcagaacaccaaccagagctgcaagaagcaaaacagggagatgcatctgcatgtgacctttattcctcatgtttctctgacttgagtgggggttttggaggttcaccttggggtacattttctcttgcctcatcttctttagcctcgggttcagctgggagagaagaagaaggtgaattccccaagcaggcccccaacactgacccaacagaggccaggaggatgttggatgatgtggagagtccagctgcccctgtggaggagacagagaatgagcacaggggtcgggcagtggcccagaaatcccacccggatccctcctccaggtcctgaaaatcccagggctctgccatgggtagaagctgctagaggcaactaaaagacagctcaggggtgaattcacggaaactgagagacagagggagagtcatccacagacagaccctaagagcta

SEQ ID NO: 7312 - DNA, 557 bp, Homo sapiens
  MAP TO CHR19.3; EXPRESSED IN HELA, SIGNAL = 2.6; EXPRESSED IN LUNG, SIGNAL = 2.4; EXPRESSED IN BONE MARROW, SIGNAL = 1.9; EXPRESSED IN ADULT LIVER, SIGNAL = 1.9; SWISSPROT HIT: Q12149, EVALUE 1.80e+00; NT HIT: gi14785934, EVALUE 3.00e-73; EST_HUMAN HIT: AL552701.1, EVALUE 2.00e-75
atcttcacggtaggtctgcgccggctcagacccacgctcccgaggagatggggcagggggcttcgggctggctgccgggggggtttgtgcctcagttggtgggatcagggtggtgggtgaggcgtggcccctgcaggccagggtctccagccccagccccacagcccacagctgcacgtcgacccatggctggcgggtggctctgacgcctgcctccggtgtgttccttgaggcagcgtttcggccgcacggtgagggcggcgctgtatgcgcctaaggagccggtgctggactacaacatggtcatcatcttcatcatggctgtgggcaccgtcgccatcggcggctactgggccgggagtcgggacgtgaagaagtgagtttcgcatcgtgcgtgtgctgtgacggggtcgggcggctctgacacgggccgggacggccagtcttccagaacagcagtgagtgctttggcctcggcaggcacggctcgccccgtggagcccttcgtttcttcctcaggaggtcctgggacagaatcagtctcttttcctgccagg

SEQ ID NO: 7313 - DNA, 504 bp, Homo sapiens
  MAP TO CHR14.3; EXPRESSED IN HEART, SIGNAL = 6.9; EXPRESSED IN LUNG, SIGNAL =  10; EXPRESSED IN BONE MARROW, SIGNAL = 9.4; EXPRESSED IN ADULT LIVER, SIGNAL =  16; EXPRESSED IN PLACENTA, SIGNAL =  10; EXPRESSED IN HELA, SIGNAL = 8.7; SWISSPROT HIT: Q91685, EVALUE 2.00e-03; NT HIT: K02559.1, EVALUE 4.80e-01; EST_HUMAN HIT: BG743930.1, EVALUE 7.00e-01
ctgactgggacttcagcctcatgaggtggttggatggccaaatggcgtcacctaagtgcccagaacccatgagtgtccctgtcctctgcctgagtggtcaccactgtctggtgtgtgaatgcacagggcagggtggatgcaggcttagcactgtatccccaggcaaatacggcccagctatagtcctgtccctggaatctgggacctgcacatccttggcacctaccagcaggtggccagagtccttcagcttggacttgtacagcatccactggtagcgcagatcttccagctcatccgaggtcccccttgctggcccgagacgaaggaggttctcaaagagatgctgaccttctggcacccgagcctccagctcctgggggaaacagcagcgtcatggtgcggcttccaaatggcccagacagccccacctgaatggtaaggatgggtccatcaaatttcacttgacagacaggtaggcagggaggaggcagacagaatcca

SEQ ID NO: 7314 - DNA, 529 bp, Homo sapiens
  MAP TO CHR18.3; EXPRESSED IN ADULT LIVER, SIGNAL = 2.6; EXPRESSED IN PLACENTA, SIGNAL = 3.1; EXPRESSED IN HELA, SIGNAL =   4; EXPRESSED IN LUNG, SIGNAL = 2.4; EXPRESSED IN FETAL LIVER, SIGNAL = 2.7; EXPRESSED IN BRAIN, SIGNAL = 3.3; SWISSPROT HIT: P36952, EVALUE 1.00e-25; NT HIT: gi4505788, EVALUE 1.00e-97; EST_HUMAN HIT: BF832784.1, EVALUE 1.00e-103
agagtcctggaatggcacagttctgaatcttgaccaattctggccacaaagtctacattccttttttccgtaggcactgcctatgggttctaataactgtattcccacttaaagtagaaacaaggttttggggcttacctgtccaatttcatttgcagtgtcacctttagcacccacttgagcaagtgacagagaggtggagagacagattggagagaagaggacattgcccagtggctccttttcacatagttgtttgaacagatcaacggcaaaagccgaatttgctagttgcagggcatccattgcgggcctggaagcaaggacaagggagcagttagtttctaaagcatctttaacgtcttctcaactgcattctgccaacactataagaattctatttaaacaaagtaattgatctcagaagaaacaaggaactttctgtaaattcaaaagtaagatcagttgtgaagaaacttccaggcaaatgtctgaaggcatgtgaggtcctctgtgtgtccagctctgc

SEQ ID NO: 7315 - DNA, 552 bp, Homo sapiens
  MAP TO CHR14.3; EXPRESSED IN PLACENTA, SIGNAL = 1.7; EXPRESSED IN HEART, SIGNAL = 1.7; EXPRESSED IN LUNG, SIGNAL = 1.9; EXPRESSED IN BRAIN, SIGNAL = 1.7; EXPRESSED IN ADULT LIVER, SIGNAL =   2; SWISSPROT HIT: P50447, EVALUE 3.00e-08; NT HIT: gi13386037, EVALUE 2.00e-13; EST_HUMAN HIT: AA458648.1, EVALUE 1.00e-115
tctagggaggtggtgacagggagagactaaactgaaatgtgcctgtgacttccatctcaggaagatggaacatgttcaaccccaagccatgttcggggtctgtggcaagcaggaattctcctttattttccaatagggttaacaatctttcccaggaagagcacggaaggtattttctcgctgtaaatcagcagcagatagggtttgtctatcttgacgacgagtggtgtctccatgggcagagtctgtgctccggtgccagcggccccttccgtacccctctcatccatcttcagctcagccttgtgcacagcctacggaagccaagggcaaagtcaaggtctgccaagctccttggcgaccacagtgggccggaggcccagagaggatcagagaggaagaccacttggcccaagccatccagcacagcagtaacttggtttactccagggttcctggctctttcgccattaatgctggagaatattcgacaagcagatgccgtgtgaaggaaaagatggtgcagggggagcatcagttacgggagtcggt

SEQ ID NO: 7316 - DNA, 504 bp, Homo sapiens
  MAP TO CHR14.3; EXPRESSED IN FETAL LIVER, SIGNAL = 1.3; EXPRESSED IN BRAIN, SIGNAL = 1.4; EXPRESSED IN ADULT LIVER, SIGNAL = 0.96; EXPRESSED IN PLACENTA, SIGNAL =   1; NT HIT: gi14750002, EVALUE 0.00e+00; EST_HUMAN HIT: AA018501.1, EVALUE 0.00e+00; SWISSPROT HIT: O08759, EVALUE 2.10e+00
acctcagcctcctgaacaactacaactaaaggtacacaccactgttcccagctaaaaatcagtatgtttaatattaaagataaaagccttccttataaattaaaaatactgagaggtatgttacctgacgaaatatctctgtcacaaagtttacattactccttttagaagaaaaaactctgcgaactatttcaatgtctgtgagatgttcttcatcaatactacagagactagatgagctaggttctcgctccgtgagagtgcttgtattggaatgagactgttcgggttctgtagttctgtctgttttatcagcattatcatttttgctttcttctctggatactaaactagcagctgctctctaaaatacaaaaaaaaaaaaaaaagagagaaacaatatcataatcatttaactatgtattttgtcttttaataggtaatactgacaaaatccaaaacatttcccaagtaatttataccactgcttaaactccgggcata

SEQ ID NO: 7317 - DNA, 561 bp, Homo sapiens
  MAP TO CHR18.3; EXPRESSED IN FETAL LIVER, SIGNAL = 1.2; EXPRESSED IN ADULT LIVER, SIGNAL = 1.2; EXPRESSED IN PLACENTA, SIGNAL =   1; NT HIT: U67550.1, EVALUE 3.40e-02; EST_HUMAN HIT: AI791267.1, EVALUE 6.00e-54; SWISSPROT HIT: P09439, EVALUE 3.10e+00
cttttcccatccctcattccctgcatgccatttcccaccaaatcaaactcagtattttataacagtgatcctacaattgtctctcagttttaaagcttttctgatctttcaatggaattgatttccgtaataaccagactagagttggcagcccatgcttgtttggcatcactgcctgcattacgttgcctacagctcatccgccctgatcccttaaagaaacttgaaaaaacagaaatatgtcctttatcaacaccataagctgctgctgccacaagtctataaacagcaagaaaaataaacagaagccaacctattttatcaaagtctaataatacatacacactagtcttgcttaagcccgagaaataaaggcaaacacaccatggtaggaagaaaaggaatgcacgtggtctcacttatgcccttacctagacataggctccacagtgcatctgatctgagactacctcctcactttccaggcttcttgtgtgattttcccttcccttcttctcctttcctcagggttacttgcagagagattccaccaatgcatcc

SEQ ID NO: 7318 - DNA, 563 bp, Homo sapiens
  MAP TO CHR14.3; EXPRESSED IN ADULT LIVER, SIGNAL = 2.5; EXPRESSED IN PLACENTA, SIGNAL = 2.5; EXPRESSED IN HELA, SIGNAL = 2.2; EXPRESSED IN FETAL LIVER, SIGNAL = 1.5; EXPRESSED IN LUNG, SIGNAL = 3.2; EXPRESSED IN BONE MARROW, SIGNAL = 2.4; NT HIT: AF291429.1, EVALUE 8.40e+00; SWISSPROT HIT: P17534, EVALUE 6.20e-01
atcaggggagtggggataacctgggaattctggtctggtggggcaggcgacacagaccgaaggcctccgcccacccccagcctcaagccccctctgcgtggggcccctgggggcctggggacatttgcatgtactctcaggagattctcctttcttctccctgggtttcatctttaataactagatgatgggctgttggggaatgcagggccagcgctctaggaaagtgaaactgccttgcagagggaaagcaacccactgtggccccgaaagacccagaccgccagcggccccgggcagccgccgagggcaccggctcacacttcctgcatttcacaagctcttgcttggcatgcattgatgacttgaactggggggttaacccaaaaagatcaagtgcgagctcaaggcggatgatgagaacagattcggggctggttaacctcagagagcgggagtccgttggtgctaatgaggccaagggagcccggctcctttctgcccccaggcaggtgagaaagaaagaacggagacgaaagagggcccgctgtgtctactcctct

SEQ ID NO: 7319 - DNA, 578 bp, Homo sapiens
  MAP TO CHR14.3; EXPRESSED IN HELA, SIGNAL = 2.9; EXPRESSED IN PLACENTA, SIGNAL = 1.8; EXPRESSED IN FETAL LIVER, SIGNAL = 2.8; EXPRESSED IN LUNG, SIGNAL = 2.5; EXPRESSED IN ADULT LIVER, SIGNAL = 2.2; SWISSPROT HIT: P41225, EVALUE 2.50e+00; EST_HUMAN HIT: R54506.1, EVALUE 0.00e+00; NT HIT: gi16191270, EVALUE 0.00e+00
agctggattggagacacagctgtcacccaaacagtcctgcagtgcgtgctcataagcctttcgcgctttcaaaatgtgaacagccaacacctgtccagtgtagggcccataggggctgctctcagtcagcttggttaatatgtgaacagctcgagctgtggcagcccttctcacttctggcgacagctccacctccagctcagcatagagcagactgagctcacagaggtcagagtctttcagttctctgcttcctgccatgccaagtgctgtgtcaaaaacttttctggcatcctccgtgttgccaagcaaccactccagatgtgcatactgcttccacaggcaaaagttgttgcagttttctggctccttaaggagattcttggctagttttttgcagttcttcccttgagactttaatctcttcttgtttttagtgtgcaggcaccaaatgacctacagggaaaaagagaagaatgactgcaggtgctctgtaattaaggcgtcctctgctgccaactgtagaaagcactgacaggaaaaaaggcgtctacgcttcctccctttatcacgggtct

SEQ ID NO: 7320 - DNA, 543 bp, Homo sapiens
  MAP TO CHR14.3; EXPRESSED IN HELA, SIGNAL = 2.3; EXPRESSED IN HEART, SIGNAL = 2.1; EXPRESSED IN FETAL LIVER, SIGNAL = 1.6; EXPRESSED IN ADULT LIVER, SIGNAL =   2; EXPRESSED IN BRAIN, SIGNAL = 2.2; SWISSPROT HIT: O22315, EVALUE 2.30e+00; EST_HUMAN HIT: BF677900.1, EVALUE 3.00e-99; NT HIT: AP003017.1, EVALUE 1.30e-01
cgcccagttatcagttcctcgaacctcaaggaatcacaaagcaaggttccaccccccgaaaaactacgaaaagtgagaaagcctctaacactcctcgcgccgtgcccagccggaaccttgacctcaagatggcgtcccgtagtcgtaagattcagtcggctccaatcaaacatggtgggtcataatttacagttcgggcctttctagtaaccgctagacgctgcttctctatggttattcgtctcggcttggtgagtcagagccaacagcggagacgatctatatacgttcttctctatggttccgcgctccccgcccccggccgcagtgcacgccgggcaagaggaagacctccatcagctcgccgcgcagcgcggctgtatttgcggcctgtgcgagtaggcgcttgggcactcagtctccctggcgagcgacgggcagaaatctcgaaccagtggagcgcactcgtaacctggatcccagaaggtcgcgaaggcagtaccgtttcctcagcggcgggtgagtttgtgtctctgaacgcgt

SEQ ID NO: 7321 - DNA, 558 bp, Homo sapiens
  MAP TO CHR18.3; EXPRESSED IN BRAIN, SIGNAL = 9.6; EXPRESSED IN ADULT LIVER, SIGNAL = 8.2; EXPRESSED IN PLACENTA, SIGNAL = 6.2; EXPRESSED IN HELA, SIGNAL = 4.9; EXPRESSED IN HEART, SIGNAL =  21; EXPRESSED IN LUNG, SIGNAL = 5.8; EXPRESSED IN BONE MARROW, SIGNAL =  14; EXPRESSED IN FETAL LIVER, SIGNAL =  27; SWISSPROT HIT: P39194, EVALUE 5.00e-35; NT HIT: U52111.2, EVALUE 7.00e-65; EST_HUMAN HIT: BF991882.1, EVALUE 4.00e-64
tgaagtgaggggactggaactctaggcccctttcggtggggacatctgtgcttcagaagggccccagagcctccagaaatctggcttaacaagaacacattttgatattttctgacttgcacatttcctggggaaaaccaatgagcttacacctgtaatcccagcactttgagaggcccagatgggtagatcgcctgagctcagtactttgagaccagcctggccaacatggtgaaaccccatctctactaaaaatacaaaaattagccaggcatagtggtgggcatctgtaatcccagctacttgggaggctgaggcaggagaatcacttgaatccgggaggtggaggttgcagtgagctgagatctctccactgcactctagtctggcaacaaagcaagactccatgaagaagaaggagaaggagaaggcgaaggagaaggcgaaggagaagaagaaggagaaggagaaggagaaggagaaggaatagtaatgttaaatcaaagcagcaatgctgtgaggtagttgccacttagacaaaagcgaagctttcagatg

SEQ ID NO: 7322 - DNA, 594 bp, Homo sapiens
  MAP TO CHR18.3; EXPRESSED IN LUNG, SIGNAL = 3.5; EXPRESSED IN BONE MARROW, SIGNAL = 2.9; EXPRESSED IN BRAIN, SIGNAL = 2.3; EXPRESSED IN ADULT LIVER, SIGNAL = 5.6; EXPRESSED IN HELA, SIGNAL = 2.7; SWISSPROT HIT: Q64623, EVALUE 2.00e+00; EST_HUMAN HIT: BI912100.1, EVALUE 8.40e-01; NT HIT: AL161498.2, EVALUE 5.70e-01
taactccagccctccaaatgctggggcatggatgtatgtgtgcaggaatggcatcagactagacacagactggcacagagcctgccaaggtgaagacaatgcaccttataaaacagttacagtaacatctattgcatacatgaaaacaatttgcagcagattaaatacccttaagaaaggaggctaccagacgaaccacctcaacaccaaagcagggtttggtcggcatctgacagcgctgtggacagtggccagatgtggcccagcggctctccttggatctgacagcactgtggacagtggccagatgtggccccagcaatctgacagcgctgcggacagtggccagatgtggcccagcggctctcctcgggctgtttcttccaggagcatgagcttcttctctatttcggtgagattctctgcctgagttggcgttctgaggagcattcagaaattgtttgttctgaatttctaaaacacgaactattagaaaaggacaaaaaaaatctacagactgtgggaaaagttagtgtcaaacaaatacaaaaaggaaaagttgagaacagcaaatggtggctgtgttatgtggaa

SEQ ID NO: 7323 - DNA, 553 bp, Homo sapiens
  MAP TO CHR14.3; EXPRESSED IN ADULT LIVER, SIGNAL = 3.2; EXPRESSED IN BRAIN, SIGNAL =   3; EXPRESSED IN PLACENTA, SIGNAL = 2.9; EXPRESSED IN HEART, SIGNAL = 2.9; EXPRESSED IN HELA, SIGNAL = 4.4; EXPRESSED IN LUNG, SIGNAL =   4; EXPRESSED IN BONE MARROW, SIGNAL = 3.3; SWISSPROT HIT: P22602, EVALUE 4.60e-01; EST_HUMAN HIT: BG193038.1, EVALUE 0.00e+00; NT HIT: AB023215.1, EVALUE 0.00e+00
aacctgttcaccactcctgggtgcatgattgagggtgaagcatccaccagcacttcaaggggtccatagtatttttttttttgctgcctcaaagtccccaaagccttcgagcagaagtggcagtagatggttgccaatcagccaatgcagactttcactgggacaacaagaaagcagatcttctgggttttgatggaacttggcagtggggacattcagctgatgcattatataccccgtcagagcacacttgtatcttttaccttccctttgccccatgcccccaaactgcttaggtcttctctgtccctttactgctgctgcacagagatgatataaaagaggctctttggctatttgcattttgcttcctcttcttttccagattacagtatgaagctttattttctttgtacaagcttaaaatttcaacatcatcatccgccaaagttgttcctcccttttcggaggatctagggggaaagaggagcattcatcacaagtttcctagagagaggagacaaatcggtgtgccattgacaacatgagccag

SEQ ID NO: 7324 - DNA, 574 bp, Homo sapiens
  MAP TO CHR14.3; EXPRESSED IN HELA, SIGNAL = 1.5; EXPRESSED IN PLACENTA, SIGNAL = 1.1; EXPRESSED IN HEART, SIGNAL = 2.5; EXPRESSED IN BONE MARROW, SIGNAL = 0.66; EXPRESSED IN ADULT LIVER, SIGNAL = 1.5; EXPRESSED IN BRAIN, SIGNAL =   2; SWISSPROT HIT: O42422, EVALUE 2.80e-01; EST_HUMAN HIT: AA020797.1, EVALUE 0.00e+00
ctacgctgcgaagaacagcttttacaaagtagctgaatttgtttttcccacttgatttggattcacattgctttcatttcttaaaatgcttcacttcaggttcttggtcttggaaataaatttcaaggtgcattgtatccattttaagctgctttattttattttcacttgtatgagcaaattcttgggggagctttgcttttcttctgccagaaaaacaaaagggggaaatgaaaatcttttttggaatgagttctgtgggttttcttaacagccaccatgtttattagttacattgtgttttggccaatcagtgcaatgtaacaaattttacagttaattgctttcaattgagtcagtaaacctgtgatagataatttatttaactggaaaacctaggtacccataagaaaaaagattcattctctgtgaaaactgtaggaatctgttgttgttttcatttgaatatgctctacttctgctctagtatttggtttggaatatattttgtggctctaattactgtatttttaaaaaccctacctccattaacagttggtaaaggccccttttc

SEQ ID NO: 7325 - DNA, 525 bp, Homo sapiens
  MAP TO CHR16.3; EXPRESSED IN BRAIN, SIGNAL = 2.1; EXPRESSED IN ADULT LIVER, SIGNAL = 1.8; EXPRESSED IN PLACENTA, SIGNAL = 1.2; EXPRESSED IN HELA, SIGNAL = 1.2; EXPRESSED IN HEART, SIGNAL = 3.9; SWISSPROT HIT: P23083, EVALUE 2.00e-15; EST_HUMAN HIT: AA992278.1, EVALUE 7.00e-29; NT HIT: M99640.1, EVALUE 0.00e+00
ggttgattcatcccatccactatgcccttgtccagggctttgtcacacccaccgtgtaaagtatttggtgaaggtgtatctggaagcctggcaggagaccttcactgaggacccaggcttcttcacctcagccccaggctgcaacagctgaacctgggaatggacacctgtgaggagaatggaggagttgataaaagcccccttgactgaactcaatcccctcctcatcactggtacttgggagccccttacctgtggcagctgccaccaagaagcggatcccccaggtacagtccatggtgaggagctgtgttctcaggggcttctatagaggagggatgtggttgttgggtgatgctctcagggcacagacatccaaatttacctcagtggatctcaggttatttgcatattcatgagatagcatttcatagcacaaagcctggttaataataagaaagggaagataaatgacacatcagatttacaagagtgagatgctgatggtccaagccctattcctgt

SEQ ID NO: 7326 - DNA, 505 bp, Homo sapiens
  MAP TO CHR19.3; EXPRESSED IN HEART, SIGNAL = 6.6; EXPRESSED IN LUNG, SIGNAL =  12; EXPRESSED IN FETAL LIVER, SIGNAL = 5.4; EXPRESSED IN BONE MARROW, SIGNAL =  15; EXPRESSED IN BRAIN, SIGNAL =  13; EXPRESSED IN ADULT LIVER, SIGNAL = 9.8; EXPRESSED IN PLACENTA, SIGNAL = 9.9; EXPRESSED IN HELA, SIGNAL =  14; SWISSPROT HIT: Q99439, EVALUE 2.00e-18; EST_HUMAN HIT: BI257977.1, EVALUE 2.00e-62; NT HIT: gi14765608, EVALUE 2.00e-62
tgagaaaaaccaagatttgttaagtgtgagacagcctgtgtccctgcgtgtactcacgtgcataagatagttccatccttcaggcccttctggaagtcggggccgatggagaggccggtgagtccctcgatccaggtgcggagctctgcctccttctgggggtcatatttggacaggagctggtggagcaaagggcacgagactgagctgggctgggggcacccccagcaggaaccccacagaagctctgcagagggtggggccggggactccagggcaacagcagatagagcggcctggaggtcccccctcaccacacccacgcagatgctcccttttcccatcattgggggcgccccagccactgcaggcgggcacagataaaccgccctccaagcaggccgacaaccggcttagaactcactgataaacatcagctctaatccactcccggtgcaggacaaacctggccggatctgcctccccgccctgccttctcacctcc

SEQ ID NO: 7327 - DNA, 503 bp, Homo sapiens
  MAP TO CHR18.3; EXPRESSED IN BONE MARROW, SIGNAL = 6.6; EXPRESSED IN BRAIN, SIGNAL = 1.5; EXPRESSED IN ADULT LIVER, SIGNAL = 1.6; EXPRESSED IN HELA, SIGNAL = 1.3; SWISSPROT HIT: P25339, EVALUE 2.70e+00; EST_HUMAN HIT: N29640.1, EVALUE 7.00e-01; NT HIT: AJ308102.1, EVALUE 4.80e-01
gatgtttgcatggtgtccagataaggtcatcacttgccgaggactgacccttaccagactagcaaggttaattggcctcacaacaccagtgcaaaagcctatcagaatagtcagccaggtcctgaagatctggagtccaaaacagaccacaaggccagagtaggaggcttgctgaacttggattaggatgccaagaactgcttagtctctttgtctaggagaagagtagttgacatttagagaagagttagagtaaatgatgaaaatgattgaaagcctaggaagtaggaactcgaatgtagaaagtcaatgacatcttgatgcatgaggagttgaataatgactaaatgacaccatagggtttggagtcagaagttgcaatgaagttcagcatgatgccatgctctctcttgcctccagagattccacgtacactgcttccttggcttggaaatccctgccctcccattcacgcttctccccccgacagtctcctgcttctt

SEQ ID NO: 7328 - DNA, 507 bp, Homo sapiens
  MAP TO CHR14.3; EXPRESSED IN ADULT LIVER, SIGNAL = 1.3; EXPRESSED IN LUNG, SIGNAL =   1; EXPRESSED IN FETAL LIVER, SIGNAL = 1.4; SWISSPROT HIT: O67601, EVALUE 8.00e+00; EST_HUMAN HIT: R87787.1, EVALUE 0.00e+00; NT HIT: gi15147255, EVALUE 4.80e-01
acatttgcatcaccagcatctggggcttggaaagggtcttaagggatgaatggattaatgactcaatataaactgtacctgcagaatctctgatcagacagaacatttgctccaaagccattgaatgggctgggatggagcatgcatggttttagcttcatctcccacaactgtggctttgttctgtgttggtggcaggtggtttccaaaaggaaaagctttgggagatagaagtcctcgttttgacctctgccctccttgtacaccaggagccagaaaaacttcatctcttttacaagaaacattgagattcctgtaaaattaagaaatcacacaatttgatggtctacattatctaaagcaaatgagacttctatttggaacaaagactaccttgttgggaaatgagtctgcaagttaaagtgttttctggtaagtttctttggtccttagcttccttaaaggggaagtaatcattgcccatgggccccttttaatttccccaag

SEQ ID NO: 7329 - DNA, 571 bp, Homo sapiens
  MAP TO CHR18.3; EXPRESSED IN BONE MARROW, SIGNAL = 1.3; EXPRESSED IN BRAIN, SIGNAL = 1.3; EXPRESSED IN ADULT LIVER, SIGNAL =   2; EXPRESSED IN PLACENTA, SIGNAL = 1.6; EXPRESSED IN HELA, SIGNAL = 1.4; EXPRESSED IN HEART, SIGNAL =   2; EXPRESSED IN LUNG, SIGNAL = 1.4; SWISSPROT HIT: P30995, EVALUE 5.50e+00; EST_HUMAN HIT: BG251273.1, EVALUE 3.20e+00
cctgctcaagctttgtctcctttgggcaccatacctgcctggctcctctcctagccagcaggcttaggaggcttctaaccaccagcctcctccaaacaacggctaattacagttcatcattgaaattgtcatggtgtcaatcatcatccccactactctcgttggcctggtattgctaacttcaacttcatagaccttgggctcagagttggcagcccacacatcctccacaataccttgcacaatggagatgtgttgaatgaatggatgggaaactgggtggatgaagaaagtctttcctatcattgacatttaatgagattaaaggctaactcctccacagagctaagctgaatgtggtttctctgagttgggaggggagtagggggcagggatagggaagtgggtttcatgctccttgcaaacagtactacttgtgtatcaacaggtaggtgccaactaatgccaaatttggatagaaaacctgatagagactcaggatgtattccaaaggttaattgtaactgatggctgccactcagcaacaagtagagacaagtggcagacacca

SEQ ID NO: 7330 - DNA, 528 bp, Homo sapiens
  MAP TO CHR14.3; EXPRESSED IN PLACENTA, SIGNAL = 1.4; EXPRESSED IN HELA, SIGNAL = 1.6; EXPRESSED IN ADULT LIVER, SIGNAL = 1.2; SWISSPROT HIT: P42736, EVALUE 6.40e+00; EST_HUMAN HIT: BI772570.1, EVALUE 4.70e-02; NT HIT: gi15530171, EVALUE 1.30e-01
atgagccctttgctgagatgttcctctgaattgagttgcaagttggccaaagctggccagagtgcagctgtaaagggagctttgtagtctccttttgttcctttgttgaattgtaaccaaagctaagggagctaccctgggctttatcccgtccccacctcttcacctccactgccctgccaactgttctttccctcctcctgcttcctggctctttactcccctaccgagtacgtcggttctgcactctctctccctgcaccacttgattcttagagccaaactgttatatagccagttttccaaccatcaagatggcataaaattttgatttgcatatttattttataggctcttttagagcccagaaatggcagtcacctttcccatgtgtttctgcgtctttggcatcaccctgtgtcagcagcactgagtgcctaggtgagccaccctaccctatgctgcccgtgcagtctagggggcaagatgtcacatgggtaagagccctggctggtaagagtagtgggc

SEQ ID NO: 7331 - DNA, 589 bp, Homo sapiens
  MAP TO CHR16.3; EXPRESSED IN ADULT LIVER, SIGNAL = 1.2; EXPRESSED IN LUNG, SIGNAL = 1.6; NT HIT: gi8922994, EVALUE 3.00e-33; SWISSPROT HIT: O13804, EVALUE 1.50e+00; EST_HUMAN HIT: AI491824.1, EVALUE 1.00e-33
tgactccgcctttgagagaccacaggtcctgccctttgacaggaggtgctgacgctgtggcagctgtggtcccggggccagcaggtcattgtctactacgaggaccagtgctctgtgggccggcaccacgagctgtagccaggaatcttctactgatgggggaacaaggtgaagaccgatgcgctcatctgctgctacctggagaccatgaagagctgcggccgctcggagatcctggaaagacctcattttctacatgtcacttgttagagccgatggttcaagttctcagccagataatggacgccagctgccgtttttattccactttcccctggggcggggcctgggaaggcttgcatttcttctgttgtgtaacagcagatgtcagcatttctcaggatggtttcaagacgattatttagtccatgttggaataggttctttttgggaccaaattactctttttccgaaataaaatcgggtacctggttgccatggtgaacaaaatccagaaagacacactcatcggccatacccactggctacctcagccccactacattgctggattagggttcgagaaggc

SEQ ID NO: 7332 - DNA, 529 bp, Homo sapiens
  MAP TO CHR14.3; EXPRESSED IN FETAL LIVER, SIGNAL = 0.92; EXPRESSED IN BRAIN, SIGNAL = 1.6; EXPRESSED IN ADULT LIVER, SIGNAL = 1.7; NT HIT: AF175963.1, EVALUE 5.00e-01; SWISSPROT HIT: Q93034, EVALUE 1.50e-01; EST_HUMAN HIT: N36319.1, EVALUE 1.90e-01
tttggtacccaaagagtgggtgaaagtttcaggaaaagaaatctcaagccttgaggcctcccatgaaggcgagaccaagatttctcttccacaacccaatctttaaaattattctggagatggttgggaggagagtagtcatcctcttgactagaggatgagagactgtgcaggagaaagctctggaggagacctcaccctttgtgactagtatggtgtgtctcattcatcatgagatggtgggtgatgcaggtgatgagttaatgataattaagcccacgctgtggaacccatgggagaagcatgtaatagccaatagtaatatcagcaaggccttcctcaattccacgcagaggaagacccaaaaggatcagtggacccagggccgtgggataccatgagaagggagtcgatggcagggatttaggtttgggggttcttggaaggaaggtatcatgtagacttttggtgaggccctagagagcctatcattagccaaaatggtatggctgtgaggctgctcaaatca

SEQ ID NO: 7333 - DNA, 561 bp, Homo sapiens
  MAP TO CHR14.3; EXPRESSED IN ADULT LIVER, SIGNAL = 1.2; EXPRESSED IN HELA, SIGNAL = 0.99; EXPRESSED IN PLACENTA, SIGNAL =   1; EXPRESSED IN FETAL LIVER, SIGNAL =   1; EXPRESSED IN BRAIN, SIGNAL = 2.5; SWISSPROT HIT: P02831, EVALUE 2.70e-01; EST_HUMAN HIT: R20618.1, EVALUE 0.00e+00; NT HIT: gi14748462, EVALUE 0.00e+00
ctcttgccctttttcgacagcacttatctgcgggactccagcttcgcctccaggctattcagaaccacgtgaaccaccacagcctaaggacgctgccgggctcgggccagagcagtgctggcctggcagccctccgaaagtggttgcagtgcactcagttcaaaatggcccaggtggagatccagtcctcggaagcagcctctcaattttatcctctatgagtggactcctcggcgctcagtgtcaacactctggtttagcaataatgggtttaaaaacaaacaatttgatccaagcaggttggggaacatattggtactgtacattctctttctagtttagtaaaagatgtgcaaaggccagagagggccgaaaatgaagctttcttgctacacatatttctgatgactccttgggctatctgattaagtgtttccttacattattttttaaaaaccaaatcatttttctttaactaacttctattttttttaagaaaaaaaaatagactggtgggtactcacagaaaagttgtataagtccccctgttgctatttttga

SEQ ID NO: 7334 - DNA, 581 bp, Homo sapiens
  MAP TO CHR16.3; EXPRESSED IN HEART, SIGNAL = 1.5; EXPRESSED IN HELA, SIGNAL = 1.3; EXPRESSED IN LUNG, SIGNAL = 1.4; EXPRESSED IN BONE MARROW, SIGNAL = 1.6; EXPRESSED IN BRAIN, SIGNAL = 1.6; EXPRESSED IN ADULT LIVER, SIGNAL = 1.2; EXPRESSED IN PLACENTA, SIGNAL = 1.3; SWISSPROT HIT: Q27967, EVALUE 5.60e+00; EST_HUMAN HIT: BG764956.1, EVALUE 3.20e+00
cagcctgtcattccctcttccctcagcctcactggaggttgtcgtcttcctggggagctggaaagctgcaggcaaggggctgtgcagtcatgacaccactattcaccctggcctggggccagctcagataatacctctcatcacccccggggcccctcgcttccttcttcctctgggatgggtatgtgaggcatctgggaagtcaccacctaccaccccaaagggtggtgaggtaatccccagacacggtctaacaagtgcctggggtgaaagaggctctgtgtggaggagagtgcctccctgtgttgctctgaacccccaggagcacttcactgatatcctggcacccagaagagatgagaagttaacgcggttttcttgtcatcacaaaagcatctttcatgccataatcgagtctggattggagggaagatttcactagacagtggccagaggctagacactctgttggttattgcccacccctccacccactcagccatttgaggattcctattgtaagcaagaaagtgaaggagacaggcacactgcctaagagggggatgctgacatgctaagca

SEQ ID NO: 7335 - DNA, 560 bp, Homo sapiens
  MAP TO CHR19.3; EXPRESSED IN BRAIN, SIGNAL = 1.1; EXPRESSED IN ADULT LIVER, SIGNAL =   1; EXPRESSED IN PLACENTA, SIGNAL = 0.85; EXPRESSED IN HELA, SIGNAL = 2.1; EXPRESSED IN LUNG, SIGNAL = 1.4; EXPRESSED IN BONE MARROW, SIGNAL = 0.79; SWISSPROT HIT: Q92733, EVALUE 5.40e-02; EST_HUMAN HIT: BE244830.1, EVALUE 0.00e+00; NT HIT: gi11034834, EVALUE 0.00e+00
caaaactgaaattccgagatactgaacccatttgttcaaggttgcacaactgaaagcgccggcttcatgacgacataacccaaaaaaaactgtagctggcgtctgctctcgcgcccacttcgctctcacaacagtgccaagaggtcggcgccgtcatcaccccgcgtttacacggctcaacaggaaggccaggaaatgcccaaggccccggccgtggtcaaaccgcgcgcggacccagggccttagccccgccgtcgccgcgacccacacttgccggagtcctcagcagggcctcaccgtcccgcaggcgccccgagcccgcgcctccgcggacctgacgcgccgcgtagctggtgagcgggtaacggcggccgacctccgggaacgacactgccccaaaccgttccttagcttggaagccgccgccaggcctgaagctatcgcgggactgacccagtgcaccgcccacggcgaaccacatttcccagaatcctccccctgcggtacaaatgtcccggaagccgcgaaccgccggcacccgaagaccacacttcccaagg

SEQ ID NO: 7336 - DNA, 581 bp, Homo sapiens
  MAP TO CHR14.3; EXPRESSED IN LUNG, SIGNAL = 1.4; EXPRESSED IN FETAL LIVER, SIGNAL = 0.98; EXPRESSED IN BONE MARROW, SIGNAL = 3.1; EXPRESSED IN ADULT LIVER, SIGNAL = 1.5; EXPRESSED IN PLACENTA, SIGNAL = 1.1; SWISSPROT HIT: Q28640, EVALUE 2.90e-01; EST_HUMAN HIT: BI600819.1, EVALUE 3.20e+00
aagtggcatttcccaagatgccctgagaaaacaggcagcagcaggatccattcctaccattgtagattctaccccccacccgcccaccaggggaatctggctgcaggaaaaaccatccaagcgcaagacagagatgctgtgggcatcctcagttccagaactggggaatccatggaaaacctgcagaaaaacttgctgcccaagcagaggaggcgaagcaggtgggcggccacgggacacctgtgtgtgaatgagagcaggtgggcggccacgggacacctgtgtgtgaatgagagcaggtgggtggccacggggcacctgtgtgtgaatgaaagcaggtggatgcccctgccaggaggaggcagccccacaccacgggcaaggtgagtgtcgtctccactgcccaccttggccaagaggcctgcacaacagtgcctggcacctgcccccgccccaactgggttttctcatctgccatatagagaggagggttacctgctgctgcccctcgggcctgtcctgagggtaaaccccaccaagcatgtggaagtaggcgtttctggaggtttttctccccagac

SEQ ID NO: 7337 - DNA, 523 bp, Homo sapiens
  MAP TO CHR19.3; EXPRESSED IN FETAL LIVER, SIGNAL = 3.1; EXPRESSED IN BONE MARROW, SIGNAL = 0.77; EXPRESSED IN ADULT LIVER, SIGNAL = 4.3; EXPRESSED IN HELA, SIGNAL = 0.91; NT HIT: gi14763360, EVALUE 6.00e-47; EST_HUMAN HIT: BG771709.1, EVALUE 1.90e-01; SWISSPROT HIT: P29640, EVALUE 2.10e+00
tggaatttggactttagcggggctgggggaccccggaaatggacgagaagcagaaccgaggccctttagggctcagcggaggcctgcctgtctctctaaggtccctcttggagcaactgaagaaactccaggccattgtggtgcagtccaccagcaagtcagcccagacaggcacctgtgtcgcagtgagtcctggtgcccccaggcaagccggggacctaggcttctgtagaggggcccatagggaggtgacaatgagtccaagctctccttgtgccccagctcaagtatgatccagtctggtctttggggcctcagtttccctgcctgtgggatggagatgcttgcaggggaggggagggagggggtgactctgccgctgtctccaccaggtcctgttgctgtcctttgccctcatcatcctcccctccatcagcccttttggccccaacaaaaccgagagccctggggactttgcgcctgtacgaggtaggggatccccacctttgaaacccttgtctgg

SEQ ID NO: 7338 - DNA, 553 bp, Homo sapiens
  MAP TO CHR19.3; EXPRESSED IN ADULT LIVER, SIGNAL = 3.1; EXPRESSED IN HELA, SIGNAL = 3.1; EXPRESSED IN PLACENTA, SIGNAL = 2.1; EXPRESSED IN LUNG, SIGNAL = 1.8; EXPRESSED IN BRAIN, SIGNAL = 4.4; NT HIT: gi11424606, EVALUE 0.00e+00; EST_HUMAN HIT: BG747071.1, EVALUE 0.00e+00; SWISSPROT HIT: Q14157, EVALUE 3.10e-02
tcccaactgccttactccagcctgctgcactcattcccactattgcccggccctgcaggtgggtaggtatagagtccaaggtctaagagaaagttgcctagcgacaggtctgcagctagggatgtggcttccattcccattctcagaacggggtcccctcccactgtcctggtgctgagacgacccagtccctggccgcccatggacagagtgtaccttcatagagaatgccctggttgtccctggtctggaaggacttcagcttccactgtcgcccactcttgtctgtcagcactgtccctgtgggcaaagcttcaagtgaggtggtcactcggctccgcttcagcgtctgagggctctgcctggtcttctgagggctacagctggtcttctgagggctacccctggtcacctgagggctcttcctggtcttctgagggctgcttttgggggttgggggtctgctcccggagcctgcaggaggatgtaagaataaagtaaaagcaccatccaggagagaaaagttagatggggagtgaaacagcacgcaaaa

SEQ ID NO: 7339 - DNA, 524 bp, Homo sapiens
  MAP TO CHR14.3; EXPRESSED IN BONE MARROW, SIGNAL = 2.7; EXPRESSED IN BRAIN, SIGNAL = 2.4; EXPRESSED IN ADULT LIVER, SIGNAL = 1.8; EXPRESSED IN PLACENTA, SIGNAL =   2; EXPRESSED IN HEART, SIGNAL = 2.1; SWISSPROT HIT: P26175, EVALUE 3.70e+00; NT HIT: gi11465652, EVALUE 2.00e+00
tcccaaattcggtcttgaactatgagattgtgtaaggtagaaggagctctggcctggaaatcggttcgcatcctcgctctgcccctacctatctctaaccacctcatttctctaagcttccttccttccttttttttttttaaattaatctgatacagaagatagtaggagaatagatttggtaatttctaaggaccctaccagttttatgattctgtatctcaggaatttttctaaacctatcttcattgtagcatttaccagccggatatttagactccctcctccctcaggttctcgaattcttagccccaggactgactccgtctccaggatgttctaggagaggaggtgtcatcttttgagtttcccaaggatcctccacaggagtagggtggggtggataacaatttagggaagagaaccaagtcaggagaagcaaaagaagagtctttccttgagtgattgacctctcttagccttttaatctatttaacatcctaagcccacactgacgtgtagaa

SEQ ID NO: 7340 - DNA, 554 bp, Homo sapiens
  MAP TO CHR18.3; EXPRESSED IN BONE MARROW, SIGNAL = 0.78; EXPRESSED IN ADULT LIVER, SIGNAL = 1.8; SWISSPROT HIT: P10772, EVALUE 6.90e+00; EST_HUMAN HIT: AA723868.1, EVALUE 1.00e-114; NT HIT: AY011121.1, EVALUE 8.20e+00
aatgaggtctgtgtgagggcatgggtatatgccatcactatgcaacattttaatcttcagtttttataggagtttcctctgagcactcatcaaaggtaatgggattagattttttttcttcctttgtcaaatgttttcctcaccctgaatactgtcacacacgtcgcaggtggatgagatttgtccactgaggaggaattgcacttttcgaccctcctaggatgtgacttgaatacctggcttgttccatgttgggcttgccacctgctcctgctctgaggtagccgctgacctaaaggcatcgcaagggtggtgaggtgaagagggagcaagtgttctcagccacacatttttccatctcccctcagaatccacctctcagaggtagcctaagtggccctcctaccggatgcgttgttttatcacgactgcagctttcttttcttagattctgccaatgcttttaatgggctggtcccctgcgaagagcagggattttgtgttttcttttgaagagcgtggtagatttctgagcaccctgtggcagtctgtaa

SEQ ID NO: 7341 - DNA, 500 bp, Homo sapiens
  MAP TO CHR14.3; EXPRESSED IN BRAIN, SIGNAL = 2.5; EXPRESSED IN ADULT LIVER, SIGNAL = 2.3; EXPRESSED IN LUNG, SIGNAL = 1.7; EXPRESSED IN BONE MARROW, SIGNAL = 2.2; SWISSPROT HIT: P34504, EVALUE 1.60e+00
aagggaagggtgtgaaatcctcagcagatccgctctggcctccttgttccggagtaagccagggagagagagaaaaagggggaaaagatgaggggatcagaaggcccaggcatggctttgcttttctttttaaaatcctttttctttggaccccgctgcctggaggaacaggggctaccccagcctggggcccgcagcaccatggcttcctggatgctctcccacctacctgccatcgcagctgcacgcggcgcctccgggagccctcagtggggtgcagcgacagagcccggcaggtgcagcagccgccagcccctctctccggtaaccccagggctgctgcacacatttgtcttgtgttttacaatccgccccttcacctccttccctgctgtttctccccatttcactcttctctatcccatttggctttcctcatttttcacttgagtgggtttcctatccccgactccgctccggcctcactctgctcaacacca

SEQ ID NO: 7342 - DNA, 508 bp, Homo sapiens
  MAP TO CHR14.3; EXPRESSED IN PLACENTA, SIGNAL = 3.6; EXPRESSED IN BONE MARROW, SIGNAL =  10; EXPRESSED IN BRAIN, SIGNAL = 4.1; EXPRESSED IN ADULT LIVER, SIGNAL = 2.9; NT HIT: gi13376297, EVALUE 0.00e+00; SWISSPROT HIT: P07916, EVALUE 9.00e-08; EST_HUMAN HIT: BF893620.1, EVALUE 0.00e+00
atcctatgagggatgggaggaggggagaggaaggattcagccagtgcccagactgaaattgattaatgtcaattgcactcttcttcacacatcttcaggttgcatgttcgtggagtagtttaggaataaatccacagcttgtggagtactaaaatacctagtggtctgctgtattacattatggccttccccagcagcttccaaggcagcctccaagtcactggcaggagaatttggctggaactgcatggaggactgcagagattcctctccatagttatagaagggactgttccaggcctgattgttccaggactgggtgcaccaggtctgagtgttccaggagtggttgctccaggactggatgttctgggtctggttgctccaggttgaattgttccaggtctggttgctccacattggaaagttcccagtcatgttcaccaggcatccccagtggtaggaagagtagaggctggggtaggtaggtgctgaggccttctgagtc

SEQ ID NO: 7343 - DNA, 540 bp, Homo sapiens
  MAP TO CHR18.3; EXPRESSED IN HEART, SIGNAL = 1.6; EXPRESSED IN BONE MARROW, SIGNAL = 1.7; EXPRESSED IN FETAL LIVER, SIGNAL = 1.1; EXPRESSED IN ADULT LIVER, SIGNAL = 1.6; EXPRESSED IN HELA, SIGNAL = 1.4; EXPRESSED IN PLACENTA, SIGNAL = 1.2; EST_HUMAN HIT: BG500029.1, EVALUE 7.60e-01; NT HIT: gi12084983, EVALUE 5.10e-01; SWISSPROT HIT: O60610, EVALUE 8.70e+00
tcattaaccgactggccttcgcattaacagcccctccatcgggggttgccttggagacaaagcttcctgtgggtaatccaagattatctagctctttgtcctacatgtgacccttaattacttgctaaattagaatggttttctgaaaatcacaagcggaggttaatatgttcttccagagctggtcaagctaagatgacactgaattcacagggaattcaagttacatgatccctgaaggcgtctctttgagtaagaagatgaactctccccctgggaggcactgcccccccataaagcccctgtcactcactgtccctccgcctgcttttctagttgtggtttaatcttctcaggacgattcactatgtcaatattgagcagattcattctggtgcaggatcctgtatccatttgtctttgataactagttgctttaaatttgagtacatatttatatcataattgcaggtttttactctttatttacacaattacaaggcttcatgtacccatgtgggacaggcaagggaactgaag

SEQ ID NO: 7344 - DNA, 541 bp, Homo sapiens
  MAP TO CHR18.3; EXPRESSED IN HELA, SIGNAL = 2.6; EXPRESSED IN BONE MARROW, SIGNAL = 1.9; EXPRESSED IN ADULT LIVER, SIGNAL = 2.1; EXPRESSED IN BRAIN, SIGNAL = 2.2; EST_HUMAN HIT: AI815044.1, EVALUE 1.90e-01; NT HIT: AE001646.1, EVALUE 5.10e-01; SWISSPROT HIT: P97377, EVALUE 1.70e+00
agcaatagcagggaagatgcacaggaaataaaaagacacatggtgatcatgatgatgctttgttcactcttcacctccacagacctccagaaatctaagggaaagggaaacacctgcaactttgctccccaccctggccctcgacttgccctttaccctaagatcacccccattgttttgcaggtgcctgcggatactgccagactctgcaatgctcagcatgagagtggactggggggtaaacggggaggggtcccactgtttgaataatcccaaaacttgttctccaggggccaggagagtggctccttcccggccagactctgctttccaaaatcatatgcaagaccacagtcttggttggtaacattctttcaccaagaggtcagtgaaagcatccactgccttccattgaaagtggaagagggaatttggaagacaggccttgcagatgagtttcgtcttccctgccagttattatcgcatgtctaagttagggtgttaacacttcagatgagtcactcatggcagtggctagaca

SEQ ID NO: 7345 - DNA, 552 bp, Homo sapiens
  MAP TO CHR16.3; EXPRESSED IN BONE MARROW, SIGNAL = 0.8; EXPRESSED IN FETAL LIVER, SIGNAL = 8.8; EXPRESSED IN ADULT LIVER, SIGNAL = 0.93; EST_HUMAN HIT: BI759722.1, EVALUE 3.00e-74; NT HIT: AF169631.1, EVALUE 2.00e-74; SWISSPROT HIT: P52734, EVALUE 3.00e-03
ggactgcctgtgtttgtgtgcgtgtttgtgggtgtgcacgtgtgccacatgccgctgagtgagacccagggcctagcctggaacctggggtacagaggcgaggccgcctctctgggtgaggtgcgttccctgcacccgtcccgggagtctgccttctagaccctagcatgtgcacctgtcctgggagtcggccttctagaccccagcgtgtgtccctcctgcagcagaggcgtgcagcaccacggaggatggggccgaacccctgctctgtccctcgggctatgagtgccacatcctgagcccaggtgacgtggccgaaggtatccccaaccgtgggcagtgcgtcaagcagcgccggcaagcaggtgagtgtggcaccccagccctgatcctggctcctgccccagtccccttctccctgtaagcgcctctcacccgcatggacgacctgccccaggaagcagccccagcacctgggactgactgagagctcctcacatcttccccctgcccggctccttctttcatggcccctaccctttccctgtcaca

SEQ ID NO: 7346 - DNA, 524 bp, Homo sapiens
  MAP TO CHR18.3; EXPRESSED IN ADULT LIVER, SIGNAL = 1.5; EXPRESSED IN BRAIN, SIGNAL = 1.4; EXPRESSED IN HELA, SIGNAL = 1.1; EXPRESSED IN PLACENTA, SIGNAL = 1.2; EXPRESSED IN BONE MARROW, SIGNAL = 1.8; EXPRESSED IN FETAL LIVER, SIGNAL = 1.4; EST_HUMAN HIT: BE966443.2, EVALUE 2.90e+00; NT HIT: AL163279.2, EVALUE 5.00e-04; SWISSPROT HIT: O05955, EVALUE 4.90e+00
ttggagagagaatggaagggatggtgggggagagagagatttctttaaaccagttgtgtatatgtatatatttatctctacatggagaagggttgaaataaacaacaaaacacacttagtttcaaaagagataatttactaaaagtatctctcacttagatgaattctgatatgtgaacaggcttatgaattacaaatttctggacagaaaacagggtaaaaaatctgctccgccaaggtgggcatattctgaaatgctcccttcaaatgtgacaaggagtacaatggagaagaagtcaagttctcaagaaaggagccaagagtctcgaaaagctgtgggctggggaggtattctcaggcagcaaaactgaagcctaatcaaggaatactttctgtccccagggaatatcactaacatttcgtctggggaatttcagaattgctatggaccagtaactgctcaatgctgctcagaattgtcctttctgaatcagcctccattatggagattgttccccctttgt

SEQ ID NO: 7347 - DNA, 573 bp, Homo sapiens
  MAP TO CHR14.3; EXPRESSED IN ADULT LIVER, SIGNAL = 2.5; EXPRESSED IN BRAIN, SIGNAL = 1.8; EXPRESSED IN PLACENTA, SIGNAL = 1.5; EXPRESSED IN HELA, SIGNAL = 1.6; EXPRESSED IN LUNG, SIGNAL = 2.3; NT HIT: gi14760099, EVALUE 8.50e+00; SWISSPROT HIT: P51652, EVALUE 7.20e+00
cagtcctgaccaatgtgtggacagggctgcagatggttatgccaagcgtccgctgggtaggatgctgagtgtgagtggctcatggggtgacatgcagagcagagcacagctcagctgtgagttatggtcagagttggccaagcagaatgtcatgccggtgccgaaggaatgtcccgtgtttaccgggaacatgggagataatggcctcatgagtacgtaagagagcacagacagcgcagtgacgaatcctgcttagctgcgtccccaaggatgaccagctggaccgtgcggcagatgggggccatggaaggcatttgagcagcgagaaggccagtcatacttgtgctttggaaagatctccatggatagttacacatagaaggtgaattgagctggtctggtcccgaggagaagggaacagatgtttgaccactatgaaccttatggtacatcttgcctggagccaaaactgagacaggttgagccgcaaggaacaaagatacaaatagatctgctgtggaggggacttgactgtttcccaagaagtcccttgggactgctctttgctggaac

SEQ ID NO: 7348 - DNA, 536 bp, Homo sapiens
  MAP TO CHR18.3; EXPRESSED IN LUNG, SIGNAL = 1.7; EXPRESSED IN BONE MARROW, SIGNAL = 2.5; EXPRESSED IN BRAIN, SIGNAL = 1.7; EXPRESSED IN ADULT LIVER, SIGNAL = 1.7; EXPRESSED IN HEART, SIGNAL =   2; SWISSPROT HIT: Q07154, EVALUE 3.80e+00; EST_HUMAN HIT: BI831184.1, EVALUE 1.90e-01; NT HIT: Y14970.1, EVALUE 5.10e-01
ctgaaaagggagaccagcagctactgatcaaccttcagggcctgattcaaacaacttttaatcttgcccaggaactttctaaagtgttgatgaactttcttcaatccctgagaaactaggttgccagacgagaaaggtgtttctgggtcagaactgtcaaaccaacgtccgcaccctgttccattttttatgagaggtactgaagacaactttccaatgaagatagtgaaactaatgattacctagagggaaaaatgtttgtcctagtctggcattcttactactaacttaagcttgtatccctaagtcaccaaaaagtcttgagctccagtccccaggcttattcgcccagttagatattcatagctcttcatttggagagtaagccatagagtatgatgtgggaaaagagagcagtcatgatgatttcctctgctataccttaaccttgaccccactctcaacctgggctcagtgacaacatgctgctgactttggtgagaaaacaaaggtgaagaagtgaaggcaaagccaaa

SEQ ID NO: 7349 - DNA, 571 bp, Homo sapiens
  MAP TO CHR14.3; EXPRESSED IN ADULT LIVER, SIGNAL =   2; EXPRESSED IN PLACENTA, SIGNAL = 1.8; EXPRESSED IN LUNG, SIGNAL = 2.7; EXPRESSED IN FETAL LIVER, SIGNAL = 1.5; EXPRESSED IN BONE MARROW, SIGNAL = 2.6; NT HIT: AF111168.2, EVALUE 0.00e+00; SWISSPROT HIT: O81972, EVALUE 5.50e+00; EST_HUMAN HIT: BG251534.1, EVALUE 2.00e-44
agaaagcagtcagagggctgggaaaataatacaggagtgctggtctccaaacaaactcttgccagattattctgtccattcagtcaaacctggtgggagcacctcaggatcttggacagagaatattataatccccaccctgcttcgccactgaggatctaacggaggactcccatttcttggggactcacatcaatgacgacatcatggcacttgaacttagtggctaagttcaacttcgtgtccacatcttccaccagattgacatactcctgtaatatctgtgggaagaggtacttccgattaatgattcaaacacccataaggcacagagctctacaaggtagaaaagaaagtcctgaagaaggcaaaagagttcaatagctaatgtttccagtttccatcatcaaccacaggactagttctgcaatgggaatgaggtaacgctacacagtacttccatgctgcctcagtaagcaggaaagagcacacttctcctgatcctcgagccagatacacatgccagcaatgagtgctctagctgtgatccagtgctctgctcatttctccc

SEQ ID NO: 7350 - DNA, 525 bp, Homo sapiens
  MAP TO CHR16.3; EXPRESSED IN ADULT LIVER, SIGNAL = 1.3; EXPRESSED IN BRAIN, SIGNAL = 1.5; EXPRESSED IN HELA, SIGNAL = 1.1; EXPRESSED IN PLACENTA, SIGNAL = 1.5; NT HIT: AF217796.1, EVALUE 1.30e-01; SWISSPROT HIT: P11837, EVALUE 1.30e+00; EST_HUMAN HIT: BF062602.1, EVALUE 1.00e-128
ttctgcttccaaatgcacaggattgggttgtacagtatgagcccatcttttatggaagtttaagtcctctgtcttctgattttcaggacatgaggctctgcctgcagtcagcaacttggaatattcagacttcagaccagcatcacagattataaccctccgtaaatcatctgcatcccagctcccatcaaaagccagcctgaaggacccatggacacgtgactccagtgttctcaacaacatcttaagatcaagttggtttgcacaacatttgcatctacttgggacaaagcaagaacaataagggcaaaaaagtaagttttcatacagctgaatttattcggttaaataaactacccttctttttgagatggggtctccctctcttttttttaagtccataaaatgttttatgagataatggtgatagtcaattgtgatagctgccattgcctttaatatccttagatggcaaaacagaattttattgggactaatttctttccttctctccactctctgcaa

SEQ ID NO: 7351 - DNA, 566 bp, Homo sapiens
  MAP TO CHR14.3; EXPRESSED IN HELA, SIGNAL =  11; EXPRESSED IN FETAL LIVER, SIGNAL = 6.4; EXPRESSED IN ADULT LIVER, SIGNAL =  27; NT HIT: U48865.1, EVALUE 0.00e+00; SWISSPROT HIT: Q15744, EVALUE 1.00e-52; EST_HUMAN HIT: AW070239.1, EVALUE 4.00e-24
aacagtcccaacacccagtcacagtgcaactttattcagccatataatcattatgctgggtcctgccctctttgccaccccggttgccatttatccatggtctatgtctcagggttctaggcccccagcaggatgggggtccgcagagttaggccgtgccagggagcctggtgcccacaatccaccagccagcctcagctgcaaccccccacgcccttgatgaggttggccgcctcaggaatctggcggaagaggttgcggagggtgtctagctcctgggtgagctgctccacgcggctgcggaggcgctcgttctctgccatgtactccagcaccttctgctgcgtctccagaatgcgcctcttggccttgtctcggctcttgcgcacggcgatgttgttgcgctcccgcctcagccggtactcaaggctatctttgttcactgccttcttgcccttgtgtaaggggccagccggggagggcgccttcaggaggggactgcaggggggtgcggcagtggccaaaggggcctggaggggaaggcacggagagacggagaggtgagg

SEQ ID NO: 7352 - DNA, 585 bp, Homo sapiens
  MAP TO CHR14.3; EXPRESSED IN LUNG, SIGNAL = 4.5; EXPRESSED IN ADULT LIVER, SIGNAL = 4.5; EXPRESSED IN PLACENTA, SIGNAL = 4.7; EXPRESSED IN HELA, SIGNAL = 4.3; EXPRESSED IN HEART, SIGNAL = 5.6; EXPRESSED IN BONE MARROW, SIGNAL = 7.1; EXPRESSED IN FETAL LIVER, SIGNAL = 4.6; EXPRESSED IN BRAIN, SIGNAL = 4.5; EST_HUMAN HIT: BI560865.1, EVALUE 0.00e+00; NT HIT: gi13654838, EVALUE 1.00e-45; SWISSPROT HIT: P07311, EVALUE 3.00e-10
tagatgctcaggcaccactgactaataataacagcagggtgatcttccatttacaccatgttttaccgattgcacagcattttcatactcattgctctacaaactacctctttgccatgcagctaccaaatagccagcggcttctagttcacatttgtcaagaacacgtcccttgttcctatgcccacaacctaggttaccaccccaaagcctgcaggccacatacctgagtatgcttacggaaaaacaccccttgcaccttcccaaaaatttcataatccactgatatcagggtgtttccttctgccatgctcaaacctgtcagaaaccaggaaagcagaagagtgaagggctattattccaggacccgcaagcctgagtcagaaagggccacacccacccctgtccatccttaaccattgcgacctctccccgacttcaaggtcctggaaatggaaacgtgagtggatgtgataaggtgtgtgtgaaggaagaaccagacgccgggagagggagcttcggatcgcagctgcccgctgaagcctcttctggggaaataacctgaggaccgatgacctccttaca

SEQ ID NO: 7353 - DNA, 597 bp, Homo sapiens
  MAP TO CHR18.3; EXPRESSED IN PLACENTA, SIGNAL = 1.3; EXPRESSED IN BONE MARROW, SIGNAL = 1.1; EXPRESSED IN ADULT LIVER, SIGNAL = 1.2; EXPRESSED IN BRAIN, SIGNAL = 1.3; EST_HUMAN HIT: BG722090.1, EVALUE 0.00e+00; NT HIT: gi9631294, EVALUE 2.30e+00; SWISSPROT HIT: O14867, EVALUE 7.60e+00
tctgaaccccacacattgacgaagtgccagccatagcaatagtttcagacccgtggagtcagctgtgctgttgccaacctccatcacctgtccgcctttatcctgggctctgttcctgtggatttgaacaaatagatgagcggcatcggaagaaagctttagctgcatgtgtttgggtgaccacgagagggcagcacgtaagagaccagtgtcggccccgctgccttcttgaacacaccggaagcctcctaggaaaactgcagattttgtcagactgtgaagtagaagagtcaaagagccttcattgcttccttttaaatgaccagcctactaaggaatttagaatgcccaagtaaggttttcacttaatcctttaagaaatacatctaatatttctaatctaatctatcattttcaatggaaaacagtattttttttttcagtgattctcactgctttctttctgaggaacttgaaatgaatcttatgttttatttatttttcaatttctaaggtaaggactgctggtcagactggacttcaaaattcctggatccttaagacccaatgcatcagacaaatgtcctgctggatcct

SEQ ID NO: 7354 - DNA, 560 bp, Homo sapiens
  MAP TO CHR14.3; EXPRESSED IN BONE MARROW, SIGNAL = 1.5; EXPRESSED IN BRAIN, SIGNAL = 1.3; EXPRESSED IN ADULT LIVER, SIGNAL = 0.94; SWISSPROT HIT: Q28036, EVALUE 9.20e+00; EST_HUMAN HIT: BF035327.1, EVALUE 1.00e-51; NT HIT: AF020503.1, EVALUE 4.00e-23
tcagcacttgcttcttcaccttgtacttttatgttatagagatggctttttttttcttaaacctcatgaaccaatatctgctaccttccaacttttcttctgtatcttcctcacctctctcagctttaatagaattgaagagagttagggccatattctagattacattctgggttaagagaatgttgtggctggtttgatcttctatccagaccaataaagctttctctgtctcagtgatagggctgttttgctttctttttatttatgtgttcatgggagtagcacttttagtttcttacaagaacttttcctttgcattcacaacttggctgtttggttcaagaggcctagctcttggcctatcttggtttttgacacaatttccttaccaagcataatcatgtgtatcttttcatttaaagtgagaaacatataactttttatttcacttaaacacttagaagccatgatagcattattaattggcctgatttcaatattgttgtctgaaggaatagggaggcctgaggagagagagagagagatagggggatggg

SEQ ID NO: 7355 - DNA, 589 bp, Homo sapiens
  MAP TO CHR18.3; EXPRESSED IN HEART, SIGNAL = 1.6; EXPRESSED IN ADULT LIVER, SIGNAL = 1.3; EXPRESSED IN PLACENTA, SIGNAL = 1.3; EXPRESSED IN HELA, SIGNAL =   1; EST_HUMAN HIT: AI635626.1, EVALUE 3.30e+00; SWISSPROT HIT: P03448, EVALUE 1.90e+00
aaggtgtcctatcaattcaattttacttttaccttttaagtagactgcaagctcctaaaagtcaggtacaaactgacagcctcaccagctttcagtccaacagaacacagcccactgtttgtctaaacacaatcttttcacctcagtcacacttactgattgaaagcatgcagggtgttgggacttttaagggaattggcttactaagagtgcttgtccagattcaggtaagagtcagtgaaggaacttgaggtggagtgtggagttcaaataaggtaagtgctattcggtactgggagtctgtgaaaacagcagtaatcagtagatcttttctacttggcagcagactctataccctgggctctgggtcaggacctcttctctattcacaggaggaaaaaggcttaagaagagcagagttggttccctaaatcaaagtttgattttggtgcataattcttatgctaacacagcaataagaaatcagtcaaagtaactgtttggaactccaaggtaacagaagtccaattttaggcaaatgaggcaagagggagtgtacagtctgatgacaaggaagcacaggtggatt

SEQ ID NO: 7356 - DNA, 507 bp, Homo sapiens
  MAP TO CHR18.3; EXPRESSED IN HELA, SIGNAL = 1.5; EXPRESSED IN BONE MARROW, SIGNAL = 1.2; EXPRESSED IN FETAL LIVER, SIGNAL = 1.4; EXPRESSED IN HEART, SIGNAL = 2.1; EXPRESSED IN LUNG, SIGNAL =   1; EXPRESSED IN ADULT LIVER, SIGNAL = 1.3; EXPRESSED IN PLACENTA, SIGNAL = 1.4; NT HIT: AB017161.1, EVALUE 4.80e-01
ttcaggagaggatggtcaggtagctgtgcttccggtcagcatgtcttccgtctgcctcccaggtcctgacgtggtagatttctcatttgtgcctcatcctctaattctgatctctcccaaggctcactcccagccagtgagttctgtttttgacaaggtgagcccctgagcttcccacaagacttctagcaccagtccttccccataaagatgatgcccacttaccttctttccttcttttgctgaaagccgcagtctgactaggaaggttaataaatgagatgaccacagactgttttcctgaatgtgatactggccaaataggtctcctgcctggttgtaggtctcttttctgtgattcttaaatgaaaagggtaggagtattctttgacattctctaaccactggtcactcattgtttgaatgttatgctgttttgtgctgtgtgtttaattatgacaaggctccctctaaatatcagtagcccctttccatatccctggggtt

SEQ ID NO: 7357 - DNA, 527 bp, Homo sapiens
  MAP TO CHR16.3; EXPRESSED IN LUNG, SIGNAL = 4.6; EXPRESSED IN BONE MARROW, SIGNAL = 7.2; EXPRESSED IN ADULT LIVER, SIGNAL = 7.7; EXPRESSED IN BRAIN, SIGNAL =  10; EXPRESSED IN PLACENTA, SIGNAL = 7.3; EXPRESSED IN HEART, SIGNAL = 7.8; EXPRESSED IN HELA, SIGNAL = 5.5; SWISSPROT HIT: O83640, EVALUE 8.40e+00
agggtgatttcctaggctggcggagaggcgcacctgtctgggatgcttatagatttgattagataacatttgtcagctgcatcagccgcaggtaactcctgacgagaatttatttccctgtaggtagtggaacgaagcgatgttccaaatttcatggggctgccgaagaggcttgcaggagtgtcacgcctaagaggctgtacaacagttgtcaggataatcagactatttgcaatcaccattttctgctcttttttcccccttaagtacctaaatggaaatgtaagatagccaagaagagaagacacatgtgtgtgctatacatagatgatttcccgtcaaaatgtaatcgatttatagttttgttgataaattcctgtgagtacttgtcctctctttccctctcttgtgtgtctttgggtgcaactcttgaattatgaatacacaatgagccttgctgttcctgtcaaaagcttgtcttcatataccaaattataatacttatacccaggagattttccattttg

SEQ ID NO: 7358 - DNA, 521 bp, Homo sapiens
  MAP TO CHR19.3; EXPRESSED IN ADULT LIVER, SIGNAL = 1.3; EXPRESSED IN PLACENTA, SIGNAL = 0.95; EXPRESSED IN HELA, SIGNAL = 4.5; SWISSPROT HIT: Q03405, EVALUE 4.00e-22; NT HIT: U09936.1, EVALUE 0.00e+00; EST_HUMAN HIT: BF348853.1, EVALUE 8.00e-81
tccacatcctgatggacaagtcctaattccttacaataatattcacccacctgaaggaaatcccaccttttccacagggagacccaccacagttaactccagcttaactggaagtcaatctcttgcggaactctccacccccaataagtgttccctcccagcctcggagagggcctcaccgtgagtgccggtggctaccagacattgattcatggggcctcggcagtcaatgaggaaagtctcttcagaggagcatccatgggtgctgttccccttgcagctgtaacactggcggccattctgcggcagattttcaagctccaggacttaggagaagaccagagacacagagaccaagaaaattagtgcttggatctccacttccttgaatgacctccccaggacttccactccgagccagagatgtcatggagccaccttgtggtcaggcgtctgaatggcatttggagggggatggttttcgagggcttgagagaaaccccaactttcaactccccatg

SEQ ID NO: 7359 - DNA, 543 bp, Homo sapiens
  MAP TO CHR18.3; EXPRESSED IN HEART, SIGNAL = 1.8; EXPRESSED IN LUNG, SIGNAL = 1.9; EXPRESSED IN BONE MARROW, SIGNAL = 1.9; EXPRESSED IN FETAL LIVER, SIGNAL = 1.8; EXPRESSED IN ADULT LIVER, SIGNAL =   2; EXPRESSED IN HELA, SIGNAL = 1.5; EXPRESSED IN PLACENTA, SIGNAL = 1.8; EST_HUMAN HIT: R20761.1, EVALUE 7.60e-01; NT HIT: gi13385879, EVALUE 5.20e-01; SWISSPROT HIT: P40238, EVALUE 1.00e+00
ctcagcagatccctagcaccccattccagtattactttcagattggttattgccagacaaattggtgcctccaaagtcttgaatttttggcctctttttttttttttggatttcctcttcctcttttcttagagggctggcctgtatcttgaacatggatttggcctgtccttgaagaggcccattgggcactgtctaggactcttctacctgccaaaccaccaggtaggccactggggctcttgtgtgtggcccctacccttgagggtccctggaccatgatagtagatccggcacccagtaggcaaacatctggtcccacctggctctctgaggttgtggctgtctgctgctggccagtacttcccctcttaaggctgtctgtgggaacttcacccatcattggatttagtctgtaggatcctggaggagacacctagtgaactggtgaggaggccacaatggagtctctctcagacatagacaaggtgctgctggctctgctgacatagtaggtatccctgcggcaggagtgtcttagtc

SEQ ID NO: 7360 - DNA, 564 bp, Homo sapiens
  MAP TO CHR16.3; EXPRESSED IN FETAL LIVER, SIGNAL = 1.9; EXPRESSED IN BRAIN, SIGNAL = 1.7; EXPRESSED IN ADULT LIVER, SIGNAL = 1.3; EXPRESSED IN PLACENTA, SIGNAL = 1.6; EXPRESSED IN HELA, SIGNAL = 2.2; EXPRESSED IN LUNG, SIGNAL = 2.3; EST_HUMAN HIT: AA354570.1, EVALUE 7.00e-23; NT HIT: L39062.1, EVALUE 0.00e+00; SWISSPROT HIT: Q01113, EVALUE 1.00e-12
ctcttagcagtgagggtggcagggctgcacaccagggctggtgctcctgcctggaggctggacatgacctcagtgtccttagtgagggctgggctgacccttgcgcactgcagtgctgagacggcccagggaccttatgacccaccatgtggcagatgggaagagtgaggcccaggagtggggctcacacaaggtccttcagcaggtgacacaaacctccaaggcccatcacaaggtccttcagcaggtgacacaaacctccaaggcccatcacaaggtccttcagcagatgacacaaacctccaaggcccatcacaaggtccttcagcagatgacacaaacctccaaggctcatcacaaaccttccactttggcccagggcactaaagggcgcacctttgccaggtgggtttggggggagcctcctggcactgaggctgctcacagccctgggcccttcctgcccacgggccctctgatcccaccctgggggtggccaggcaacacccttgttgctgtgtccatctttctcctgctgactggcccgacctacctcctgttcaa

SEQ ID NO: 7361 - DNA, 586 bp, Homo sapiens
  MAP TO CHR16.3; EXPRESSED IN HEART, SIGNAL =   3; EXPRESSED IN HELA, SIGNAL =   2; EXPRESSED IN LUNG, SIGNAL = 2.5; EXPRESSED IN FETAL LIVER, SIGNAL = 3.1; EXPRESSED IN BONE MARROW, SIGNAL = 4.1; EXPRESSED IN ADULT LIVER, SIGNAL =   3; EXPRESSED IN PLACENTA, SIGNAL = 2.2; EST_HUMAN HIT: AL519832.1, EVALUE 9.00e-84; NT HIT: gi14785624, EVALUE 6.00e-84; SWISSPROT HIT: Q63880, EVALUE 2.00e-14
aactggggatctaggttggggtccggaacctgaagggagggccccttacccatgatgtctgaggcagagaagggcaccccccaagcctccaccctgggagaggggtccagccaaagccagaattatacagtgaacttggtcccttgggcagagggcattgattcctgggctgaagcccaggttccagcaggatatgggacaaagagcaacaggctgtggagatgccaaccacggctcccagacaggccagacctggggagcagagaagggtctggcatcctggtggctaattcaaagcaaacctgcagaggctggcgaggagccaggctgaactaaccgttgccccaacactgcccccagcactggagatgagcatgcacctggcaaccagggcttcctagatgtggtagctgctttgcgctgggtgcaagaaaacatcgcccccttcgggggtgacctcaactgtgtcactgtctttggtggatctgccggtgggagcatcatctctggcctggtaagtcactatagggggctagtgatggtggccaggagggctccggtggtctcagaactcccagctcctctg

SEQ ID NO: 7362 - DNA, 501 bp, Homo sapiens
  MAP TO CHR18.3; EXPRESSED IN PLACENTA, SIGNAL = 3.2; EXPRESSED IN LUNG, SIGNAL = 3.4; EXPRESSED IN BONE MARROW, SIGNAL =   2; EXPRESSED IN FETAL LIVER, SIGNAL = 2.2; EXPRESSED IN BRAIN, SIGNAL = 2.9; EXPRESSED IN ADULT LIVER, SIGNAL =   2; EST_HUMAN HIT: BI518280.1, EVALUE 1.80e-01; SWISSPROT HIT: Q09445, EVALUE 7.00e-01
gaacccctcagacacctgaccttgctccctgatgcctttcccaggcaatcggctgcagtggtcctggaacagcagcgaccagccccacacagcctgttccacagcacccactgcttcctgcatgacagggaccaccacacacagagcctgggctgcgaggaggacaccagagtggggagcaggtggggaataagaaaaaacaccctacactgcagcctcactgaggctgagaatgggggagttgaagccaatactgagggccagcagatggctctgtctttggcaggcagccggagccctcctggaatgggcattaccactgtggccgttttagagagaaggctctgaggtctaagcacctctgagataacacagcaggtgggactgcatggtgcatccatcttccacaccccaccaccctgcacgaccttagccactgggctagcagtcacttgactgtgttacttacaacctcaccaaacccaccagcatagagatggt

SEQ ID NO: 7363 - DNA, 572 bp, Homo sapiens
  MAP TO CHR19.3; EXPRESSED IN FETAL LIVER, SIGNAL =  16; EXPRESSED IN ADULT LIVER, SIGNAL =  11; NT HIT: gi14759600, EVALUE 0.00e+00; EST_HUMAN HIT: N72206.1, EVALUE 0.00e+00; SWISSPROT HIT: Q9Y284, EVALUE 1.00e-12
atcagctttgccaactctcggagctcggaggacacgaagcaaatgatgagtagcttcatgtgagacttgccctacagaacaagtgactcttgagtaaggggtggggggaccccagcctggccatcctagactgacacctctctcctgtctcaggctgtccatctctgccgtggtgatgtcctatctgcagaatcctcagcccatgacgcccccatggtgataccagcctagaagggtcacattttggaccctgtctatccactaggcctgggctttggctgctaaacctgctgccttcagctgccatcctggacttccctgaatgaggccgtctcggtgcccccagctggatagagggaacctggccctttcctagggaacaccctaggcttacccctcctgcctcccttcccctgcctgctgctgggggagatgctgtccatgtttctaggggtattcatttgctttctcgttgaaacctgttgttaataaagtttttcactctggctgtcagcctcttctgttcagtggggtgttcctcctacctggcgggaagggctctagccccatag

SEQ ID NO: 7364 - DNA, 511 bp, Homo sapiens
  MAP TO CHR14.3; EXPRESSED IN BRAIN, SIGNAL = 3.9; EXPRESSED IN ADULT LIVER, SIGNAL = 6.9; EXPRESSED IN PLACENTA, SIGNAL = 5.9; EXPRESSED IN HEART, SIGNAL = 6.5; EXPRESSED IN HELA, SIGNAL = 3.9; EXPRESSED IN LUNG, SIGNAL = 5.6; SWISSPROT HIT: P41593, EVALUE 4.70e+00; NT HIT: X77586.1, EVALUE 1.90e+00; EST_HUMAN HIT: AA399527.1, EVALUE 7.00e-69
acatgtgtcaggctgcagtggcgcagtccctggctcccacacagcctgccgccaacacacccggggctctcccaatggtcgtgccattctaagcctcactccctccttactactcctcacgggtgctcagtgacgatgaatgaaatggtgcctgtattcgatactgttccacaaacacctattacctgatgctcttctgttacctgatttgctgctgctttttatttttaaaggaaaaattgaaaaacattctgaagcctgggtgtttacaagatacaaaaagtaagagtgagttgaaagaatcctcaaaacatgtcaccatctcaaacataacactgacttttgaaggtaaaagatattttcaaactaccttgaccccagtagaaagtgaggcaaatacatccaaggagatgaaggataagacctctgaagaaaagatgcctgattttcagagcacagctctcaaggctgaagaatccaggtatgtgaggcaggaacatgccaaaggaat

SEQ ID NO: 7365 - DNA, 550 bp, Homo sapiens
  MAP TO CHR16.3; EXPRESSED IN LUNG, SIGNAL = 3.3; EXPRESSED IN BONE MARROW, SIGNAL = 1.5; EXPRESSED IN ADULT LIVER, SIGNAL = 1.9; EXPRESSED IN BRAIN, SIGNAL = 2.4; EXPRESSED IN HELA, SIGNAL = 2.7; SWISSPROT HIT: P43494, EVALUE 2.30e+00; NT HIT: L78833.1, EVALUE 2.10e+00; EST_HUMAN HIT: BG259117.1, EVALUE 0.00e+00
gccaaaaggcagcaaataagtgccttttcttcccttcagaatacatggacaatccaaagctctattagtctattattcagaatgaaaagtgtttacaatattcgtcctcttactcctcagtatgtgagactgttcctcgtagcaggtaatttcttccgaattcaaaaactcctcatggaagcatctgtttttgtcatcaaggagggggctgtatgtggaattgcaaggccaaagacatctcgggtcaactcttctcaggaccagatccaagtcgccagtgagaacacacattcaggcagcctccaccagcgccctgcctcaggagcgaggctccctgcttcatgtgggcaagagctgcccttgttttcccagcgggcagttgggggtctggagcctaggaagcaaagtgaagcacacactcctgcttccttccttccctgcagttggtgagtatctggctcagtttaggttaatatcatctcttcagcctggcccagtttaccactatgggaaggagcccagcagcaggggctgccagacctggaaatag

SEQ ID NO: 7366 - DNA, 544 bp, Homo sapiens
  MAP TO CHR14.3; EXPRESSED IN FETAL LIVER, SIGNAL = 1.1; EXPRESSED IN ADULT LIVER, SIGNAL = 1.1; EXPRESSED IN BRAIN, SIGNAL = 1.1; EXPRESSED IN PLACENTA, SIGNAL = 0.86; NT HIT: AJ010770.1, EVALUE 3.30e-02; SWISSPROT HIT: P71613, EVALUE 1.00e-03
gaaggcgtctcggttacttgcgggcctggccgggctggctggtgggctttcttgggagcaggcctcttccctccggctccccagctgctcgtatccgggtttacagccccggggcagtgcctacagggcctgcaggctggatgttctgagatttttattggcatctccatcaagatgagggccatgggggtccttcaggtcttccggagccgctttattggggctggccttccagacacggcggggagcagcgatttccaggggaatctggtttctctgctgggctcgcacccgtttcctctgtgtttggcttggcagcgcctgggcctggcctgttttgagcctcacctcgtgcttgggcttttgtggcctgtcggtggatgaggtggcgcggagtagccgtttctcctcagccgcagggacacaaacggagctttgtatggggcagacgcaggtggaagggaaggagctcaggcctctcctgtgctcggggaaatgctctggagttggaggacgttaaaacacaagtgcaaaccactccaga

SEQ ID NO: 7367 - DNA, 587 bp, Homo sapiens
  MAP TO CHR18.3; EXPRESSED IN ADULT LIVER, SIGNAL = 1.5; EXPRESSED IN HELA, SIGNAL = 0.88; EXPRESSED IN LUNG, SIGNAL = 1.1; EST_HUMAN HIT: AW382741.1, EVALUE 0.00e+00; NT HIT: AB035089.1, EVALUE 0.00e+00; SWISSPROT HIT: P48594, EVALUE 2.00e-51
  unsure 325
  unsure 343
  unsure 417
gccaaaataacgaatctccacatagtcaattcattgttaaggtgtattagagatcgacagttagtcatatcagtttcttttttccatttgtatagcttgaagagaaactcactgctgagaaattgatggaatggacaagtttgcagaatatgagagagacatgtgtcgatttacacttacctcggttcaaaatggaagagagctatgacctcaaggacacgttgagaaccatgggaatggtgaatatcttcaatggggatgcagacctctcaggcatgacctggagccacggtctctcagtatctaaagtcctacacaaggcctnttgtggaggtcactgagngagggagtggaagctgcagctgccaccgctgtagtagtagtcgaattatcatctccttcaactaatgaagagtntctgttgtaatcaccctttcctattcttcataaggcaaaataagaccaacagcatcctcttctatggcagattctcatccccatagatgcaattagtctgtcactccatttagaaaatgttcacctagaggtgttctggtaaactgattgctggcaacaacagattctct

SEQ ID NO: 7368 - DNA, 503 bp, Homo sapiens
  MAP TO CHR18.3; EXPRESSED IN FETAL LIVER, SIGNAL = 2.6; EXPRESSED IN BRAIN, SIGNAL = 2.6; EXPRESSED IN ADULT LIVER, SIGNAL =   3; EXPRESSED IN PLACENTA, SIGNAL = 2.4; EST_HUMAN HIT: BI860161.1, EVALUE 2.80e+00; NT HIT: gi6978883, EVALUE 4.80e-01
caccaaggagaaggaagcagagtcccagaaggaaaacaggtagatttgctcacctggaggcttgtttgagattaactcggggaggagaacacagtgtgctaactgcaccccttggcttggcttctgccatgtttttttgtggatttcagcccaagcagggagcagttgtggcataaacttaagttgctgacccctgactaaataatgaccagtgtttacataagatgcagagaaaattgtcatctgtttgaattaaggggatcatttgttaaaatatgattactagtaatgggtttttaaatgtaaggtttacatgtgtataatgtgtccaaatttatacatcttgtaccaagccaggtggcatgaagtctttttgatgctgaagaatgtatcaaagtcctttgctatctttccgtgccacattgtgagcgggcttttcttcctttgacagttcctctgattctttctctttgagcacatattctgcctctgagccttaccac

SEQ ID NO: 7369 - DNA, 511 bp, Homo sapiens
  MAP TO CHR14.3; EXPRESSED IN LUNG, SIGNAL = 3.3; EXPRESSED IN BONE MARROW, SIGNAL = 3.1; EXPRESSED IN ADULT LIVER, SIGNAL =   3; EXPRESSED IN PLACENTA, SIGNAL = 2.6; EXPRESSED IN HEART, SIGNAL = 2.9; EXPRESSED IN HELA, SIGNAL = 3.2; EST_HUMAN HIT: BG284518.1, EVALUE 1.00e-120; NT HIT: gi14784669, EVALUE 1.00e-120; SWISSPROT HIT: P38604, EVALUE 1.60e+00
tctagagctgcactggcaacattagagaagtttttccttaaaaaaaaaattaacagttgtccttttctttttgccccttgacaggattacagactagttacatacagtaaatgggttgtgaaggtgatgtccatcgatcatttttttccttttttttttgtaggcaatctttggcagccagacactacctaactccaatttatggacaatgaataatggtgcaggttgtagaatttccagtgccacagctagtggccagaagccaaccactctgccacaaaaagtggtaccacctccaagttcttgcgcctccctggttcccaaacccccacccaaccacgaacaagtgctcagaagggcaacatcccagaaagcttccaagtaagtttttttctgttcaatttctactgagttttatcagttctaagctaatagtactctttatttattactcttcaagaccgttcgtactgaagtactggaaacaagaacacctgctgggaaataaagg

SEQ ID NO: 7370 - DNA, 535 bp, Homo sapiens
  MAP TO CHR16.3; EXPRESSED IN ADULT LIVER, SIGNAL = 1.8; EXPRESSED IN PLACENTA, SIGNAL = 1.1; EXPRESSED IN HELA, SIGNAL = 0.98; EXPRESSED IN LUNG, SIGNAL =   1; EXPRESSED IN BONE MARROW, SIGNAL = 1.2; SWISSPROT HIT: P56099, EVALUE 8.50e+00; EST_HUMAN HIT: BG179683.1, EVALUE 1.00e-123; NT HIT: AJ303140.1, EVALUE 7.90e+00
ccttctctggcaaatcgaagtgtcctcttgtgggaggcggtgggcagcgacactcccgttggacgtcagtgctctcgggcccggccaccccggagcagaactcacttagggcctggtgcccctgtgcccagttctcagaatgtcggagtgctcagttctcagaacgccggagtgccccattcataacctgcagccccgttcatagcctgcagctcccctccttcctctcctcctggtcttcagggagcacccccagctcccctccccactctcaaaccctcctcctccctcccctctctcagttccctgtttgcaggatctcctcctgcccactctccagcccaggtcctcccctctcatctccaattctgcttcacgggccatgacagcaggcaggccatggcctgctctcagcagtttgatcgatggactaaggagatcactcctacgagagtgaaaaagtcaaatgtgcctgagattcggatggggagctctcaaagctatggattgcaagagtcaacaccgcctcaaaagt

SEQ ID NO: 7371 - DNA, 533 bp, Homo sapiens
  MAP TO CHR14.3; EXPRESSED IN FETAL LIVER, SIGNAL = 1.3; EXPRESSED IN BRAIN, SIGNAL = 1.3; EXPRESSED IN ADULT LIVER, SIGNAL = 0.96; EXPRESSED IN PLACENTA, SIGNAL = 1.3; SWISSPROT HIT: Q03262, EVALUE 1.50e-01; EST_HUMAN HIT: BF315953.1, EVALUE 4.80e-02; NT HIT: AE006608.1, EVALUE 1.30e-01
atttgccagtccctgatttgagttaaagtcttccaaagatcataagagaatacaagagtagttttttaaggcctcagaaaacaaaaaaaaaaaaaaaaaaggaaggaagaaaggaatgaacaagagaaggaaagacaaacgaagatgttcactaaacaaataagttcaccaaagggctcaaatgcattcttcttcttcttcttcttcttcttcttcttcttcttcttcttcttctttttttctgcttgccttgccttgtctttctaaaagaattgaatggtcctggtgttcagggcccatgggcccccttttgagttcttccatggcatttatacggccctgtgagagtgaattctaatgacctaaggccctgcataatccagcttgtgctcacaacttgcttcatctcattccacagctgcctgtgcacaccccgctcccacacaccggctccttccattcctcacatctgccaggatcccctgacctcagggcctcttaccatactggtccctctgcctgaatgctcttcc

SEQ ID NO: 7372 - DNA, 539 bp, Homo sapiens
  MAP TO CHR16.3; EXPRESSED IN LUNG, SIGNAL = 1.3; EXPRESSED IN BONE MARROW, SIGNAL =   1; EXPRESSED IN ADULT LIVER, SIGNAL = 1.5; EXPRESSED IN PLACENTA, SIGNAL = 1.5; NT HIT: AL445835.1, EVALUE 1.30e-01; SWISSPROT HIT: Q08397, EVALUE 1.70e+00; EST_HUMAN HIT: BE568488.1, EVALUE 3.00e-03
tgagttggcttgcagttgagtagttgatgtcatgttatggtttgtagacatttaaacatatattaattttaatttagtggttttcttttcatattttagagccaaaatatttttttttttcagttctcagatattttcacaggcccttgagaagcatgttataaagcttagatattatgcctgtaatgccaaatgttttaaagagccgagcctgggatggaggtggcagggatcgggtaagggtggcgtgggtcagggttctgacaagcaccatcctagaatctgggaacatcttctaccatcaggtgtccccatcctgttggcttacacaagactcacagccacaaacctggccacgggcagtcgtgaaattaacatcacagcatgggataactatcacgatgtgggcatcagctatttggaatggacacccatgagctggaccaggatcctgaaggatcccttcagcaccaggtgtcgactccgcagtttctgaatgtggagtcatcttgggagtcccagagaaaggatcgggactg

SEQ ID NO: 7373 - DNA, 501 bp, Homo sapiens
  MAP TO CHR14.3; EXPRESSED IN ADULT LIVER, SIGNAL = 0.95; EXPRESSED IN BRAIN, SIGNAL = 1.3; EXPRESSED IN PLACENTA, SIGNAL = 1.6; EXPRESSED IN FETAL LIVER, SIGNAL = 1.5; NT HIT: AB010444.1, EVALUE 4.80e-01; SWISSPROT HIT: P15328, EVALUE 2.40e-01
aaagagatgaggactcgcccccaggaagtctgactatacaataggaatggtgtatttatttattcagccctttcctacactgcagtcatttcatttcaccctcaggatgtgtatttagtggtaagctttctttcttttcctgttagtttcctgcaaaaggacatcagtgtcttcctcattggagcagctgataagaaggatgttgttgctcaaatagagacagaaaaacatatttcctatcacagacccaggccatcccaagggcatggagaattagaccaggttgtggaaataatagaagaacctgattttcatgcctatttccctggtgccatcttcctccctgaaatactctgcaataattacaccttccacttaagtaggatttcacacttttccaaagtagcatcacgttgtacggaagtagagttggctgcactgtagctggcatagcctattagttactttggagggtttatatgaagaggcaactttgggttt

SEQ ID NO: 7374 - DNA, 563 bp, Homo sapiens
  MAP TO CHR16.3; EXPRESSED IN ADULT LIVER, SIGNAL = 5.9; EXPRESSED IN HELA, SIGNAL = 6.4; EXPRESSED IN HEART, SIGNAL = 4.1; EXPRESSED IN FETAL LIVER, SIGNAL = 8.7; EXPRESSED IN LUNG, SIGNAL = 7.3; EST_HUMAN HIT: AW166505.1, EVALUE 0.00e+00; SWISSPROT HIT: P03181, EVALUE 2.10e-01
agaggacagccagagtgagccctcaccatctgccaaacagcacaaaaaagccaagaagcgcaagagcctgggggctcccgtgctccacgctgtggccagcatggtgtctgcacccttagagacattgaggctggagcgtgagtggcagtccctggactgttccttctccccctgcctgtggggcccgacatggcacaacctggcgctctagcctctgccctgccctgggtctttgcaggaaaggcccagcgcctgcggccgctgtaccagtacgtcaactattgcaaccctgagctgaaccaggcagggaagggggacggggaggctgaggtggaggcagaggcagagctggccccggttcccgaggagggaggtgtggagcaactgcaggccttgctgcccttggcaggtgagctgggcccaggcctcgctttgccctgtcccagtccactagtgacccccacccatgccctggctcccctcggagaggaggctggagaggagcctgggggcttgcccagcttgggggtgagtgaccacaaggccgaggtggataagtcaac

SEQ ID NO: 7375 - DNA, 538 bp, Homo sapiens
  MAP TO CHR16.3; EXPRESSED IN LUNG, SIGNAL = 1.4; EXPRESSED IN ADULT LIVER, SIGNAL = 1.2; EST_HUMAN HIT: AL040556.1, EVALUE 2.00e-66; NT HIT: gi13629292, EVALUE 1.00e-66; SWISSPROT HIT: O75437, EVALUE 6.00e-14
caaagcacaagatcccaagggacattctgaaaagaaaataaaactcttagttattagatattccgaaggcaagttatcctcacccagagagaccaggtttctgtagttttctaacatcacatcctgatacaaattcttctgagctggttccaggtgttcccactcctccaaagagaattctacggccacatccctgaatgtcaacagtccctgaaataaaaataaagaatacactgaccatgtggccatggcagagttcttcatttgtcccaagatgaaatgacagttattggttctgacatatatgagtgacctgaattattcagtaagatcatttttaacacagtaatattttctaatgtagtctcaaactctgtggaaagaaaataacataaaatccacaaaactagtgtagatatttatatcaaatgtaaaatataaaactaaggcatcaacacaggaatatacatttttgggtgctatatttacatcatccagaatcagctgtgtataattctcaggtgcaaaagtcatggtg

SEQ ID NO: 7376 - DNA, 547 bp, Homo sapiens
  MAP TO CHR16.3; EXPRESSED IN LUNG, SIGNAL = 2.6; EXPRESSED IN BONE MARROW, SIGNAL = 2.1; EXPRESSED IN ADULT LIVER, SIGNAL = 1.5; EXPRESSED IN PLACENTA, SIGNAL = 2.3; EXPRESSED IN HEART, SIGNAL = 1.8; EXPRESSED IN HELA, SIGNAL = 2.6; EST_HUMAN HIT: AW603832.1, EVALUE 0.00e+00; NT HIT: gi14777947, EVALUE 4.00e-85; SWISSPROT HIT: Q9Y6M0, EVALUE 2.00e-07
accatctgaccgtcttccagacagcccctgagctacagctggctctgggcactgaggcgtgggaagccccctgaaggaaatgaaagctcgcggagggcgaggtggtgcagctgggatgcccagtttaatgtctgaacaaataagtgagtggctgagccaggctgaggctggttctatggggacccgggactgtcaggcacagccagttctggggaggaggccagggagaggttgtggggctcagtggggacaggactgacgctggctccttcccgaggccctcctggccaggggtggggggctcgagggagctcaccagacaagcatcccgctccccctccaagtagccggcacacagcatgtcctcagtgatgggtccctgtcctgctccccgccagtacagatggctgcagacttccgagtcgatgataggaaccttcagcttctgcagggtctgagggtggggcaagggaactgggaggaaagaggacagaatcaggtttgggggtctcccctcctcgttgcctcctcaaaggactattccccc

SEQ ID NO: 7377 - DNA, 503 bp, Homo sapiens
  MAP TO CHR14.3; EXPRESSED IN LUNG, SIGNAL = 1.4; EXPRESSED IN FETAL LIVER, SIGNAL = 3.4; EXPRESSED IN BRAIN, SIGNAL = 4.4; EXPRESSED IN ADULT LIVER, SIGNAL =   3; SWISSPROT HIT: Q90867, EVALUE 1.20e+00
gagaataacctgcgctttggaaactagtggcccttgaatgtgttgtcacttcgagtggccccttaagttttcatttattctgattcttagccaagtttacctcggtggtcaattttaattgatttcactttcttggcttctagaactgcagttcccacgttagaagagcagttgtcacctgcttctcagcagggtgctgtggtcgtcacggaaacaggcctgttcggtactgcaagaggtgccactcaaatcatcacagtaatgaagtgggggccgctgcggagactcacctctatcagacctctcctccgcccatcaacacgcgggaatgcggcgctgaggagctggtctgcgccgtggaagccgtgatcaggtaacacgcagtttcttagtagctgcctctgacaactccaccttgctttgagctaagctccgcacactgagatgtgcatatttaatgcaacctcaaatgcccttagcccagatgctcaccttcccacagt

SEQ ID NO: 7378 - DNA, 502 bp, Homo sapiens
  MAP TO CHR16.3; EXPRESSED IN FETAL LIVER, SIGNAL = 2.3; EXPRESSED IN BONE MARROW, SIGNAL = 2.1; EXPRESSED IN BRAIN, SIGNAL = 1.9; EXPRESSED IN ADULT LIVER, SIGNAL = 1.5; EXPRESSED IN PLACENTA, SIGNAL = 1.5; EXPRESSED IN HELA, SIGNAL = 1.5; EXPRESSED IN LUNG, SIGNAL = 1.5; SWISSPROT HIT: P30203, EVALUE 3.50e+00; EST_HUMAN HIT: AU160821.1, EVALUE 7.00e-01; NT HIT: gi6679562, EVALUE 4.80e-01
aaatggggttgattccttggcacttcacagacatcctcacctttctgttccctcagaatcgggttcctgtgaggctgggtagtgggaggcagggatggaggtagcaggatggcgtgggtgggattagcaagtctcggagtctgttgtcccatctcaaggggttccataaaaatcacctttttggtcctatattgggaacttgtgtggttctcagcttctgaccagaagctcctaggaagaactggctggtcacgactccttaagcttcatccttgatactggttgtgtcatctcagacccacgggttagtatggtagcttcactggcttttggggctgggtctgactttgcatctgattgctctggcctgtcattagcatccctgtaaggagagggaacggagtcagttcagggatattcttgccagaaaatctggggtcgaaatctccttccacttttcctcccagcagattggactcattggcgctctcatgttgaattt

SEQ ID NO: 7379 - DNA, 530 bp, Homo sapiens
  MAP TO CHR18.3; EXPRESSED IN HELA, SIGNAL = 2.1; EXPRESSED IN LUNG, SIGNAL = 2.2; EXPRESSED IN BONE MARROW, SIGNAL = 3.1; EXPRESSED IN FETAL LIVER, SIGNAL = 3.3; EXPRESSED IN BRAIN, SIGNAL = 2.8; EXPRESSED IN ADULT LIVER, SIGNAL = 2.6; SWISSPROT HIT: P10659, EVALUE 8.50e+00; EST_HUMAN HIT: BI019004.1, EVALUE 7.40e-01
cctgcttttcctcctcacagaggcaataaacttgtctaagactaagattatatactgagtctaagactcagacaaagcctcttcttctcctaagatatttagttttatagatttatatagcatctaggaaaaatccaaactccattgatttatagaagatatgctcctttgagaaatttctcatacttcattcacccagttttgaggttacctcccttacaaaacaaatacgagaagagcaatctctcaggtcttcactgccaaagtccaaattttattttttattttgttttattgattgggcatttccaaactggccactcgcttaggttttagggatacaaggatggcagacacggttcagtcccaattctaagcaagccagggagacacatacgaaccatgatgaccatacaaagcaacagggagataaggaggagaagccaagcaccttcacaggagggatggctgtctgcctacgggagccaggtgagatttcacataggaggtggctttgagtctggagcttg

SEQ ID NO: 7380 - DNA, 543 bp, Homo sapiens
  MAP TO CHR14.3; EXPRESSED IN LUNG, SIGNAL = 1.2; EXPRESSED IN BONE MARROW, SIGNAL = 1.1; EXPRESSED IN ADULT LIVER, SIGNAL =   1; SWISSPROT HIT: Q10443, EVALUE 5.10e+00; EST_HUMAN HIT: BI860943.1, EVALUE 1.00e-116; NT HIT: D11101.1, EVALUE 8.00e-03
cctgtaatcccaaattcatgcagaatacaataatacatagataattctcatctggtctatattgacttctaaaaggataagaggtggatcatgcaatacttatggaagattgaaataattaattgttcaggatttaaaagagttagtaagtttcaggaaaaccataatagtatgtccctcttattttttttcttttctttcttaaggccttggtgtcaaatcttatatcaaccaaagaagagttaatgaaactacgacagatccttagactcttgagactcaggtgcacagaaaatgatggcatatgtttgctcaagattgtgtcggctctgtgggagaaatggctgagtttgctggaagctgctaaagagtgggagatgtggtgcgaagaactgaagcaggaatggaaatttgtcagtgaagaagtgagtgcttcattttcaacaaaccatgtagtttctaacatgttatttaaattgttttattactttcaccttgtttttctataaaacgagtccttagcctataccatttgtgcacatc

SEQ ID NO: 7381 - DNA, 500 bp, Homo sapiens
  MAP TO CHR14.3; EXPRESSED IN HELA, SIGNAL = 1.5; EXPRESSED IN BRAIN, SIGNAL =   1; EXPRESSED IN ADULT LIVER, SIGNAL = 1.1; EXPRESSED IN PLACENTA, SIGNAL = 0.99; SWISSPROT HIT: P52848, EVALUE 6.00e+00; EST_HUMAN HIT: BI049200.1, EVALUE 3.00e-89
caaagttttcttggttatttttgtttcttttttaagaagaaaggtaatctagtagtagaagtttacttgtcacaaataagtttgcattaatgaaatgtgctatgcactttaggagctttagaagtatacaagcatgcagagcttaaataatgtgctatatatatttatttaatcctgatgtttttagcctaatgttaattgtggtaggaaatttaattgctggatcaatttttattttgtttcttcaccttaggtcttagtacccactgtgtctatggttggaaagcatttgggcgcaagaaaggatcatccaggcttaaaggctaaagaaaatgatgaaaattgtggtcctactaccactgtttttgttggcaacatttccgagaaagcttcagacatgcttataagacaactcttagctgtaagttaaactgtttatttttcattaaaaatttttttatcattctacatttcaaacttaagcagaaagaagactttca

SEQ ID NO: 7382 - DNA, 503 bp, Homo sapiens
  MAP TO CHR19.3; EXPRESSED IN ADULT LIVER, SIGNAL = 1.1; EXPRESSED IN BRAIN, SIGNAL = 2.6; EXPRESSED IN PLACENTA, SIGNAL = 1.6; EXPRESSED IN HELA, SIGNAL = 2.1; EXPRESSED IN LUNG, SIGNAL = 2.2; NT HIT: gi7305200, EVALUE 2.00e-03; EST_HUMAN HIT: BF365806.1, EVALUE 2.00e-32; SWISSPROT HIT: P40319, EVALUE 2.70e+00
ggaagcaaggtagggaaaggctgtccacaggcagaaagggagagcagctcacctcccccaaccctgctccctcctatctcttcccccacaccccatgtgccagactcacatccaaagtaacaagagaggaagaagatgaggatgaagatgaggaggaaggtcacatctgtctccaggatccctgccgatttggtaggaggagtaaggttcattcaggtggatgtcccctcagtggcacccagctctggtgtcccacagagagcctggtttctaggtccccacgtgctcaccaaactcatcagcggagaagtgtcgtgtccagaaggacttgccattggtgaggaccatctcatactccagctgcaatccatcacccctgtggggggtagggaggcctaagggggccctgggcaagttgggggttggcaggaaggcaaagagaaggtggtccaggtgccaccccagccccttaccccacacttgctgagcgcaatataccacca

SEQ ID NO: 7383 - DNA, 580 bp, Homo sapiens
  MAP TO CHR18.3; EXPRESSED IN PLACENTA, SIGNAL = 2.1; EXPRESSED IN LUNG, SIGNAL = 2.5; EXPRESSED IN HELA, SIGNAL = 1.8; EXPRESSED IN BONE MARROW, SIGNAL = 1.9; EXPRESSED IN FETAL LIVER, SIGNAL = 2.1; EXPRESSED IN BRAIN, SIGNAL =   2; EXPRESSED IN ADULT LIVER, SIGNAL = 1.8; EST_HUMAN HIT: BE244333.1, EVALUE 1.00e-118; SWISSPROT HIT: O02662, EVALUE 1.90e+00
tattctttcctcgacgtgccgtgcagagaaggctggtgttttgggtagtcttgaacaatggggacttcctcttctctagagagagctctttgactataggcaggaaatgctgcacgggagcctggttagcaggggtgctgtgggccccgggctgcagggcctgctatgcatgcagcagcatctcgtgacgggtcatctcctggtgcgtcctgtgatgaagcaggtgcgccacaagccagagaggagcaccagaggggaaaataacaccctgtccatctgactgcagaaggcatgcccctcacatctccgtgcctctgcaatcgagacacagcgagagtgtctcagatgtaacgaataccataaatctgtgtaaagcaagtcctgggggaagaagaagtatggggtctcccttggaaaggacaacaaatatgccacagaatggcacccagcacccctgaggtgagcccagcaggctgtggacggtgctgaatttccagttacttcttaaggcctaaagaagatggctcagcatgctcctggcctctaatgcatttggagtggggcaaaacacacaccttct

SEQ ID NO: 7384 - DNA, 521 bp, Homo sapiens
  MAP TO CHR14.3; EXPRESSED IN ADULT LIVER, SIGNAL = 6.2; EXPRESSED IN PLACENTA, SIGNAL =   6; EXPRESSED IN BRAIN, SIGNAL = 8.4; SWISSPROT HIT: P07799, EVALUE 2.10e+00
cttgagcaggttgaggaaggcaaaggagagcaaggcatcagttttccagatgggcgacagagccatggattcatctcgggcttcccgactgcccctgtactgccccagttgcagccctgcccctccacccctgcccatcttgcccaccctctgggaatggaggacatggcccccaaaggtcctccagcctctcccccagctggccataatgtatgtcccttcaacctgcagcctcgagtcaggtgcactgtgctgtcaccatccatgtgggctgaggcatgcaggggccttggggtgggagtgggcagccccagggcccacagagcagattactgcatctgactcacccctgccctacgctctgtctcaccaggaggactgccctcctgtctgatctctccaggagggatggaaagatacctgaagaccataggggcatttgaaggacaattgttcaaagcaggcaggggcagctgaatcccagttcttccccctattcccccatcactgctcctgtcaga

SEQ ID NO: 7385 - DNA, 569 bp, Homo sapiens
  MAP TO CHR16.3; EXPRESSED IN PLACENTA, SIGNAL = 2.1; EXPRESSED IN LUNG, SIGNAL = 4.2; EXPRESSED IN FETAL LIVER, SIGNAL = 3.3; EXPRESSED IN BONE MARROW, SIGNAL = 2.7; EXPRESSED IN ADULT LIVER, SIGNAL = 1.6; SWISSPROT HIT: P16144, EVALUE 1.40e-02; NT HIT: U70545.1, EVALUE 5.40e-01; EST_HUMAN HIT: BE146133.1, EVALUE 3.00e-96
ctcagaagaagggcctgatgggctcaccacatcgtggagaagataccccggctcagtctcagtcagttccccaagcgcataggtgttcgggaagtggcctgcagacagctcctccatgccttgaaagcagaagtagccccctcctgtttccctgtcccagttgggtgaagcatgggagcctgctgggacagtcccaggcgtgccgtcacgcaggggcaggccgtccatcggtctcgcgggactctggctgcgggtggctgaggacacctggcctcatgggagacggtgccagggtccctggagtgaggtgggtctcctccccatggctgtcactcctcagcagattggtgtgggcgggtgtgcgtttaggaacctgtgagctgagacattgtccagctagcgtcaggccaaaagcaaccaaggctttgagaaatccacctggccctgccgagcctgtttctggctgtggaatgggatttgccccagcgccaggtgtctgggaatcacaggcctccgtgtgtgaaggtgccagttgcacgggctgtgaccgtccctccacgtgcttgtat

SEQ ID NO: 7386 - DNA, 582 bp, Homo sapiens
  MAP TO CHR18.3; EXPRESSED IN ADULT LIVER, SIGNAL = 2.4; EXPRESSED IN PLACENTA, SIGNAL = 2.4; EXPRESSED IN LUNG, SIGNAL = 2.4; EXPRESSED IN BONE MARROW, SIGNAL =   3; SWISSPROT HIT: Q61001, EVALUE 1.30e-01; EST_HUMAN HIT: AA830027.1, EVALUE 2.10e-01; NT HIT: gi14747525, EVALUE 2.20e+00
ggaccagagcttgtttctgcactctgagtgaactgggtgaattttcattatgagatttttatctcaataaggctgatctagccagtaggtcctcacagggaatttgccttgaacctgctctggaaagggacaaaagaaacagcaggacagaccagtcaacaactcacgtctttatccgggaggagcctgcggatgtccacgtgagagcagtgccacccaggattcatgcccgtgttattatggccaatccgaattttttcaatgatttctcccacatcttctaactttggaaaggagataaggcactgaatgttagctgaaagatccaggaaagtatggccttggcaacatcctgcttccccagggcatccaccctgagtccctttgcatttcctcctgatacgtctccactatccagccaggccagctcccattgtccttgacacacacgccatgcttatgcctcatgtcccctctcttaaagtcagccttgactccagaacttggtttaatccaccttctctgggagggggacccctcttcagcatggagcccagctccccatctgccactgctcactgt

SEQ ID NO: 7387 - DNA, 552 bp, Homo sapiens
  MAP TO CHR14.3; EXPRESSED IN HEART, SIGNAL = 6.4; EXPRESSED IN FETAL LIVER, SIGNAL = 8.7; EXPRESSED IN ADULT LIVER, SIGNAL = 5.5; SWISSPROT HIT: Q99538, EVALUE 1.00e-27; NT HIT: gi16191187, EVALUE 4.00e-91; EST_HUMAN HIT: AW811071.1, EVALUE 1.00e-114
agggagaagatgtgtgtggctcgtgtgaggggtagagacgagggtggggtttggcagggacagcagaagtgtgaacacaagtaactgttcttcaaactagaagtgagagctgtcatctatggctctggtaaactctcctacccactgggacaagaagagtgttctggggccaagatttaaaattagtgaatttggacaaccttcttcctctctgaaatgagcccactgtttctcagcctggatggaaccttctataaggtcgtacaaccaatgtgactgccaggggacaatatgaattcagcttctggattctggtcatggggagagcctgctggctcaccgtgggggagtgccagttgaagcagtgggtccggaagtgcagcagggcctctgggtagcagctgtgccccgtgagcggggctctctcggacaggagctgctccacctcagcctcggacgctgccagcaaggagacgatcttacgcactgacttctcaatgaggtgcctggcctggggagaaacgcggcctgtcagaatgtgcctccctgaat

SEQ ID NO: 7388 - DNA, 535 bp, Homo sapiens
  MAP TO CHR18.3; EXPRESSED IN HELA, SIGNAL = 5.2; EXPRESSED IN HEART, SIGNAL = 3.7; EXPRESSED IN LUNG, SIGNAL = 3.6; EXPRESSED IN ADULT LIVER, SIGNAL =  42; SWISSPROT HIT: P00167, EVALUE 4.00e-10; NT HIT: L39945.1, EVALUE 0.00e+00; EST_HUMAN HIT: AI720791.1, EVALUE 0.00e+00
atatggcctctgtgggtctggatgagtaacacattgaaggaatcctctaaataaccagattctaaacattaaagacaattatacaccaaacaggcaaacacggtgcatactttaaaagccaaatatatttttaaaagatcatgcttataataagtaaattacacattaaggaaacatcaaaataaagtagatgaataaaaaggcacactcgaaaaatttgagcgcagaaaggacagttctttttgttttgtttctaatgtcggaagaaaaagaaagagatatattaaaatcattgttttcaagtgaaggtttctgtcagttgaagtagttagcaatggcttcttttctcccgtgtccaaagcaggctcttcctgcgctgacttctgaggaggtgttcagtcctctgccatgtataggcgatacatcaaggcgacggccactgcagagatggcagggatcacccagttggtccaccaactagaaagacacaaaaagcaatgatgctgacatgatgtgcactgtggtggactcaaaa

SEQ ID NO: 7389 - DNA, 518 bp, Homo sapiens
  MAP TO CHR18.3; EXPRESSED IN HELA, SIGNAL = 1.1; EXPRESSED IN PLACENTA, SIGNAL = 1.8; EXPRESSED IN LUNG, SIGNAL =   1; EXPRESSED IN BONE MARROW, SIGNAL = 1.3; EXPRESSED IN ADULT LIVER, SIGNAL = 2.2; SWISSPROT HIT: P11602, EVALUE 2.00e-08; NT HIT: gi16164049, EVALUE 1.00e-100; EST_HUMAN HIT: BE179954.1, EVALUE 1.00e-100
gaggggtccttaagagccagtggagctgggctgctgccctcaggagagccactttctgaaagcccgttgtatgccatcattaataccaccctgctggagtccagattgccccttagtgaatgcccgttacattcttcacagctgtctgaaatacaagcagcccacaaggaaaggggggaagagggtttggaatctggaaacaccagaattctttctaattgaccaaaacaaagggaatcaaatcttatataaagccgcagagctccctccccgggctcaccgtccatccgtgaatgatgaaaaaggttttagctgtcatgttgaaactgcagtcttctaagggctggctgtggccgacggagaggtagcatccttcatgctctgggtccttggaggtgcggaggttaaacctcacagatggtttgacctcagtctgtgtagctttgggtttgtggagcttatctggggagacagaacagagcgtgggtgcatctagcagacttgcggagtgagagacc

SEQ ID NO: 7390 - DNA, 541 bp, Homo sapiens
  MAP TO CHR19.3; EXPRESSED IN PLACENTA, SIGNAL = 1.1; EXPRESSED IN HELA, SIGNAL = 1.4; EXPRESSED IN LUNG, SIGNAL =   1; EXPRESSED IN BRAIN, SIGNAL = 2.2; EXPRESSED IN ADULT LIVER, SIGNAL = 1.6; SWISSPROT HIT: Q9Y5K2, EVALUE 6.00e-43; NT HIT: AF228497.1, EVALUE 0.00e+00; EST_HUMAN HIT: AI557281.1, EVALUE 0.00e+00
cccacagctcctacaccatcgggctgggcctgcacagtcttgaggccgaccaagagccagggagccagatggtggaggccagcctctccgtacggcacccagagtacaacagacccttgctcgctaacgacctcatgctcatcaagttggacgaatccgtgtccgagtctgacaccatccggagcatcagcattgcttcgcagtgccctaccgcggggaactcttgcctcgtttctggctggggtctgctggcgaacggtgagctcacgggtgtgtgtctgccctcttcaaggaggtcctctgcccagtcgcgggggctgacccagagctctgcgtcccaggcagaatgcctaccgtgctgcagtgcgtgaacgtgtcggtggtgtctgaggaggtctgcagtaagctctatgacccgctgtaccaccccagcatgttctgcgccggcggagggcaagaccagaaggactcctgcaacgtgagagaggggaaaggggagggcaggcgactcagggaagggtggagaagggggagacagaga

SEQ ID NO: 7391 - DNA, 576 bp, Homo sapiens
  MAP TO CHR16.3; EXPRESSED IN HELA, SIGNAL = 3.7; EXPRESSED IN HEART, SIGNAL = 5.5; EXPRESSED IN FETAL LIVER, SIGNAL = 5.3; EXPRESSED IN BONE MARROW, SIGNAL = 4.4; EXPRESSED IN ADULT LIVER, SIGNAL = 4.7; EXPRESSED IN PLACENTA, SIGNAL = 4.7; SWISSPROT HIT: Q09769, EVALUE 2.80e-01; NT HIT: AF395008.1, EVALUE 1.40e-01; EST_HUMAN HIT: AA253378.1, EVALUE 5.20e-02
ggacacacacaggcacaatcactcctgatcttttccacaatctgcagtgccctgagaccatatggacaatcttgaggaaaccaagggtgcaggggaaagagctcacacagacagacgctgcccagcaggatggtgagagtggtccgcacggccctgtgagcatccgtgaccaggacagtgagtggtccacacagccatatgagcatccgtgaccaggacggtgagaatggtctgcacagccctgtgagcatccgtgaccaggacggtgagagtggtccacacagccatatgagcatccgtgaccagtgcactgataagacatcgtaggccacaagttctgtacaaactgacccaccccataggaagccccactggaccagcacgtgcgcacctggggagctgaggtccctgccccagcgaggtctggggaaggaggatggcggaaggccccagtaggttcggaaccacaacttgattctgggccccaggagctggaaaggagtcttcctgcagagctctgcccccctgcactgcctggtgccccccagaccccagtcctgtctgcactctgactcg

SEQ ID NO: 7392 - DNA, 584 bp, Homo sapiens
  MAP TO CHR14.3; EXPRESSED IN HEART, SIGNAL = 4.2; EXPRESSED IN FETAL LIVER, SIGNAL =   2; EXPRESSED IN BRAIN, SIGNAL = 1.5; EXPRESSED IN ADULT LIVER, SIGNAL = 1.6; EXPRESSED IN PLACENTA, SIGNAL = 1.8; EXPRESSED IN HELA, SIGNAL = 1.7; EXPRESSED IN BONE MARROW, SIGNAL = 1.6; SWISSPROT HIT: Q56030, EVALUE 5.00e-01; NT HIT: AF097732.1, EVALUE 2.00e-34; EST_HUMAN HIT: BG980440.1, EVALUE 3.00e-28
acatggttcttgggctcttggggctcagctcaactcaacgtggcttcacatggtgggcacgctggtgcccagggagagagagagagacaaagatgtccatcttgcagacagacaggagggagacaggtcacagcttggcttgctcctgcccagagagagaaagagttaagctgctgaccctgaaggcaagggagagccacctgtgcagctgcaggcgttggggcaccaggagcctcagagctggagcagacagccgagataaaggtggacagtgtgagaaagctgttgatgagagttgctgctgaataaaatcatctttcacctgcctacagctccctgagtattctttctgctcatccacccacaccccttggacttcagcatggcctggacctggaccctgggatctgacacacactgatatatagtattaagacataaaatattaaaaagcttaaaaatggtaaatctggataaaggtataggctatttctctgtactattctgaagcttcgagatatttaaaaatgtaattatgctgaagtatatttatcagatcatatcctttcccccactcctttctc

SEQ ID NO: 7393 - DNA, 500 bp, Homo sapiens
  MAP TO CHR14.3; EXPRESSED IN HEART, SIGNAL = 3.2; EXPRESSED IN HELA, SIGNAL = 2.4; EXPRESSED IN LUNG, SIGNAL = 1.6; EXPRESSED IN FETAL LIVER, SIGNAL = 5.1; EXPRESSED IN ADULT LIVER, SIGNAL = 2.9; EXPRESSED IN BRAIN, SIGNAL =   4; SWISSPROT HIT: P16088, EVALUE 6.00e-04; NT HIT: AL163246.2, EVALUE 1.00e-128; EST_HUMAN HIT: AA928194.1, EVALUE 1.00e-116
tagctccagagggaggaatgctaccaccaggagacacaacaatgattccattaaactggaagttaagatagccacctggacactttgggctcctcctacctctgagtcaacaggctaagaagggagctacagtgttggctggagtgattgacccagaatatcaagatgaaatcagtctacttctccacaatggaggtaagaaagagtatgcatggaattcaggagatcctttaggacatctcttagtattaccatgccctgtgattaaggtcaatgggaaactacaacagtccaatccaggcaggactacaaatggcccagacccttcgggaaagaaggtttgggtcactccaataggtaaaaaaccatgacctgctgaggtgcttgctgaaggcaaagggaatacagaatgggtggtagaagaagggagtcatcaataccagctatggccacgtgacaagttgcagaaacgaggactgtaatcgtcatgaatatttcct

SEQ ID NO: 7394 - DNA, 537 bp, Homo sapiens
  MAP TO CHR16.3; EXPRESSED IN BONE MARROW, SIGNAL = 0.7; EXPRESSED IN ADULT LIVER, SIGNAL = 1.6; EXPRESSED IN HELA, SIGNAL = 1.2; EXPRESSED IN LUNG, SIGNAL = 1.5; SWISSPROT HIT: P91917, EVALUE 7.60e-01; NT HIT: AL163278.2, EVALUE 2.00e+00
caactcttgtgctttggcagttggaaaaagaagaagaaatgttagaggagaaatgtaagctcataattataacataaaataatatctgtgaatgaaaaggaaattggctcacaggcaataacaagatcaagaaccaagaagtcccattttgttgttgttttgctttcagctttgttaatgttgttttaaagcccattatgagctcctcaagattccagaaattcaccaagtcctgatccaggtcttttgaaatggaggaaaggggaacaaagaattccaaccctaaaattctactatgggctacctggagggggcagagctcccctgcttctttgcaggccttcatctctacagaaaaggtcaggcaaatgggtcccacatcattcaatcctaactgctccttcatagacttcagtttctgcctaatgtgcttgtctgggtctaatttcatgatgaatgtgaagaaagagtgagtgagaaagaggtgtttataaggaaaacctaactagagaataagccagttgtcaagggtcagct

SEQ ID NO: 7395 - DNA, 571 bp, Homo sapiens
  MAP TO CHR18.3; EXPRESSED IN HEART, SIGNAL = 4.1; EXPRESSED IN LUNG, SIGNAL = 3.7; EXPRESSED IN FETAL LIVER, SIGNAL = 4.1; EXPRESSED IN BONE MARROW, SIGNAL = 3.6; EXPRESSED IN ADULT LIVER, SIGNAL =   3; EXPRESSED IN PLACENTA, SIGNAL = 3.4; EST_HUMAN HIT: BF944946.1, EVALUE 2.00e-04; SWISSPROT HIT: Q03172, EVALUE 2.40e+00; NT HIT: U92082.1, EVALUE 1.40e-01
tgatggtgagagcacctgtcatgtgctagggtggagggggcttggcaacagtgctggtgagcagaattaagctgggggcagggggctgggcagaaatctctggggagtaatcagtaaatacttactgactggctgactgagtgaatgggtggatgattaaagcagcagccagaacaagagccaagcatgggtggcacctgaaggtggactacctgctgaagagctgggtggacgggaaggctggtggtggtgatggggcggggagggggggcagtgctgctggccggcacagcagtggcagcactgctattagtcatcgtgaaagctccaggtgcccggtgcaggcccagcagacccctgacccagcctgatcaatcctaatggaatggagcagaggggcagccgctgcagggagcgggccacccgtcctccctcctgtccccgtccttgtaactttgtcagctgtcacagcagccctgaatgtggaggctgcctgcctcagtcatgtctggtctcgtttggccggcctgaggtgccaccagacaggagacgtagggaggagaggacaggg

SEQ ID NO: 7396 - DNA, 556 bp, Homo sapiens
  MAP TO CHR14.3; EXPRESSED IN BRAIN, SIGNAL = 1.2; EXPRESSED IN ADULT LIVER, SIGNAL = 1.1; EXPRESSED IN PLACENTA, SIGNAL =   1; EST_HUMAN HIT: BE747941.1, EVALUE 3.00e-83; SWISSPROT HIT: P38712, EVALUE 6.00e-05; NT HIT: gi14748376, EVALUE 2.00e-83
gagggggaaaagagaagtgccatctattacctgagctgccgaaggttcctcaaatgataatgcttttctttaattaattcccacagccggcctggagtagcaaccacaatctcaggacgacggttcagcatcctctgctgtttctgcgtggacattccaccaaccaaaatagcagttttaattcctatgggacagaaaacataagggacacttattcaatctgggtgatcattttcttacatggctgacacaggcaccccagattagcagagacagacatcagcacagtgtaatgccctagagcattgctaaaagagcaggcctggccagactgttgacgccactcctagagggcttaccaagtcttctgtgatctgagctctacttcttcagcctcatttcttttctactccctcccctccaaccacaccaaaggggctgaatttgaacccaggtatgcttacctccaaagctctgggaaaacggagcactggggcaccataatgctgggaggaatatgacctgcagctgtgctacacctctcctaggaagccct

SEQ ID NO: 7397 - DNA, 590 bp, Homo sapiens
  MAP TO CHR19.3; EXPRESSED IN BONE MARROW, SIGNAL = 2.5; EXPRESSED IN ADULT LIVER, SIGNAL = 1.8; EXPRESSED IN PLACENTA, SIGNAL = 1.9; EXPRESSED IN LUNG, SIGNAL = 2.1; EXPRESSED IN FETAL LIVER, SIGNAL = 1.3; EST_HUMAN HIT: BG978572.1, EVALUE 3.00e-77; SWISSPROT HIT: P48546, EVALUE 6.00e-23; NT HIT: D49558.1, EVALUE 0.00e+00
cacactgccttccaaattcccctaggcggctacattgcactagaaactatatccacatcaacctgttcacgtctttcatgctgcgagctgcggccattctcagccgagaccgtctgctacctcgacctggcccctaccttggggaccaggcccttgcgctgtggaaccaggtgggcatcctccttccgttcctccaaatgggaatcttgcttctctggtgggaccaggaagttctcagtccatttcctatctcctacactctccacagtttatctgagttgggagggtccctctccaaatgtgtcttggggtgggggatcaagacacatttggagagggaacctcccaactcggcctctgccatcatttaactctcccagcctatcactcccatactggaattttccgttcctctccctcattatttcacccatcattgaactttttcaccaatgagagaatccacctgctggcggtgaggcatggcaggatacgagaaagtaagtgggggtggggatgtggcaggtgccagtttgttactaggagacagggtgggagagactagagtctgggagcagacgtggtaagaa

SEQ ID NO: 7398 - DNA, 549 bp, Homo sapiens
  MAP TO CHR19.3; EXPRESSED IN HEART, SIGNAL = 1.9; EXPRESSED IN LUNG, SIGNAL = 3.7; EXPRESSED IN FETAL LIVER, SIGNAL = 2.1; EXPRESSED IN ADULT LIVER, SIGNAL = 1.6; EXPRESSED IN HELA, SIGNAL = 3.7; EXPRESSED IN PLACENTA, SIGNAL = 2.2; EST_HUMAN HIT: BE615981.1, EVALUE 9.00e-50; SWISSPROT HIT: P70483, EVALUE 2.00e-06; NT HIT: gi14758793, EVALUE 6.00e-50
tggacgagagactcccagagcctcccacagggacgcaagcatctctgctgcctgcctctggccctccccacccactacgagcacaaggggctaggcctcacctgtccgattgtccaggaagcggatgcccctgtcgtcgtgggcggtgatggtgagaggctggtttggatgactcaccacttggttgatctgggttggacctgaaggaaaacgcaggaagagggaaggatgtcaagcagaaaatcaggaagaccagaacagaggcacaagcgcagcgtgacagcccctacaccagcctctgcctggatgtcgaggggggctgggcgagggcactccggtccccgaccgcagcgctggttctgcacaagcagcccctgggccctgttttggggcgggggaagaggaataacaaacatgaacacattccgccactctaccaagagggcccgacggggcggccctgacgcgctctccccactcagccccgccagtgccctggctgtgagggccgggggccctccactgggacccaacttccttcctgctcag

SEQ ID NO: 7399 - DNA, 511 bp, Homo sapiens
  MAP TO CHR14.3; EXPRESSED IN FETAL LIVER, SIGNAL = 1.7; EXPRESSED IN BRAIN, SIGNAL = 1.7; EXPRESSED IN ADULT LIVER, SIGNAL = 1.4; EST_HUMAN HIT: BE386113.1, EVALUE 4.00e-98; SWISSPROT HIT: P08567, EVALUE 7.00e-03; NT HIT: gi7706642, EVALUE 3.00e-98
attttgggggagctgtgacacagccctgagcaccctggctgaaatggaatgggggtcttgtgtcatggaggtgtgcagaggtggcaagagccacgagagatcccataggaatggggcaggtaggtagggccactcccaagcagagaaaataatatacacaggacaggaacagctgaaggccctgaagcaccgtggtggcaccagccagactgtgcagcaagcacagagcccccccaaggggcagggtcccctgcccacccaacacaggcaggagaggctgccacagagcccggcaagtggggcactcactgcaggctgatgtgcgggggcagcttgaaggagtttctcaggctgtgcagctgctggaccttccccggctgccctgcatgaatagccccggtgatctcaaaggcccaggcatcccgctcctctcgagaacaggcctccaggaagtactccgtggatgtttgagtcttcagcttaatgaggagctgtgggaagagagagccag

SEQ ID NO: 7400 - DNA, 552 bp, Homo sapiens
  MAP TO CHR18.3; EXPRESSED IN HELA, SIGNAL =   1; EXPRESSED IN BONE MARROW, SIGNAL = 0.94; EXPRESSED IN ADULT LIVER, SIGNAL =   1; EXPRESSED IN PLACENTA, SIGNAL = 0.95; EST_HUMAN HIT: AI870985.1, EVALUE 1.00e-88; SWISSPROT HIT: Q55132, EVALUE 2.00e-08; NT HIT: AB043547.1, EVALUE 0.00e+00
cccagatgatctttctgttgcagggtggaagatgtctatggatgtgacattcctggggacgggtgcagcatacccatctccaacccggggtgcctctgctgtggtccttcggtgtgaaggcgagtgctggctctttgactgtggggagggaacacagacacagcttatgaaaagccaacttaaagcaggttagtgtgccttcagctatctcattaagatttttttgttgttctgcttcattttcttggctctccttggacattttgtttagaaacagccctgatggttgcatcccacttcagtgctacaccctggtgagacttggaaggcctgcaggcatctggccacgtccactgaacttcatttacttatttacttgcttttcatttatcctgtagatgctgaaagcaaggattcatgtaggcttggggtttgggaaatgtcgtgggatacaccaggcatattagatgaacactgccttagcaaggaagcagtgtacatacttacctccaccaggagatagttttcatgagaggatgcaaagggtaggaa

SEQ ID NO: 7401 - DNA, 542 bp, Homo sapiens
  MAP TO CHR16.3; EXPRESSED IN ADULT LIVER, SIGNAL = 1.9; EXPRESSED IN HELA, SIGNAL = 1.3; EXPRESSED IN PLACENTA, SIGNAL = 1.7; EXPRESSED IN HEART, SIGNAL = 1.6; EXPRESSED IN LUNG, SIGNAL = 1.9; SWISSPROT HIT: Q9N2M8, EVALUE 2.60e-01; EST_HUMAN HIT: AA309340.1, EVALUE 9.00e-53; NT HIT: AJ298054.1, EVALUE 8.10e+00
acctagctcaccaggctcaggagtcagttacatccttccacaaaggccagctcacctggtcaccccaaagccctccctctgtgggtgggaccagagggcccagagcacggatgacccaattgagcaggactcaggtggactcaggtgggtgctgggctggactcctggctgtggggagcagccaccaccctgcctactgcatccatgttccaactcgctgcctatcagagcagaggcattattgggcaccttgcgaaacatgcttctggtgcacctgctgcctgctgcccctcctgcagagtgcccgggctctccagaggggattcctgtggagggttggcttagattctgagtcctgcttctcacacccagggctgctaccccagaggccagctgcttgagtaccctggaagccagtttgtaaccccaggctacagctgggtccatcccacagcgcttctttagtgtatctatttgtactgcctgctcatttcatagagaggggtgtgtcttgccccagcccatctggcatgtctaaggca

SEQ ID NO: 7402 - DNA, 500 bp, Homo sapiens
  MAP TO CHR14.3; EXPRESSED IN PLACENTA, SIGNAL = 2.3; EXPRESSED IN HELA, SIGNAL =   2; EXPRESSED IN LUNG, SIGNAL = 2.2; EXPRESSED IN FETAL LIVER, SIGNAL = 1.7; EXPRESSED IN BRAIN, SIGNAL = 2.3; EXPRESSED IN ADULT LIVER, SIGNAL = 1.4; NT HIT: AF111167.2, EVALUE 0.00e+00; EST_HUMAN HIT: AI365263.1, EVALUE 2.00e-62; SWISSPROT HIT: O14598, EVALUE 4.60e+00
aacaggactcagagcaagggcagagatccccaaagagatggtttttccttaattcatcaggctggagcagagtttaaaccaagctggaaccactccggctctggccacaacctaatctctacatcctggcctccatcacattggccggaagctggttcgcttcatccaagggtctagtttgagggcattcatggcttctgcaagtttgagcatcccttgctcctggtgctggcagtgccactcagccatggactggagcatccacttggtttggagcttgtaccaataggagctgtaaaccacgacctcggtgaggtctgaagactccagagccttcagctggagcatggccttgctcatctgctcgatgtaagggattatccatacgggcctgctgggggaaggggatgagagctcccaggtagggcacccaggccagcactgggcacactcaccaaaggtggcttccagcagccgcgtcgggacctagaacacctctg

SEQ ID NO: 7403 - DNA, 579 bp, Homo sapiens
  MAP TO CHR18.3; EXPRESSED IN PLACENTA, SIGNAL = 2.4; EXPRESSED IN ADULT LIVER, SIGNAL = 2.2; EXPRESSED IN BRAIN, SIGNAL = 2.8; NT HIT: gi16195155, EVALUE 1.40e-01; EST_HUMAN HIT: BI825067.1, EVALUE 2.10e-01; SWISSPROT HIT: P75829, EVALUE 3.20e+00
tggcactgacatggtaggaggccccatgggcccaagctctgaagggcactggagggcactaggctgcccaggctgttttacgcatcgcctgatctatcgtgagttggggtacagttatgacgagcaggatgaaattagcacagctctgttctccaattactgctgaccaaaatgaattctggtctgcgataactaggctgtaacttttaagatacttcagagaacgatgaaaatgcacatccatatacttcaggcatctggaggatgtgatgtgagggagtgccgggaaactgactttcaaaaatccatgcccattttactggattaaaattgtttaatctaactagctgttgaccttggtttgtgatattgaaaattctgggcctttctcatacgcttctgtttaatgtgactcctcttgtatcttacaatttccacgttgtccttagactccttgatgttgatgattgcatgacatctatctttgggaatctcgggaacctttttaaagtattagtaagagctattgatcatcacaaaagcccctgagagaaaaggaccacttcatccaggcttgtt

SEQ ID NO: 7404 - DNA, 560 bp, Homo sapiens
  MAP TO CHR18.3; EXPRESSED IN BRAIN, SIGNAL =   6; EXPRESSED IN ADULT LIVER, SIGNAL = 5.1; EXPRESSED IN PLACENTA, SIGNAL = 4.9; EXPRESSED IN HEART, SIGNAL = 4.5; EXPRESSED IN HELA, SIGNAL = 5.2; EXPRESSED IN LUNG, SIGNAL = 4.8; EXPRESSED IN BONE MARROW, SIGNAL = 7.3; EXPRESSED IN FETAL LIVER, SIGNAL = 7.5; SWISSPROT HIT: P19181, EVALUE 6.20e-01; NT HIT: L06862.1, EVALUE 3.40e-02; EST_HUMAN HIT: BG682647.1, EVALUE 5.00e-02
tgtggctcctaggactttggataagtctattttcaaagggctaaaattagcgtttctgatacttagtccatgattttcccttgcttggatatttgtccttataattaactgagtattttctttgcttccttcaatggcagcattcctggttggattcagcttcccccaaaggttagccccctcagatgcattgctctttccccctgtgggaggaggggcatctagagtttcatcttttctctttttacaagcacatgaaacttggtccagaagcccaccaaccaagaaattaggatgggcctcagtaatgttttttcctgacatgcttctatccttgaaacacacaaggctcccagtgccaagaatcaaggtatcaagcgtcggcctacgacaagaagactgagggacagacccagcctggcagtttatcctcccatcccgacgactgtggggaggactacagagtgagccactgctgtgtatactctgcttgccagtacaagtgctgactcatcccttggcacacaaagctgtaaacttcaccccatgcttcgttagtt

SEQ ID NO: 7405 - DNA, 593 bp, Homo sapiens
  MAP TO CHR19.3; EXPRESSED IN ADULT LIVER, SIGNAL = 0.99; EXPRESSED IN HELA, SIGNAL = 1.5; EXPRESSED IN LUNG, SIGNAL =   2; EXPRESSED IN FETAL LIVER, SIGNAL = 0.84; NT HIT: gi13236531, EVALUE 1.00e-51; EST_HUMAN HIT: BG013976.1, EVALUE 2.00e-78; SWISSPROT HIT: P46846, EVALUE 2.00e+00
aaactggatggggtagggaccttcagttcattcatctgtgccaactgcctccctcacttcactgagaccatttcttacccacccccccaccctaaatgctaaaagctctcatggtggagagaaaagtagatgaggcttccctctctgtgatggctcaggaatgaatgtttggggatgtatcatgtccatggggaatggctctaatcttgtcctgtgccaaatctctcaatcagttctgcagccacacgatttcctcctgttccttctcccacctctgcccagacaccaaggcctcacacactcacctgcctcctggacagtgcagcgaccctgggcaggatctgctgctctcggcgggcctggcctgtccccggatgcatctggttcacagaggaggcccactggctggacacgtctctcggatcatctctgacactggcgggggcttcagccatctcgacatctgagttcagcataagatattctttgccgagcaagttgactatagactgtagagagaaaaaagacaatcagacactatgagaacctgaaagtagctctcatatttcctgggtcctgccataatgctcaca

SEQ ID NO: 7406 - DNA, 529 bp, Homo sapiens
  MAP TO CHR18.3; EXPRESSED IN HELA, SIGNAL =   2; EXPRESSED IN PLACENTA, SIGNAL = 1.8; EXPRESSED IN ADULT LIVER, SIGNAL = 1.5; NT HIT: gi15305410, EVALUE 2.00e-65; EST_HUMAN HIT: BI517527.1, EVALUE 4.00e-33; SWISSPROT HIT: Q92750, EVALUE 3.00e-17
gttattggtgaatggggcactctttagtttctccttcctattgttggaaggatctgcttggcttaattcctcccccttcaccccacaatgatgtttactagcaaagttctttgaaacataactggttaatcatctctcaaattttaagaatgattaaagtttcttttctggtggagtggatgtagggggatgtttgcttaatagaaacaaaatcattaccttctgaaagttcagcttcctatttatgttggtattcctgcctttagcaggtttatacaatacctaatgtagaatgtgtggcccaggatcattataagactttctgttttcttttttttcccaggcaagtgaaaattacatcctgtgtagtgataccaggtcacagctcaaatttcttgaaaagctggatcaattggagaagcagagaaaggatttggaagaaagagaaatgttacttaaggcagccaaggtaagggccagtgtgatttatgagtgaatgtggcctggcagtgtggtcagaggtggcttt

SEQ ID NO: 7407 - DNA, 562 bp, Homo sapiens
  MAP TO CHR18.3; EXPRESSED IN PLACENTA, SIGNAL = 3.9; EXPRESSED IN HELA, SIGNAL = 4.9; EXPRESSED IN FETAL LIVER, SIGNAL = 3.1; EXPRESSED IN LUNG, SIGNAL = 5.2; EXPRESSED IN BONE MARROW, SIGNAL = 4.7; EXPRESSED IN ADULT LIVER, SIGNAL =   3; NT HIT: U31918.1, EVALUE 3.40e-02; EST_HUMAN HIT: BG289400.1, EVALUE 3.10e+00
gcagcttcagcagttgtgtctgcacctaccttttccttctgggtcatgtttctgacgtctgcaccatatgagctttcactctttctattgaaggttcttttaatactttggaatagcattaaggcccaaacattagcctcgtttaaggcagcaagcactctcatgaactcctctctgatcttgggatgtagtatcttctttgtggttattttgtttgtgcttatttttaccttttccaatttgaggagagcactagagaagacagagaacaaaaatagtgtttctgtatggcttgaatctctttttgcctgggatatgtagtctgtgttgaagtactttgaagggggccatggataaggaacttgagactcactcctcctcattgatatttttgcttttccaggaaggaaacagtcatattctggattaattctgccctcagcagcatagactggtcttggagaatcatcttccaggcttatttaaaacaaaaagcaaaaaactatgaacttgggtctctctaaattagtagaaaaaaatttccccctcccactgatttaaa

SEQ ID NO: 7408 - DNA, 559 bp, Homo sapiens
  MAP TO CHR19.3; EXPRESSED IN LUNG, SIGNAL = 1.8; EXPRESSED IN BONE MARROW, SIGNAL = 1.9; EXPRESSED IN ADULT LIVER, SIGNAL = 1.3; SWISSPROT HIT: O00570, EVALUE 3.60e-01; NT HIT: AB007977.1, EVALUE 8.30e+00
cacaattcacaaacgttgccttggagacttattttttaaggcctcagaacgcttggacacttttgaagacgggaacacacggctgaaaacagccctcggacgcgcccatactgcacttcccacccggctcctctaggggaccgaaggtcccaatggcctcttcgacgtggcctcacccgatggctccgcgactcctgcggactcctgtggagtggtccaggcctctgtaaggaggttcctcgattaccctgggtcgattgtgacctctgccaccccccgaaacaccgcccaacccactagtccacacgagcctcaccaaagtagtgaacgaccagacaacacaaaggaaaaagtggctctgaggaaacaggcgccagcgaccaaaagagagaactggcgcgccgcaacgtcacttccgtttggggcattggaaggggcgtggctcgttgtgtgggcagttggacaggatggaactcttcaggattctagtttccctccgcgtgggtgcggaggtatcaaggggtcggctcagtgcctgggtgggcaagagagaaatgga

SEQ ID NO: 7409 - DNA, 545 bp, Homo sapiens
  MAP TO CHR14.3; EXPRESSED IN PLACENTA, SIGNAL = 2.5; EXPRESSED IN LUNG, SIGNAL = 3.8; EXPRESSED IN FETAL LIVER, SIGNAL =   3; EXPRESSED IN BONE MARROW, SIGNAL = 3.1; EXPRESSED IN ADULT LIVER, SIGNAL = 1.3; EXPRESSED IN BRAIN, SIGNAL = 1.8; SWISSPROT HIT: P29386, EVALUE 2.30e+00; EST_HUMAN HIT: AW188614.1, EVALUE 3.00e-03; NT HIT: AE007533.1, EVALUE 3.30e-02
ctgcaccctagctcccatagtgggactacaatcgacatacaataaatataatagatattatttttgtaacttaagcaatataactgcttttgataattttacaaaatttctattactgttttaaaacaaataaatttaggaaaaataatttctttttgtggctgcagtgctgatatctaatgaagtcttgaatggatcatatacattttcaaggcttcagttttgtcatcagtagcgacggcaggagtaggccacccggagcagccactgccatcagccggctgcagcagggggtcactagctgtggtggcaggagtggctgtgggagcagcagtggcagtggtcgatcccctgtgcccaacttttctcaggcagtggactgtgacacccctacccttgcatagctgggcaggacccactcccaggcccggatcttccaccacagtctcagcctcaccccttgccacatcctggggacccacaagcacctagccaaaggtgcagccgggactcacgaagctggccccaggagtgtcggatttgtt

SEQ ID NO: 7410 - DNA, 520 bp, Homo sapiens
  MAP TO CHR18.3; EXPRESSED IN LUNG, SIGNAL = 5.9; EXPRESSED IN BONE MARROW, SIGNAL = 8.8; EXPRESSED IN BRAIN, SIGNAL =  12; EXPRESSED IN ADULT LIVER, SIGNAL = 8.3; EXPRESSED IN PLACENTA, SIGNAL = 7.9; EXPRESSED IN HEART, SIGNAL = 4.5; EXPRESSED IN HELA, SIGNAL = 7.1; EST_HUMAN HIT: BG256659.1, EVALUE 4.70e-02; SWISSPROT HIT: Q19366, EVALUE 1.90e-01
ctaggtgcagaacagccctcctgggtgtcagaatgccagcgacaggagagaaggaggaaggacatgttcatatacgaagatacctttcgggagttcttagggaaacactgtaaacagctctgccctgagcccgggaggtggccatgctggcagtgagggatgtggcctgggccgtgggaacacagaggcggccagaggggaaagcctcagagctgcgtggacaggcttcttctgcttacacacgggcttctgccctgctcttgcccctcgggggttcttttgtcactggagaccctgctgttgccctttgctctccagtgcgtgtccccttcttccatatgccccctccttggtggggacaggctgctctgggaggtacagtgactgcgctagatgaacaccttcccaggtcaggcaatgacattttgctgatgtgtgttttagtctgggatgccctgagtagcttctaattatgaggcactgtctgtgcctcttgggtggaggccaagtttccattctg

SEQ ID NO: 7411 - DNA, 516 bp, Homo sapiens
  MAP TO CHR16.3; EXPRESSED IN LUNG, SIGNAL =   1; EXPRESSED IN BONE MARROW, SIGNAL = 1.2; EXPRESSED IN FETAL LIVER, SIGNAL = 1.1; EXPRESSED IN BRAIN, SIGNAL = 1.5; EXPRESSED IN ADULT LIVER, SIGNAL = 1.2; EXPRESSED IN PLACENTA, SIGNAL = 1.2; SWISSPROT HIT: P49160, EVALUE 4.80e+00; NT HIT: AF283320.1, EVALUE 1.20e-01; EST_HUMAN HIT: BF904236.1, EVALUE 4.60e-02
gaaggagagagtgtgcagggacaggaagtctggagtggaagtgctgctggtggaaggcatggaaacggaacccaaaacacaaaacagaaacaaatgaaatcctctgagtctccttccaaatcgatttcacattcaggtgaaatccaaagatgctgttttccctaaagtgagtccattcttcatggaagaggaaataatgactctgaacctgcccggtgcaattgcggggcacgtttggacttgtgtggagtggtcccactcaaagtaggtgttggaaggagctggcagagacccacaccttcacgggatgtatgcagcacccccattcctgatctgattcaggatgtctgtaagcaggagggttgctgaatgtttttattttttatttttggaaatgaataaataatttaaaagcattagataaaagcaccaattccattgaacctaaaagactaaaaccgtacccagcgtttgcagccaccgccagggtgtctgtcaataacggagggtctggaa

SEQ ID NO: 7412 - DNA, 561 bp, Homo sapiens
  MAP TO CHR16.3; EXPRESSED IN HELA, SIGNAL = 1.9; EXPRESSED IN ADULT LIVER, SIGNAL = 1.4; EXPRESSED IN PLACENTA, SIGNAL = 1.1; EST_HUMAN HIT: AI150843.1, EVALUE 3.00e-03; SWISSPROT HIT: Q9XYB7, EVALUE 1.40e+00; NT HIT: AL163279.2, EVALUE 8.30e+00
aaacaatccagccaggacagttacaccgacgctttattcatatctgccaccatcgggattgattcccacacagtgactcactcacagcaccaatctctttaatcaactgtgctgagcagtgacatccaagctcacctcggaaaacgacggaaactccaaggcaaggtggcctcccgaagtggccttttcccttccctcctcatccctgggctgtttccagcagacggcagtgaacgcctaaatgagggtttgatcaatggaggccaagctgatattgacaaagcagctgcagtttccgcaaatcacccagcactcatagatactgaagattaatctttacaaatacggggcaaagggggagagaaaaaaacaagtcgatttagtttccgtttattactttctccagaaggcactgaagagtcaaaagtttaactgatgtacattagacagggagacaaatccagaaatatcacccaattacccggtagcttctagaaggtatttttcatgacagcaggtgggtttgccttttctaaatcaggaaggagacaagacaccgct

SEQ ID NO: 7413 - DNA, 593 bp, Homo sapiens
  MAP TO CHR14.3; EXPRESSED IN HELA, SIGNAL = 5.7; EXPRESSED IN HEART, SIGNAL = 3.9; EXPRESSED IN BRAIN, SIGNAL = 1.7; EXPRESSED IN ADULT LIVER, SIGNAL = 2.7; EXPRESSED IN PLACENTA, SIGNAL = 2.1; EST_HUMAN HIT: H97583.1, EVALUE 2.00e-84; SWISSPROT HIT: Q15388, EVALUE 1.00e-09
atcctcttccctccatacccaaattatagaacacgagcatttccaatgcaagagtatacttctaaacagtaagagtatacttgctgtaatttggctcaaaattaatattgccgcttcaccactgtgaagctcaacatcttcctcatatttgtactctactcttcacaagacttgtctaagtagtctttagttggatatgcttttaatttttaatgcttgttgctttcttggatttgtagaatgtctgttttaaagaacttcaaaattttgctcaaaacttgtcattctgtttcaggagagcacagaatggggattcaacacctcggcaatgcccttttagtgtgcgagcaaccacgggaacttctgaaagttttcaaacacactctccctcccaaggtatttgagatgctgttgcacaaaattccccttatttgccaggtgagcacatatttaattatctttgtgaaatgtacacagtaaatagctatgttatgcttgactacacagaaatatcaaagtatgtgtgtgaattgcccaaaatcttaaataagtgaaatctctgaatttttggctgctttaacacgaagcaagcc

SEQ ID NO: 7414 - DNA, 530 bp, Homo sapiens
  MAP TO CHR16.3; EXPRESSED IN BRAIN, SIGNAL = 5.7; EXPRESSED IN ADULT LIVER, SIGNAL = 5.4; NT HIT: AF200531.1, EVALUE 2.00e-03; EST_HUMAN HIT: W23991.1, EVALUE 2.90e+00; SWISSPROT HIT: P74257, EVALUE 8.50e+00
ctccactcagaacagcctcctgctgacctctctgcatttacttcaggagacagagggaggctatccactgcagagatgctggggctgaaaagtttaaaaattggcctctcattcttgcataggtccttggctccctgcatgaacagaacccagccctggtctggatcggaagcaagaaaagaagcctgaacccaagtacggcctttgggcacggtctttctaccacatgtccacccgctctgcaactgccgggcacagcggacagtcaagctgtggtccatgatcaacaacctacgacctcccagtggccgctgggccactgccctgcccttggtaacctgagcaaagcagaggtaggaaagcaggttagctgatgaagaagaaagagctcacggcaagttctgaaacccagctgaaattatttgggggagaatcatagaatccaagacatggcaaaccagcctctcagggagaatttccctctggcccaccagatcgggcctcaacatgctttggtgacagaccccagt

SEQ ID NO: 7415 - DNA, 505 bp, Homo sapiens
  MAP TO CHR18.3; EXPRESSED IN HELA, SIGNAL = 1.7; EXPRESSED IN HEART, SIGNAL = 1.7; EXPRESSED IN LUNG, SIGNAL = 1.5; EXPRESSED IN BONE MARROW, SIGNAL = 1.6; EXPRESSED IN ADULT LIVER, SIGNAL = 1.6; EXPRESSED IN BRAIN, SIGNAL = 1.4; EXPRESSED IN PLACENTA, SIGNAL = 1.5; SWISSPROT HIT: P77810, EVALUE 8.00e+00
tggatcaaataccctgagagctggtctaacacttaaatagctgtacccctcattctttcttctctcttccgcataggaaccatgagtttcctttgttatagtggtgaacttttttgtcacatccaggtggaggaaattctgggtattcgctgagagcaaacaaaaggacacacgttgggtcctatactggtggtgttatatccaacactgggaaggctatttcctcatcatgctgctttcagggcacatggaaacactagaaaagaattattagaatagagttagaattccagttaggatagaaatgttgggaagtgtgttggtgtttgtgccgggatgttaagctcagggcaaagggattccagactgttctggaatagattatttggtaccaacgctttccaaatttttttttcttgcttctctgccagccttttggaatcaaactggaagttctagtaacacttgcttctgtcgctgccaaagtccctgctggtgaaattaa

SEQ ID NO: 7416 - DNA, 600 bp, Homo sapiens
  MAP TO CHR16.3; EXPRESSED IN ADULT LIVER, SIGNAL = 2.5; EXPRESSED IN PLACENTA, SIGNAL = 3.1; EXPRESSED IN HELA, SIGNAL = 4.4; EXPRESSED IN HEART, SIGNAL = 2.7; EXPRESSED IN FETAL LIVER, SIGNAL =   3; EXPRESSED IN LUNG, SIGNAL =   6; NT HIT: X75627.1, EVALUE 3.70e-02; SWISSPROT HIT: Q9Y543, EVALUE 3.90e-01
gtggatccggtaggtgacaggagctgcgcagggaggggagcacagccgcttactgtgtccccccatccaggcgaccctcatctgccatcctctgcgggccggcaactcttcctccaaactgccggggcgcatgctgtgcgcgctgccgggccactggcgccctgtccgcttacccagctatccatcggccagccacccggccacccgcacctcccgctccagggcctctgacatcccctccacccctctccgtgcagaattcgaaccccgatcctctcccttccgctcgccccagcccgggtcccgcagccccgcggcacgcccggcactcaccctcagagctcccggcactcaccctcagcgctcgcggctcctccgcgctctgcacgaaactgaaagtagaagccgccgcctagagctgctccgccagtgcatggaactggcggctgctgccgagaaatcacgtggattcgaggtgccagcccgagccagatggggctcgggcgcgggatgggcgggggcctaacacacccgctccctgctgcgcccacaccctggcacctccccacagccccgcatcggacccaaggacagtcccag

SEQ ID NO: 7417 - DNA, 583 bp, Homo sapiens
  MAP TO CHR18.3; EXPRESSED IN ADULT LIVER, SIGNAL =   7; EXPRESSED IN HELA, SIGNAL =  30; EXPRESSED IN HEART, SIGNAL =  20; EXPRESSED IN FETAL LIVER, SIGNAL =  10; SWISSPROT HIT: P24539, EVALUE 4.00e-74; EST_HUMAN HIT: BI861179.1, EVALUE 0.00e+00; NT HIT: gi14739401, EVALUE 0.00e+00
tggcaattgtctccttttcctgctgtgtggagatgctctgcaccacgtgcttctccacccaatttatcacgtgttcttgttcctttcaacacatcatgttctgcacagatatatgatagtccaggcgattctttacttccttatatactctatacagtcgttcccggtaagtaacttccaaagccatagcaatgttattcctttgcacatcaaaaaggtaatggcgcttctgaaccagtgcctgttgtgacttctccatatcaattgcattctggatttgttggatggaagcctgcttcgcctcttctagttgggcaaggttttgctcattgagtttatcagcaaagtctgcaacaaagggaccatattttttaattccatagaccattacacctagtactgatagggcagtgaaggtctctgcgctaatcacatatattcctttgcggacctaaagctgctggcaaagaaggctcaagcacagccaattatgtaaatgtatctatcccaattgagacagctagaaacagttgactgactaaatggaaactagtctatttgacaacgtctttctgtgttggtg

SEQ ID NO: 7418 - DNA, 566 bp, Homo sapiens
  MAP TO CHR16.3; EXPRESSED IN BRAIN, SIGNAL = 1.6; EXPRESSED IN ADULT LIVER, SIGNAL = 1.9; EXPRESSED IN PLACENTA, SIGNAL = 1.5; EXPRESSED IN HELA, SIGNAL = 2.5; EXPRESSED IN LUNG, SIGNAL = 2.2; EXPRESSED IN BONE MARROW, SIGNAL = 1.2; SWISSPROT HIT: Q08303, EVALUE 7.10e+00; EST_HUMAN HIT: BG259473.1, EVALUE 0.00e+00
cctgccaaattgttcctagctgaggcattctggagtgaagatgcagactggaaagcaaaccctgaccctacctgacacgtgattgtcctggtgctttgcgagtctaacagtgcgcccgggtgaatcaagctactggtacctccgctaccgccaccaccaccaccaaaacgcattggcgaagtggagggttcattagggcaatgagcacagcagcttactttggggacagaagaaagctgtattttaggctgctgaagagaacgaatatcaggaagtgggactgctggaaaaagcttagagccagcatgaaggggtgatggtacatcctttagttccacagcaactttcttgttctccatgtactctttctgagaaaagaaaatcagaacataaattaattttatgaggtccgtggttttttggttactcatatcttactgcatgcacaaacagaaatagtgttcaattctgttacatcactaaatcataactgaacaaaatggaatcacagctagttaaaaccaggaacattcttcagagaggtctgcaggacatgaacactggaa

SEQ ID NO: 7419 - DNA, 572 bp, Homo sapiens
  MAP TO CHR19.3; EXPRESSED IN ADULT LIVER, SIGNAL = 1.2; EXPRESSED IN PLACENTA, SIGNAL = 2.1; EXPRESSED IN BONE MARROW, SIGNAL = 1.4; EXPRESSED IN BRAIN, SIGNAL = 3.1; SWISSPROT HIT: P35789, EVALUE 2.00e-73; NT HIT: gi14767612, EVALUE 1.00e-102; EST_HUMAN HIT: AA587596.1, EVALUE 1.00e-106
ggctttgccacattcttcacatttgtaaggtttctctccagtatgagttctcctatgtttatgggggcttgaggaccatgtaaaggtttttataccatttatagcatttctctccagtatgaattgtcttatgtatagtaaggtgtgaaaaatggttgaaggctttgccacattcttcacatttgtagagtttctctccagtatgaatcttctcatgttcactaagggttgaggataaaataaaggctgtgccacatttatcacacttgtatggtttctctccagcatgaattttcttatgcctagtaaggtgtgaggaatgggtgaaagctttgccatattcttcacatttgtagggtttctctccagtatgaatcttctcatgtttactaagggttgaggatgaaataaaggctttgccacatttatcacacttgtatggtttctctccagtatgagttttgttatgtgaagaaagggttgcaggatgtttaaaagctttgccacattctttacatttgtagggttgctctccagtatgagttatcttatgaatagcaagctgtgagggc

SEQ ID NO: 7420 - DNA, 567 bp, Homo sapiens
  MAP TO CHR14.3; EXPRESSED IN FETAL LIVER, SIGNAL = 3.2; EXPRESSED IN BONE MARROW, SIGNAL = 4.7; EXPRESSED IN BRAIN, SIGNAL = 4.7; EXPRESSED IN ADULT LIVER, SIGNAL = 5.6; EXPRESSED IN PLACENTA, SIGNAL = 6.4; EXPRESSED IN HELA, SIGNAL = 4.7; EXPRESSED IN HEART, SIGNAL = 2.6; EST_HUMAN HIT: AV723700.1, EVALUE 2.00e-01; SWISSPROT HIT: P24563, EVALUE 2.40e+00
atcttgttcatccgtgcctctgctcagcacctttgacatgcagcttcctctgcttatgcactttccccaaccccctcctgccatctggttgatgctgcctcatccttgaaatgcctgctcctcttggaggtctccctgcactggcagacgaggccaggcctccctgacacctacatccgtgcatgatttttcctcttggcgctgctcacagcagtgaccgtgagtttggcactgtgcagttatcgggaactccctgcccacctcccaacatcacaggccatgaaggcaggggccagtcgtgtcttcctcaccaggtcccagcacttagcacacttgctgctacatcgttctgttaatgagaaagaaaagtagcaggactgacgttttgtacaaaaggggaactcttgcctgttttttgtttgctcatttgtgttttaattctgggtctatccacgtggatccagcccagtgggctgcacgagtggccttgggccaggcccagctttctctccacgatgaccttctgggtccctccaaatgtccacacctggaggcacatgagagaca

SEQ ID NO: 7421 - DNA, 518 bp, Homo sapiens
  MAP TO CHR16.3; EXPRESSED IN ADULT LIVER, SIGNAL = 1.9; EXPRESSED IN PLACENTA, SIGNAL = 1.9; EXPRESSED IN HELA, SIGNAL = 1.7; EXPRESSED IN LUNG, SIGNAL = 1.5; EXPRESSED IN FETAL LIVER, SIGNAL =   2; EXPRESSED IN BRAIN, SIGNAL = 2.6; NT HIT: AF327059.1, EVALUE 3.20e-02; EST_HUMAN HIT: BE896465.1, EVALUE 1.80e-01; SWISSPROT HIT: Q47884, EVALUE 8.20e+00
ctgtcctagctcaggatgcctgcgtaggaacccctttacccccctatataggggtgggcatcttcctcactgccctacttggtgttcagaggttgtcttgggtcttatggttgtctggggtggggggcgtgttgttgttgagggaggttatgtgctcttggagcatccgtacaatggtgggaatgcagaccttgaccatggggtagagcctcttccctcaattgagaaggagtggttttcaccaggagagcctttggtgtagcagagacccggggcatgccaggagttcctgtctgcgctctcttgacctctcacctggcatttcctgggcattggtctcatttgagatctacactcggctcaaggcgtctggtgttgaatttcctctgtctcctctccagcctctcctttccaccctagttttttctccctctacaccccagtcttgctaatgtcttgtctctcgtagtagcctttatggcagatcaagaggatcctcactgaccattaacaacaga

SEQ ID NO: 7422 - DNA, 504 bp, Homo sapiens
  MAP TO CHR14.3; EXPRESSED IN PLACENTA, SIGNAL =   2; EXPRESSED IN BONE MARROW, SIGNAL = 1.9; EXPRESSED IN ADULT LIVER, SIGNAL = 1.4; SWISSPROT HIT: Q43082, EVALUE 5.40e-01; NT HIT: AF026564.1, EVALUE 1.90e+00; EST_HUMAN HIT: BG288656.1, EVALUE 7.00e-01
gcagtgttaaggcctccatctataaaacagcacattctttattgccttgcagaccaataatcattaacagactggatatcaagtttgaataataatatactgagctaggttttataaggacattaattcacatgcacaactacatcaacccctgaggacttcgtagaatgtgaatatagacattatgtgattcatgccttagctaggcacctctggggcatgtcatgatggcctgcattcagccacaagttggtgagaaatatttggaaacgtcagaactagcaaagaacataaaatgtgcaattgaaaactcacccagagatttcagtgaggctaactcttctgagatctgcaagaggcagtaagccaaacctcagcactgtctcagtgatcagataaacacgtgtttgcatgtgacagtagcctataacagatgatctgtgggagcctgccagggaaggtgacctgattagcacttgactgggtgctcttccctgctttctg

SEQ ID NO: 7423 - DNA, 541 bp, Homo sapiens
  MAP TO CHR19.3; EXPRESSED IN ADULT LIVER, SIGNAL = 1.6; EXPRESSED IN PLACENTA, SIGNAL = 1.8; EXPRESSED IN HELA, SIGNAL = 1.8; EXPRESSED IN LUNG, SIGNAL = 2.5; EXPRESSED IN FETAL LIVER, SIGNAL = 0.78; SWISSPROT HIT: Q60611, EVALUE 2.00e-01; NT HIT: AY030277.1, EVALUE 1.00e-35; EST_HUMAN HIT: AA993678.1, EVALUE 2.00e-69
ggttctgagctgaggaatgcaaagtgctggggttccacagtgggggttccctctgaggaaaagggtgagagggaagggggagcctgtgacgacgggggcttgaagaagggctcttacctggccagctttctccttgttgatgagcaggcgaggggtggagaggggtgccctgtggggagggggagctaaggggtcagggtctgtcctggccctgggtgcccagccgtcctcccagccacagcccccaacctacttgctgatgagggaggcaaagggctgcacctgcaaggaggtacccatgaccaggaggaggtccaccttcaggaagtcctgcggggaggggcgtgagcttgggagcctccgcccaggctgcgccaccgctccctcccccgcccccagcagcaaacctccctgccgccccccatagctggggaggtgacctttcctgaggcagggcccaggctgcccccatggggcccagcacaggtggaggcggcggttggggatgcggggaggctggggggccacttactgactgcat

SEQ ID NO: 7424 - DNA, 510 bp, Homo sapiens
  MAP TO CHR19.3; EXPRESSED IN BRAIN, SIGNAL = 3.9; EXPRESSED IN ADULT LIVER, SIGNAL = 2.4; EXPRESSED IN PLACENTA, SIGNAL =   4; EXPRESSED IN HEART, SIGNAL = 3.5; EXPRESSED IN HELA, SIGNAL = 4.8; EXPRESSED IN LUNG, SIGNAL = 4.3; EXPRESSED IN FETAL LIVER, SIGNAL = 2.9; EST_HUMAN HIT: AA338927.1, EVALUE 0.00e+00; SWISSPROT HIT: P05383, EVALUE 2.00e-09; NT HIT: AF208004.1, EVALUE 8.00e-40
agcaacttcagtttggacacctaagttgccctgtttgctctgttttgttttgtggtggttgaaatatcacatattcctcagcagaggggaaacagaaacccacagggtctgggagaccacctgcatgttgaagtatgctggactcctctgcattcccagggggcttggtcgtgcactgccacctgtggacaccctgacagcctgatgtgatggggggtggcccgcttacctgaaccttccgatccgccgtaggtgtgagaacatctccccgccgggcacgtactccatgaccatgtataagtttgagttgtcctgtgggaagcagtggctggtcaagggcccacccctgagacttggacccgatctgaaggccttgggggcctccccggctggtgttcaaacattaaatgacaacagcgatcctggctccctgtaggaatcatgttctacaggggcgacccttatcctgctgttaatgggtgaaagtgagggctggctcagaggtatgtc

SEQ ID NO: 7425 - DNA, 523 bp, Homo sapiens
  MAP TO CHR14.3; EXPRESSED IN BONE MARROW, SIGNAL = 0.98; EXPRESSED IN FETAL LIVER, SIGNAL = 1.5; EXPRESSED IN ADULT LIVER, SIGNAL = 1.4; EXPRESSED IN PLACENTA, SIGNAL = 1.1; EXPRESSED IN HELA, SIGNAL =   6; NT HIT: gi14748646, EVALUE 5.00e-81; EST_HUMAN HIT: AU132572.1, EVALUE 2.00e-84; SWISSPROT HIT: Q10568, EVALUE 3.00e-43
gctcttctgccccagtgtagtcttcaatccagaattggtgaataattttgaatattctgtctttacccttaaaaagattcaagaagtagtcctttggattgtgttcttgtaggcatgttcaccagattgatgcagtgctgttgtctcaccctgatcctctccaccttggtgccctcccgtatgctgtcggaaagttgggtctgaactgtgctatctatgcaaccattcctgtttataaaatgggacagatgttcatgtatgatctttatcaggtaatttaagcaattaaaaaaattttgttagcactccttcagtgattgtttttcacctttatttgtgttattcttttagtctcgacacaatacagaagattttacactctttacattagatgatgtggatgcagcctttgataaaatacagcagctaaaattctctcagattgtgaatttgaaaggtaaaaagaatttccagtagtaagtatttagatgaatggggtttaacttgctggaaaataccgagg

SEQ ID NO: 7426 - DNA, 591 bp, Homo sapiens
  MAP TO CHR14.3; EXPRESSED IN ADULT LIVER, SIGNAL = 0.96; EXPRESSED IN PLACENTA, SIGNAL = 0.92; EXPRESSED IN BONE MARROW, SIGNAL = 1.3; EXPRESSED IN FETAL LIVER, SIGNAL = 0.86; NT HIT: D26083.1, EVALUE 1.40e-01; SWISSPROT HIT: O60333, EVALUE 3.30e+00
tgttgcatcactgaaaagcctagaaggaccaataaaaaaaaagcattcttgcacatttactttttccaacagagcgtgcataaggaactttctgaaaccatgtcaagtattctccagattgaacaagaggatatagaatggggaccctcagaagcagaaagcatagtatttaaacctcaggaaatttcgcaagttcagccagcagaggaattaagtaaacctttggaagatggacagcccacaagtgattcaaaagaagccaagtgggtgtctttaacggtaagaaactatttatgttggaaacacctaagagttatgagaattgaggatgtgcaggtgtgaagaattggcccaggcaaggaccaacgtatggggctgggggcgggggtgatggtgtgttcactctgaaaagggggcctcagaagtgcaagttgcccacttaggaaaaggaaacatgttttttgagggtttctagtgtcaaccctaattgcaactctggggagaggaaacattttcaaggagggaaggaatttttaggtcttttagaaattggccaagaatcttctagttaccatctcgaggaagtcagga

SEQ ID NO: 7427 - DNA, 532 bp, Homo sapiens
  MAP TO CHR18.3; EXPRESSED IN HELA, SIGNAL = 2.2; EXPRESSED IN LUNG, SIGNAL = 2.3; EXPRESSED IN FETAL LIVER, SIGNAL = 1.1; EXPRESSED IN BONE MARROW, SIGNAL = 1.9; EXPRESSED IN BRAIN, SIGNAL = 1.8; EXPRESSED IN ADULT LIVER, SIGNAL = 3.4; NT HIT: AL163204.2, EVALUE 0.00e+00; EST_HUMAN HIT: BF329040.1, EVALUE 1.00e-118; SWISSPROT HIT: P98187, EVALUE 3.30e-01
agacaccatcatcctggagcagcactgcaccctcactagccagggtgttcatgacttcctcaacgcaaggccacgttcaagacttgggacttcagtgatgcacttgtgctgggcaaggtggcttctccggtatcttaatttgccatggaaggtgctggataaaggagggacagtcagatatgtcttagagatgactgtagaaggctgcctggaaggagtgaacaagagccaggagacccaggagggagcttgtggggcaggtctggagatggcaagggagggatcctgcttggatgaaaagtcttcagggactgtctcaggttacactcaggtgccctcagagctaatgtgttcagaggtcttgtctccaggatgaaaatgggaaggagttgtcagaagaggacatataaatggaggctggcatcttcatgagtaccagcggtggtcccggtgtgggtctctccatccagggacatggtggatggacactacatcactccattctgcccttcctttccctcctcccattctc

SEQ ID NO: 7428 - DNA, 588 bp, Homo sapiens
  MAP TO CHR16.3; EXPRESSED IN ADULT LIVER, SIGNAL = 3.6; EXPRESSED IN PLACENTA, SIGNAL = 2.3; EXPRESSED IN HELA, SIGNAL = 2.7; EXPRESSED IN HEART, SIGNAL = 1.9; EXPRESSED IN LUNG, SIGNAL = 3.7; EXPRESSED IN BONE MARROW, SIGNAL = 3.7; EXPRESSED IN FETAL LIVER, SIGNAL = 1.4; EST_HUMAN HIT: AL519832.1, EVALUE 1.00e-113; SWISSPROT HIT: Q63880, EVALUE 1.00e-20; NT HIT: gi14785624, EVALUE 1.00e-114
gagaacagcctgagggtttgtctttcactccttcccctcatgggggctgcaaactcaccccgtggcctttctgtccttccctcagggcccgaagttgctcagcctgaagtagacaccaccctgggtcgtgtgcgaggccggcaggtgggcgtgaagggcacagaccgccttgtgaatgtctttctgggcattccatttgcccagccgccactgggccctgaccggttctcagccccacacccagcacagccctgggagggtgtgcgggatgccagcactgcgcccccaatgtgagtagtgctggtggaggcgggcaaacaggcaggttgcaggagaatcctgctgctggggcttgtggggctgaacagctggacctcaggcccacccttggccacaggtgcctacaagacgtggagagcatgaacagcagcagatttgtcctcaacggaaaacagcagatcttctccgtttcagaggactgcctggtcctcaacgtctatagcccagctgaggtccccgcagggtccggtaggccggtaggcaccccagagggccctgtccacctgatccagctccactatgcctacc

SEQ ID NO: 7429 - DNA, 514 bp, Homo sapiens
  MAP TO CHR18.3; EXPRESSED IN ADULT LIVER, SIGNAL = 1.4; EXPRESSED IN PLACENTA, SIGNAL = 1.2; EXPRESSED IN LUNG, SIGNAL =   1; EXPRESSED IN FETAL LIVER, SIGNAL = 1.4; EXPRESSED IN BONE MARROW, SIGNAL = 1.9; EXPRESSED IN BRAIN, SIGNAL = 1.6; SWISSPROT HIT: P22272, EVALUE 6.20e+00; NT HIT: gi16167002, EVALUE 7.60e+00
ttgaggctcagggaaatcacagtacattatgttggttcatggtatcaggggctgtgtggagctgcctatcataatcccttgaagagctttgttttcttgccagtttcatgtctttgcctcctggagtctgtgcagcctgccaggctccatcattgcaggtgtgttccaagaggaaacgtggcacatctgttcaggtaccagttcacagcttccccatcacttactttgcattgggctgctctacatggaatctcattgcagcttcaactgccagatgtacgatgatgacccatgtgcttgggacccatgtctccagatggttccatgaggataaccagataggtctcattctcaaaatattcaaagctgaaatcatctctaccatgacctccaccaaacctgctttttcttctttgctccctatttacctctttacccagcctacaaacagttgtctggaagtcatgctagcttgttctctctcttgactcctccctgcctcattctaggcatc

SEQ ID NO: 7430 - DNA, 560 bp, Homo sapiens
  MAP TO CHR18.3; EXPRESSED IN HELA, SIGNAL = 1.2; EXPRESSED IN BONE MARROW, SIGNAL = 1.9; EXPRESSED IN BRAIN, SIGNAL = 1.6; EXPRESSED IN ADULT LIVER, SIGNAL = 1.2; EXPRESSED IN PLACENTA, SIGNAL = 1.2; NT HIT: gi14765937, EVALUE 1.00e-118; EST_HUMAN HIT: BG250691.1, EVALUE 1.00e-118; SWISSPROT HIT: P50137, EVALUE 1.40e+00
gcaatgggtttttcaagagcctcagtgttaactatcgtatgtggtccaaataatgcacttctggatacagacagttaacgagaagagccaagaagcttttcccatcttgaaggcaatggccaggatgccttataaattgggtggcttgcaatatttgatcctggtattcaacatactgcttacttgatgccatggattcaagagcattcagagcctaaaagacacggaagatgagagggttaactccatagaggcacataatgtgactgccagaggtacagcacacccattatcactgtgtacttcaactgtgagccttgtgggaaggaggcctacagaactgaggccaggagtccggaaggcaggcattgattaacttaaccacaaccagaaggaggccagcagcccaagcctctgtggcctttgcagcatcccacacccagccttccctgtttctgttctgtgccatttcccaaccttgccttaccaagagccactgctgtggcaggctgctcttgttgctgggcgcctcacctgccacaccgatttctaaagcctgc

SEQ ID NO: 7431 - DNA, 523 bp, Homo sapiens
  MAP TO CHR16.3; EXPRESSED IN ADULT LIVER, SIGNAL = 1.7; EXPRESSED IN PLACENTA, SIGNAL = 1.1; EXPRESSED IN HELA, SIGNAL = 1.6; NT HIT: gi14724248, EVALUE 6.00e-59; EST_HUMAN HIT: BF196068.1, EVALUE 2.00e-59; SWISSPROT HIT: Q61085, EVALUE 2.00e-05
actcaaccccaaagctgatggttctctcacttcccaaagttggggctgccacaccccagtctagaaccctatctagcctctgtgcagatagggttcgtacccaggtacctcttcataccctggatgtatgaaggatctctggctcagaggcttctggaagtgtgctgctcccacttactctgtgttctgatagacgcccactgagatgttcagcccctccagctcttccttgagcatctgcaggtctgagttgacgaagctcagctccagccgcacttgctcccgcacctttgggtttgcggccactctgttcaaagagaagagggagagaagtgccctcagccaggtatcccagcttctgggtgagcagacccaatccccagtccctgcagggaggatcagggcacggcttgcagaggagggccgggagtgtcgggtaaggtatcccacggacacagagcacctgcccagcttgcagcacacctgccagtacgtggagctggggacacaggcaatgacactg

SEQ ID NO: 7432 - DNA, 545 bp, Homo sapiens
  MAP TO CHR18.3; EXPRESSED IN LUNG, SIGNAL =   1; EXPRESSED IN ADULT LIVER, SIGNAL = 0.99; EXPRESSED IN BONE MARROW, SIGNAL = 1.5; NT HIT: AB038961.1, EVALUE 5.20e-01; SWISSPROT HIT: Q04886, EVALUE 5.10e+00
gagagccctcaacaaaatgcagctcattatgttgctttgtttaatgtgtagctttgagatggctggggctgcctccctttatcttagtgtgagcccggaagggtgaggaaattaccaaggagcaggggctcgcccaccttgatgagggagagtgagcagggaagaggagtagcccttaaatggaggctgaaaagcaatattgtgttggcagacaacaggaacacctgactggcccttttctgatggattaggtagagtgacatggcctgaaccttgaagcccctgaaagagtttaggaaaaataatgaaaaagaaaaaagaagaaaattcatggaaagattgagtaaggcttcgtttcttttcctctctgggtagacagctgacttcgtgctcagatctgctactgatatcaaagggtgtttcacggccagaaagagtaaatgacacccttaaaaaagaaaacaagatgaacatcaaatccatttagtcgaatcttcattcaatccagatgtttggcaatgtagagacaaaacatccgccacttt

SEQ ID NO: 7433 - DNA, 598 bp, Homo sapiens
  MAP TO CHR16.3; EXPRESSED IN ADULT LIVER, SIGNAL = 1.3; EXPRESSED IN BRAIN, SIGNAL = 1.5; NT HIT: Z80203.1, EVALUE 3.70e-02; SWISSPROT HIT: P35928, EVALUE 5.80e+00
ttccattccccagaacagaccctcaggcccccttctgagcgacagcagacactccctcgggagaattaaaatactatttttcaataaatgaagccccggccctgcaccagccctggaagactgtgagctgggcgaggtggcttcctgcatgtgcctcacttattaagacattgccactctgaagagtggagtcattcccaaggcccccgttgtcactggcaggcagcggttgactgacaagtgtcagttgcagcttgctgagcagcagaggccaatagactgtgaaacaaggagcagatgtgctaatgacaaaactttccaaactgaaaacacaaggagcagattcccgggaaaggtgtttccccaacctctacctggtgatgggacgaatgagaaaaacactagccaaacacagagctcaaagtcatcaagacttcgtaatgagaatgcaacaggggctgagcagaaagagggaagggccgctgtcacagccgcgtgcacctgcagccagcgccattgtcatagcagctctgaggatgtaacaagaagcaagcaactgtcatcaaactgtaaacagagtgaaagctgcagaaggaca

SEQ ID NO: 7434 - DNA, 518 bp, Homo sapiens
  MAP TO CHR16.3; EXPRESSED IN BRAIN, SIGNAL = 2.2; EXPRESSED IN ADULT LIVER, SIGNAL = 1.8; EXPRESSED IN PLACENTA, SIGNAL = 2.1; EXPRESSED IN HELA, SIGNAL = 1.7; EXPRESSED IN FETAL LIVER, SIGNAL = 3.1; SWISSPROT HIT: P31429, EVALUE 6.00e-05; NT HIT: gi14776078, EVALUE 5.00e-72; EST_HUMAN HIT: AI887572.1, EVALUE 2.00e-72
gcaggtggaggctacagaagcccagtcctccaggagcctccaaggttgcattcactagcctgaagaacttggccttcagtttcccctgtgtgactagggctggtgggcagcgggccccaacccaggatcagggctaaggtcccacagctggctggtgggtggccacacaggttccctcaggggctggaggatgtgtccacatacccagtcctgatagaggagttgctgagtcgtagctggagcgaggaagagcttcaaggtgtccttcgtggaaacctgctgcgggtcttcagacaagtggaaaaggtaagctgggctggtggacaggatggttcagtggtttgagaaggggaggggattgctgtgggagcctctgactgcggacttcctcccccaggtgagagaggagagcagggcgcagagccccgtggaggctgagtttccatatgggcaactgagcacatcctgccactcccacctcgtgcctcagaatggacaccaggctactcatctggagg

SEQ ID NO: 7435 - DNA, 507 bp, Homo sapiens
  MAP TO CHR18.3; EXPRESSED IN FETAL LIVER, SIGNAL = 1.8; EXPRESSED IN ADULT LIVER, SIGNAL = 1.2; EXPRESSED IN BRAIN, SIGNAL = 1.3; SWISSPROT HIT: Q01026, EVALUE 1.10e-01; EST_HUMAN HIT: BF513119.1, EVALUE 2.80e+00
caaaaacaagcagtcataaacaagaagaaagtaaagtaacagcaacatacatagaaaattcctacacccaaaaaagttatcagaaaataaaacacaagataactcaaaataatttcagtgtgattgtgataatatactggttaaaatattttctgcttccaaacaaagcgtatttataagtggctttccttttcaaaagaaaaaagtaacagagaacattcttccagtttacttctataagaatgtgcttgagaactccaaaatgacacagtccaaatgttgtaaatatggtccagcaaactacagaaaggcacacaaggaggctgccatcaatgccattcaaagaggtaactgtgaaatactggaaactgaggaggaggtcaacagaaaatattcttaataaaaaagtaaattttaaactgtgctcaataataagcctaaactgatgcattttttaatactacggattttactcatcaaacatctgtatcagaaccaccagccatg

SEQ ID NO: 7436 - DNA, 517 bp, Homo sapiens
  MAP TO CHR18.3; EXPRESSED IN ADULT LIVER, SIGNAL = 1.5; EXPRESSED IN PLACENTA, SIGNAL = 1.7; EXPRESSED IN HELA, SIGNAL = 5.7; EXPRESSED IN LUNG, SIGNAL =  10; EXPRESSED IN FETAL LIVER, SIGNAL =   3; EXPRESSED IN BONE MARROW, SIGNAL = 5.7; EST_HUMAN HIT: AA146961.1, EVALUE 7.20e-01
ctgttctcctcaccccctcttttttaaacaaatagcatccgcctctcagttcagatttgtgaaaccttttctcaggctggtttttcgtcgtcttcctttccagcagtcttagattttggtttactccagtttgttttagccacttaacactgttgtcatctgccgtaattcgctttgtgattttcttcgttcctgtgtttttggggaatgatggagataaagaagtgtatgtttaatcaggagggtttttttttcccttcttttcaacagtttttgtttgttttgctagcatcagtgaatattaaacccttcgtttttgggaaaaccagatctatttttttctttaaataaaagtagtgttttcagttagtgctctcatgaagccacatctgtgtcactgagttcaattaacttagtcgatgaaatgcctgctgatctgtagtgggtggtaacataattattttaatttggactattttaaaagcatcaagagatcgcatctttgggaacccacaat

SEQ ID NO: 7437 - DNA, 540 bp, Homo sapiens
  MAP TO CHR14.3; EXPRESSED IN BRAIN, SIGNAL =   3; EXPRESSED IN ADULT LIVER, SIGNAL = 3.2; EXPRESSED IN PLACENTA, SIGNAL = 4.1; EXPRESSED IN HEART, SIGNAL = 3.3; EXPRESSED IN HELA, SIGNAL = 3.9; EXPRESSED IN LUNG, SIGNAL = 5.3; EST_HUMAN HIT: AW438612.1, EVALUE 2.00e-84; SWISSPROT HIT: Q92356, EVALUE 5.10e-02; NT HIT: gi14750570, EVALUE 0.00e+00
ttcttggcactgtagctccccaacaccccagagctgagaagcctgctcctctcttggcccaccttgtgcgcagtttctgcaaactgctgggcgctgttcttcaggtcttctgtcttctcctctgctcggcctaatcgctctccacgctcattcaaggcctggcttgccttctgcactgcgctggtcacgctgtcagcagctgaatggaggatgctgtttcctgaaaggaggagagcaggagcatcagaaactggctcagctgacccacagtgaccagactccggcagggtgagtatcctgtaagaggaaggcaggtcacactgcagaaaggccgctcgtctagtgtctaggaaacaagccgacatttcttttgattgggtttgactgacgcacttgcagcaagaacacccactgactgcaggacctaggaaaatcctaaatgcttctctataaactcatcactgacatgccagtcatttccattctgccagtattctatctgtggaggctcaaaaggatggggcctgtctggatttacaa

SEQ ID NO: 7438 - DNA, 574 bp, Homo sapiens
  MAP TO CHR19.3; EXPRESSED IN PLACENTA, SIGNAL = 3.5; EXPRESSED IN HELA, SIGNAL =   4; EXPRESSED IN FETAL LIVER, SIGNAL = 4.3; EXPRESSED IN BRAIN, SIGNAL = 6.8; EXPRESSED IN ADULT LIVER, SIGNAL = 3.8; EST_HUMAN HIT: AL597586.1, EVALUE 9.00e-84; SWISSPROT HIT: P54792, EVALUE 1.50e-01; NT HIT: gi16163780, EVALUE 2.00e-80
ctttcttcattcagcccagcatctaattacatcttctgtcagtcagggcctgagagggtggggttttaaacgttatccaatcagcgacgctgggctgggaactgtccaatcaggcacgcagcttgagcggagaggacggcttccgggatgtggcgggatttgtccgcttctttgtctttggctgccgctggaactccgggtctcgtcttcactgctctgtgtcctctgctcctagaggcccagcctctggtcctgtgacctgcaggtattgggaatccacagctaagacgccgggacaccctggaagcctagaaatggtgagagtgcggggtccaacatcccgagagaggggaagggctggttggaaccggtgggaagtggctgtggcgagactcaggcctccccgcagtcagctctacaatctgcgccccgagttctccttgcccagctcggcctcagtcgccttcagccataagatggcggttgcgccgacagcccggcccccgggcgtcctgtctcttccctgcatagtgactgtgcccttgcctggagccctctctggggaatctctgca

SEQ ID NO: 7439 - DNA, 579 bp, Homo sapiens
  MAP TO CHR19.3; EXPRESSED IN PLACENTA, SIGNAL = 1.8; EXPRESSED IN HELA, SIGNAL = 1.3; EXPRESSED IN ADULT LIVER, SIGNAL = 1.4; NT HIT: U68396.1, EVALUE 0.00e+00; EST_HUMAN HIT: AV716973.1, EVALUE 1.00e-116; SWISSPROT HIT: Q05315, EVALUE 3.00e-37
cacaagaaagggacctgctcaacactgtgtgctctgccctcaggaatgaaccatatctgcaggtggatttccacactgagatgaaggaggaatcagacattgtcttccatttccaagtgtgctttggtcgtcgtgtggtcatgaacagccgtgagtatggggcctggaagcagcaggtggaatccaagaatatgccctttcaggatggccaagaatttgaactgagcatctcagtgctgccagataagtaccaggtgagcaccccaggagctccccgcacccggcttccatgggatctcagagcaggaggcagctcttcatgccctaactccagataactccctctgtccccggcttttcatcacccacaactccccttatcccaggcttttcatcacccataactccccctgtcccaggctttttatcacacacacaggggttccctttacttttatcatttccctctctcattcaacaggtgttgttgcttgctctgccatcacctctccttgcactgccatcctcagctcttttcccatacctgaccagggtcaatgtcggttcacttgccatttt

SEQ ID NO: 7440 - DNA, 577 bp, Homo sapiens
  MAP TO CHR14.3; EXPRESSED IN BRAIN, SIGNAL = 1.7; EXPRESSED IN ADULT LIVER, SIGNAL = 1.6; EXPRESSED IN PLACENTA, SIGNAL = 1.9; EXPRESSED IN HELA, SIGNAL = 1.6; EXPRESSED IN FETAL LIVER, SIGNAL = 2.7; EXPRESSED IN BONE MARROW, SIGNAL = 5.4; NT HIT: gi9628113, EVALUE 2.20e+00; SWISSPROT HIT: P34284, EVALUE 3.20e+00
tgttgaatgtctgccctctggaaggcactgggctaagcttgagtgatttatgtgtagcttcttcagtagagcattcaaagtcctttgtgttcttgttcaacctaaggttcgatactttcctccagtcacatctacaatgatgcttaaagtgcagccacacaggaccctggggtggtcccagaatgtgttgtctgcctctcacatgccgccttgttgatgagagtccttctagcatcccccttctccacatcaggagctgctactgagatcccaacctgtagctcaaatcttctttccatgtcaactgtttgcttgcccctgtccctagcaaaagctaacccttccttctctaggctcctacagcactttgtccagtgccaaccatagtctttctgtagattttgacaattgctctctccaacgtcctatgtggccacaagagagtgaggtgagcccttcacattgtgcaatgtgcagccaataggcattgtaacaaaagtttgtgaataaacaaatgagtagatctggaaagcattttgtagtttacaaaatgttttcgcagacttgacgcaattta

SEQ ID NO: 7441 - DNA, 591 bp, Homo sapiens
  MAP TO CHR14.3; EXPRESSED IN ADULT LIVER, SIGNAL =   2; EXPRESSED IN LUNG, SIGNAL = 3.8; EXPRESSED IN BONE MARROW, SIGNAL = 2.4; SWISSPROT HIT: Q9YAU2, EVALUE 1.90e+00; NT HIT: gi15299846, EVALUE 3.00e-33; EST_HUMAN HIT: BF315963.1, EVALUE 1.00e-122
gggaagaagggtcaatccaccgactagagtggcggggagcatcacgcggcgctgcatggggctcgtggggaggggaaaacgtatggggctggggtcgctctggaggccggggactcggactcgggtagccgcggaggcctttctcaccatcgcgccaaactctcttcgctacagcagctgccgacaccgccgccgttacacgagcttaactacaacgccgctaacagccaatcctcgcgagaggagccgccggaagtcgtcgaaagtgcaacgcaaaagagccttttggatcatagaggcacagtcacttccggcagctagagcagctactgactctgtttcagccatcttcgataaaggcaaaaaggtaagggaaagtttccaagctttaggaagaattattttttttcaagacgctgtcttccgtactttcgttattaaacatacggctcaagtgatcaccggtatagacagtgacatcagacatctttcattagccctactcaaaaatggcggcaacgtaagtatcctgggccggaggtcggttgtaacccggaagtgcctttgtaaaggagggggtggttagacaat

SEQ ID NO: 7442 - DNA, 523 bp, Homo sapiens
  MAP TO CHR16.3; EXPRESSED IN FETAL LIVER, SIGNAL = 2.7; EXPRESSED IN BONE MARROW, SIGNAL =   2; EXPRESSED IN BRAIN, SIGNAL = 1.2; EXPRESSED IN ADULT LIVER, SIGNAL = 1.2; EXPRESSED IN LUNG, SIGNAL = 1.7; SWISSPROT HIT: P51143, EVALUE 3.00e-13; NT HIT: X91127.1, EVALUE 0.00e+00; EST_HUMAN HIT: BE313934.1, EVALUE 2.00e-50
aagtccctttggaacccatctaactctttattggctgaaactgaggtgactgtaacgtcaatacaacagcaccacagccctatgccctgggttttcaaatagagctccgagcaagtgggacagggggcaggtaagagttgacagacacaacaatcagttcccacgtttgaccaaagagggcctcttggcttcttctctccctgtgccagggtggaatttacgtcttgaccctcctggacacctttgctgcgggcacctccatcctttttgctgtcctcatggaagccatcggagtttcctggttttatggtatgtgagtgtgtggaaaagcctcagctcccagtcctcctagaatcctgcacctggaggtgtgcagggaggccttccatttccaggacagccacctaaaattccagagtccagcaagtcacttattgggaacaaatcttaatcctcggctcatctttggatgaacctgcccttaacaggaggctgcaaaggcccctgggcatcaactcctaaa

SEQ ID NO: 7443 - DNA, 581 bp, Homo sapiens
  MAP TO CHR16.3; EXPRESSED IN PLACENTA, SIGNAL = 5.5; EXPRESSED IN HELA, SIGNAL = 5.1; EXPRESSED IN FETAL LIVER, SIGNAL =   4; EXPRESSED IN LUNG, SIGNAL = 4.6; EXPRESSED IN BONE MARROW, SIGNAL = 5.3; EXPRESSED IN ADULT LIVER, SIGNAL = 6.2; EXPRESSED IN BRAIN, SIGNAL = 4.1; SWISSPROT HIT: P72689, EVALUE 1.10e+00; NT HIT: U07794.1, EVALUE 1.40e-01
gaatgaacacccatgcacaggcattcacggccccgaatacacagcaggtatggtatcactgcttgctgacaggtgccctctggaaactcccaagatgaaatggacaacagcaggctggacccagaccacaccgggaacacatgtacaaccagcctaaaggccagtttggtgtacatcctgggcccaggaggacaccggaagctttggctgctgccaggaaggtaacagaaaccggggacagcccacctcgctccccaagaaccatctccagaatcaacccccaggctcatcccaggggctttgtacagcagcaacacccatcgtgccaggcgccacactggatcccactctggcgcacccttggaaaccaaagaatccaagaagctcaattattcaaaaaatcatgaaggtggtcaagcaggctgggtaggaaagaagcaaaaacctcctccactttggagagtcctcaaaacctccagaaagacacatagactgtagacacatagacacggtctatgccttttttcccatggaaaacacaagaaatgcagaatcttcccaccttgacccctgccttctat

SEQ ID NO: 7444 - DNA, 532 bp, Homo sapiens
  MAP TO CHR16.3; EXPRESSED IN BONE MARROW, SIGNAL = 1.4; EXPRESSED IN ADULT LIVER, SIGNAL = 1.1; EXPRESSED IN PLACENTA, SIGNAL = 1.1; EXPRESSED IN HELA, SIGNAL =   1; EST_HUMAN HIT: BG982234.1, EVALUE 1.00e-51; NT HIT: gi13654717, EVALUE 1.00e-51; SWISSPROT HIT: P21415, EVALUE 1.70e+00
acatggagtcttgctctggggcacgtgcctatgggggatactggaaaccatttttcctgggtattgagacgtggcatgtaagttgcttccagcagccgacttctggaggctactttctcaagcctgttaggggaattgctttagaggagaatattacagtgcaggaaggctctgggggataatttggttttactgtgaaatgtttcttttctttcaccaaaagatggcagtaacctccatccaacttctaggatcctagctgcctgaaaaccgacgttcttcccatcaattgctttctcaattccataccatcattcattcatatttttgtttctttctggttttgttttccttcttggtaggagggcaaagataaaatgttcctgatagaaaaattgatcaagctgcaggatatggagaagaaagcaaaccccagctcacttgttctggaaaggagagaggtggaggtgagtctggaggctgccttggggacccctgggacacgagcttgcctccatgtaaaaagcgcgtc

SEQ ID NO: 7445 - DNA, 592 bp, Homo sapiens
  MAP TO CHR18.3; EXPRESSED IN HELA, SIGNAL = 1.5; EXPRESSED IN LUNG, SIGNAL = 1.1; EXPRESSED IN BONE MARROW, SIGNAL = 1.8; EXPRESSED IN BRAIN, SIGNAL = 1.8; EXPRESSED IN ADULT LIVER, SIGNAL = 1.6; EXPRESSED IN PLACENTA, SIGNAL =   2; SWISSPROT HIT: O02739, EVALUE 9.00e-24; EST_HUMAN HIT: BI871335.1, EVALUE 0.00e+00; NT HIT: D88575.1, EVALUE 0.00e+00
ttcaagactgcccaagacacattcatgtacttgaacacaaatatccaggaagcgataattatagaaaactatgtatctctgtagctattgttttatctatcacttgaccatatgattctaaattatctctgaattatttttacagattgaaaacaaactgacctttcagaatctaatggaatggaccaatccaaggcgaatgacctctaagtatgttgaggtattttttcctcagttcaagatagagaagaattatgaaatgaaacaatatttgagagccctagggctgaaagatatctttgatgaatccaaagcagatctctctgggattgcttcggggggtcgtctgtatatatcaaggatgatgcacaaatcttacatagaggtcactgaggagggcaccgaggctactgctgccacaggaagtaatattgtagaaaagcaactccctcagtccacgctgtttagagctgaccacccattcctatttgttatcaggaaggatgacatcatcttattcagtggcaaagtttcttgcccttgaaaatccaattggtttctgttatagcagtccccacaacatcaaagaacc

SEQ ID NO: 7446 - DNA, 589 bp, Homo sapiens
  MAP TO CHR18.3; EXPRESSED IN BRAIN, SIGNAL = 1.1; EXPRESSED IN ADULT LIVER, SIGNAL = 1.1; SWISSPROT HIT: O95156, EVALUE 1.90e+00; NT HIT: AL139794.3, EVALUE 1.40e-01
ttggcttttctgctttccagctatccctaataagagagagagaaagctagagacagagaatgtgttccaggtgctcaatgtcttactggtgctgtgcctgcaactatcatcattccagcttctgtgtacacacacctggcttcccacagttaaggtggaggaggaggcagccagccagctgtgtgaaggactgaacccgttaggctgtgagactgaggggcaaactcaccatccagggttgcactgacagcctcagctgaaggctcacccttaacaagctgaacaagccttctgacaattgctgtcaatttcgtcccaggaagatgctggcaggacctagatcttggttatgacctggagccatgcccagaaacactcaaatctatcaccaataattgtccatgggcctggctgaaggggagcctccctgacaaacaaacaagtggaaatctgtcacaaaggaagcaaacacaccccatgaccaggagggccactcattcctcttgttctcattggtttggctgctgcatggtaaactcactttaagcatcgtttcttcaattgtccaggctcatgaaagtggtcagca

SEQ ID NO: 7447 - DNA, 502 bp, Homo sapiens
  MAP TO CHR16.3; EXPRESSED IN FETAL LIVER, SIGNAL =   2; EXPRESSED IN BONE MARROW, SIGNAL =  40; EXPRESSED IN ADULT LIVER, SIGNAL = 8.9; EXPRESSED IN PLACENTA, SIGNAL = 2.7; EXPRESSED IN HELA, SIGNAL = 2.4; SWISSPROT HIT: P01764, EVALUE 4.00e-41; EST_HUMAN HIT: BI464043.1, EVALUE 1.00e-113; NT HIT: L25546.1, EVALUE 0.00e+00
accatggaattttggctgagctgggtttttcttgctgctattttaaaaggtaattcatggagaactaaggatattgagtgtgaggggacatgagtgacagaacagtggctatgtgtggcagtttctgaccaggatgtctctgtgtttgcaggtgtgcagtgtgaggtgcagctggtggagtctgggggaggcttggtccagcctggggggtccctgagacactcctgtgcagcctctggattcaccttcagtaacagtgacatgaactgggtcctctaggctccaggaaaggggctggagtgggtctcgggtattagttggaatggcggtaagacgcactatgtggactccgtgaagggccaatttaccatctccagagacaattccagcaagtccctgtatctgcaaaagaacagacagagagccaaagacatggccgtgtattactgtgtgagaaatcctgtgaggagacacaagtgtgagcccagacacaaacctccta

SEQ ID NO: 7448 - DNA, 539 bp, Homo sapiens
  MAP TO CHR18.3; EXPRESSED IN FETAL LIVER, SIGNAL = 1.4; EXPRESSED IN BONE MARROW, SIGNAL = 1.6; EXPRESSED IN ADULT LIVER, SIGNAL = 1.3; EXPRESSED IN BRAIN, SIGNAL = 1.7; EXPRESSED IN PLACENTA, SIGNAL = 1.2; NT HIT: AE001963.1, EVALUE 5.10e-01; SWISSPROT HIT: P98055, EVALUE 1.30e+00; EST_HUMAN HIT: BG183843.1, EVALUE 7.60e-01
gtcctgaaacacccacatcctgagttggttgggagtttgaagtattttggacgtcatttggatattttcacttctgcttcttccttctctatgaagttttaacactagagatttatcaaaagcaattaaatgtaccatgttttttcttagaggtgtcttgtcttccatgttgcacagagatggattatgatctttggtcagcccagagatgtgtcttttccaggagtggtctaaaaagagagagaactctgtggtggtatactttcttgggggatgctatttattgggtggaggagggggtgaattacaaatctgagaaatatgatattcaccatggctttatgctactatcaaactgcccccattaccttcatcagcacccatcccccaacaccactatcactctgggtacattcctcctttattttttcccattcctgccttccttccactactacctgtcccactgagccaaccctaaacattttgtcctcatagttgttcctcatctttcccatacagggttctgtaggccagaa

SEQ ID NO: 7449 - DNA, 503 bp, Homo sapiens
  MAP TO CHR19.3; EXPRESSED IN ADULT LIVER, SIGNAL = 1.9; EXPRESSED IN BRAIN, SIGNAL = 1.5; EXPRESSED IN FETAL LIVER, SIGNAL = 2.9; EST_HUMAN HIT: BI824253.1, EVALUE 0.00e+00; NT HIT: M17082.1, EVALUE 0.00e+00; SWISSPROT HIT: P40199, EVALUE 6.00e-64
ggtcccaatattgaccgatgctctctcctctctcctagcctcacttctaaccttctggaacccacccaccactgccaagctcactattgaatccacgccgttcaatgtcgcagaggggaaggaggttcttctactcgcccacaacctgccccagaatcgtattggttacagctggtacaaaggcgaaagagtggatggcaacagtctaattgtaggatatgtaataggaactcaacaagctaccccagggcccgcatacagtggtcgagagacaatataccccaatgcatccctgctgatccagaacgtcacccagaatgacacaggattctataccctacaagtcataaagtcagatcttgtgaatgaagaagcaaccggacagttccatgtataccgtgagtatttccacatgacctctgggtgttgggggtcagttctacttcccacatacgggattgtcaggcctgggttgtgcctgtggccctctctgcattacatcc

SEQ ID NO: 7450 - DNA, 537 bp, Homo sapiens
  MAP TO CHR19.3; EXPRESSED IN HELA, SIGNAL = 1.6; EXPRESSED IN PLACENTA, SIGNAL = 1.4; EXPRESSED IN LUNG, SIGNAL = 1.9; EXPRESSED IN BONE MARROW, SIGNAL =   2; EXPRESSED IN ADULT LIVER, SIGNAL = 1.4; SWISSPROT HIT: Q99372, EVALUE 5.80e-01; EST_HUMAN HIT: BE302663.1, EVALUE 3.00e-80; NT HIT: gi15304432, EVALUE 2.00e-80
acgacttgcatagtcctggggcctcctaggagggcaggccccttcccaggtgctcacctgagtcaagtgacagagggtggccctcacactgaccagccggtcctgcaagaggcgctggcgaccccaggccctcccgggagccccagcctccctggtggcttggcccagctgttgccgggtcaactccagagctgcttctagttgctcctgcaccaagacagaaggtggttagacttcagaagccatgcctagccccaagaagaaagaaaagatgtcctttcacgtcctggacgtccagtcagcatcctgacttccgcattcaggaagggctcagggcaggcagagaggccaggcgccctgtccttggcccagggccccgcaccttctcctcctgcttctggtctatctcctcctgcagcctccgcagaagccggtcctgcccgcacaacttggtcagcagcgtctggagaaaggagagcgggagctactgatggtccagatctggctcttcccctgccgctcctcccatcatctaga

SEQ ID NO: 7451 - DNA, 573 bp, Homo sapiens
  MAP TO CHR19.3; EXPRESSED IN PLACENTA, SIGNAL = 6.4; EXPRESSED IN HELA, SIGNAL = 3.8; EXPRESSED IN LUNG, SIGNAL =   6; EXPRESSED IN FETAL LIVER, SIGNAL = 8.3; EXPRESSED IN ADULT LIVER, SIGNAL =  48; EXPRESSED IN BRAIN, SIGNAL = 5.9; SWISSPROT HIT: Q04749, EVALUE 9.60e-02; EST_HUMAN HIT: AI885116.1, EVALUE 8.00e-38; NT HIT: M20902.1, EVALUE 0.00e+00
aaaaacgtgggtggacagagggaggcaggcggtcaggggaaggctcaggaggagggagatcaacatcaacctgccccgccccctccccagcctgataaaggtcctgcgggcaggacaggacctcccaaccaagccctccagcaaggattcaggttggtgctgagtgcctgggagggacacccgcctacactctgcaagaaactcaaaaagggagatgaggggatcgtgggagggaggtagggagggaggagggtgccactgatcccctgaacccctgcctctgcctccagagtgcccctccggcctcgccatgaggctcttcctgtcgctcccggtcctggtggtggttctgtcgatcgtcttggaaggtaaaagtgggatgggagaattgcggagttggagatttggaagagtgaaggtggctacaggcctggggtcccggcttagaggacctctgagagctccggggccccttctgggtcgtggttgcctcatcgtggtcgggtgggtctccaggttctcccaggctcagtcccgcaggcgccaaatctgcgcaggagagcactagcaacc

SEQ ID NO: 7452 - DNA, 515 bp, Homo sapiens
  MAP TO CHR14.3; EXPRESSED IN HELA, SIGNAL = 1.3e+02; EXPRESSED IN HEART, SIGNAL = 1.4e+02; EXPRESSED IN BRAIN, SIGNAL =  40; EXPRESSED IN ADULT LIVER, SIGNAL =  46; SWISSPROT HIT: P02248, EVALUE 5.00e-32; EST_HUMAN HIT: AF075321.1, EVALUE 0.00e+00; NT HIT: gi16163456, EVALUE 0.00e+00
ctctttttcttcagcgaggcggccgggctgcagacgcagagatgcagatctttgtgaagaccctcacgggcaagaccatcacccttgaggtcaagcccaccgacaccatttagaatgtcaaaaccaaaattcaggacaaggagggtatcccacctgaccagcagcgtctgatatttgctgggaaacggctggaggatggccacactctctcaggctacaacatccagaaagagtccaccctaaacctggtgctgcgcctgcgaggtggcattactgagccttccctccgccagctcgtccagaaatacaactgcgacgagatgatctgctgcaagtgctatgcttgcctgcaccccggtgctatcaactgccacaagaagaaatgcggccacaccaacaacctgtaccccaggaagaaggtcaaataaggctcttccttccttgaagggcagcagccttctgcccaggccccatggccctggggcctcaataaagtgtccctttcattgactgga

SEQ ID NO: 7453 - DNA, 600 bp, Homo sapiens
  MAP TO CHR18.3; EXPRESSED IN FETAL LIVER, SIGNAL = 1.2; EXPRESSED IN ADULT LIVER, SIGNAL = 1.2; EXPRESSED IN HEART, SIGNAL = 1.7; EXPRESSED IN BONE MARROW, SIGNAL = 1.9; NT HIT: gi16191286, EVALUE 1.50e-01; SWISSPROT HIT: O26742, EVALUE 7.70e+00
cccagtacactctcaagccctgtgttgctctggtcccacagcttctgcccttgactttccatataacagcacattggtggccagggctttgcactaacctacctgcctccaacattgtttttgaataatggaagctaagcagatgcatattaatgcctgcattatggagaagactgtctcttcacaagtaatctgtagttgttagtcttgaaagtgggttaattcattgtctttctagagaaaatgattgcatggcctaatagtcttccagttagtctgtgtggcaaggtagaagccaggagtggattcttagctcctgttgagtgctgctgtcctgaatcagagatcttctctcccgggccactttgtcatgagcaggattttgaaccaagaccttttcttcacctgtctcgggggccctcaccgtgggctttgtgatcccctgacagctccaaaagcctttatcctcatccaatatctggtgaacagctgacacctcctgggaatctttaaaattgttctctaaagaaaccattctgctgcaagtacctatttttagactttataaagcccacgtcaggttgtcgctgcctttctctc

SEQ ID NO: 7454 - DNA, 532 bp, Homo sapiens
  MAP TO CHR16.3; EXPRESSED IN PLACENTA, SIGNAL = 1.4; EXPRESSED IN FETAL LIVER, SIGNAL = 1.6; EXPRESSED IN BONE MARROW, SIGNAL = 1.5; EXPRESSED IN BRAIN, SIGNAL = 1.4; EXPRESSED IN ADULT LIVER, SIGNAL = 4.1; NT HIT: D21077.1, EVALUE 0.00e+00; SWISSPROT HIT: P23141, EVALUE 1.00e-19; EST_HUMAN HIT: BI561549.1, EVALUE 9.00e-56
gtttccgggaagaaaagagctgtgaagcccttctcactctgcttggtcttaggagaccttagtgagtcccagcgtccccacctgaagcccctgatagcctcctacccactacaatgtcgtgagtctgtaaatatcaagtccattttcaggcttaaacctcccagtccaaggcgctgccctagaagacacctcgcctagatctggctgaacttcaggggttcttctttccccctccgcaggtgcacccaagatcccaaggtagggcagtttctctcagaactattgaccaaccgaaaggaaaacattcctttcaagctttctgaagactgtctttacctcaatatttacactcctgctgacttgaccaagaaaaacaggctgctggtaagttgtgggatcccctggtcaagacgtgtcagtgccagtaccccagatattctagtgtagatcggaaggggatgaaggcagcttggggagggagctgcacaggccaggattgtttcaggaccccagggcctctacaggaaacaca

SEQ ID NO: 7455 - DNA, 511 bp, Homo sapiens
  MAP TO CHR14.3; EXPRESSED IN HELA, SIGNAL = 1.3; EXPRESSED IN PLACENTA, SIGNAL = 1.2; EXPRESSED IN LUNG, SIGNAL = 1.5; EXPRESSED IN ADULT LIVER, SIGNAL = 0.96; SWISSPROT HIT: Q59801, EVALUE 2.80e+00; EST_HUMAN HIT: BE972361.1, EVALUE 0.00e+00
ttcaagaaaaattgttgcccttatattaggcaattatagtaacaagaatagatttgttacatatagtataagtattttgggggtaaaaaagtttttggaccaagccagatgacagtgatgcaggaagagtatgacctttctattatgcagcatatttgtgctacgtcttccttaccaagaagaagtatgaacaaagaatcagaaatataccattatgttcaggtttcaagaatagtgcttcaaggtgagaagaattttttctatgcattttactagtaataaaagaatcttaaatcaaccaagaaaaatataaaaggtctggagggtgacaacagaaagaaaagaaaaggctggagaacatgagtttacttaacctccagaacagagtcaggacaaacaaagaacacttggtgaagacagagcaaacccagacacacggatatttaatcagctaaaagctacagcaatgtgaagctatataacaacactggccagccaaatacaaggttaa

SEQ ID NO: 7456 - DNA, 583 bp, Homo sapiens
  MAP TO CHR18.3; EXPRESSED IN ADULT LIVER, SIGNAL = 1.2; EXPRESSED IN PLACENTA, SIGNAL = 1.1; SWISSPROT HIT: Q01095, EVALUE 2.50e+00; EST_HUMAN HIT: BI024996.1, EVALUE 5.30e-02; NT HIT: M18818.1, EVALUE 1.40e-01
tcttaagttgttttgcccgccattttgtctttaaccctcagacagcattttcttggcacttgcaggaataaaaatgatgatttattgagcacaactttgtaacctgtactgcattagcaggtaaaagaactatttcatcttggggatatgaagaaactctttttcataccccaaatgtctttgcccctcctcctggagatagagccctgctttttcctggtgatcgctagtcccccctacacaactcagagacaggtgggtttatggctgcttttagagttaatttgttgttgttctaatccaaatattatggtgcctttttccttttcagatataggtttagtggtgaagatggtcctagtctctccaatgagaggccttttggctcgtgagtcagagacattgatagaagttcatttctgcctctagatgttggaatgttgggatgtcatgcacggagctacctccatggtgggggagctaagcctgtggcacagaagcaggctgagtggacaagcagggagaatttagatctttgatgaagtcaccatctctgaagcatcctaccctgaaacaggcctca

SEQ ID NO: 7457 - DNA, 542 bp, Homo sapiens
  MAP TO CHR18.3; EXPRESSED IN LUNG, SIGNAL = 1.9; EXPRESSED IN FETAL LIVER, SIGNAL = 1.9; EXPRESSED IN BRAIN, SIGNAL = 2.5; EXPRESSED IN ADULT LIVER, SIGNAL = 2.1; EXPRESSED IN PLACENTA, SIGNAL = 1.9; SWISSPROT HIT: Q50008, EVALUE 4.50e-01; NT HIT: gi15308432, EVALUE 1.30e-01
cactgtttggaccccatttccctgaaatatttctaaatcaatgaaaaaaaaaagttagagcacagctgggttctttgacctccctggaaagcaactcccagaaaagacttcaccctctcccattccagtgtgcaggagccattccagcggacaggaccgtacacgcaggtgctgaggaagatgcgactatcaacaaggccgctaccctcaaagtgaggagggtcccccgctgcagcaagccatggctccttatctgcctggctgatcctgtgccccttctcacgtgtgtggtttctcagatggattgtgcagacagtgggggggtaggggttccaccggaggagcacagtggctactgagaacaccttttcaggaagcatccatctaggtgtggggacagagggcatgagggccgcaggcaaacacaggcttgcacacaaatgcaggttgccttcttcttttatctgcaagacacaaggaaatgatcaggaaggtcagagggctctgggggctcaggatactgaggatgggcaagaaacaaa

SEQ ID NO: 7458 - DNA, 501 bp, Homo sapiens
  MAP TO CHR14.3; EXPRESSED IN PLACENTA, SIGNAL = 5.9; EXPRESSED IN HEART, SIGNAL =   8; EXPRESSED IN LUNG, SIGNAL = 7.3; EXPRESSED IN FETAL LIVER, SIGNAL = 9.8; EXPRESSED IN BONE MARROW, SIGNAL = 8.8; EXPRESSED IN ADULT LIVER, SIGNAL = 9.5; SWISSPROT HIT: P98088, EVALUE 7.00e-01; NT HIT: AF239909.1, EVALUE 8.00e-03
catgtattggggagaccaccggtttgtgccggctggagcaggttactcactctgtgccctgatgcccgtctgtgcctccctggtcagcatggtggcagggggtggtggaggagcccaagaatttgggtgggggagggcctctacaagacttggcctgccacttacctgtattagttgcatgctgcttggcgcatggtcccaaagagggttttgcattttattaccaaagtcttgataaaagggacttgggtcagagcaaacatgaggggaggaaaaacaaaggaaattaaatgcaaaatcactgctggtgaaaaaccacatggaggccttgactttaataccgccagagccgatgggggaagtggccccaaagagtcggaaccgaaggacgttggcctggtattcctgaagcctggcccctcttctgtttaaaaagaaattgccatttaatttgtttctgagttttatttctcaagtgaaccagcatgaggccatgtaatg

SEQ ID NO: 7459 - DNA, 502 bp, Homo sapiens
  MAP TO CHR14.3; EXPRESSED IN LUNG, SIGNAL = 3.4; EXPRESSED IN ADULT LIVER, SIGNAL = 2.7; EXPRESSED IN PLACENTA, SIGNAL = 2.5; EXPRESSED IN HELA, SIGNAL =   4; EXPRESSED IN HEART, SIGNAL =   3; EXPRESSED IN BONE MARROW, SIGNAL = 5.4; EXPRESSED IN FETAL LIVER, SIGNAL = 2.8; EXPRESSED IN BRAIN, SIGNAL = 4.5; EST_HUMAN HIT: BE880986.1, EVALUE 0.00e+00; SWISSPROT HIT: P33485, EVALUE 9.10e-01; NT HIT: gi14749530, EVALUE 0.00e+00
agtgctgctgtttctcctcctaggcactagccacagctctcactctgtgcagtcgggcctggtcagacagtctcctgcccgggcctcagtagccagccagtcttcctactgctatagcagccggcattcatccctccggatgtccaccactgggtttgtgccttgtcggcgctcttctactagtcagatatcgcttcgaaacttgccatcatccatccaatcccgactgtcgatggtgaaccaaatggaaccctcaggtcagagcggcctggcctgtgtgcagcacggcctgccttcctccagcagctccagccaaagcatcccagcctgcaaacatcacactctcgtgggctttcttgcgacagagggaggtcagagcagtgccactgatgcacagccaggcaacaccttaagtcctgccaacaattcacactccagaaaggcagaagtgatttacagagtccaagtaagtaagcccagaggtggtcttgtgctgtttttg

SEQ ID NO: 7460 - DNA, 596 bp, Homo sapiens
  MAP TO CHR16.3; EXPRESSED IN BONE MARROW, SIGNAL =   4; EXPRESSED IN BRAIN, SIGNAL = 3.7; EXPRESSED IN ADULT LIVER, SIGNAL = 2.6; EXPRESSED IN HELA, SIGNAL = 3.4; EXPRESSED IN PLACENTA, SIGNAL = 2.8; EXPRESSED IN HEART, SIGNAL = 2.4; EXPRESSED IN LUNG, SIGNAL = 3.9; EST_HUMAN HIT: AW294552.1, EVALUE 0.00e+00; SWISSPROT HIT: O15265, EVALUE 7.70e-02
tcaccacatcctcctcttcctccccactctgcacatgcggctgggtggcagccagcggcctcagacagacccactggcgtctctctgctgagtgaccgtaagctcggcgtctggccctctgcctgcctctccctgagtgtggctgacagccacgcagctgtgtctgtctgtctgcggcccgtgcatccctgctgcggccgcctggtaccttccttgccgtctctttcctctgtctgctgctctgtgggacacctgcctggaggcccagctgcccgtcatcagagtgacaggtcttatgacagcctgattggtgactcgggctgggtgtggattctcaccccaggcctctgcctgctttctcagaccctcatctgtcacccccacgctgaacccagctgccacccccagaagcccatcagactgcccccagcacacggaatggatttctgagaaagaagccgaaacagaaggtaattccagccctggttttctgctgggaccagggtgccttctctgcccaggagggactgttccctgcctgctgcatctagtgtcacagtgggagggctcggaggactgtgcccaagtcacaattg

SEQ ID NO: 7461 - DNA, 502 bp, Homo sapiens
  MAP TO CHR19.3; EXPRESSED IN ADULT LIVER, SIGNAL = 1.1; EXPRESSED IN HELA, SIGNAL = 2.1; SWISSPROT HIT: Q9UPR5, EVALUE 4.00e-43; NT HIT: gi15301799, EVALUE 0.00e+00; EST_HUMAN HIT: BG772726.1, EVALUE 0.00e+00
tagacaaaatggggcctctgtaggcaaggaaggaagtctgagtgtatgccccagctgggtcgtgtgcccacaggggacgaggaggaggaggaggacgggtcccgggaggagcggctgccgtcgtgctttgactacgtgatgcacttcctgacggtgttctggaaggtgctcttcgcctgtgtgccccccaccgagtactgccacggctgggcctgctttggtgtctccatcctggtcatcggcctgctcaccgccctcattggggacctcgcctcccacttcggctgcaccgttggcctcaaggactctgtcaatgctgttgtcttcgttgccctgggcacctccatccctggtaacaccctgggagactttggtggggtaggatctcagatgagccaggcaggggcaacacaggatcctgccaaaatgaggtgggtggagtcacacagcgcccatgtggtgggtctcagagaaatacggaggtggggcataatagaagcca

SEQ ID NO: 7462 - DNA, 510 bp, Homo sapiens
  MAP TO CHR18.3; EXPRESSED IN LUNG, SIGNAL = 1.1; EXPRESSED IN ADULT LIVER, SIGNAL = 1.1; EXPRESSED IN PLACENTA, SIGNAL = 0.99; EXPRESSED IN HELA, SIGNAL =   1; EST_HUMAN HIT: AI334974.1, EVALUE 2.80e+00
ctgacaccccagttactgccccaaggaaaccaaagtgtcagcagtcatcctcagggtgtctcatctctgtctctccttcgcttccaaaaagcctgcctgaaatctgactttcagagagttactgcaggtggtaatatgaacaactggggacaatacagacctttgagaccttctgctctaggaatagtaactaatcttttccctaaaccaataatagtttctctacagctgaagccagattcaaggtcatatcagtttaaaagaaaattgaaaagacaattattttggactcttaaggaaaagcagacagtgaaaattcaatggctatattcagaacataccgaagtatttgaaaagaaactttttcagcccatggaagaagacacatgtaattattagaattgtgggaatgcaaaaactaggacattgtttctgtaacaatatattgggatgacctaacaactaggattgctaaatcaggggaaaaaaccacagacgcaaaaggtagca

SEQ ID NO: 7463 - DNA, 506 bp, Homo sapiens
  MAP TO CHR18.3; EXPRESSED IN FETAL LIVER, SIGNAL = 2.6; EXPRESSED IN BONE MARROW, SIGNAL = 1.8; EXPRESSED IN BRAIN, SIGNAL = 2.7; EXPRESSED IN ADULT LIVER, SIGNAL = 2.1; EXPRESSED IN PLACENTA, SIGNAL = 2.2; EST_HUMAN HIT: AA393229.1, EVALUE 1.10e-02; SWISSPROT HIT: P53774, EVALUE 1.80e-01; NT HIT: gi15920163, EVALUE 1.90e+00
gtccaatttcccatcactgctgtctacttctccctaatggggtcacatgcttacctcaccctggctgtcacaaccagagccaggttgcccaactgtatggatgctttcttcaatcttcatatgtccccacactgtcctcctttctagatggacatcctcctcaccctgcttattttctgacatcctgtgttggccaccctcatatactgaaacagtcttcatcccactcagtctgggaaagcctgtcccagactatctcccttgcacaaaaatttctcctcactcatcacaggctcagacaccctggactcattttccaaaccctgtgtggatgcccttccgactcatgctcacatgtactgctctgggctactgcacttccctatcacctcatccacctctaacacacagtcgcgtacattatggagcctcaccaaatgcctcttggactaaattactcagggaaggaggaggaagagaatgagtggaagctgactttctcaagg

SEQ ID NO: 7464 - DNA, 528 bp, Homo sapiens
  MAP TO CHR16.3; EXPRESSED IN HELA, SIGNAL = 3.5; EXPRESSED IN HEART, SIGNAL =   3; EXPRESSED IN PLACENTA, SIGNAL = 2.5; EXPRESSED IN LUNG, SIGNAL = 3.6; EXPRESSED IN BONE MARROW, SIGNAL = 3.8; EXPRESSED IN ADULT LIVER, SIGNAL = 2.6; EST_HUMAN HIT: AL036502.1, EVALUE 1.00e-82; SWISSPROT HIT: O35245, EVALUE 8.60e-02; NT HIT: gi15314944, EVALUE 7.80e+00
atgagcgtgggagatgactccccagcccccagccctcctcatccttgtccctaagaagagagtgagagcaaaacttgtggctgcagtgcagacaagcctgcctctttctcatgcagatgtgatgtttcccacacagggaggcagtcagaaaccagcatatgcccttctgtcttcccagccagcagcccaggaagggcaggtgctttgaaggagaggcccctaaccccctttcacggacattcacagggagtcaaggtggacgcgagagaccacagtggagccacagcccggatgctggccaagcagtacggacacatgaagatcgtggccttgatggacacttactcgccctctctgcccaagagcctctatcggagcccaggtacccacacctgccagccgcgccctgctggggtctctggttgccttgagctttaggtgacctggcagagaaagatgtcccccgcttccccggctcccaccttctctgagatttggctctgcctcccccagctgcttacatgtcaa

SEQ ID NO: 7465 - DNA, 527 bp, Homo sapiens
  MAP TO CHR16.3; EXPRESSED IN HELA, SIGNAL = 1.3; EXPRESSED IN BONE MARROW, SIGNAL = 2.1; EXPRESSED IN ADULT LIVER, SIGNAL = 1.3; EST_HUMAN HIT: BI061679.1, EVALUE 3.00e-68; SWISSPROT HIT: P51433, EVALUE 1.90e-01; NT HIT: gi14776228, EVALUE 3.00e-70
ccaggtgtgtgtctttggtgaggacaaggcagggggtggcttagagcttggccttgaatctataatcttgatcccctcccccgccacccaacactgaccccaggagcagcgggagcagctgcaggtcctacgccaggctgccttcgaggtggagggggagtcctcgggtgccgggctaagtgctgaccgtcgccgttccctctgtgcccgagagttccgcaaactgggcttttctgtgagtatcacccctacccaactccccacccctgcctcagcccagggctgttgttccaggcggccgtggcccttcttgaactgcctgtgcccacttcccccagaacagcaacccagcacaggacctggagcgcgtgccccccggtctgctggccctggacaacatgttgtacttctccagaaacgcgcccagcgcgtacagccgggtcggtgacagggtagggtgggggggtggcagcatcccccaggcagggtccccatgggcttagctgtgactccttgccccattctct

SEQ ID NO: 7466 - DNA, 585 bp, Homo sapiens
  MAP TO CHR18.3; EXPRESSED IN ADULT LIVER, SIGNAL = 1.2; EXPRESSED IN HELA, SIGNAL = 1.3; EXPRESSED IN BONE MARROW, SIGNAL = 1.5; EXPRESSED IN FETAL LIVER, SIGNAL = 1.8; EXPRESSED IN BRAIN, SIGNAL = 1.9; SWISSPROT HIT: P12053, EVALUE 4.30e+00; EST_HUMAN HIT: BF918648.1, EVALUE 1.00e-100; NT HIT: AJ310932.1, EVALUE 2.20e+00
aataacatggcagtgggctcctgggttgattaaatctgaacattctcgccattgtgtgtccctgcatggtgacggtgacagtgacgctgggctccacgtttactgccctgtgaagccatgccgggggccaaagcctgaaccatttttttttcttattcaacatactacagactagctatttttgaagagttatttacaaggtagtctttctgatttatgacaatttcatttgtgaaaataagaaaatgggaactctgaatccagccaaggttatcgtgaaggagatgctttcaagtaagctagatgtgtacctagctttgctcttttctttctgttttcagggaagtttggatgattatttcacccatgcgaccaagaatgagccttcgcacttctggagagacagaactctgcaaatagagctgagggaatactcaaaagacagatttgggagttctaagaactcgtgcagtaaaatgacagcagaggagaaggggcaggaaaatgttaccctaagagcatggctggcaggaaggagtgaggctgggtccactgatccccactacttagcaggaaaatgccacc

SEQ ID NO: 7467 - DNA, 557 bp, Homo sapiens
  MAP TO CHR18.3; EXPRESSED IN ADULT LIVER, SIGNAL = 1.3; EXPRESSED IN PLACENTA, SIGNAL = 1.5; EXPRESSED IN HELA, SIGNAL = 1.7; EXPRESSED IN LUNG, SIGNAL = 1.9; EXPRESSED IN BONE MARROW, SIGNAL =   2; NT HIT: gi7656917, EVALUE 1.00e-35; EST_HUMAN HIT: AI335888.1, EVALUE 2.00e-87; SWISSPROT HIT: P98195, EVALUE 2.00e-21
ataacttgctccctgtccccagactgatggggtgagctgcgttctcaattttaaaaccatctggctctagggagcaattaacacaaattgtaaagaaagtctttatgatccataatggtctttattttaaagaataataccaagtgacttttgtgatattgcttaggattcctctagaacaatgttattcaaacgtatatacttagccgtgaaaacaaaaagttctgaacacctaagttcttctgcagctgtctcatgttggcaagctttctgagcactgccgtgctggctcgcctgcgtgcggctttcctgaggcagcggtggcctcagttgttgctggtctcccgtaggtcgctctggtgcagtggacagagagtgtgggcctcacgctggtcagcagggacctcacctccatgcagctgaagacccccagtggccaggtcctcagcttctgcattctgcagctgtttcccttcacctccgagagcaagcggatgggcgtcatcgtcagggtgaggctgcggggagggtgccacgcgatggcttcagacattttg

SEQ ID NO: 7468 - DNA, 514 bp, Homo sapiens
  MAP TO CHR18.3; EXPRESSED IN FETAL LIVER, SIGNAL = 1.8; EXPRESSED IN BRAIN, SIGNAL = 1.5; EXPRESSED IN ADULT LIVER, SIGNAL = 1.1; EXPRESSED IN PLACENTA, SIGNAL = 1.2; SWISSPROT HIT: Q64760, EVALUE 5.50e-01; NT HIT: gi11761627, EVALUE 7.60e+00; EST_HUMAN HIT: BE968442.1, EVALUE 1.80e-01
acattgcatagctgcactcgctctcttcctccctcctcctcacgagattaatgaagggaagaaagaggacattgttacagacctgtttgtgtggttgttctttacacctcccgtgatgatgaccaaagtcaatccaagccacttggcatctgccttgcccaccactgcagggggtacatagtcatcatttagcactgagcacgtctccctagcagtgctggaaggaggggtgccatcaacagcctccaatgcagctgaactcggaggggtggcaagcctgggagaaagaccaggacaagggtgccgctctccacagaactttgacaacccgttcctccatggtgtcctgatatcacatcttctgtaaccactgtttccaaatggccttcctaggggatgttgacttctagcattttcaatatcagaaacttccttgtctccccacacttccctccgtatgctattgggcctgtcttgtagggactgaactaggtgtgcattccagggtcagagt

SEQ ID NO: 7469 - DNA, 559 bp, Homo sapiens
  MAP TO CHR16.3; EXPRESSED IN ADULT LIVER, SIGNAL = 4.5; EXPRESSED IN PLACENTA, SIGNAL = 2.4; EXPRESSED IN HELA, SIGNAL = 4.2; EST_HUMAN HIT: BG743360.1, EVALUE 0.00e+00; SWISSPROT HIT: O75153, EVALUE 7.00e-30; NT HIT: gi14771279, EVALUE 3.00e-30
actcatgctccagcagatccaggcaacacgatgggggccacaccaccatcttacaaagtcagtggagccatagatgacactctgctcctggtcccactccaggatgccagggatgaggactggaacctgacccagtagctgcggtcatccacctctgctgtgtccagcgtgtacagaccctccatgtccgctgccttgtgcgggtgctcaccgttcaggtcattggtgaatgctatggaggctgccacatccctggcaaagtccttgtagtggccactaatgacaaagcccaggctgaagatgatgcggctccacatgaacatctgcagcttggtctcctcactgggactgatggccatgacgatgcctccctgactaccatggcgccccatgtggctgccattctgaagttgctgtgtacctgggagggaccaaggctgggagggtgagaggccatgcccacaaaagcctcaggctacatccacctggtccagctcgccaagatgggagaggcaaccaggcctgccttgggagccagagacccttgcctcagtttcct

SEQ ID NO: 7470 - DNA, 525 bp, Homo sapiens
  MAP TO CHR18.3; EXPRESSED IN ADULT LIVER, SIGNAL = 1.3; EXPRESSED IN BRAIN, SIGNAL = 1.5; EXPRESSED IN PLACENTA, SIGNAL = 1.2; EXPRESSED IN FETAL LIVER, SIGNAL = 1.7; EST_HUMAN HIT: BF339487.1, EVALUE 1.90e-01; SWISSPROT HIT: P54282, EVALUE 2.50e-01; NT HIT: U07000.1, EVALUE 2.00e+00
tcctcccctgtgatctatgctttctctttcacttactcaaattgagccccactcaatgtggtttctgtttccagtaattttccctcagactgcagctctttccttctggaatgaattgtttgccggatatttctgagactctcaggaatttaaactgttccaccctctctgctccacccagatccaggcccagttatcttcactgtgagcccctgggactcctcttccctgctcaggatgcgctcagctctgatcagggtgttgtcttcatcttttgggggtgagaatttgtgggtgacttttttatttttgtgaccaagtcctgttgttgctggtttggcgtatttgtccatgtcctcaggtttgataggtctcctgtcacctaatttggttgaagaggttagaggttagaggtgggatttttgttgttgttggctgaggtggtgggtttttggggggctgcatcctatctgctctacttggttgtcaggagaggttatagggagattgggaaacctactgcca

SEQ ID NO: 7471 - DNA, 503 bp, Homo sapiens
  MAP TO CHR16.3; EXPRESSED IN FETAL LIVER, SIGNAL = 0.93; EXPRESSED IN ADULT LIVER, SIGNAL = 1.1; EST_HUMAN HIT: AA384273.1, EVALUE 7.00e-01; NT HIT: gi14735055, EVALUE 4.80e-01
accgaataaaccctttgctcagacgtagtgaaaaggtaaattccccttcaacctaatgaagtttcagtcactcacattttctgaatttgccgaacagaaatgcgatcaggtgcctactaagtccagtacccagcacgatgtctagcattgaaacatacagtgtatacaccagcacctccaccaaacccatatccagcatgcaaaacatacccttttcaagtcggaagcacatagatagattttttggagttcaaaaggtcttaatgcaaactggctccaattcctttttttttttttttaaatctttgaaacattggttaagtcttctcagagctatcattttgcacacatggaaactttagaccatccatccttcaagtgtcttggggtaattagagatactgaaggttaaggacctagcatactactaatagattttcaacaaatggtagctactgttatttctcatcattgcagatttaagagtgccaattctcagagca

SEQ ID NO: 7472 - DNA, 589 bp, Homo sapiens
  MAP TO CHR16.3; EXPRESSED IN HELA, SIGNAL = 3.3; EXPRESSED IN BRAIN, SIGNAL = 1.6; EXPRESSED IN ADULT LIVER, SIGNAL = 1.3; EXPRESSED IN PLACENTA, SIGNAL = 1.3; EST_HUMAN HIT: BE207609.1, EVALUE 8.00e-72; SWISSPROT HIT: Q13398, EVALUE 9.00e-09; NT HIT: gi16164987, EVALUE 5.00e-72
gggcaatggtcttgtagagcttcccgcagtcgccacagcggaagcggcgctcacgcacgtgcacctcctggtgcttcttgagcaggtaggccttggggaaggccttgccacactgcgcgcaggcgaacggcctcggccctgcagccacacacagcatcaggccaagcccatcacccgcgggcccgccaggccgcctgccacctgcccacagatcccctggctccctgctgtctatggacccaccctggacacccagaagcaccccggccacctatagcccatccactgccatgggccacacacccacccatcacctaccggtgtggcccctcttgtgggcctccagggtggctgctgtcgggaaggtctcactgcactgaggacatgggtgggtcctgggcaccgctgaggcctcgctggccacctgctggggaaccacaggaaggtctccagcacccggggcaggctgtgccctggcagtaccaagaacacaaccatgggccccaccctggcaggctcccttgtggccccagggaaggcagtaaacagatcaatggacaaagtcactgcagaaagccacttcagggag

SEQ ID NO: 7473 - DNA, 536 bp, Homo sapiens
  MAP TO CHR18.3; EXPRESSED IN ADULT LIVER, SIGNAL = 4.2; EXPRESSED IN PLACENTA, SIGNAL = 4.4; EXPRESSED IN HEART, SIGNAL = 1.9; EXPRESSED IN HELA, SIGNAL =  13; EXPRESSED IN LUNG, SIGNAL =  14; NT HIT: gi15305851, EVALUE 1.00e-102; EST_HUMAN HIT: R53920.1, EVALUE 2.00e-96; SWISSPROT HIT: Q16787, EVALUE 6.00e-31
tttcttcttgccatgtgctgggacttacaccactagctaagtttgccacaaaagttccatgttattccccaatgtagtaaggaaattatacaacaaaaccattaacagctggaatagaatagctttttaaagtttccagagaaacgggtcatttaatcagtacctacgttagcttatccatttgaaaaatgggggttgggtgtttgctccccaccctctgtctcagtgctgagattcgaaggaacgctgaacacctctatttcccttcatcgccgatgttcccaacaggtcacagtttgctgtggacatgcagacaacatcctccagaggactggtgtttcacacgggcactaagaactcctttatggctctttatctttcaaaaggacgtctggtctttgcactggggacagatgggaaaaaattgaggatcaaaagcaaggagaaatgcaatgatgggaaatggcacacggtaagagctggggctgtgtcagtatctccagttggtgtggaattcactgttggagtcgctgaaa

SEQ ID NO: 7474 - DNA, 598 bp, Homo sapiens
  MAP TO CHR14.3; EXPRESSED IN ADULT LIVER, SIGNAL = 1.8; EXPRESSED IN PLACENTA, SIGNAL =   2; EXPRESSED IN HELA, SIGNAL = 2.2; EXPRESSED IN LUNG, SIGNAL = 2.7; SWISSPROT HIT: P06538, EVALUE 3.40e+00; NT HIT: gi15920163, EVALUE 1.40e-01; EST_HUMAN HIT: BI518425.1, EVALUE 0.00e+00
taaatgcccacaactctccccacgccgctctcccaccccattgagaagcagtggttggacctacgctcagcattgtgctcccaggccctctctgcgggttcaaacgcctcttgatgtcctcttggtctctgcctccttgcttcctctagttgggatgcctgcacgctggagagagttgggtcttttgtggcttttgtggctctggtcccagtaggagatgacagacacaaccagagggcaggattccctcgttccacggttccatctactctggaggcgaaaaaggggtgtgtgaagtggtccctgggaataaagagaaagctgctcacctttctgaaaaacttttcacctctcagggaaaggggacctgagagaagcctaagagaaaactcctgatgcttagccaactccttgagaaggaaagtgagaatggaggctgaagccccttccatccttcctggtaaagcagcggagacgccaacacccacgatctgcaactcaaagtcaagggattccgtgtccctgcttgtgtcaacatagaaaacgcccatggcaacgggcaagtgcggcctgaaatggcagagtgtgtgtttcacaa

SEQ ID NO: 7475 - DNA, 573 bp, Homo sapiens
  MAP TO CHR19.3; EXPRESSED IN ADULT LIVER, SIGNAL = 2.6; EXPRESSED IN PLACENTA, SIGNAL = 2.2; EXPRESSED IN LUNG, SIGNAL = 2.3; EST_HUMAN HIT: BG488791.1, EVALUE 3.00e-62; SWISSPROT HIT: P98187, EVALUE 3.00e-25; NT HIT: gi14767726, EVALUE 1.00e-110
tagatccatcctcctgccactcaccaggcccaggtgacccaagaaccagttctgtttccggggctgcgggaaacaccggaggcggcggccgttgtgatagaaggcataggtccaggccaggatgcgggccaggagccaggaggccccgaccaccagcaggagcagccacggggatgctgccaccggcctgaggcccagccaagacaggctcagcagcgacatcctgcagggcagacgggatggagggtgaggtcctgaggcctaggaaaggggctggggagctccaggaccaatgatgggtaaacatggttaagagcatggagggagattcagggaatctcaggggaagaggccaagggagaggggagaggagaagtgacacaaaattagagatcaaggaaactagagaccagaaaccagacagcctcatctagaaccaccagccaacttgacctctggttacctgcaagcacccatcaccagggccagctccctggagccatcccagtcttgggcagtgcccctccctatccagccctgccacccccagcctggcaccttctgtcaggagaa

SEQ ID NO: 7476 - DNA, 565 bp, Homo sapiens
  MAP TO CHR14.3; EXPRESSED IN FETAL LIVER, SIGNAL = 2.1; EXPRESSED IN LUNG, SIGNAL = 1.1; EXPRESSED IN ADULT LIVER, SIGNAL = 1.9; EXPRESSED IN BRAIN, SIGNAL = 1.6; EXPRESSED IN HELA, SIGNAL = 1.6; EXPRESSED IN PLACENTA, SIGNAL = 1.4; SWISSPROT HIT: P49341, EVALUE 8.10e-01
gaggacttggatgaggttgctgaggttaaaaattatctacctagaaaattctttctagctgaggtatttcagagtggaaaaaaatgcttggaaaaaaaccttcctatctttgcccctaaggaaataaagttacaatgacagtcacctaatctaataacttctcttattcctgtcataggttcaccttgcaggtgtactggttttcctcattttcattcttttcactgattcttttttagcctctgattccttactgaaatctattgaaaagtgcacaattgcaattttagcattaaatttctctttaatactgcttgtcacttttcctctcattgattcaaagctacgtgccaagtcaatggagcaatgtgagtttaattctttctttggtttggttaccttccttcttcaagcagcagcaattagagaacactacaccttggtcctttttttgatataattaaatgagtaattcttataactgtttattattgattccctcaacttttcatcctttcattctctctgcattccactcggctccccccaaagttagccacagcag

SEQ ID NO: 7477 - DNA, 584 bp, Homo sapiens
  MAP TO CHR18.3; EXPRESSED IN HELA, SIGNAL = 0.94; EXPRESSED IN BONE MARROW, SIGNAL = 1.6; EXPRESSED IN FETAL LIVER, SIGNAL = 1.4; EXPRESSED IN ADULT LIVER, SIGNAL = 1.1; EXPRESSED IN PLACENTA, SIGNAL = 0.99; SWISSPROT HIT: P06333, EVALUE 7.40e+00; NT HIT: AF032130.1, EVALUE 9.00e-03
tggagggaggggtttaagaggagaggtgtcaggagaaactgaagcaaacagaaaaaaataaccttgggtaatgataatttgaagagtaggaggaaagtttgtgcatttaattatgataacaccagtttgtcaggaaagctaaactcaaccagaaaatccttaatcattaacgctgtcatcccaaaaaagcaccttctcgtaactgcctgtttgacagattctggaggacaaagagagcctgcagacaggaaactgtcaatccttctgcacagaacatcagagaacccctctgaagaaggtgagtgagcgtgagcatgcacctatgggtgtatgtgtgtgtggcgtggtgtgtttgcagagtgtatattcattttcccttttgcttcttaccttttgtccttgaagattctttcctctcattgtctaaaacaaattggcaataccccatttgctccattgcactttctcttctcagtgccttctgctcactttttttcccagaaggtttaagtcatcctcacggtcagcttccaagggagccatgttattgagaactattcttaagccacggtttctttccagta

SEQ ID NO: 7478 - DNA, 530 bp, Homo sapiens
  MAP TO CHR18.3; EXPRESSED IN HEART, SIGNAL =   4; EXPRESSED IN LUNG, SIGNAL = 1.3; EXPRESSED IN FETAL LIVER, SIGNAL = 1.2; EXPRESSED IN BRAIN, SIGNAL = 2.6; EXPRESSED IN ADULT LIVER, SIGNAL = 1.3; EST_HUMAN HIT: AA001088.1, EVALUE 2.00e-93; SWISSPROT HIT: P51152, EVALUE 1.00e-20; NT HIT: Z22818.1, EVALUE 2.00e-65
cactttgggcattatttgggaactgactttggctgctttttcttagggacacagcaggtcaggagagattcaacagcattacctcagcttattacagaagtgccaaggggatcatattagtatatgatatcactaagaaggagacatttgatgatttgccgaaatggatgaagatgattgataaggtaaatgttgcatttttctgtccaatgtgaactctctgcttgtgagtcttaatcattattaaaagaaggaggggaaacacatgtattgagcatgttttcatatagactaaacatcatttagcccatatatagccttcgggatagggatgtagtcctgtattgtggatgaggcaaagaagaattaaatttatccagaatcaggatttttcgtctggtatcctggactgtctcaactacagaggccaaacatgctcattccactacatccagctgctttcatggaatagatataagacatttcatttctgcggaaaggtcacctggacactcatctcatgcacgtcc

SEQ ID NO: 7479 - DNA, 517 bp, Homo sapiens
  MAP TO CHR19.3; EXPRESSED IN HEART, SIGNAL = 3.2; EXPRESSED IN HELA, SIGNAL = 5.5; EXPRESSED IN LUNG, SIGNAL = 6.9; EXPRESSED IN BRAIN, SIGNAL = 2.5; EXPRESSED IN ADULT LIVER, SIGNAL = 4.4; EXPRESSED IN PLACENTA, SIGNAL = 2.7; EST_HUMAN HIT: H65955.1, EVALUE 1.00e-113; SWISSPROT HIT: Q09695, EVALUE 2.10e+00; NT HIT: gi15306461, EVALUE 6.00e-84
ttttgggtcttcttgatggggggagagttgggcacagatgttgacctgatctgtcactcacttccaggatatttcatgtctgaatcgggacccagctcgagtagtagttgtggactgcaagaaggaagccttccgcctgcagccctataacggcgttgccctgcggccctgggacggcaactctgatgaccgggtcttgttggatctgtctgccttcctcaagagtaaggctgacccctgatcccttggcctctgaccccagagcccctgactctgaagaggaaggataaatgcatgattcatggctgggcgactgaggtgcaagaggtgcctgagcaccttggagtctttaggagcttcttaggatgttcatggaatgtttgggggatacttggggatgttcaggggagccctttcagagcgttcagaagcattccaggtagcactgactgcccccgtgccccagtgcgggacgttcccctcatgggccctgcctccctctggcctttagaagcct

SEQ ID NO: 7480 - DNA, 552 bp, Homo sapiens
  MAP TO CHR14.3; EXPRESSED IN ADULT LIVER, SIGNAL = 2.2; EXPRESSED IN HELA, SIGNAL = 2.9; EXPRESSED IN PLACENTA, SIGNAL = 2.8; EXPRESSED IN FETAL LIVER, SIGNAL = 3.2; EXPRESSED IN BONE MARROW, SIGNAL = 3.1; EST_HUMAN HIT: BE172224.1, EVALUE 2.00e-53; SWISSPROT HIT: P75077, EVALUE 3.00e+00
tggatgaatcagaatggcacttaagctttgtttctgtccttttgtcactacacatatatttattgttactataaatacttttttgtatattttgttctcatggttaatatattcctttgattttttttgtagtctcttcatcatgaactgtctttatatgttcaacaactaaaaatagatattgaaaaaggaaagcttagtgacaatattttaaaacttgaaaagcaaataaataaagaaaagaaacttatccgtagaggaaggaccaagggtctcatcaaagaacatgaggtacaataaagtgtttccacttaaattttgtcatcattttggggtttatcttaaatggttgtgtgtatctttagcctaggatgaaaactgttctgaaaattaccctagccctcctctccccggggatgatcacttctttgcttcacactcgcagcagagcctgtacttcttactttttagaagtgagaaaattcggcactgagttaatattttatgatttcccttgatgtgtctcagtggcccctgtcctcagactctggt

SEQ ID NO: 7481 - DNA, 588 bp, Homo sapiens
  MAP TO CHR19.3; EXPRESSED IN HELA, SIGNAL = 1.5; EXPRESSED IN LUNG, SIGNAL = 2.2; EXPRESSED IN BONE MARROW, SIGNAL = 1.8; EXPRESSED IN FETAL LIVER, SIGNAL = 2.1; EXPRESSED IN ADULT LIVER, SIGNAL = 1.9; NT HIT: gi16176921, EVALUE 3.00e-15; SWISSPROT HIT: P53814, EVALUE 7.00e-03; EST_HUMAN HIT: BI827405.1, EVALUE 6.00e-85
aggaaggcccaggtagtgaggctgtaggggccctggccgactgccccagagggtgacttgggaggggacctggtactggggcccacctgggggtagcaggactcagcgcctcctcatcagtaaccccatggagacatgaaggtgcctgagcgccatggcatcctccagggcccaggcccggaagaactggtcctggatgagctcccccaggctggactgggacagcttcatgagatgctctaggagcaggatgggcatcaggctgggaggggtccctgggagaggttggtgtccacaccctgtttccaccatggccccctcccactgggcagtgctgggtccttttcgggccacccctggggtccagctgtgcacaggaggccacggccagggggaggcctgggcaggaaggggctcaccacactcctgcctttcatccgggtcatgtcgagggtggactctgtgtctgagaggtctcatggtgtcctgcccctcagactggagcagagggtcatggggacaggctgagggtgctgtctgtcccgcgtgttcccctggatagcctcgggcacgccaggacttaactct

SEQ ID NO: 7482 - DNA, 506 bp, Homo sapiens
  MAP TO CHR19.3; EXPRESSED IN HEART, SIGNAL = 7.5; EXPRESSED IN LUNG, SIGNAL = 1.1; EXPRESSED IN FETAL LIVER, SIGNAL =  11; EXPRESSED IN BONE MARROW, SIGNAL = 1.4; EXPRESSED IN ADULT LIVER, SIGNAL =   1; EXPRESSED IN HELA, SIGNAL = 1.5; EST_HUMAN HIT: BG286420.1, EVALUE 0.00e+00; NT HIT: gi5032238, EVALUE 2.00e-65; SWISSPROT HIT: P16415, EVALUE 5.00e-65
tatgtgggaaaggcttcaggtcttccagttacattcaactacatgaaaggactcacactggagagaaaccctatggttgtcagcaatgtgggaaagcattatctgatctctcaagctttcgaagacacatgataacacatactggaaatggacctcataaatgtaagatatgtgggaaaggctttgattatcccagttcagtgcaaagacatgaaagaactcacactggagagaaaccctatgaatgcaaggaatgtggtaaagccttcagtcattcaagttacttacgaatacacgaaagagttcatactggagagaagccgtataaatgtaaggaatgtgggaaaccattccattgtcccagtgcctttcataaacatgaaaggacccacagtatggagaaaccctataagtgtaaagaatgtggggaagcatttcattgtatcagttcctttcataaacatgaaatgactcactagagaaaacccctatgagtgttgaacatg

SEQ ID NO: 7483 - DNA, 545 bp, Homo sapiens
  MAP TO CHR19.3; EXPRESSED IN BRAIN, SIGNAL = 2.7; EXPRESSED IN ADULT LIVER, SIGNAL = 2.1; EXPRESSED IN FETAL LIVER, SIGNAL = 5.1; EST_HUMAN HIT: AU118770.1, EVALUE 3.00e-43; NT HIT: gi16177795, EVALUE 2.00e-43; SWISSPROT HIT: P17656, EVALUE 3.90e+00
ttccagggaatgaagactggggcaggggaggaaactccccgcaggacccgggggtgacacagggacagaggctgcatgggggttccgggcggctcccccgggagtttcagcgtgttctggccgcttccaaccctcccctcccagggctccggctccggctcggctcctgccctgcactcaccatgtcctgtccgttcctgagctctttgaggagctccctgctcctcgcagccggtgcaggtgagcacgacggggacacctgtggtcactcagggcaggccgggtgtgctctgcagggaggacagcaacgccccgcccctggggctgtgattggatggttctcttctctgctcatctctgattggagagttcaccagtcacatcccaactcccctgattggacagttctttagactctgcccctcctcttctggttggtcagcttgctatcccctgagctcccctgattgggcagttcttcaggccccaccccagctttcctaattggtcatgtttccacgccctgcctcagctcctttgatttg

SEQ ID NO: 7484 - DNA, 569 bp, Homo sapiens
  MAP TO CHR16.3; EXPRESSED IN HELA, SIGNAL =   2; EXPRESSED IN LUNG, SIGNAL = 2.1; EXPRESSED IN FETAL LIVER, SIGNAL = 3.4; EXPRESSED IN ADULT LIVER, SIGNAL = 2.6; EST_HUMAN HIT: BF812903.1, EVALUE 1.00e-115; NT HIT: gi14776045, EVALUE 1.00e-118; SWISSPROT HIT: P55795, EVALUE 3.00e-04
ccctctttgcttgtgaggagctggcacaggctgcactgcgcaggcacaagggcatgctgggtaagcgatacattgaactcttccggagcactgcagccgaagtgcagcaggtgagcgcccagggctccccacccccagatgtactgttactccagggcggccctctgtgtccctgccctacttggcatgaccagcctgttgctgccttccttactaggtcttgaaccgctatgcatccggcccactccttcctacactgactgccccactgctgcccatccccttcccactggcacctgggactgggagggactgtgtacgcctccgaggcctgccctacacggccaccattgaagacatcctgagctttctgggggaggcagcagctgacattcggccccacggtgtacacatggtgctcaaccagcaggtgaagccactgcttggtagggggaacacataaataggaaggggtgtgtgttaggggtaaggcactcttacacatgacaaactgctcacaagatggtgtgcacagggccggccatcgggcgatgccttcattcagatga

SEQ ID NO: 7485 - DNA, 521 bp, Homo sapiens
  MAP TO CHR19.3; EXPRESSED IN HELA, SIGNAL = 1.7; EXPRESSED IN ADULT LIVER, SIGNAL = 1.8; EXPRESSED IN PLACENTA, SIGNAL = 1.8; SWISSPROT HIT: P98160, EVALUE 2.00e-07; EST_HUMAN HIT: BI906741.1, EVALUE 8.00e-41; NT HIT: AF287892.1, EVALUE 0.00e+00
ggggaagttctaggcctcacagctgagcacacaccagagctgagctcccccttgaagctcacgggcagtgggtggcccatgagggtggcgcaggtgtgttctcctcctccagcccctcccctacccacctgtgccctcattctgcagggagaggctcagggaaatgtgctgggagccccgagggttctgagctcggcaggtgaattccccttcatccctcgcgtgcactcgaggcagcttcagcagcccatggttcgaggactgtgaggggctcagggtcaggctcccttgggtccagctcagcctggcagggggattgctgtcgacagcacagaccaggcgcagagactggccctccaggactgagagggatgagctgttccccaaggctgtggatgctgtagagaaagaggtgtgttcaggaggttgatgatcaggaccctcgaggctggccctgctgtatcaatgtccccctgcccttgctgtggggccaaggagggtgcgtgtggaggattctaagg

SEQ ID NO: 7486 - DNA, 583 bp, Homo sapiens
  MAP TO CHR14.3; EXPRESSED IN HELA, SIGNAL =   3; EXPRESSED IN HEART, SIGNAL = 1.7; EXPRESSED IN FETAL LIVER, SIGNAL = 2.3; EXPRESSED IN BONE MARROW, SIGNAL = 2.6; EXPRESSED IN ADULT LIVER, SIGNAL = 1.8; EXPRESSED IN PLACENTA, SIGNAL = 2.6; NT HIT: gi4557280, EVALUE 5.60e-01; SWISSPROT HIT: P54362, EVALUE 2.50e+00; EST_HUMAN HIT: AI298461.1, EVALUE 2.10e-01
atcttcgaaacgtgcatgggcagcgtcagcgccgttgcatgtttgagaacactgcacttagacctccaattgtcacctgtctttaacgtccacttgcaaatcaatgacttcggtgcctttgtttttgccacagtttctgctaatccacttaagctggttgattgtcagaagcaattctggtggctttaaaaagcattttacaacaagtgtggccatcatcagtatcaaggagaaggctcatcacacagcagatatgaaaatgctttctaatttaaaacactattccagggcttctttgcacacaccatgaaatactgatatattaaacataaaatgacaaaatatatcatgttgtgctaaaccacacttcatcttctaagtgattcttgcattgccaagcagtagtgggcaccaaagatttaagtaaaaatcatgagagaagtacttaacattaagaatgtcctactccccataggtttttcttttcctgctaagtaatgaaagaacattgttatttgaccttagcagctggacataaatgtaggtaagtgctgcgtagacatccagacctgcctaacttgct

SEQ ID NO: 7487 - DNA, 515 bp, Homo sapiens
  MAP TO CHR16.3; EXPRESSED IN ADULT LIVER, SIGNAL = 1.5; EXPRESSED IN PLACENTA, SIGNAL = 1.2; EXPRESSED IN BONE MARROW, SIGNAL = 1.6; EXPRESSED IN FETAL LIVER, SIGNAL = 1.1; EXPRESSED IN BRAIN, SIGNAL = 2.1; EST_HUMAN HIT: BF527554.1, EVALUE 1.00e-128; NT HIT: gi14778285, EVALUE 0.00e+00; SWISSPROT HIT: O75593, EVALUE 1.40e-01
cacacacgtggcatcttaggccatgggcaggggtggcaggaaggggcagcctgggctctgggagccttgcctgtgtgacccagggtggggttacagaggaaaggcggggtgctggcccagatcaagagccagaaagtgcaggacatcctcgccttctatctgggccgcctggagaccaccaacgaggtgattgacagtgacttcgagaccaggaacttctggatcggtgagtgcccagctgattgggggtatggcgagtaaggggttgtgatgccccaccctgctgcaggaaccctgggccatggcggctgccagcagatggcaagggtgtgttgagggcctggagcccagagcggggccagctgctcaccccctttcccgggaagggcccaggtagggagcacatgggggctgccagcgctgggaagaggggccagaaaggcagctggcagcagactccagggtctgagtgggccaaccttgactaccccggcccagggctcacctacaagacc

SEQ ID NO: 7488 - DNA, 566 bp, Homo sapiens
  MAP TO CHR18.3; EXPRESSED IN HELA, SIGNAL = 1.6; EXPRESSED IN BRAIN, SIGNAL = 1.5; EXPRESSED IN ADULT LIVER, SIGNAL = 1.8; EXPRESSED IN PLACENTA, SIGNAL = 1.3; EST_HUMAN HIT: AA158709.1, EVALUE 8.00e-04; NT HIT: Y08256.1, EVALUE 8.40e+00
ctttgcgctttcaaatttcccctcacttttcccaggtactcacgataacaccagctgaaccaactggaacttcggacaaatctttgtccatttcttggccatggacgttacaatcagtcagaaatgccgatgccagaatgatcaccataatcttttatctttttagaaaagttaactctgtgtatagcaagaaatgggagtaaattgatggtgaatatgttaatctggtaggaaaatcttccaaattaattcctgtagtcatggcaaaaacaaggcattatttggaagctttgcatttcggatattaaaattctacttttaccctacttttcaaggtatgaaatatcttatacttaagaactttcagtttataaaatggtatagattaaatatagagcaaatttatacaagcaacttaaatgcatgaataatgcagaacacctacaggaagacttgcagttactgacattgtataattttagactgataaatacttttggagtctaaccattgtataagcagagaagactgtcaagtagacattcgggggctggatacggtttaat

SEQ ID NO: 7489 - DNA, 536 bp, Homo sapiens
  MAP TO CHR16.3; EXPRESSED IN BONE MARROW, SIGNAL = 2.3; EXPRESSED IN FETAL LIVER, SIGNAL = 1.9; EXPRESSED IN ADULT LIVER, SIGNAL = 1.4; EXPRESSED IN BRAIN, SIGNAL = 2.4; EXPRESSED IN PLACENTA, SIGNAL = 1.5; EST_HUMAN HIT: BG574629.1, EVALUE 4.00e-92; SWISSPROT HIT: P96351, EVALUE 2.90e+00; NT HIT: gi14775605, EVALUE 3.00e-92
gctgtgttcagagcttgtgggacagggggacacagggatggggagatgaggggttagcaggggcttggaatggacacttacgtggggaaaggtgatttttcggagagcggcatcgtaattctttacttccaccttctccatgagaggacgaaagactaagtgggtgtcagtgcctgggaaagcaggggagaaggtgtacagaattagaagtcatcctcacgagaacagccagaactgggcagggtaaagcagcagcctcaccagagggggaacccacctccagatatcagcgctgttgggctgtgggccacagtgcgcacgtcatgagtgtgatgctggaacggttttgtccgcacccactgcttctcactgctgttagatgtcacagggaccagctgaaaatggaagactgttccctcggctgtgcccaccacgaaactgtcttcttgctgaggaattaaatcatgagggaggtacacgtaagcaaaacaaggtctggttggaaaaatattccgaggctttctgtctcagcagct

SEQ ID NO: 7490 - DNA, 570 bp, Homo sapiens
  MAP TO CHR16.3; EXPRESSED IN BRAIN, SIGNAL = 1.2; EXPRESSED IN ADULT LIVER, SIGNAL = 1.5; EXPRESSED IN PLACENTA, SIGNAL = 1.5; NT HIT: gi7305040, EVALUE 3.50e-02; EST_HUMAN HIT: BF359350.1, EVALUE 5.10e-02
gtcccagtgagcaaagaaggtgggctctggtcatcactgtccccaaatcacattttctcactcccagtcataagtcccacatcttcactttgaacatggtttgaaaagatgatctttttttatgttctcatgcctgcccctcggcctttgtgaagcaatttctacagaaacgatggtctgccaccaaataagagtttactaagaataaaaattgaatttcgtctgcctgttgacaagctgattgatctgggggctctcgtgaccgaatcgtctcctaagcacattctcatttatcatgtgcgagattgtttcaaaatcaatagcagccctgcgcagatgagtgtctgctggggacctgtcagggcccacggccttccctgtaatgctgctaatttctttgacagaattatttcaacagttaaattgttctgtgcctgttatccccatacttttactagaatagtttgttgaggtcctaatttttaatatccttcttgtaaagttgagctttaaggagtttgccctttttaatcatgagggtagtttctcacccctgcttttcttgcttaa

SEQ ID NO: 7491 - DNA, 504 bp, Homo sapiens
  MAP TO CHR18.3; EXPRESSED IN ADULT LIVER, SIGNAL = 1.1; EXPRESSED IN BRAIN, SIGNAL = 1.2; EXPRESSED IN BONE MARROW, SIGNAL = 1.2; SWISSPROT HIT: O85213, EVALUE 4.60e+00; NT HIT: AF361099.1, EVALUE 1.90e+00; EST_HUMAN HIT: BG183993.1, EVALUE 4.50e-02
gctctggccaagtgtaggactcaggaatgcgattcagttcagttaacatgaattgagcttttcatttgtgccaggtgtgatggaagccagacagttggaaccagttacgggtggggagaaaggatggaaacaaatgaatgtcaggttggtccgaggtccaagtggcattgttaccattgcctatctgcaggtggaaaggtggatcttgagtaaggttagaattagatttgagaattagcattgtgagcaagagacaaaatgggggcgtggctgagaagaaagatgagatctctgaaatggagcatagttttattcagaaaccaggaagaggacgcaggcctagaaaataatgttgagaaggtttggttagagaggctgagaaaacaagagaaaaatagtactcagggaagagatggtttaacgtaatgggttgaatcaattcccaccccatgcttcacagtgatgaggcactttcaataggataggtctgagtggaagccaaat

SEQ ID NO: 7492 - DNA, 562 bp, Homo sapiens
  MAP TO CHR14.3; EXPRESSED IN ADULT LIVER, SIGNAL = 2.7; EXPRESSED IN BRAIN, SIGNAL = 3.1; EXPRESSED IN HELA, SIGNAL = 2.8; EXPRESSED IN BONE MARROW, SIGNAL = 3.8; SWISSPROT HIT: P36851, EVALUE 1.40e+00; NT HIT: AJ310932.1, EVALUE 2.00e-06; EST_HUMAN HIT: AL521707.1, EVALUE 3.00e-31
ggaaagaagggaggaaggagaacatttatgattcacagaaggaggctgaattatcaatattaacagaaggttaagagaaattgaaatcaactctcacaaaatattttcaaatgttcaagactttagcggaagaggtcactgcagatatgctggaaatagcaagagaactagaattagaaaccaagcctgaagatgcaggtgaattgctgcaaccttgtgctaagacttcatcagatgaggaattgcttattgtgaataaacaaagtggtttcttgagatggaatccactcttggtgaaaatcttatgaacattgttgaaatgacaacaaagtatgtagaatgttacataaacattatttgacaaaacgtgttagagtttcagaggattgactccaatttttttttaacttttacatttatgggcacatgtgcagatttgttatataggtaaactgcatgtcatgggtgtttggggacagaaattactgcatcacccaggtattaagcctagtacctattagttactgatcctctccctcctcccacccttcaccctcagtta

SEQ ID NO: 7493 - DNA, 539 bp, Homo sapiens
  MAP TO CHR16.3; EXPRESSED IN ADULT LIVER, SIGNAL = 4.2; EXPRESSED IN BRAIN, SIGNAL = 5.5; EXPRESSED IN HEART, SIGNAL = 6.2; EXPRESSED IN FETAL LIVER, SIGNAL = 4.1; EXPRESSED IN BONE MARROW, SIGNAL = 2.6; SWISSPROT HIT: P18357, EVALUE 1.00e+00; NT HIT: gi14779133, EVALUE 1.00e-104; EST_HUMAN HIT: AI017320.1, EVALUE 0.00e+00
tgctcatttgttcatgttaatcctatgtttattacagataacagcatacaggtttttttccccccctgtcatgtacagctgaatcgcacagaatttgaagatcaagatgatgaagccagagttccatatgagggttttcggcctggggtgtacgtccgcgttgagattgaaaatgttccctgtgaatttgtgcagaactttgacccccattaccccattatcctgggtggcttgggcaacagtgagggaaatgttggagacgtgcaggtgggtccctttgctgcatatttggtgcctaaggctctgtggatttcccctccatcaatcatcttacactctcatccccctcagatgcatctgaagaaacatcgctggtataagaaaatcctcaagtcccgagatccaatcatattttctgtagggtggaggaggtttcagaccatcccgctctattatatcgaagaccataatggaagacaaaggcttctaaagtataccccacagcacatgcattgcggagcagccttttggggtaaaat

SEQ ID NO: 7494 - DNA, 554 bp, Homo sapiens
  MAP TO CHR16.3; EXPRESSED IN LUNG, SIGNAL = 2.7; EXPRESSED IN FETAL LIVER, SIGNAL = 0.93; EXPRESSED IN ADULT LIVER, SIGNAL = 1.5; EXPRESSED IN HELA, SIGNAL = 4.3; EST_HUMAN HIT: BF895921.1, EVALUE 1.00e-113; SWISSPROT HIT: P13468, EVALUE 2.10e-01; NT HIT: AB015174.1, EVALUE 1.30e-01
tcagacccggatgagtaagggctcaaatttgccctgcttgcctctttgcccttagaaactggggtctctgtttacaaggggcagtggcgttgctgatgaaaaacggggctgtgggaaatacattctgcctaaagagttttaagggacaacctcacctcttttcttctccgcttattgggccattttcgggcccgatccccagggggccggccaggctctcgatcagagctgtcccctggctccccggtggccccactggagcccccccttttccgcttcccagaatgcttcagccgatgttccagtcgctctgggggctgaagagatgcatccttctgtggaggaggaggtggggctgagatagatggaaaagggcaagctcccaacccctctaggggtgaccaggttgccgaagtacccctcgggccgggaaaccgggtccccagagacgagctctacctcctcccaccccagggcggggcagaggcctggccagaggagccggttgctctggtttggggtgccagcattcccccctcaactccacccactag

SEQ ID NO: 7495 - DNA, 583 bp, Homo sapiens
  MAP TO CHR18.3; EXPRESSED IN BONE MARROW, SIGNAL = 2.2; EXPRESSED IN LUNG, SIGNAL = 1.9; EXPRESSED IN ADULT LIVER, SIGNAL = 1.5; EST_HUMAN HIT: BF907256.1, EVALUE 1.00e-117
tcatctgcactggtggtctccacccaccaccccatggatcatgatcctccttcatgtgacctctttctgtcttggcttctggtctcatgatactatgattttccaaacagctactccagccacatttttattatattttattcccttttcataatagtttagagcctgtggccccaagttctactctgattgtacctatgttaatgcacatagaattctatgtgaatggacagtctccacgtccatggctgaagtccttgatcctttcttctgtcctgttgagggttttgcaggctttgccttagctgaatttgtcatctgtatgttatctgcaaaccagcgtcctgccagctttcttgttattgccactagagccagcatttttctagctcattaaatctgctctctaggagtaaatactgactaccccccccctttttttttaaccttcccaccatccttttatctaatctgacacataatagcagcctttgagaatgcctttccccttcccttcactgcttgtattcaggcttgtatcacctcatccctcactcaacacagttgttccaagtgaccaccc

SEQ ID NO: 7496 - DNA, 553 bp, Homo sapiens
  MAP TO CHR14.3; EXPRESSED IN PLACENTA, SIGNAL = 1.6; EXPRESSED IN HELA, SIGNAL = 3.8; EXPRESSED IN LUNG, SIGNAL = 3.8; EXPRESSED IN ADULT LIVER, SIGNAL = 2.6; EXPRESSED IN BRAIN, SIGNAL = 3.1; EST_HUMAN HIT: BF131439.1, EVALUE 0.00e+00; SWISSPROT HIT: P43167, EVALUE 1.40e+00; NT HIT: gi14748505, EVALUE 2.00e-09
agtctgccactctacacgggctccccaagccaatttcccctgggcgcccgccccgtcctccggtcactgcagcaccgtctcagagctcaccgtccaagtcctcgtctggagccgccgccacccggtgctgcacttccccctgtaccagagggtcgaataattccgttaccatgtccttcatctgggccacgccagacaacaggccctggaaagggtcgccgtcacccggcgcctcacaggacacccgcagcttctgcggcttcccttcctgcccgacgtactctcccagcagctccatggtgaccgctaagcttccagaacacgacaccgggaagcgccacccggaggcggaaatcagcccgcgtccggcgcaggcgggagaagggagaggagtgacatccgtttgtcggaagtcgctcctcccccttccttcgctttttttccttgtcattggttcctggcactcgggccccacctcctccggctacgcccctcgcggccgcttttcccgcctccgccggggccgagccgctgttcggctgacagttgagga

SEQ ID NO: 7497 - DNA, 516 bp, Homo sapiens
  MAP TO CHR16.3; EXPRESSED IN HELA, SIGNAL = 8.6; EXPRESSED IN ADULT LIVER, SIGNAL = 7.4; EST_HUMAN HIT: AW580872.1, EVALUE 0.00e+00; SWISSPROT HIT: P22695, EVALUE 5.00e-23; NT HIT: gi14775826, EVALUE 1.00e-81
acactttggcaaccctgaagagacttcttcccttcagacttactgttttagtatgttccagagaagggagtggcattcttcttggggaattcaggaagagggagacacgctgttactctatccattaaataaagctttgatgttcacagccccccgccaccactcagaaaaaaaaaataattgccttgctctctaaaactgacttctgccttttattggacaggaacaagctgaaagctggatacctaatgtcagtggagtcttctgagtgtttcctggaagaagtcgggtcccaggctctagttgctggttcttacatgccaccatccacagtccttcagcagattgattcagtggctaatgctgatatcataaatgtaagtaaatgaaaacttaacgatttaacaacagagaacttaaccttaatgatccaatttcagaaggatgcataagcgtccttgggcagtgtattattctcatgtttggtgctcatctacttaatgtggaggcaggagg

SEQ ID NO: 7498 - DNA, 507 bp, Homo sapiens
  MAP TO CHR14.3; EXPRESSED IN PLACENTA, SIGNAL = 4.9; EXPRESSED IN FETAL LIVER, SIGNAL =   3; EXPRESSED IN ADULT LIVER, SIGNAL = 3.2; NT HIT: gi14750997, EVALUE 0.00e+00; EST_HUMAN HIT: BI523233.1, EVALUE 1.00e-127; SWISSPROT HIT: O95741, EVALUE 6.00e-41
gtctttaagtggtgccagggccagggtctgcaccttggtggaaacggtgtcaacgcccttgcacacaaagccaacccttccaccctctctgcttgccctcagaagtactcggtgctgctggtgctcactgacggtgtggtgagcgacatggctgagactcgcactgctatcgtgcgtgcctcccgcctgcccatgtccatcatcatcgtaggcgtgggcaatgctgacttctctgacatgcggctgctggatggcgacgacggccccttgcgctgcccccgaggggtgcctgcagcccgagacattgtccagttcgtgcccttccgagacttcaaggatgtgagtcccccgggccccttccggctgaaggactcctcagcttctcatccccccaaatctgaccttcgtcttccaccatttgatgtcctgctaaggacgcgggagcccagctggccaccctgaagccccacttctccctcagatgaccctgcctcccctactcttcct

SEQ ID NO: 7499 - DNA, 543 bp, Homo sapiens
  MAP TO CHR14.3; EXPRESSED IN HELA, SIGNAL =   2; EXPRESSED IN PLACENTA, SIGNAL =   2; EXPRESSED IN HEART, SIGNAL = 3.2; EXPRESSED IN ADULT LIVER, SIGNAL = 1.8; NT HIT: gi14746510, EVALUE 1.00e-106; EST_HUMAN HIT: AI792614.1, EVALUE 1.00e-106; SWISSPROT HIT: Q13625, EVALUE 4.00e-06
ttgccagacccaggagttacctgtagttcttggtacagtctttttaactccaccgccgctggtcccgtcaatttgccattgtaagactggaacccattcagttttcctttctttaaatcttccaattgctgactaagctgatcaacccttaaaattgcagtctgtacttcctgcttcttttcctggaacatggcactgaacctttctatttcagcagctataattgaccacacaagaaaagaataaaagatttagttgatcctttttttttttcatttctatacactgaacttaattctagtatcatttagtgccagaccgtggagaaagctgtgatatgcagaatccacaacacatttcaaaaagcctttgggacacatgtatctgattactcataaagcaaacaattatatttgcattaattcccgactattctttagggtaatcagtccataagctagtttgttcaagtgacttagaaatctctgagaccaaaggttttgtgaaggcagggccatccaagcctctctcgtgcatcactgt

SEQ ID NO: 7500 - DNA, 582 bp, Homo sapiens
  MAP TO CHR18.3; EXPRESSED IN ADULT LIVER, SIGNAL = 2.9; EXPRESSED IN PLACENTA, SIGNAL = 1.3; EXPRESSED IN HELA, SIGNAL = 0.86; EXPRESSED IN BONE MARROW, SIGNAL = 1.1; SWISSPROT HIT: Q60772, EVALUE 2.50e+00; NT HIT: AJ011415.1, EVALUE 1.40e-01; EST_HUMAN HIT: BI667905.1, EVALUE 4.00e-80
gggttcctgattaaatccccagctcttctgtctgttactcttaaatgtcacagtgttcactggcactgtcataggtcctcaggtccttgatcaacagaaaagtacctggggactcgctgtctcctgccctcccttcgctccccccgcagagcagatgtgggaccccaatgctaatggcctgcttgctcttcctcctagacgctgaaggagtgggtggccatcgagagcgactctgtccagcctgtgcctcgcttcagacaagagctcttcagaatgatggccgtggctgcggacacgctgcagcgcctgggggcccgtgtggcctcggtggacatgggtcctcagcaggtgctgtacgattccctcccactgagggaggtgctacttctagacgtcagtcatgccttcccgggggtggcaagggagaggctcaccctgatcctcaaccacaaccccccataaccccaattcccaatgaagatgaaacattcccctggtctcaaatgaagccgtgttattgctttccagtcttgtcaggactctggggaggggttggctcttagaagccagtgcagatgacaa

SEQ ID NO: 7501 - DNA, 563 bp, Homo sapiens
  MAP TO CHR18.3; EXPRESSED IN FETAL LIVER, SIGNAL =   2; EXPRESSED IN BONE MARROW, SIGNAL = 0.75; EXPRESSED IN ADULT LIVER, SIGNAL = 1.7; EXPRESSED IN PLACENTA, SIGNAL = 1.4; EXPRESSED IN HELA, SIGNAL = 1.6; EST_HUMAN HIT: BE142803.1, EVALUE 0.00e+00; SWISSPROT HIT: Q07283, EVALUE 1.20e-01; NT HIT: gi14763118, EVALUE 1.00e-109
aatgttcccaagagcagcagttcttcacttgacacatatatttgaaaaatatggtacatatggctgtagagatagttacatgaaccaagaggaaaagtatatttatctacggtttggcctgatcttaggatttttgtatttttctcatgttttcaaacaaatagaattttctttttaaaattgtatcagtggacatatccatgaacttttcttaatgggagtctggttgtgggtggcattatcttttggcaattgcaaatgctgcatgctgcttctttgtgttttctgtgtgtagctagagagattgcaagctgaaaatacctcggagtgggacaagagggaaatacttgaaagagaaaagcagggactggagagagaaaatagaaggctgaagatccaggtgaaagaaatggaagagcttttggataagaaaaatagattaagtgcaaactctcaaagtcctgatttcaagatgtcacaaattgatctgcaagaaaaaaaccaggtatgggtgctccttggagcaaattctcactgtctaatctcactctgatgcctacgca

SEQ ID NO: 7502 - DNA, 505 bp, Homo sapiens
  MAP TO CHR16.3; EXPRESSED IN BRAIN, SIGNAL = 2.1; EXPRESSED IN ADULT LIVER, SIGNAL = 2.1; EXPRESSED IN LUNG, SIGNAL = 1.3; EXPRESSED IN BONE MARROW, SIGNAL = 1.3; EST_HUMAN HIT: AA329471.1, EVALUE 4.00e-58; SWISSPROT HIT: P20631, EVALUE 5.00e-04; NT HIT: AL163203.2, EVALUE 1.00e-32
tctccctgactccacattccagagggcgacccactcttggtcattctggaatgcggcaggcacgcagcgtttgcgtgggaatcctgagcacggcagaacccccacacccaccatggttcctgggcctgtgcactctgggtctgtgcctcagaggctgccaggcacccctggggacaccacgggggacagggccctgggtgcggaggcgtctggaacaggaattggcacctgggtgcggagggctggctgggtctgaatttttctgcttctcctgctccccgaggagtgcagccccggtgggcccaatggttcctgtggagtggggagctgggtgctgtggtgtctccagcacccaccccagaccccagttcccggccagcttgggccaaaaggagaggctggactttggagggtgggtgtgagtgcctttgctgaaactggcccctgccacccagtggccagcatgacaagttgaggctctaacccttccacccctcacatcttc

SEQ ID NO: 7503 - DNA, 535 bp, Homo sapiens
  MAP TO CHR14.3; EXPRESSED IN ADULT LIVER, SIGNAL =   7; EXPRESSED IN HELA, SIGNAL =  15; EXPRESSED IN HEART, SIGNAL =  12; EXPRESSED IN FETAL LIVER, SIGNAL =  37; EXPRESSED IN BONE MARROW, SIGNAL = 7.7; EST_HUMAN HIT: AU118273.1, EVALUE 0.00e+00; SWISSPROT HIT: Q13772, EVALUE 6.00e-47; NT HIT: gi14149616, EVALUE 0.00e+00
gtttgccagctctgtcttccttgggacttccttttttgtatggcggccagatgagccactctgacagctgttctttatgacttggaaggaatcagaagttccagaaggaaccattacctttagtgcctgtgttctcttacttcttttctagaaggacagaaccacatgttcagggaatctttatgcttctcaggctcaggtttgggttcctcaggcatcccatttttatcctttccttctttcttcagaagccacttgcacagagcttccttctcacaattctcatcacacacacactttgcaaagcttgtgcagggctcattggctttgcacatctcctctaccttacatgggtcatgatgcttctggacaggccaatcccagtaaccacgctgggggtggacaatggtgttttggcctccaagtggtcattcaggcagttcagattgccaggttttcaatctccacccccttgggcttgttgccctgacagttggtgcgggagttggtcttgacaagccaatcgttcacattg

SEQ ID NO: 7504 - DNA, 505 bp, Homo sapiens
  MAP TO CHR19.3; EXPRESSED IN ADULT LIVER, SIGNAL = 1.6; EXPRESSED IN PLACENTA, SIGNAL = 0.84; EXPRESSED IN FETAL LIVER, SIGNAL = 1.1; EXPRESSED IN BONE MARROW, SIGNAL = 1.3; EST_HUMAN HIT: AW130597.1, EVALUE 1.00e-129; SWISSPROT HIT: O95180, EVALUE 3.10e-01
gctgggactggagtctgaagaagagagagggctgctaggagctgggcccccaggctccttgggctcctagactcaagcgaccacctccttggaatgtgcccagggtctcgatctcacccagctggggcagggttcgggcagagctagaaggtctccactcacgtgaacaaactgtcttccaggttccggattcgggcctgagcctggccctcgggtgactgggggtccttcgaggtggggtcttcggatggctctggcactgcagctgccccatccattagccaacgttcccggagagacttcctctgggcaggggaagggagttggggctgggcatacagactaccccggtccatgtaaagtcccctcccgacctctgcaggctgggcaggtatcttatcaccacctcacaaccagttgcgacatacatcaggctgggatacatggccacagtgccccccaacgctgcaagtgggcagacatcccttgttccaaacccttccaa

SEQ ID NO: 7505 - DNA, 581 bp, Homo sapiens
  MAP TO CHR14.3; EXPRESSED IN PLACENTA, SIGNAL =  21; EXPRESSED IN HELA, SIGNAL =  20; EXPRESSED IN FETAL LIVER, SIGNAL =  20; EXPRESSED IN LUNG, SIGNAL =  15; EXPRESSED IN ADULT LIVER, SIGNAL =  27; EST_HUMAN HIT: BF876923.1, EVALUE 3.00e-31; SWISSPROT HIT: P39188, EVALUE 8.00e-06; NT HIT: Y07848.1, EVALUE 4.00e-20
catttttagggagggaagggcaggagttttgctgctcctttaagttgctttttgcttttaaattttttgcatgaggttctctaaaaaagtaagactgtaaaagcagcttgttcaaaacttgacctcttcggcatgcccaagaatttgtgaaacaaaagagaaggcaatggataattgattctgttctctaaaggcccttctgacactggtcaggtactggtgtggtttctactggtgtagaaactggtgtagatactggtgtagatactggtgtggtttctactggtgtggtttctaccatgcaggcgtttagtctctgccagcaggaggacacagatggtgtctacctttctacagatgtctttaaatgtcaaagacatgagaagagaatctattgacattcttatcattgtgacaatgtggtagatcccttagcattacctatgccctaaatgatactcaaataagtgggctagggaaagattttattttatttttgagacagggtctcactctgtcacccaggctgtagtgcagtggcatgatcacggctcacagcagcctcaacctcctggaaatca

SEQ ID NO: 7506 - DNA, 586 bp, Homo sapiens
  MAP TO CHR19.3; EXPRESSED IN HELA, SIGNAL = 1.1; EXPRESSED IN HEART, SIGNAL = 1.8; EXPRESSED IN FETAL LIVER, SIGNAL = 1.9; EXPRESSED IN ADULT LIVER, SIGNAL = 1.4; EXPRESSED IN PLACENTA, SIGNAL = 1.1; NT HIT: U86216.1, EVALUE 4.00e-11; EST_HUMAN HIT: BG197640.1, EVALUE 9.00e-10; SWISSPROT HIT: Q9Y4A9, EVALUE 4.00e-26
tccacactgctacctgatgcatcgcagacccttattaatcactctattttacctattctgttgcctcctctctgtctctttacaagcagcaggaaaatgggacctgtctggtgacagaattcctgatgatgggattctccaacctcccacacctgaggaacacactcttcaccctgttcttccttacctacctggtcaccctcggtggcaacgtcaccatcatcaccatcacccatgcggataggtcccgccacactcccatgtaccacttcctggtggtgctgtccctctcggagacctgctatacacgctggtcaccatccccagcatgctggctcatctgctgatggagaccaggccatctccatccctggctgtcaggctcagatgtttttcttcctgggtctgggatgcagccactgcttcctccttaccctgatgggttatgaccgctatgtggccatctgccaccccctgcgctactctatggtcatgagacccaccgtttgcctctgcctgggagccctggttttctgctctgggttctcggtggccttgatcgagaccagcatgatcttctcatcgc

SEQ ID NO: 7507 - DNA, 524 bp, Homo sapiens
  MAP TO CHR14.3; EXPRESSED IN HELA, SIGNAL = 4.2; EXPRESSED IN LUNG, SIGNAL = 3.8; EXPRESSED IN FETAL LIVER, SIGNAL = 1.9; EXPRESSED IN BONE MARROW, SIGNAL = 4.8; EXPRESSED IN BRAIN, SIGNAL = 5.9; EXPRESSED IN ADULT LIVER, SIGNAL =   3; EXPRESSED IN PLACENTA, SIGNAL =   4; SWISSPROT HIT: P10210, EVALUE 8.50e-02; NT HIT: AF294032.1, EVALUE 8.00e-03; EST_HUMAN HIT: AA773134.1, EVALUE 0.00e+00
gtgtggtttgctggatgatggggcgtggggtggggtgagcagtgaggagtggggctggggaagcctcggggcccagggcagctagactaaagatgggtccacagcagccagcagggtgggcttgagtgctcagctgggcaggcaggggttgcgtggagtgaggagaagcctgaggcaggtagagagagggagtggaagtaggggatggtatggggaggagctgggtaagtggaggtgggttggagagcagatgggagggcccaagtaggactcaccaggttgaaggagctggggacctctgaggtttccagctggggcctctggtttgggaagctgaactctgtgttcagtgtggtacctggctggtagcagagccacttaaggatctggggactgactgactggatgaacatatgatggagagcagaaggagccccagaggagagcccggagaggagaggaggacaggctgggaatgcggctccacctgcccccacaagcaggccctcacagagctggatctc

SEQ ID NO: 7508 - DNA, 592 bp, Homo sapiens
  MAP TO CHR14.3; EXPRESSED IN PLACENTA, SIGNAL = 1.3; EXPRESSED IN BONE MARROW, SIGNAL = 0.7; EXPRESSED IN ADULT LIVER, SIGNAL = 1.5; EXPRESSED IN HELA, SIGNAL = 1.1; EST_HUMAN HIT: AW405665.1, EVALUE 7.00e-26; SWISSPROT HIT: P01764, EVALUE 3.00e-17; NT HIT: Z27453.1, EVALUE 1.00e-126
acaccatcatcctctctcggcaatgccttctcctcacgtgtcccaccctagagttttttatgtagttggaaatatgcaaaggaccctccttctttggtgaaaaccagccctgccctcaccctacagttctgggatgggagacccagccctggaatttcaaggtttttccacatggtgattagcactgaacagagaactcaccatggggtttgtgctgacttgggatttacttgttactattttaaaagtagattcagggtgaactagagattttgagtgtgagtggataacagttaaggaaacactgaaaatatgtgccagtttctgaccaggatgcccctgtgtttttgggtgtccagtgtgaggcgcagttgttggagcctgggggagacttggtacagcctggcgcggtgggggtgggggtccctgagactgtcctgtgcagcctctggatttgccttcagtagccactggatgcactgggcctgccaggctccagggaacagactggagtgggtctcatgtattagtactgatgggagtagcatacgctatgcacattctgggaagttctgattccccatctccagaa

SEQ ID NO: 7509 - DNA, 589 bp, Homo sapiens
  MAP TO CHR14.3; EXPRESSED IN FETAL LIVER, SIGNAL = 2.3; EXPRESSED IN LUNG, SIGNAL = 2.3; EXPRESSED IN BRAIN, SIGNAL = 2.6; EXPRESSED IN ADULT LIVER, SIGNAL = 3.3; EXPRESSED IN PLACENTA, SIGNAL = 2.7; EXPRESSED IN HELA, SIGNAL = 2.8; EST_HUMAN HIT: AA378297.1, EVALUE 2.00e-48; NT HIT: AF198490.1, EVALUE 2.00e-10
tccgtttgtatcaaaaccaggagaaatctcttcaaaatctgaaattcgtccagatttactccacataaactactttttgacctttcatcttgagaaaagcataatttctgtctttggtgggaatataaaagtgtttgcctcctaatgtttcctaactagcaatgccaaaaaatacccttctaactggatgttttaagtaaaagtacttttaaggcagaaagtagatattataagatttattctcttgtcatctataattaagtttaatgaaaatactatattttagttcattcaggctgctataacaaaatactatagactgggtaatttataaacgacagaaatttccttctcacagttctggaggctgagaagtccaagatcgggatgccagcagatttagtgtctcatgagggcttattttctctgcttcaagatggtgtcttcttgctgcattcccacatggcagaaggcgaagggggtgaccgagcttcctcaggcctcttttataaaggcactaatctcatttatgagggtggagctctcatgaactaatcgtctccctaaggcccctcctcttaataccaca

SEQ ID NO: 7510 - DNA, 507 bp, Homo sapiens
  MAP TO CHR18.3; EXPRESSED IN HELA, SIGNAL = 1.3; EXPRESSED IN BRAIN, SIGNAL = 1.1; EXPRESSED IN ADULT LIVER, SIGNAL = 0.94; SWISSPROT HIT: Q00269, EVALUE 9.30e-01; NT HIT: gi11466252, EVALUE 4.80e-01
gacctcccctactccactccagtctccagctgaaactgtctctgctgctcctcttcgggaccagcaatggaacctcccgctgtgcctcatcaggtcttcccatggtgggtggcttctagcagccatgatttccactcagagactcccaactactcaagaatggaggtgcttgtgcaggtgctttcgctactcttgcttcagtttgctgtacactcacttccctatcccccatctatacacagatattagtgttctagaatccccatgtaaataaaattgcaagaatattgatgagcttttcatattttcccaaagaagttatgtgaaaatacatatcagtgaagacataggtttacaaatgtatgatatttaatatttagctactagatattctaattttaaagctgtcatttggggatatctattttcatttatgattttagtagaggtgcatatgttctagatctttaaaattatagcctcaaatccatgcaagcaaaattgatg

SEQ ID NO: 7511 - DNA, 574 bp, Homo sapiens
  MAP TO CHR14.3; EXPRESSED IN FETAL LIVER, SIGNAL = 0.85; EXPRESSED IN BONE MARROW, SIGNAL = 0.91; EXPRESSED IN BRAIN, SIGNAL = 1.3; EXPRESSED IN ADULT LIVER, SIGNAL = 1.1; EST_HUMAN HIT: BG622356.1, EVALUE 1.30e-02; SWISSPROT HIT: O43815, EVALUE 1.40e-02; NT HIT: AF091326.1, EVALUE 1.00e-04
cattgcagagcagccaattcctattctctccacccagagaaagttttaggattataagctaactttaattgtagcttgattatatggtaattgtggagctaaagttgttacagaggtattttattgtgtttcccaaagataaacagaaaagttttgatagatttactcactattcggtatcctattatcatatattattgaatggtatctttagctttattctaaataaaactgtgtataaatatacacacacatacactaaattgatcctatgttttctttatagggacacatggaaggagaggtgtggggtttagctacacacccttatctgcccatctgtgctactgtaagcgatgataaaaccttaagaatatgggatctctcacctagtcattgtatgttggctgtccggaagctgaaaaagggtaagaggctctcacacttgaacgtagattaagctctcacagttttctaacctttacaaatataagaaagcaaaactaggcacattttaaaaaggctttaaatatgttgaaatatttattcaatgtctacttgctcatggtgccac

SEQ ID NO: 7512 - DNA, 547 bp, Homo sapiens
  MAP TO CHR18.3; EXPRESSED IN BONE MARROW, SIGNAL = 2.2; EXPRESSED IN ADULT LIVER, SIGNAL = 1.6; EXPRESSED IN PLACENTA, SIGNAL = 1.9; EXPRESSED IN HELA, SIGNAL = 2.3; EXPRESSED IN FETAL LIVER, SIGNAL = 2.1; EXPRESSED IN LUNG, SIGNAL = 1.7; EST_HUMAN HIT: BF939710.1, EVALUE 3.00e+00
caaactcctagagtgtcagtgtggtactatattttacatcaatgatgaataatcatcagaatcattgtctttaattgtggaatcatcattcatgtttattagtgtttccttataggcacctacgtgatacgtggaaaagaaatctgcaaaatcaaagggtagctttagtgtctgttgcttttcacaaatgaatgtactcatgatgaaaggcctaacattgcttggactacttcgatctggaataagaagaaatattgcctgttcagaacagccacaggagaagtaattaattgagggctttggaatcagtgttttataggaaatgatttaattagttgttctatccattggcttcaaaaattttgttgtaatatatgcttcagtttacccctgtgactctgatgatttccttatgcatataaggaaattataagagaattttagtagcatggacatattcctgtgaattgaagatgtgatgaaaacttctaatttaagaatctttattctttggagaacatgtggttctgccctgtttaactgcaca

SEQ ID NO: 7513 - DNA, 583 bp, Homo sapiens
  MAP TO CHR18.3; EXPRESSED IN BRAIN, SIGNAL = 1.4; EXPRESSED IN ADULT LIVER, SIGNAL =   1; EXPRESSED IN PLACENTA, SIGNAL = 0.97; EST_HUMAN HIT: BE889084.1, EVALUE 2.00e-17; SWISSPROT HIT: Q92125, EVALUE 1.90e+00; NT HIT: AF151902.1, EVALUE 1.00e-17
cggggtctgcacattataggccaggatggcattagctccttattctcaggagcccctctcattcaggcaaagatagctggctggcctcagacggttagataggaatggagttagacatttttacatgacaacggcctttacctctatataaactttgaaagcttttcatctaaactaaatggtgtattttctatgagttaccaagaactctaaactgagcaaaaggacagtcttaatttaatcaagctctggaatgatgggacacagcttcaaaaaacactgttgcagcagaagatataaaggcctgtaaaaaaacaatgtttgcagaaaataagaagggaggaagcataacctggatatggccttctgctcctggtaggtaaatggctctccacacccagggtgaggagggacttggttcaaatgacttggatacgctccctgagtgtatccagctgtgtgttgaagtcctccacactctgctggtgcatggtggatgcttcctcctggaacctttccatttgctgcttctcctgcattttctcctaggcctcctgggtcagggtccacttgtctaggctgc

SEQ ID NO: 7514 - DNA, 600 bp, Homo sapiens
  MAP TO CHR16.3; EXPRESSED IN HELA, SIGNAL = 3.8; EXPRESSED IN HEART, SIGNAL = 5.4; EXPRESSED IN PLACENTA, SIGNAL = 4.5; EXPRESSED IN LUNG, SIGNAL = 3.4; EXPRESSED IN FETAL LIVER, SIGNAL = 5.9; EXPRESSED IN BONE MARROW, SIGNAL = 3.1; EXPRESSED IN ADULT LIVER, SIGNAL = 4.3; EXPRESSED IN BRAIN, SIGNAL = 5.3; EST_HUMAN HIT: BI459446.1, EVALUE 9.00e-07; SWISSPROT HIT: P38036, EVALUE 7.70e+00
ctctcttccaaggaatccccattcttgtaggaaactctggatttcctagtctctccaaggactggcctacaagggacagagaaaagtgaatacaccttgaaactactcagagtgtatatttgagtgactttcagagaccctccctctatgccaccaaggcctaagcatgaccttgtttctgttggtgggagatgataaaaccttacttggcaagtttgaaaacgaggattgctgggcgaagtaatgtccaatctttaaactcatggacatatcaggaagcatctgtgcatctggatatttatgatgctcaataatggataaagacacctgaaaagtgagtgaacaaaagaattttcaggctaaatattccttcccctgaagggttcttcctttgtttcaggcatagcgatctggcctgagaaggggccttgggtcaccttgtggtcaccaggacttgcttgcaagagctccatgtataacaggccatagactcatcatctgtggagccactcctgttgcccagaataagaattcatggctgccaaaagtgcctgtggttagagcagaaagattgcgagttggtgggggaagagagctaat

SEQ ID NO: 7515 - DNA, 513 bp, Homo sapiens
  MAP TO CHR18.3; EXPRESSED IN PLACENTA, SIGNAL = 1.1; EXPRESSED IN BONE MARROW, SIGNAL = 1.2; EXPRESSED IN ADULT LIVER, SIGNAL = 0.94; SWISSPROT HIT: O78484, EVALUE 6.20e+00; NT HIT: gi15828471, EVALUE 7.60e+00; EST_HUMAN HIT: AV728330.1, EVALUE 1.20e-02
tgctcttaaaacatcaactgccttacacaatatcaacacattgtttttttaaattttttctctaatacaatattttatttcaataaaatgcacttttgaaattttaatatgttttacagcacttgagacattaaatgaacacagcttttaatagctggttatatggaattgactattggaaatttaaagaatagcctatatcaagttgtagttaatatttttattctcacaaacattcttttactatttgtacaaaatgactggtagaactgtcattttcatccaaacagaatcaattgtcctctttatgtagtaattgtccactagcttgttcaacacagttctcaaagtcaatttgtcagttttgtgaccctgagaatagaactcagtatggatgaaaagagaatattttggttttatttatttaaatagatggttacatcattgtaactgatttaaggaaatatcatgttcttaaattcatattgttttcaagtatgatttcatgaactg

SEQ ID NO: 7516 - DNA, 528 bp, Homo sapiens
  MAP TO CHR14.3; EXPRESSED IN FETAL LIVER, SIGNAL = 2.5; EXPRESSED IN LUNG, SIGNAL = 2.2; EXPRESSED IN BONE MARROW, SIGNAL =   3; EXPRESSED IN BRAIN, SIGNAL = 1.6; EXPRESSED IN ADULT LIVER, SIGNAL = 2.9; EXPRESSED IN PLACENTA, SIGNAL = 2.1; EXPRESSED IN HELA, SIGNAL = 2.4; EST_HUMAN HIT: BE256326.1, EVALUE 2.90e+00; SWISSPROT HIT: Q95247, EVALUE 2.20e+00
ttatgcttccttgtccagcctctccctgcagtcttagaggctgaatccagtctcatgtctggtgtctgtgctgaatgtcagtggttttaaggcctcttctgcatatcagctctggccctcctcacccagctttccttggtctgtaagtcatatcctttaacctccacctgggtgtagctctcagagttggagggcattttgccatggctgctgcagcctgtgtgcaggaacagatacagcatctgatgatctgatttatgttttccagatttatcgcctcactcgcatactcaggccagttgatattttaggcacgtgaatcacagtgtctggcatggcttcctctatagcagagctccggcagcaggcataatgaagttgggaggggggagagttcaacttatcagggaggaaaatttgtgtcagtaacaagtctgcctggcaacagcactaaaagagagatagcaggtcccaacatcagagccaaaatcttcacactagtagagtagcatcaccctgagcaatttt

SEQ ID NO: 7517 - DNA, 569 bp, Homo sapiens
  MAP TO CHR14.3; EXPRESSED IN BRAIN, SIGNAL = 1.4; EXPRESSED IN ADULT LIVER, SIGNAL = 1.1; EXPRESSED IN PLACENTA, SIGNAL = 0.96; EXPRESSED IN BONE MARROW, SIGNAL = 0.83; EST_HUMAN HIT: BI835430.1, EVALUE 6.00e-91; NT HIT: gi8923637, EVALUE 4.00e-91
ttgactcaaatctctcacaggcttttagtacttttttttttttttaaatctctccaaatattatcatctcaagccaaaatactaggtaatgcatattcaattttctcaaacaattaaaatgaaaattctaattaaaaatacagaacctaccactctaataaattcaaacatctctattatggcagagttcatcagattgtagcgggatccattgttgagaaatgctttcactactggttcaaacaaaaaacttttcattatgtagcggttgtaaaactcatcttttaatccaataatctttcttttaaaacgaagggcacctgaaacacagaggcatggttgtttaaatcacataccactcttccatactttagacttaccaaacaaaaataaccatcaaaccaaaaaaaactgtttaacacatatcaataattatttatgatgtttgcacttccggaactgtgaacctaaagataaggattatgaaaatgttatcagaaaaatgtcttctaaaagtagtatatgtcatcatagaacacaagtcttagaaagccagaaaaatcctgaaa

SEQ ID NO: 7518 - DNA, 509 bp, Homo sapiens
  MAP TO CHR19.3; EXPRESSED IN HELA, SIGNAL =  16; EXPRESSED IN LUNG, SIGNAL = 9.7; EXPRESSED IN BRAIN, SIGNAL = 5.8; EXPRESSED IN ADULT LIVER, SIGNAL = 6.7; EST_HUMAN HIT: N41761.1, EVALUE 0.00e+00; SWISSPROT HIT: P33946, EVALUE 2.00e-45; NT HIT: gi14760348, EVALUE 0.00e+00
ttgtcctctgccttttctcccgccctgtcccctcccacctcatcatgtccccggcctctctgcagatcctctggaccttctccatctacctggagtcagtggccatcttgccgcagctgttcatggtgagcaagaccggcgaggcggagaccatcaccagccactacttgtttgcgctaggcgtttaccgcacgctctatctcttcaactggatctggcgctaccatttcgagggcttcttcgacctcatcgccattgtggcaggcctggtccagacagtcctctactgcgatttcttctacctctatatcaccaaaggtagctggaatgtgggacggctggaagggaacctcctatttctgcagctcctgccctccctggggactggggtctccttacccctgtattatgcaaagaagggagcatttcttcgccgggtttctggggtggcaggcctaccatcctcctaggaattcagaccgttagcctctgcctccctaagggctaag

SEQ ID NO: 7519 - DNA, 522 bp, Homo sapiens
  MAP TO CHR18.3; EXPRESSED IN FETAL LIVER, SIGNAL = 1.2; EXPRESSED IN ADULT LIVER, SIGNAL = 1.1; EXPRESSED IN PLACENTA, SIGNAL = 0.92; EXPRESSED IN BONE MARROW, SIGNAL = 1.2; SWISSPROT HIT: P58028, EVALUE 2.80e+00; NT HIT: gi14861871, EVALUE 1.30e-01
tctctcatttgatgattcacagctgcttattcaatgaacaatgtaaagctctagcaatattttgtaataaaagttacctgtattccggttcaagaaacagctgcatctcttcagtcttaatgtttggtttggctgaatcagacttcctatgccagaaagtacagaaccaatttgttctcttaaaatctcaaatgttaaaggtagggaagaaaggtctttatctttaaaaggcagcttggagatatcagttaaatttgctgccacccacagatgcttaacctggagaaatcagaaataatggaggattaaagattatgtgcctacagtaattttggaaaatgaaggagtccctcaggtagaaacatgatccattagcccaaagcttttcaagttacagcctataaatatttgaagtgtttaacttctaaggaggcaaaggaattactcaacctagtacaaggagaggtgatgaggagtaatgggatgacattaacaaagagaacatttcctcaacagagggga

SEQ ID NO: 7520 - DNA, 591 bp, Homo sapiens
  MAP TO CHR18.3; EXPRESSED IN LUNG, SIGNAL = 1.4; EXPRESSED IN BONE MARROW, SIGNAL =   1; EXPRESSED IN FETAL LIVER, SIGNAL =   2; EXPRESSED IN ADULT LIVER, SIGNAL = 1.2; SWISSPROT HIT: Q62728, EVALUE 7.50e+00; NT HIT: AF135028.1, EVALUE 1.40e-01
tttaaagccggcaagtatggatgtgactcccgtccccttggccaggacaagtcgcttgcccaaggccagtgtgcatgcgggaaggcacaggcctgagaagccaaggggcatgaaagtgggaggctgtgaatgtcggggacccagcgtacctcatcccgctgcagagggaagcttgcatccagccaacccaaatcctacacacttccattttaacgggtttcactctgaaataaatgaatgtttctcagggcaacattacatccagttctgccagtgcagaatcctacgtcctttgtgcgggctgtgcagagtcctgcgaggcccctggtagacaaaagatgggccgtgagaagcgggtcccacgtgaggatgacgagagggtgggaagtgccaacacagatcccacttggaacttcatcttctccaaagaatgtcaaattttgagtggaaaggggaaaaaaaggggggagccccaaacgtaacacaacactccgaagtcagttctttttctctcttgactaattaagcttaaccagaatggtggggctgtcaggcgtggggaacctttcctgagagaagaaaggagccgct

SEQ ID NO: 7521 - DNA, 533 bp, Homo sapiens
  MAP TO CHR16.3; EXPRESSED IN PLACENTA, SIGNAL = 0.92; EXPRESSED IN HELA, SIGNAL = 1.8; EXPRESSED IN LUNG, SIGNAL = 1.8; EXPRESSED IN ADULT LIVER, SIGNAL = 2.3; EST_HUMAN HIT: BI769184.1, EVALUE 0.00e+00; SWISSPROT HIT: P37769, EVALUE 4.00e-03; NT HIT: gi15317767, EVALUE 1.00e-72
tgggttatttaggtggtccgtgcgtcccacctactggagccctcgacctgggaggagagtctcacctgtgccacctctggtctgcagcaggggcaggacatgggtgacagtggcctggagggcgacgcagagggaggattctaggacaggtggcaggtggggggagagcgtggcaggttcccacaaacatccactggggtcgtgggcacttgcaggctgtgcttccccagagtggggtccagcagcaaacccagggtccccgaggaacccggaagcatcgtcctctgcagattccaaaggccttttctccaggccgaggctgcagggctgctgtctgcctctttacctggcttctaggccgccaggaagctggctggggccaccggccggcgctgcctccctctctctatggacgtccgagcgcccccagctgtcatggccgccgtggaccaggctctgaaggagtttggcagaatcgacattctcattaactgtgagtcggtgctgagtgaggttggtggcttctcacaggt

SEQ ID NO: 7522 - DNA, 597 bp, Homo sapiens
  MAP TO CHR14.3; EXPRESSED IN LUNG, SIGNAL =   1; EXPRESSED IN BONE MARROW, SIGNAL = 0.9; EXPRESSED IN ADULT LIVER, SIGNAL = 0.92; EXPRESSED IN PLACENTA, SIGNAL = 1.3; EST_HUMAN HIT: BI517361.1, EVALUE 1.00e-76; NT HIT: gi14752832, EVALUE 9.00e-77
ctttcccatggcatgatttctttttctattataaattgtctgtttttttaatctgttgcatttaatgaaaatcattctttgagacttttttcatatttttattgttggtaattttaaaaattatgcaacctaaaaaaattgcatgtgaaaactttttctagcattaaagctaagtatttttatgaagcttacacagaaagggttagtatataaacagtttatgtgtataaatactttataataatagtttatgctgtatttttgaaatctaaatgatgtaggaggcaaaaatatcatggttgttgtatatgtttctctcagcaaatatctggactttgacatttcctcttcgctatatgtttatttttctgtaatacaggccagaaaagctgtaacaatgatgtttttctccaattttccattctcatggattcgccattttttgatcactctagcactcaatattatcatcgttttacttgcaatatatgttcctgacattagaaatgtatttggtgtagttggtaagttttctgtttcaaaaagttcacataataaaattgataaaattgctacccagcctcacatctgaatcca

SEQ ID NO: 7523 - DNA, 576 bp, Homo sapiens
  MAP TO CHR16.3; EXPRESSED IN FETAL LIVER, SIGNAL = 3.2; EXPRESSED IN ADULT LIVER, SIGNAL = 3.4; EXPRESSED IN LUNG, SIGNAL = 2.8; EXPRESSED IN PLACENTA, SIGNAL = 3.5; EXPRESSED IN HELA, SIGNAL = 4.8; NT HIT: gi14786016, EVALUE 5.50e-01; EST_HUMAN HIT: AL079573.1, EVALUE 8.00e-75; SWISSPROT HIT: O09018, EVALUE 1.30e-01
tgtcactcagcagcttccaccaacactgaaccccaaaagagcagagagagaaataaagtcaagccaggattaaccccttctgaagtcttccaggacccgggcacacacaccctgaccaacgtggcgggaggaaaacttgctcccaggaaggtttgtggggacacggtgccgagggtggaactgccttaatccaggaccttcgatgccccctgcagagcgggagcggctgggcttggggaagggtgtgcaccctgtgcgggtggttcctgggggccaacacgggcccaccaccctggcccacaccctggagcctgactgcaggttcgctcctgaactgcagctttctcctccccgccgcgtgcaccacccacactcctggatgaagcataattcctgccgggtaactcgccaccatcacccaggggcactctatgcaaagcgctctgttccatcctgaagagagcatgaagcactccctaagatcactgctgggtgtcaaagaaaggaaagcctttccagacctagagatccagaaacccagcgcacacccacattaggagacacggaagagctcac

SEQ ID NO: 7524 - DNA, 506 bp, Homo sapiens
  MAP TO CHR14.3; EXPRESSED IN BRAIN, SIGNAL = 1.3; EXPRESSED IN ADULT LIVER, SIGNAL = 1.7; EXPRESSED IN PLACENTA, SIGNAL = 1.3; SWISSPROT HIT: Q63503, EVALUE 3.20e-01; NT HIT: gi14748633, EVALUE 1.00e-32; EST_HUMAN HIT: BI020569.1, EVALUE 2.00e-32
ctggcagctgatgtgtatgggggccgcatgcagcccagcatgggacccagaatgtgtgcagcagacacgccccccgaccccatccttgccacctccttcccccattttccttggcaggatactcacctcacccagggcccttcttgtgtctccccagtattgtacctggaaggctcggctcttgtgtttgaggacatcttcagattgattgcgttctactgtgtcagtaggtgagtagacccggccctgcaggaggttatctggttgtagcaaacatcacatgcaaccctgggtgggtgcaggggacttcacagggaagccccagagggaggggtgtggcccagaggatgcagagagagggcacaggcccctctgggaaccacagaggatgtgttggctctgaggctttctcacactatctgataagagcccctcccttccacacctgcccctctggctcacggcctgtctctcagcttcctgtatcatcagcttcaaggacagcc

SEQ ID NO: 7525 - DNA, 561 bp, Homo sapiens
  MAP TO CHR19.3; EXPRESSED IN HEART, SIGNAL = 1.7; EXPRESSED IN LUNG, SIGNAL = 5.4; EXPRESSED IN ADULT LIVER, SIGNAL = 6.3; EXPRESSED IN PLACENTA, SIGNAL = 6.1; SWISSPROT HIT: Q61626, EVALUE 3.00e-24; NT HIT: gi14756303, EVALUE 4.00e-82; EST_HUMAN HIT: BF927389.1, EVALUE 0.00e+00
gacatgggaagcacacacaccttccccgctgtcaattccacttcccaagaaagacaccagagccacttcctcactcctgacccacccagtttcccattcctggggagagggaagttatttgagggtttgagggtggcagctcaggggcctttggggctcctctgcctaggcagcctcttatccatcccacccccgcctctgtcccaccgcagctgtcagccgccctgatgtttgacgccgtgcacgtggtggtgagcgctgtccgagagctgaaccgcagccaggagatcggtgtgaagcctctggcctgtacatcggccaacatttggccccacgggaccagcctcatgaactacctgcgcatggtgagcccgagcggggatgggtggaggaggcaggacacggccacctcaggtgggagcgctcactgtgaccaccctgtggccctctgccctccctgctcttcccaccgtacccactgcctcccctgtccactcctggctgttgctgcctatctgggttactctctctctctctttctgagtcttgccctcttcatgc

SEQ ID NO: 7526 - DNA, 512 bp, Homo sapiens
  MAP TO CHR18.3; EXPRESSED IN BONE MARROW, SIGNAL = 1.2; EXPRESSED IN ADULT LIVER, SIGNAL = 1.2; EXPRESSED IN PLACENTA, SIGNAL = 1.3; EST_HUMAN HIT: BI599561.1, EVALUE 7.20e-01; NT HIT: AB022281.1, EVALUE 1.90e+00
ttcccacaccttgaggaaactgtatttcttttgaactatctctgatccttttcccaaaagatggttcaaaatcactctgtctgaatgagaccttaattagtcatagattactctgccccaccccaagactctgatgttctcccctatattaaattacacttgtgcaccatgttttatggtatcctcaccagttgttatcttgggtgttgaatttctctcccaccagctgagtcataacctgcttcaaagcagactgggtttctgatttctgatggcagagttctccattctgaatggtggggcacatggataccaatggcccagggctttacaacacccctgaaacataccactgtgtcagttcagtgctgggaaggttctaagtccacattcctgtcagtcagccgattatccaatccacatagccgtaaaaacatgagaaatctagattgtcaccccatctaaagaaaggagggattgcaaaggtagaaagtgggggtaagagagcacaa

SEQ ID NO: 7527 - DNA, 556 bp, Homo sapiens
  MAP TO CHR16.3; EXPRESSED IN LUNG, SIGNAL = 2.4; EXPRESSED IN FETAL LIVER, SIGNAL = 1.4; EXPRESSED IN ADULT LIVER, SIGNAL = 1.9; SWISSPROT HIT: Q09372, EVALUE 1.80e+00; NT HIT: AF129756.1, EVALUE 3.40e-02
ttcataatgcagatggcaggatctagagatgcttcaatgcaagcacatttaataaacaatggggctatgaaaataaacacaccagtggaaagagtagctgagcttgcccatgatatctagtgttgttcaaatatgcaaattcatctctataacaaagtaggttttgattttctagaatctgatcatccaatcatgacaaatccctctgattattatttttttccttgcaagttacaatttaaggttctacacagtagcagtgggcctgagaatattggttgatgtaattcttggtcttggttgaggcagaaacttaagtgagtgtaacaatttatatgatcaaataaaagcttctgaataataataataataaaaacatcttttctccatctcccaactctcttaagtcatttagtgtctccaccaaaatgcaatgccagtgactgtgttgaaacagcttaaatggtggcacataaattctcactctcttctacaaaggaagtttcagaaatttgcaaaggattaattgacctctccttgcctccgaatcctcata

SEQ ID NO: 7528 - DNA, 514 bp, Homo sapiens
  MAP TO CHR16.3; EXPRESSED IN PLACENTA, SIGNAL = 2.4; EXPRESSED IN HELA, SIGNAL = 2.3; EXPRESSED IN FETAL LIVER, SIGNAL = 2.7; EXPRESSED IN BRAIN, SIGNAL =   2; EXPRESSED IN BONE MARROW, SIGNAL =   2; EXPRESSED IN ADULT LIVER, SIGNAL = 2.8; EST_HUMAN HIT: AA663096.1, EVALUE 4.60e-02; SWISSPROT HIT: P22607, EVALUE 2.00e-03; NT HIT: AF029062.1, EVALUE 7.60e+00
gctaaatgaaccagcaccaagtttatatccaggagaactgcttactctagaggattttgtctcttggataatgacatgattctgtctttcataggctactccaaaacttctataatgatggtagagtttagtgaagtggagcatcggcatgccatccccatgctcctgacaagcagcagcagctaacctaagcacagtcacatagggcatgccattgacacccaccttgctgttgttcacctccacatactaagttgccatacactttgcagtggaatttcaccttactgcatctggttggtcagcagtcctgcaggtagaaagagttggtcaggagggcacattgagagaatagatgggagctcagaggctgcctagctccctgcaccctgcccacaggccacagtcctcacccagctgtccagcatgcatgtctgctgaaggctgctgcacttgttcttcatcacagaggtgggatgaaagcagtctgagggcaccacactccatgatcagg

SEQ ID NO: 7529 - DNA, 501 bp, Homo sapiens
  MAP TO CHR18.3; EXPRESSED IN HELA, SIGNAL = 1.1; EXPRESSED IN LUNG, SIGNAL = 1.4; EXPRESSED IN BONE MARROW, SIGNAL = 1.5; EXPRESSED IN BRAIN, SIGNAL = 1.2; EXPRESSED IN ADULT LIVER, SIGNAL = 1.3; EXPRESSED IN PLACENTA, SIGNAL = 1.1; EST_HUMAN HIT: AV719338.1, EVALUE 7.00e-01; SWISSPROT HIT: P16729, EVALUE 7.90e+00; NT HIT: AF026492.1, EVALUE 1.20e-01
cacaagattctaggcagggcctgtaagctaggcgttatcagactatctatccaaattttgaagcccttcctattctcaggctgtttatattttcccaggctcagctcccacaagctccgtcttctcagtgtcctcatgactagaacgatcagacacacatacagtggtttgaactcgaccttcctttttttgatgacacagatcactgtggataaaactcttcccaagatttctaacttcctattcccttcccagtgtcttccaatactcgtctccagagatttgtttatcctgcagagagaggaacaaaaggatgatactggctttttccaagcaacccacagaaaggatctcaaagcttcacgtacatttagcaacccctaagccttgaccaaagattagccagaagatgagagagatcagagttgtcatgaaagggaaggaagtctcagtcagctcaacatagttccatcatgccccccttgaggacactgggctttt

SEQ ID NO: 7530 - DNA, 538 bp, Homo sapiens
  MAP TO CHR18.3; EXPRESSED IN FETAL LIVER, SIGNAL = 1.1; EXPRESSED IN ADULT LIVER, SIGNAL =   1; EXPRESSED IN PLACENTA, SIGNAL =   1; SWISSPROT HIT: O70579, EVALUE 6.60e+00
tcaaagtgggattctgggagtgggtgcctcacatgtttgaagagctagcagatagcctccctactggaaggagacagggccagcataatacaatgcatctggtggcatctccatttcccagattctcatctgtgctggcacagggcaatgtgcaggtgcagctggagggtcagatatcaagacagctaatggcagtgacacttagtcactatggtgactatacaatgggaaagatagtaatctgacttctaatggagccagacagcagacaggaaacagaggaaataaaagctgtttgtgtctaatagagaaagcaagaggataatcggaaactcatgttgttgactttgaagaagtccctcatctctgatatctgcaagacatacatgcctacggatcaaaccaagaacctgagtataagggtggaagagccaattaaatcgtcaaaccccacacttgcggagagaagtgggatgctaatatctgctaagaagacagatagacagtaactgaggactcatcctccaaaccctctgaa

SEQ ID NO: 7531 - DNA, 503 bp, Homo sapiens
  MAP TO CHR19.3; EXPRESSED IN HEART, SIGNAL =   2; EXPRESSED IN LUNG, SIGNAL = 2.2; EXPRESSED IN FETAL LIVER, SIGNAL =   2; EXPRESSED IN BRAIN, SIGNAL = 2.9; EXPRESSED IN ADULT LIVER, SIGNAL = 1.3; EXPRESSED IN PLACENTA, SIGNAL = 1.6; EST_HUMAN HIT: BI603287.1, EVALUE 1.00e-23; SWISSPROT HIT: P38898, EVALUE 9.20e-01; NT HIT: gi14766572, EVALUE 2.00e-22
tttgctgcatgtcctgtctctatgcagtgatgatgtgctgatcattatctttgtcaccgtgatgcccctggagatctccagaaagtaagaaccagagagccaaggcagggccagcattgcaaagctgaagcaagggaagagagttggtaccctgcccctcacctgaatctccctgagttggggacgtcttctgggtccacctgaagccgccagacaacctgcatgcaacaagagtcactcaggtgcaagggggcgggattgaggcacccaacccacccccgcttcagtatctcctgcatgggttgtgacctgttgtcaggctgcccatgtggccctcccattgtgcctgggaccctcccacacagcctcgaagccactctctggcaacaactccctccaagctggggtgtcagagaactgtggggagggaagggggaacgaccgcatcggggtacgggggtgagactgaggggtgtggcgagtggagtgagggagcagatgtc

SEQ ID NO: 7532 - DNA, 593 bp, Homo sapiens
  MAP TO CHR14.3; EXPRESSED IN PLACENTA, SIGNAL =   6; EXPRESSED IN FETAL LIVER, SIGNAL = 3.5; EXPRESSED IN LUNG, SIGNAL = 7.3; EXPRESSED IN ADULT LIVER, SIGNAL = 6.1; EXPRESSED IN HELA, SIGNAL = 8.5; NT HIT: AJ310828.1, EVALUE 5.70e-01; EST_HUMAN HIT: BE972628.1, EVALUE 2.10e-01; SWISSPROT HIT: P24892, EVALUE 3.90e-01
gatctgtactgaccctgccggttgcaaaaataaagctgttttcaaaacaataaaaccaattctagataggactttgcattttattttttaagatgtattttccctgtactgtttggcaaaaacatctacttccacaggctttttctagtcatagtcacagtgatctccttcacagtttattgggcagggaacacacacagttacctttctaacccttctaatttgtgttggattctaagctcccacatcttggccctcgggcattttccttgataaagccctcctaccttacagtccaaggaagaccaaagactttggatatgaaatttttaaagtaaccactgaagaagaggcttcaattgtattggcccaactggcaatctatggaaggccacatgaattgcttagagataatactctcgcctttcaccttgcagtcaccagtttgaatcaagcagagattaacagtgtccaagggttgttatcatctggtgatgccttgggagctgatatgaaataaattactagtatcttgcatctacttaccggaggtcacccagttcagactattttggggaccagatccaaatctt

SEQ ID NO: 7533 - DNA, 571 bp, Homo sapiens
  MAP TO CHR14.3; EXPRESSED IN LUNG, SIGNAL = 3.6; EXPRESSED IN FETAL LIVER, SIGNAL = 6.7; EXPRESSED IN BONE MARROW, SIGNAL = 6.4; EXPRESSED IN ADULT LIVER, SIGNAL =   3; EXPRESSED IN HEART, SIGNAL = 3.9; SWISSPROT HIT: Q28969, EVALUE 2.40e+00; NT HIT: M20685.1, EVALUE 8.50e+00; EST_HUMAN HIT: BG035186.1, EVALUE 2.00e-01
aaggagagaggagtagcggggcagccaccgaaggctgatgtggcttttcatgactccacccagtgaggcccaactggctccaagggtagggcagcagcctaaggaatggaggaaatggtctttcctcaagcagagcttagactttattgtcttggaaaaacctgtttgtatttgggagatgtgcttactttaataggtcaaccctgcaataatgggcaggtctgaggctccaggagtgctggggtagtctattcacccccttattctttctctctatccttttttacccacctgccttgcagccagtgggtgtcagagccagcagcagactggagtctaagggcactgctttctgtccgtgagcttgagaaggcttcttgcccttctgaatctccaagtccttgcctgcaaagcacaggcaatgataaaaacactaacgccttatctggtgttgcaggatcccttaccaagggcttctacgtctcctatcgtgagctcagtactcagtgaggtaggcaaaactggaggaggaaaccggggaggaggagtgagtctctaactccccacgctg

SEQ ID NO: 7534 - DNA, 556 bp, Homo sapiens
  MAP TO CHR14.3; EXPRESSED IN ADULT LIVER, SIGNAL = 1.9; EXPRESSED IN HELA, SIGNAL = 2.3; EXPRESSED IN PLACENTA, SIGNAL =   2; SWISSPROT HIT: P20186, EVALUE 1.40e+00; NT HIT: M91004.1, EVALUE 3.40e-02; EST_HUMAN HIT: BG715654.1, EVALUE 1.00e-88
ccaaccaagtttaggcaagccctgtagccgagttctgcttgcggttgtttttctttttcctgttctcaggcgcgctgcgggcacctctcggacaaggccccagccgtcgcgggttgccgggcagagtcggacgccgccagctcttcactccacgcccacctctctcctggagcgctgggccttcgctggccgcaccggcagccatgagctcggagatggagccgctgctcctggcctggagctattttaggcgcaggaagttccagctctgcgccgatctatgcacgcagatgctggagaagtccccttatgaccaggtaccggccagctcccgtcagcctgtgcatcctgacgctgaggctgcggggtctggggcatatcccagccccgggttgggaggccggggaggaaggcccgaggcggggctgaccgttcggccctcggaggcgcccggagcgagaccttgtggagctgtgactagcgggtccgctgtccgccacgtccacggggatagcaagttctgtgccatgaccgccccctcctcacaatcttcagc

SEQ ID NO: 7535 - DNA, 565 bp, Homo sapiens
  MAP TO CHR18.3; EXPRESSED IN HELA, SIGNAL =   2; EXPRESSED IN BONE MARROW, SIGNAL =   2; EXPRESSED IN ADULT LIVER, SIGNAL = 1.8; EST_HUMAN HIT: AA889813.1, EVALUE 1.00e-115; SWISSPROT HIT: P48193, EVALUE 9.00e-30; NT HIT: gi15306268, EVALUE 1.00e-121
aatgatgcttttcccttccctggtaggctgcaatatttcccacttagttccatgctatctcataagaagtcctatggaggcaccagcagatacatgagaaaagaataacaagaaaaagggctttgcaagaaagcactacaaacgaacacctggatgctctgagtgagagcttgcccatctcagaattttactgtgcatggacccacactatgctcacgtctcgccgttaatggactgaaatcagtactgggaagaggtgggttgtgtgcgggacactctcccatcaaggcacaacttaaatgaacacctttctgcctctaacctgtggctcttgtgcagctcgatcactttgtcttccagttctttagtgtggtttggtgcaaagcggaactcactaatgtaatcgctcccacattcatctgggtcatagtctccgagctctgactggacagtgtaggagcccagcaaggccagggtaacaaaggagcagggcagccttccggacacgatgtcatctcgcaactgcaagcagaggtagtaccttccaggaaccaaaagcacaaca

SEQ ID NO: 7536 - DNA, 519 bp, Homo sapiens
  MAP TO CHR18.3; EXPRESSED IN PLACENTA, SIGNAL = 0.97; EXPRESSED IN FETAL LIVER, SIGNAL = 1.1; EXPRESSED IN ADULT LIVER, SIGNAL = 0.92; EST_HUMAN HIT: BG183509.1, EVALUE 0.00e+00; SWISSPROT HIT: Q9ULV0, EVALUE 2.00e-50; NT HIT: gi16164058, EVALUE 0.00e+00
agtgttcgacggatttcaccaacaggtaaaaaggtgatggatttgagtcacagactgatggagacaaggactgtcaattagatttggatttcatttttagaaacagcagtcttgtgttctgattctagctgcagtcagtgagggcccactctatctgtgttgttggggggtgctcctcccttacctgagttgcatgcctgtgctccaagagcagacgtccttccgcaagagcaggttgttaagagtcactgcgttgatcatgtagaagagctgtttgaatacctgcaggatgatctcagggtccaagccctggtcacacatgactgtatgaaaggcattcatctggcggatgatagcttccaggcagtatgagttatccccatctgccatgctggaggagcgcttccggtagccggtgggcttcacaccagatagaccctgaatgctctcattttccaacatggcagaaactgaaataaaagcacagttagagaagcttgcattccccactaacaatgc

SEQ ID NO: 7537 - DNA, 560 bp, Homo sapiens
  MAP TO CHR16.3; EXPRESSED IN ADULT LIVER, SIGNAL = 2.7; EXPRESSED IN HEART, SIGNAL = 3.1; EXPRESSED IN LUNG, SIGNAL = 1.5; EXPRESSED IN BONE MARROW, SIGNAL = 1.8; EST_HUMAN HIT: BE089410.1, EVALUE 0.00e+00; SWISSPROT HIT: Q07297, EVALUE 6.20e-01; NT HIT: gi14774874, EVALUE 4.00e-51
ccttgttgatgtcttctttccagaaaaagaaaaaaccaaactgcagaagcagagagaggatgagctaatccagaagatccacaaactggtgcagaagagagacttcctggtggacgatgcggaggtcgagcggttaaggtgagtgcactgcgggtacccgatcactgggctgcaggacagcaaccttctgcttccttccagaacccatcttctgctcctgggactcacagccttgcctaacaggcatggccttgatccacagtctctggacactgaatcccaaggaaccccagccttctggcttgagaattcattttgtatataagagaatttcaaatctgtgcctcttgagggaatgttgttccaggaagtgaccagggaggagtcacatcccataatacatggcagagcttccttcacatcctgtcactcctgaaggcaatgtcttgaaacttctgctatcagtttctaccgaaactctgccacctgaactgacttgctcccaacctctgtcctcccaacctcccagctttgttctcccctttcccttccccttagtg

SEQ ID NO: 7538 - DNA, 500 bp, Homo sapiens
  MAP TO CHR16.3; EXPRESSED IN ADULT LIVER, SIGNAL = 1.5; EXPRESSED IN HELA, SIGNAL = 2.3; EXPRESSED IN HEART, SIGNAL = 2.4; EXPRESSED IN FETAL LIVER, SIGNAL = 1.4; EXPRESSED IN BONE MARROW, SIGNAL = 1.6; EST_HUMAN HIT: BG258450.1, EVALUE 9.00e-59; SWISSPROT HIT: P55194, EVALUE 5.00e-10; NT HIT: gi16165172, EVALUE 2.00e-59
ctgactgcctaagagcaggggcattttgagaactgggacaatgtctcacacatctttgtgtcaccaccagctgggacagcacccagctcacagctgtgttccaagaatataggctgaatgagaaaaccaacttcagaataccttgaattgatcttaaactagaatgtgtaacctgagttacatttctatgcatcccatcaggtgggaaagaagaaattcaaatgatacagagaaagatgacttacccttcatttctggcccataacaagttagggcctaacacaatcgcaatgttgctgggagtcattttattcacatcgctggtctgagcaagctttgcaaggaacttgatcaaatatctaggggtcaaaagagaaggggagggtttctcctctgaaatagctgctggaatgttctcttcctgcctgggtgcacaatcccagtttgctcaggtgctaactgcagagggttcctaaatcagaatctggctcaggtgaagc

SEQ ID NO: 7539 - DNA, 582 bp, Homo sapiens
  MAP TO CHR18.3; EXPRESSED IN HEART, SIGNAL = 1.7; EXPRESSED IN LUNG, SIGNAL = 1.6; EXPRESSED IN BRAIN, SIGNAL = 1.3; EXPRESSED IN ADULT LIVER, SIGNAL = 1.5; EXPRESSED IN PLACENTA, SIGNAL = 1.3; SWISSPROT HIT: P98161, EVALUE 1.70e-01; NT HIT: Y15080.1, EVALUE 5.60e-01; EST_HUMAN HIT: BG758739.1, EVALUE 3.20e+00
agagtggatgcagatggacctagagaggaaagttgggactgagatacaaccctctgaagaacaagaaggccccccttccaaggccacagggactgcagagaagcagctgaactcacctgggacaggaaccaacctgcagagccccccttattgttgtggccaacattgatcttcatcagctgccccaaatccggggcatccaggatgaacctgtcttcagctcccttttcaaagttgtccttttcattttctagcctacgctcccctgtgtgcacagacatacaaaagaaattacaaaaagaccagaagaaaagaatttccaagccttcatggtccgcccactgaaagatgctcttccaaagttaacaagggcaacttcctcctgagatctaagggctccttacatccctccagtctctgaacaaggcagaggtttgcttcatgtgtggcttgtgcccaggtcttataactgagcttttgatttctgccttactctagagtcccgatcctactaaaccgatttgtacccccatctctagatctaggaccctgccttgcttttgccagttgcttgtcctgaat

SEQ ID NO: 7540 - DNA, 572 bp, Homo sapiens
  MAP TO CHR18.3; EXPRESSED IN FETAL LIVER, SIGNAL = 2.5; EXPRESSED IN BRAIN, SIGNAL = 2.1; EXPRESSED IN ADULT LIVER, SIGNAL = 1.6; SWISSPROT HIT: P45561, EVALUE 7.20e+00; EST_HUMAN HIT: AA468142.1, EVALUE 2.00e-01
tatgagaagtgggcgatgtggtaacgaggtgcatgtaccaggacaagggaccctggtggttttggtgaaagcatttgggaaagtgaaaggagagatgataggagcactgaaagagagcccattattgctgggtatgatagctataggtaaataggatggaagcagatggcatttgttcttaacatttttcattttctttaaagtaagctaattaaattttacttctaaaacccatgaggttttagttataatattaattataaaggaaaggtatttaaaagaagttattgactttttttttaaagggcagctatgcaatagagataacttccttttatcttagcttctgtggtctcttgtggaaaataatctgagaatgtcatcagcactatgtcatctagaagagtttatcaccctaaatcaaattgcacaaataattgttttttaatacagggactttctacatacaaaaagttatataggcatataatgtcaaccttccttgtacttttcttcattacctaatcttatgagtgaaagtaatgcaattgaggttgtgtacctaggaccct

SEQ ID NO: 7541 - DNA, 506 bp, Homo sapiens
  MAP TO CHR19.3; EXPRESSED IN LUNG, SIGNAL = 3.1; EXPRESSED IN ADULT LIVER, SIGNAL = 2.5; EXPRESSED IN BRAIN, SIGNAL = 1.7; EXPRESSED IN HELA, SIGNAL = 3.1; EXPRESSED IN PLACENTA, SIGNAL = 2.5; EST_HUMAN HIT: BI909184.1, EVALUE 0.00e+00; NT HIT: gi14762477, EVALUE 0.00e+00; SWISSPROT HIT: P43626, EVALUE 1.00e-15
tagctggctgctcatcactgagtttctggtgtggtggccccaccttctctcatagaaatgtatgacacacccaccctctcggttcatcctggacccgaagtgatctcgggagagaaggtgaccttctactgccgtctagacactgcaacaagcatgttcttactgctcaaggagggaagatccagccacgtacagcgcggatacgggaaggtccaggcggagttccccctgggccctgtgaccacagcccaccgagggacataccgatgttttggctcctataacaaccatgcctggtctttccccagtgagccagtgaagctcctggtcacaggtgaggaaatgctcaattccccacacccttcgccgccatgtcctacctggagccctgagggatccccagagagtgatggggagggtgtccaagggacgtccacttcctgggtgcctggttggtcatgtgaggaagaacaccagaagcaggaaggaggagggagcagagaaag

SEQ ID NO: 7542 - DNA, 537 bp, Homo sapiens
  MAP TO CHR16.3; EXPRESSED IN HELA, SIGNAL = 2.4; EXPRESSED IN LUNG, SIGNAL = 2.3; EXPRESSED IN BONE MARROW, SIGNAL = 3.6; EXPRESSED IN ADULT LIVER, SIGNAL = 1.7; EST_HUMAN HIT: AL524228.1, EVALUE 0.00e+00; NT HIT: X71874.1, EVALUE 0.00e+00; SWISSPROT HIT: P40313, EVALUE 3.00e-36
aaaggaggtggggaaagatgggctgaggcatgggaagcaggtcctcattagcccaatggccaggctgcggcattcctgccatcaaaccggcactgagcttcagccagaggattgtcaacggggagaatgcagtgttgggctcctggccctggcaggtgtccctgcaggtacaccaccagaggggtgggcagggtcctgggtacgtcatgcctaggggcagcctcagcagcccacccccactctgacctctgagccctgaccacaggacagcagcggcttccacttctgcggtggttctctcatcagccagtcctgggtggtcactgctgcccactgcaatgtcaggtgagtgcctgcattccacctgccccgcccctcgcctcttcctgcctcctcccctggctgtccccctctcgcgctggcctccctgcagctgcctaatcccacccccttgcagccctggccgccattttgttgtcctgggcgagtatgaccgatcatcaaacgcagagcccttgcaggttctgtccgtctctc

SEQ ID NO: 7543 - DNA, 551 bp, Homo sapiens
  MAP TO CHR18.3; EXPRESSED IN LUNG, SIGNAL =   2; EXPRESSED IN ADULT LIVER, SIGNAL = 1.3; EXPRESSED IN HELA, SIGNAL = 1.6; EXPRESSED IN PLACENTA, SIGNAL = 1.2; EST_HUMAN HIT: BI831188.1, EVALUE 2.00e-94; SWISSPROT HIT: Q9UMN6, EVALUE 6.00e-01; NT HIT: gi6754801, EVALUE 5.20e-01
tgaagaaaaatgccctgaccagaaacaagggcctgagcccgaatttgacggttggagtggtaagggagcgggaggtgtgagggacccccgacccacccaggatgtcgctggtcttaactgcgacggtgtaggaggtccactccatcatttcttcctcatcgataacggcacacatttcacacaccagggtcttcttgcccttccgctgggacagccagtctccatagtagaacatggtcaggtctccagtgttcatgttcttcagtaggatctgggggagagggagccaccgtgggaatgccctgtcctccctcacctccaccagcaccccctggctcatgcagcccctccccgaatcccaaccctggagatcccagacctgagacaagcgcttgcgactgagacccacggggtgtggaaagggccctttccaggacaaaggccctgtcctgtgtgcctggcatgggatttgaagtccttacgaggactgccctagcttgggatttgggaatgggcaattcacctaaagctgtgtcctcagaggtgcctgt

SEQ ID NO: 7544 - DNA, 505 bp, Homo sapiens
  MAP TO CHR14.3; EXPRESSED IN BRAIN, SIGNAL = 1.2; EXPRESSED IN ADULT LIVER, SIGNAL = 1.2; EXPRESSED IN HELA, SIGNAL = 1.3; EXPRESSED IN PLACENTA, SIGNAL = 1.3; EXPRESSED IN LUNG, SIGNAL = 1.1; EST_HUMAN HIT: BF106558.1, EVALUE 2.80e+00; NT HIT: AJ414152.1, EVALUE 1.20e-01
cattgagctgagggcctaacaatcaatatcacatttaaaccccacagcagccatatgagaagcgttattatcgtgatctttacttcgcaggtcagaacaccgagacttcagggagttaggcaactggcccgatgccacgccagttaagtctatggcctggagaatgagacaggttttcagtttctgcaaatggttgaaacatggtcagttttttaatcgaaaacttgaggcatacatggtaactttgaacatatttgatttaaaaaaaaaaacaaatccaaatctaaaagagagaatgtgaatactgccatagagtttatcaagtggaaattaacttatttccacacttttatcctaggatttgtttctaaataaagcctgacatttaaggtagaaggatgattggatgggatcagagtgcaggggggagccagcagcgagtggaatgtggagccaccttaggccctctgtgacttgacatgccacttggtctccctgagcctta

SEQ ID NO: 7545 - DNA, 539 bp, Homo sapiens
  MAP TO CHR14.3; EXPRESSED IN FETAL LIVER, SIGNAL = 0.93; EXPRESSED IN LUNG, SIGNAL = 1.3; EXPRESSED IN ADULT LIVER, SIGNAL = 1.6; EXPRESSED IN PLACENTA, SIGNAL = 1.4; NT HIT: M99379.1, EVALUE 1.30e-01; SWISSPROT HIT: Q96069, EVALUE 1.30e+00; EST_HUMAN HIT: AL042229.1, EVALUE 1.90e-01
ccccaagtaccttccacaagaataccaacttggacccatgccatttctgaagtatgcaagtgcagtatgcaaagcctcgccaatggtttggccagttgtctgatcttacttcttcctggcatgttgtgggtcccttcaagcatgctcatgggcatggcttccaaagagagacagagggcttaggagtctctctattagagcagtacagtcttccataggtctttttcagggctttctctgttatcctgtgggaggcaggtctccttggtgctggactcacagtggctagacgctccctcagaccttcatcccttctagatgtctcctgctattactggcatttttccttcagcaggattttacacttagacttcagacatcttcaagcagaaagcaacagttactttctatttaattatttgcagccaacgtggctatgatgtttaggctctatgtaaccaaggtctctgtgggtacctccagctttcttgcctgtgctcctggtgcaaaggctgctgtcgaggagaatctgaaggcag

SEQ ID NO: 7546 - DNA, 570 bp, Homo sapiens
  MAP TO CHR14.3; EXPRESSED IN FETAL LIVER, SIGNAL = 1.1; EXPRESSED IN BONE MARROW, SIGNAL = 1.3; EXPRESSED IN ADULT LIVER, SIGNAL =   1; EST_HUMAN HIT: R99264.1, EVALUE 8.00e-01; SWISSPROT HIT: P26829, EVALUE 9.40e+00
ctatggtgctctccactccccgtcaattacttctgtgaataaatgtgactctcaatccacttgacaaactccctagacaaaatggtattgatcagaaatgttccttaaatcatctatggagttaaaatatactacaggaaggtaatgagagaggagataaagagctaacgagatggagtttttatgggaactgcaatgtggatcatttgaaatatggtgactaagtcaactttgaagttagaaatatattaactctcagctctaggaattcacaggaaccagagtgtttacactaggtgcacacactatccctcatttccttcttgaaccagctgccgaggaggggctagaagttgaagtgtcaacaaagccatcttttcatttcttgagcctttagtattgggagagctggggtcatggttgggatttgagcttgtcagtccaaacacaactccctaaaagagaataaaaatagttgctttgtttatatttcattaacagttatacccctgctttgctcacacttaatcaaggtcctttacagattcagggatgggggaggacttaaaa

SEQ ID NO: 7547 - DNA, 564 bp, Homo sapiens
  MAP TO CHR19.3; EXPRESSED IN BRAIN, SIGNAL = 1.6; EXPRESSED IN ADULT LIVER, SIGNAL = 1.6; EXPRESSED IN PLACENTA, SIGNAL = 3.3; EXPRESSED IN HELA, SIGNAL = 2.3; EXPRESSED IN LUNG, SIGNAL = 2.1; NT HIT: gi15302718, EVALUE 1.00e-117; EST_HUMAN HIT: BG743120.1, EVALUE 1.00e-116; SWISSPROT HIT: P23842, EVALUE 2.80e-01
actcctcaaagtgctggtggtggcggagcaggaccaggggctgcacctgttgaagaggccgggtgtcagggcagctgagggctggacccccagggccccaggacttggggtgaggaggggcatgtcggggcagcccaggcctcccctggcacctgcttggcccggcagagggtcccgcgacggtacatgtagtcctcggagttcacgatgaacaccatcttgtgagtgctgagcttgaagcggcagtccacgtcgcaggcgctctccacgcccaccagccgcttccaggagctcctggcctcaccgcgcagggcccgcgcctgctcgctctgccaccggcggcggaacttcttgaggttcctgggggcgaaaggaggtggaatggactctggctctcggcattgtgggaggaggatttgcaggctgggaaacccccaggcctgggaccatcagaagatgtgctacctcccaggggtccacagaaagcaaatggaagcaacaagaaatgcccccagatctgaacacccaccagcagcccccactggtcccataggtgccatccta

SEQ ID NO: 7548 - DNA, 513 bp, Homo sapiens
  MAP TO CHR14.3; EXPRESSED IN PLACENTA, SIGNAL = 1.9; EXPRESSED IN HEART, SIGNAL = 1.8; EXPRESSED IN HELA, SIGNAL = 2.2; EXPRESSED IN LUNG, SIGNAL =   2; EXPRESSED IN BONE MARROW, SIGNAL = 1.5; EXPRESSED IN BRAIN, SIGNAL = 1.9; EXPRESSED IN ADULT LIVER, SIGNAL = 2.2; NT HIT: gi14784246, EVALUE 0.00e+00; EST_HUMAN HIT: BF983132.1, EVALUE 0.00e+00; SWISSPROT HIT: Q49404, EVALUE 6.20e+00
cccaaaatattaaaaggggagcaaattaaaactaagaatgcagcatggcatttcttcctccatgtagaatccccttctaggatgctagcagttacctgatcgtttctccctctgagggtatggaaagtccagggctttctctgcgtatctggaaagcagtgagtccacctcgtccatagtgaagccaatctcctgtccaaccagcagctgctggagagtctgcacagccacagtggcccaatccaccttcatgttcataagcagctgctccagcatgaacagggggttagaggacaagtgggaatagctggcccggtgctgctcaggcagggtcagcagaatctgtttgtggggtagatccatagagtaaagaaaatagtacacaaatttcagaaaaaactcaagattctcactgggaaggggaagggtgcatgagaacaaaaggtgcatagccagctactgaaacagactcgcagtcttttaggaaggctgagctccccactaaattctgca

SEQ ID NO: 7549 - DNA, 506 bp, Homo sapiens
  MAP TO CHR14.3; EXPRESSED IN HELA, SIGNAL = 2.1; EXPRESSED IN PLACENTA, SIGNAL = 1.5; EXPRESSED IN BONE MARROW, SIGNAL = 1.4; EXPRESSED IN ADULT LIVER, SIGNAL = 1.6; NT HIT: AF161319.1, EVALUE 4.80e-01; EST_HUMAN HIT: AI290562.1, EVALUE 1.80e-01; SWISSPROT HIT: P42098, EVALUE 1.40e-01
aggcaagatcacctgcaaagcacagtagtgggaaaggtttggtacaaccatcacagagaatacatccttacagagagagcaagagatttgatctcatatgacaactctaatgagctggcttggggtattgtactgagaagaactctgagttctgcagaagagggcagccacaggtacaggaggggtcagtggcaggcatgtcaactacgtgccatccctataacagggaactgaagccagctgagttacatttctcctggatagcaataggggtattgtctgacctgagtgacaggcataccagatctctgcatgaaatggaaggcattctggaatgacacaggaccagggtgggggaactgagtacagaagacagattctggtagcccaaacactttggtcacatagagatcagtttctgcctgtactgtgacatggtcccattctgggatcaaggccggcaccaggggatctaagcaagaggatccaggaaggtggatagcaga

SEQ ID NO: 7550 - DNA, 548 bp, Homo sapiens
  MAP TO CHR19.3; EXPRESSED IN HEART, SIGNAL = 3.7; EXPRESSED IN LUNG, SIGNAL = 5.2; EXPRESSED IN BONE MARROW, SIGNAL =  13; EXPRESSED IN ADULT LIVER, SIGNAL = 7.9; EXPRESSED IN HELA, SIGNAL = 3.3; NT HIT: M17082.1, EVALUE 0.00e+00; EST_HUMAN HIT: BG768642.1, EVALUE 0.00e+00; SWISSPROT HIT: P13688, EVALUE 7.00e-65
gaagacacctgctcaggacccaaggccccatttttctaccctaatgcataggtcccaatattgactgatgctctctcctctctcctagcctcacttctaaccttctggaacccgcccaccactgcccagctcactactgaatccatgccattcaatgttgcagaggggaaggaggttcttctccttgtccacaatctgccccagcaactttttggctacagctggtacaaaggggaaagagtggatggcaaccgtcaaattgtaggatatgcaataggaactcaacaagctaccccagggcccgcaaacagcggtcgagagacaatataccccaatgcatccctgctgatccagaacgtcacccagaatgacacaggattctacaccctacaagtcataaagtcagatcttgtgaatgaagaagcaactggacagttccatgtataccgtgagtatttccccatgacctctgggtgttggggggttagttctacttcccacacatgggattgtcaggcctgggctgtgcctgtgtcctcctctgcatt

SEQ ID NO: 7551 - DNA, 566 bp, Homo sapiens
  MAP TO CHR16.3; EXPRESSED IN ADULT LIVER, SIGNAL =   2; EXPRESSED IN HELA, SIGNAL = 2.4; EXPRESSED IN LUNG, SIGNAL = 2.2; EXPRESSED IN BONE MARROW, SIGNAL = 5.1; EXPRESSED IN FETAL LIVER, SIGNAL = 1.6; NT HIT: gi14746518, EVALUE 5.40e-01; EST_HUMAN HIT: AA536209.1, EVALUE 7.90e-01; SWISSPROT HIT: P33837, EVALUE 9.30e+00
gagtcttcccttcctgtcccttcagggagcatctggaggcagccatcagtgggctgaacatcgtgatgctcaggttggccactggtcaggttgggtttggcagaggttggccatcgtagcggaattcacttatcaggccaggtccagggacaagtaacaggacattatgacagatgcttcgtggagctggaaatattaaaagcaacagccctctgctgacattcgtctccagaacctggtaagacttgtaagtttggagacagggcccatgaacttgcccacttgctgggctaagatggcagagtccccaagggagaaactggaggtggctctagtcctggtgcttgcgatcctcatttgagagggagggtgcttcccagccaggagtgggaagggcactggagtggtcccagcttgttccactgtggctgctgggaaaggccttggctatcctggaattttctagaataactcatctatgtatctcaaagaggagacgggagttccagaagaagcacctctccttgccaaggagacaaaacttgagagggtatgtagggagccct

SEQ ID NO: 7552 - DNA, 523 bp, Homo sapiens
  MAP TO CHR18.3; EXPRESSED IN PLACENTA, SIGNAL = 5.3; EXPRESSED IN HEART, SIGNAL =  18; EXPRESSED IN HELA, SIGNAL =  49; EXPRESSED IN BONE MARROW, SIGNAL = 1.1; EXPRESSED IN FETAL LIVER, SIGNAL =  49; EXPRESSED IN ADULT LIVER, SIGNAL = 6.6; EXPRESSED IN BRAIN, SIGNAL = 4.6; SWISSPROT HIT: P19945, EVALUE 1.00e-23; NT HIT: gi13637300, EVALUE 1.00e-63; EST_HUMAN HIT: AA314634.1, EVALUE 4.00e-61
ctctctccaggcatcctttgagaatgacatcatctttaaaactctgcatggcaatccctgacacactactgtgatgcccagggaagacagggcaacctggaagtccaactacttccttaaggtcatcgaacatttggatgattatccaaaatgcttcattgtgggagtgaacaatgtgggctccgagcagatgaagcagatccaaatgtccctgcaagggaaggctggtggacaagagcaccatgatgcatgaggctatccaaggacatctggaaaacaacacagctctggagaaaccattgcctcatttcatttctgggggtatgtaggttttgtgttcaccaagtaggacctcactgagatcagggacttgctgccacttatgctggtgctattgccccatgtgaagtcactatgctcacctggaaccctggtctggggcccaagaagacctttcttacaggttttcggcatcaggaactaagatgttcaggggctccgttgaaatcctgagtgaggtgcc

SEQ ID NO: 7553 - DNA, 501 bp, Homo sapiens
  MAP TO CHR14.3; EXPRESSED IN FETAL LIVER, SIGNAL = 1.4; EXPRESSED IN ADULT LIVER, SIGNAL =   1; EXPRESSED IN PLACENTA, SIGNAL = 1.1; EXPRESSED IN HEART, SIGNAL = 2.5; SWISSPROT HIT: P09896, EVALUE 8.00e-34; NT HIT: gi16306559, EVALUE 2.00e-58; EST_HUMAN HIT: AA490146.1, EVALUE 1.00e-126
ctgaatggctagcatccccttggatctgcagttaggctccctacattccagccttagcacaatcatctgggtagtttcagccttcttccagaaaatcagttttgtctgcccaccgtagccactctgcttctgatcacagcgcatcttcccctgggcataggaggaatccttgcccttatactggggcactttgtaaggctgatgcttgccacacttcttacagaaagctcttctggttttaggcacattgaccatatttgcaatagagctttctacacgatgaaaacaggaagtttggggtctgcaattcttgcttcacctggctcgtgcctaacaagaaagggaggaatcaatactttctttcaaaggcatttcatctgataaactctcagcccaaggcatgacagtcaatttctgtagataataaaacctctcggggtcaataaggagatacccttaatatctaagtgtgtgactggggtcatattcatgcagtataga

SEQ ID NO: 7554 - DNA, 571 bp, Homo sapiens
  MAP TO CHR19.3; EXPRESSED IN ADULT LIVER, SIGNAL = 2.4; EXPRESSED IN LUNG, SIGNAL = 3.3; EXPRESSED IN FETAL LIVER, SIGNAL = 2.8; NT HIT: gi7019410, EVALUE 0.00e+00; EST_HUMAN HIT: AI654760.1, EVALUE 0.00e+00; SWISSPROT HIT: P29128, EVALUE 6.30e-01
atggtaagtgtggggtctgggctctaagatctcatgggtagaatattggtgggggggtcctgtgagctcacctgaccccaaccacacctcctcctgaagggcatggccttgcagcagcgagctggggaggagcgggcgcctgcccatgcccagtcattcctggcacagcagcggctggcaaccaattctcgccgtggacccttgggacgcctggcatctctgaaccttcgccccactgacaagcactgacagacctcacaatcaagccagcctgggctccacccaccctggcttcctccagctcacatggcgcccagcactgggcttcagccaggtgctcgagagctttgaggccatgatctctgctcttccctctcccagattggtggggagggagggcgggaggtagatataggcctgttctttttagcaatgtgattcttgttgttgattctctctctggagttcatgtgctgcctcaggagactctgattttatatttgagaaaaataaaggcgttcaatctgccctggctgtgctctgggcaccaaggtgagggagagaaagtggg

SEQ ID NO: 7555 - DNA, 558 bp, Homo sapiens
  MAP TO CHR16.3; EXPRESSED IN ADULT LIVER, SIGNAL = 3.3; EXPRESSED IN BRAIN, SIGNAL = 3.3; EXPRESSED IN HELA, SIGNAL = 2.6; EXPRESSED IN PLACENTA, SIGNAL = 2.7; EXPRESSED IN HEART, SIGNAL = 2.3; EXPRESSED IN LUNG, SIGNAL = 2.1; EXPRESSED IN BONE MARROW, SIGNAL = 3.7; NT HIT: gi14780326, EVALUE 8.30e+00; SWISSPROT HIT: P08659, EVALUE 1.00e+00
  unsure 273
caagaatccttccctcctcctcactccctactcctactgattgccagagtgtcagagacctgaaattgcctcttttctcacatgactgacccactcgtatgagtcaggagtgcctggattaaaatgtggtaaaaaagagccccaaatgtcatatgtcattggcttcaaccaaaggtttattactcacatgcacttcacatccagcagagcttggtgcagaattcggggtgtaggggccccaggcctcaatggacaattgactcctccatcatntgtcactcaggtcctggggctgaggaagcctcctccatctcatgccactggcgtctccacacaaagcttccagatcctgggaagagaaggctggagagtcaagccggctcataccttactggccatgactagtcagagaaacaaggaattacgaccctccacgtgtctggaagtagaagagaagtggcttcaggtgacctgtagtaacctgtgcagactgagcctttgctttttgatcctgttgtgcgattcctttccaagtccaggtgcttttgctcttcttgg

SEQ ID NO: 7556 - DNA, 582 bp, Homo sapiens
  MAP TO CHR16.3; EXPRESSED IN FETAL LIVER, SIGNAL = 1.2; EXPRESSED IN ADULT LIVER, SIGNAL = 0.92; EST_HUMAN HIT: AA088309.1, EVALUE 7.00e-66; NT HIT: gi14778830, EVALUE 5.00e-66; SWISSPROT HIT: O84077, EVALUE 5.60e+00
atatgggtcaaacccacttgtacttttttgttttaggatgcactccagaaattgactgaaattctcaatttaaatggagaagtagcttgccaggactcaagccatcctgccaaacacaggaacacatctgcagtcctaggctgcttggccgagaaactagcaggtaactttgggacactccacagtggaagatcttaagttgtttgacattaaagggaaatttgtactgtatgtctttgatcaaactgctataccagaaagaaatctcttaaaaatgatattgagagacatagactaactggaagaaaattactgaaaggctacagaggtgaatgcaatttaatttagctttgtggattttcaggggaaattttaaaagaaaaaagttgtgcttatttgctttaagaataaggagcgaggaaaagaaaaaagggagaaaagctaaattcagcataacaaagatatgtatgtgtgtatacaatatataatttgcatatatacacactttataaagtttagctcgattatgaagacatacaaggtagagggagaggaaaaggaacttctggttggagcagttcc

SEQ ID NO: 7557 - DNA, 589 bp, Homo sapiens
  MAP TO CHR16.3; EXPRESSED IN BONE MARROW, SIGNAL = 1.4; EXPRESSED IN ADULT LIVER, SIGNAL = 1.3; EXPRESSED IN BRAIN, SIGNAL = 1.3; EXPRESSED IN PLACENTA, SIGNAL = 1.1; EXPRESSED IN HELA, SIGNAL = 1.3; SWISSPROT HIT: P57772, EVALUE 9.80e+00; NT HIT: gi9964314, EVALUE 8.80e+00
gtgattgtaccttcccctggcagggcccacgcaccaaccttgctcgtttatctcccccttggcctccaacatcagagtacttgtagagccttataatgtgctaaacattaatattcactaacttgctccagggagctatgcttcgccgagcgcattttcacctgaaaggagttgtttaatataaacatttggttaatattctgtacatttgaaagtattttatcagcattggtgtaggaccaaaagtcatttaaattcaatgggaactgattatgcgccaagaaccagtcctttgcaaaagagtgtgtttcccccctaatataatgtataaattatcaaactcacttacacggttgatgggaacactttgtggacaaacctgcaggcctgcatttcttctgactgagtattcatcagctctgatgctggtgttaaatggggaaaaatattatacaatattgctttaaaaactgtctaaatataattatcaacatctctggagtgataataattatcataacaagacttcatcagaggaaacacatggtttgacgaggatcctctactctcgagttactgccacctcaca

SEQ ID NO: 7558 - DNA, 550 bp, Homo sapiens
  MAP TO CHR19.3; EXPRESSED IN HELA, SIGNAL = 1.3; EXPRESSED IN BRAIN, SIGNAL = 1.2; EXPRESSED IN ADULT LIVER, SIGNAL = 1.4; EXPRESSED IN PLACENTA, SIGNAL = 1.4; NT HIT: gi14756192, EVALUE 0.00e+00; SWISSPROT HIT: P40198, EVALUE 2.70e-01; EST_HUMAN HIT: AI721225.1, EVALUE 1.00e-105
aaacatttactgccggatggaccacaaagcagaagtggcttcttagcttccgccaggagctgctcctgtgggttgatggagagtccccaaggcccccagccctggggatggggaaggacatgaagcctgagccagagaaccagctataagtcctgagaagacactggtgtctggggacagggagggatgggggtccctgatgaatatctggagacctcgacagcctgccctaggccctgggtgggtcaggacaaaggcctctcatcaccgcagaaagcgggggcttgcagggaaagtgaatgggcctgtggcccacctggggtcacttggaaaggatctgaataaaggggacccttcctctcattagctgtttttctgctagtgggaacttagcaaaaattcgcctgaaactccatatccattctctcctgggtcacacaaggaaaatgtcatctccaacttatttcaaccccagtctctcttccctgggaggcagaaatagggggttgggagtcaggctggggtggaccctacacaggaaagggcagga

SEQ ID NO: 7559 - DNA, 600 bp, Homo sapiens
  MAP TO CHR14.3; EXPRESSED IN ADULT LIVER, SIGNAL = 1.1; EXPRESSED IN LUNG, SIGNAL = 1.4; EXPRESSED IN BONE MARROW, SIGNAL = 2.6; EXPRESSED IN FETAL LIVER, SIGNAL = 2.2; EXPRESSED IN BRAIN, SIGNAL = 1.6; NT HIT: gi4505760, EVALUE 2.00e-37; SWISSPROT HIT: P49763, EVALUE 1.00e-09; EST_HUMAN HIT: AU140903.1, EVALUE 9.00e-47
ccccagaacgaagttcagacttgcaatgtctttgcctccaggcacctctttcagaggcccgtggcagctgcctcccatcccagagaaggggaacgacacgcaccgaacccctgcgaggctgggagggacccaccctctctcttcccttgcagtatctcaacagctgtaccccagctgctgggaccagctcccttggcaaaactggctggtggggggacaaaatgaatggtagccacccctggtcctgccctcttggtctccctcagtctggaaaaaagttcagcccgcagcggggatgggcagcctttgcctctgccctgggacccatctttgctgaggctgccaagaggacgggggcctttccttgctacccacccgaccccggagacctaccggcattcgcagcgaacgtgctgagagaacgtcagctccacgtaggagggccggtccccagaacggatctttaggagctgaaggaagaaagagttgatgcctggattggggagtggcccacgagtttccggcactcttctctctctccttgtaaggagaacccgactctgtttcctgctagcctgtggactacaggccctcactcca

SEQ ID NO: 7560 - DNA, 547 bp, Homo sapiens
  MAP TO CHR18.3; EXPRESSED IN PLACENTA, SIGNAL = 0.88; EXPRESSED IN HELA, SIGNAL = 1.4; EXPRESSED IN ADULT LIVER, SIGNAL = 1.1; EST_HUMAN HIT: BI856936.1, EVALUE 4.00e-52; NT HIT: gi14763498, EVALUE 2.00e-52; SWISSPROT HIT: P50520, EVALUE 1.00e-02
atgtggagagtgaagggacgatgttttaagaagctgtaatgacgtgtgtattatgggactagtggagtttaaggcatacttagtttcccagtcttgagaaggatacatatttttaagatatgtagaagactgctaaagttgtatcagaacaaaacattagatattattaaatgctcctaagtaccttttctatttatgaatagcttttgaaatttccttttggtgaagtttacattgtcaatattttaaaataatttgtaggagaatttagttgagagcaaacaccacaagcttgcccggagtttaagaagtggaccttctgaccacgatctgaaacccaatgctgccacgagagatcagttaaatgtaagagaattatgaaatattaatttaaaaatagttaaatgggtgttctggttgaaactgatagctatcacctcacttaaaaattatttagatgcacattttctccaggttgatgaatcctacatcatgttcataatttcacagatcagcagttctgttatcatttggggctttccataaa

SEQ ID NO: 7561 - DNA, 552 bp, Homo sapiens
  MAP TO CHR14.3; EXPRESSED IN BRAIN, SIGNAL = 2.1; EXPRESSED IN ADULT LIVER, SIGNAL =   2; EXPRESSED IN PLACENTA, SIGNAL = 1.8; EXPRESSED IN HELA, SIGNAL = 2.2; SWISSPROT HIT: P30842, EVALUE 3.00e+00; NT HIT: AL163282.2, EVALUE 9.00e-03
ataaaaagtcatgggggcagagaattgtttactccaagagcatccatggaacagaaataaaagggaagggaataaagccaaaggatatgcaaaatatctactcactgcagggcatgctcctcaagcttggtactcagtatcatttacctcaattaagtgtgagcagctcaccttgtaagactccccagcccatgtcacctggctttgagactgtcaactatctctgggttcagtcacatcaagaatctgttcataggaataatcaggttgtgctggctgagagcatgtgagcaatttctggtgcgtgagcctgtgtgcgtgggatgccttcaaatccatttcatttgggcagctgcttatcaagacttttccccagaaaccgatttagtctaatgattgtgagtagcaatgacttctgcttaattagtatggtaatcagtgcaaattctccctaaatggtagagacccatttggcaggtgccaaatgatgcttaaccaggtgctaaataggtgtgaaagcctcagttctggtctttcccagctagttgccaa

SEQ ID NO: 7562 - DNA, 569 bp, Homo sapiens
  MAP TO CHR16.3; EXPRESSED IN HELA, SIGNAL = 1.3; EXPRESSED IN LUNG, SIGNAL = 1.3; EXPRESSED IN BONE MARROW, SIGNAL = 0.96; EXPRESSED IN ADULT LIVER, SIGNAL = 0.98; SWISSPROT HIT: P54913, EVALUE 4.20e+00; EST_HUMAN HIT: T91374.1, EVALUE 2.00e-04; NT HIT: U29186.1, EVALUE 5.40e-01
cattctcccttctcactgcccctaggttgctgagcaacccagaatgcctctcacctcagtgcgcagggaacaatggtttttcagctcagggcttgagaagggcaaagagggaatccaaaagcagaaatatgggcaacccttcagaatgggccattgttcagctgggagcagaaagggatttgcaacagacaaaaagagaaggtacaccttttgtcaggaagggattgtaaaaccatccatgagaacacatgcccaaagcattaaaattgacatcacaaatacggttgatagaacaagacagcgggacatattgcaaacagaatgtgacagacaatgtctatgaagaaaacaatggtcaacaaaacggtgccatacacacattataaggagatattatgcagctaagtgagaaggacaagttgcaaagtcctgtgtgtaatatgatccatttaaagcaaacattaacgacttgaaaagcaagtctatgtttatgtgtttgcatatatatataaaatcatgaagaacagtgtgaaaagttaccttttcagaccttgttggaaaggtgatcc

SEQ ID NO: 7563 - DNA, 588 bp, Homo sapiens
  MAP TO CHR16.3; EXPRESSED IN ADULT LIVER, SIGNAL = 1.9; EXPRESSED IN HELA, SIGNAL = 3.9; EXPRESSED IN BONE MARROW, SIGNAL = 1.4; EXPRESSED IN FETAL LIVER, SIGNAL =  11; NT HIT: gi14743619, EVALUE 7.00e-90; SWISSPROT HIT: P29341, EVALUE 4.00e-42; EST_HUMAN HIT: AW373826.1, EVALUE 6.00e-88
ttgaaaaatatgcccaagccgctcctagctcactacatttagtagtaagagaccagcttcttcatagcttccatgagtcatgtcaacacagctgttgtaacccatcgaaacagacaataggagcacatcctgcagttgccgctactgctactacagatactcctgctttttgtaccatttcacagtataaatatgctatggaagctcacaatcctcaatggcattttcatgcacagccccaggttaccttgaagcagcctgctgttcatgtagaaggtcaagaacctttgacttccatgatggcatctgctcctcctcaaaagcaaaaggaaacgagtgaatggctgtttcctcttcttcaagccatgccctagtcgtgctggtaaaatcattggtatgttgttggagattggtaatttggaactccttcatatgcttgaatctccagagcctctctatactaaggttgacaaaggtatagctgtactacaagaccaccaagctaaagaggctgcccagaaagcagttaatggtgccactggtgttccaattgtttaaaactgatcagggaccacagaaagaaacttg

SEQ ID NO: 7564 - DNA, 539 bp, Homo sapiens
  MAP TO CHR14.3; EXPRESSED IN ADULT LIVER, SIGNAL = 1.1; EXPRESSED IN LUNG, SIGNAL = 1.1; NT HIT: U43842.1, EVALUE 0.00e+00; SWISSPROT HIT: P12644, EVALUE 2.00e-58; EST_HUMAN HIT: BE867398.1, EVALUE 0.00e+00
aagcagctctgttcctcagcctcctggactggggctttgatgtaacccgaactcttcttccccagggctttcactgcccctctagccagtcccaccagccctcccccacgcagactgggggaagagactgaccttcgtggtggaagctcctcacggtgttggcccggctggccgggcgctcaggatactcaagaccagtgctgtggatctgctcttcctcctcctccccagactgaagccggtaaagatcccgcatgtagtccggaatgacggcactcttgctaggctgcgggcggcggcgcagcccaaacatctgcagaagtgtcgcctcgaagtcccgcaggagctcatggctctgccctgagcggcgtcctcccgcgtggccctgaatctcggcgacttttttcttccccgtctcaggtatcaaactagcatggctcgcgcctcctagcaggacttggcataataaaacgaccatcagcattcggttaccaggaatcatggtgtctctggggagggggaggggagtggaaggttaa

SEQ ID NO: 7565 - DNA, 502 bp, Homo sapiens
  MAP TO CHR19.3; EXPRESSED IN BONE MARROW, SIGNAL = 1.6; EXPRESSED IN ADULT LIVER, SIGNAL =  11; EXPRESSED IN BRAIN, SIGNAL = 1.3; NT HIT: gi14767694, EVALUE 0.00e+00; SWISSPROT HIT: P78329, EVALUE 2.00e-36; EST_HUMAN HIT: AI761193.1, EVALUE 1.00e-109
tgaccttccctttctcaagcatcttccatggctcccagtgccctttggatcaaaaccaatttatttcacctgacatttgacatgaagctctattctctcacctaaactcagatcatagagaaacctaccttgctcagcagaagcacatcaatgaaatccaaagtcttggacttggctttgtctttgaaaaaatcatcaataccctgagtggggagggtgcgacgccgctcctggatgagagcgtctgtgaagtcgtgcaccaggcggcaggccctgcgaaagcgccgcccatcatgggagaggtaatacagaaagtccatgtgctggaggatatgctggcttcttttctctacaagggcactgagctccaagatggtggcaatatattcactgggcctcctgcagagcaagggcagaaagggaggcaacaatgtaacgtctgcaaagccccaggaacacctcccaccagcagccaggagctacctcccatcaggaaactgag

SEQ ID NO: 7566 - DNA, 566 bp, Homo sapiens
  MAP TO CHR16.3; EXPRESSED IN BONE MARROW, SIGNAL = 1.1; EXPRESSED IN FETAL LIVER, SIGNAL = 2.4; EXPRESSED IN ADULT LIVER, SIGNAL = 0.93; EXPRESSED IN PLACENTA, SIGNAL = 0.96; EXPRESSED IN HELA, SIGNAL = 1.4; EXPRESSED IN LUNG, SIGNAL = 1.2; EST_HUMAN HIT: AW386461.1, EVALUE 0.00e+00; NT HIT: gi15297223, EVALUE 3.00e-30; SWISSPROT HIT: P39028, EVALUE 7.00e-04
aagctaaaataaaaatttcggggaaaaaaatttagggataaaaccttggtgaagttctgattgctggatttggtcacaaagatcatgctgttggtgacatccctggggtccgagttaaggttctcagagtagtcagtgtagctctcccttggtcctatgcaaaggcaagaaggaaagaccaagataatacattttgatggtgaaaacacagtagaaatatatttttataagccaaaggcaaagagatgtgtcagcgagtcacattaggtgttgaggctatcctgttactgaactgatggtaatggagaggactgaggatgagaaaagaagccactcctgtgacttgctgggatctaacgccacatcgcttcccagcacctatgattctgtctctgtgtgggtggcaccgtggtgtagatggacaagacttgactctggctgtgaggcacagctactgtaaagaacactgcgttttgatttatgggcattttttttttttaaaggacagcagccccgagatcatgcctgcgagcctttgtaggcaccgtaagtagggctgcaggcat

SEQ ID NO: 7567 - DNA, 548 bp, Homo sapiens
  MAP TO CHR16.3; EXPRESSED IN ADULT LIVER, SIGNAL =   1; EXPRESSED IN BRAIN, SIGNAL =   1; EXPRESSED IN PLACENTA, SIGNAL = 0.96; EST_HUMAN HIT: BE886099.1, EVALUE 1.90e-01; NT HIT: X01038.1, EVALUE 2.10e+00; SWISSPROT HIT: P06425, EVALUE 7.80e-01
gtgagctgcctggactaaggccctccagacagcttgggcgggggatcctcatgcccactcccacccctatccctgcctcaggcccaaggaggcctcctgaagcctcttggctctgttattgcccctctccctttcatacaacccttggagcgagcacctgagtgccctgtgataaagatagcatttcgacttgaaagcataattgctgacacacattactgtttccccggaggacatcagtccagacaaatcctctacaaacctaggacagcaaacttggcagtttatgatggaagcctgtgtgtagcttgtggtctccctggtgaagtagctctgtctcctttttaggactcgggtccaaacacctgccacgccagcaacagcctcaacccttccccctctgctctccctgacccaggtgaaaagcagcagctgctgactgctggcactgcccgtcccatcctgccatgcccatcaccaggattcagagctcaaaggcttaggtgaagctctgctcgcccactgcaccatttggagattccagggaa

SEQ ID NO: 7568 - DNA, 592 bp, Homo sapiens
  MAP TO CHR16.3; EXPRESSED IN ADULT LIVER, SIGNAL = 1.8; SWISSPROT HIT: Q9QYM0, EVALUE 4.00e-05; EST_HUMAN HIT: BE869517.1, EVALUE 9.00e-04; NT HIT: gi14777311, EVALUE 1.00e-85
aggaagagccaagtcgtctggcatggcccctccctaccacccttaggcatctctggtcattatcccaccaagagattgtcttttaacctatccactggtttgcccagcgcagcttcacctttggacatttttgtctgaggcatcatggactgacagtggagggatggtgttctcatctaagcgactccgtaagctttggatcatgagcggggtgagccatgacacggtgaggtaggagaacaggccagcattgtccaggggctggggggcaggaaacctagtagaggggccacaaggataagaatgaattcaggatcaagattttgcaaggatgaatgacaaccatattaaaacacaacgaggttacccagatctacacacaaacatgttttcatgactcttatttgtaagttgaaaatcataaacaacaaaagtgcccattaattgaggaattatttaaacaaaaagagagaaattatgatctacccatactataaaatgcaaatgcaatgtagatgtttggggttttttttttttcaataaggtttgtttatatgtaaaacacaggaagagttccaagcaaaagccaaaa

SEQ ID NO: 7569 - DNA, 554 bp, Homo sapiens
  MAP TO CHR18.3; EXPRESSED IN BONE MARROW, SIGNAL = 3.2; EXPRESSED IN ADULT LIVER, SIGNAL = 3.4; EXPRESSED IN PLACENTA, SIGNAL = 2.7; EXPRESSED IN HELA, SIGNAL = 5.6; SWISSPROT HIT: Q06393, EVALUE 5.30e+00; EST_HUMAN HIT: BF958397.1, EVALUE 0.00e+00; NT HIT: AF305057.1, EVALUE 0.00e+00
gtgttgtcatctgtgccacctgctcatcactgtcaccgtatttcatcctgatgcttcatctcccacttatcagtcgctgtgacagtcattccctcataaatggcgagccagtgtgattttgacctgactcacactgttgcattagcagatttgtaaagaagtgagcacaaggtccctgcccacgctataaaagctcgcctcatgcccagcgagaacaaagaagaaatacagtctgggcttcctgacggccactgatgaataattattggcatagagtggctgcgttgccaggtttagagatcctgaaggccaaggctgactcttctgttggtgttattttcaattctatttccagtgccacaatagagtgatatttaagcaactcctacaggcgaaggccctgcagttcctccagattgacagttgcagactgggcagtgtcaatgagaacctctcagtattgctgatggccaaaaagtttgaaagtaagcgtgctgcagcggctgcagaccagaccttcatttccccactaatcagacacctcccttgatggt

SEQ ID NO: 7570 - DNA, 561 bp, Homo sapiens
  MAP TO CHR19.3; EXPRESSED IN HELA, SIGNAL =  22; EXPRESSED IN ADULT LIVER, SIGNAL =   2; EXPRESSED IN BRAIN, SIGNAL = 1.9; EXPRESSED IN PLACENTA, SIGNAL = 0.9; SWISSPROT HIT: Q9Y4Z0, EVALUE 8.00e-16; NT HIT: AF251218.1, EVALUE 1.00e-101; EST_HUMAN HIT: AW082613.1, EVALUE 0.00e+00
gtccactggagaggggagacccacctcggccagcgccgcccatgccgcggcctttctgctgcttctgctgctgcaggcctccgcggccgcggcccttggccaccacctcctccttgaccatgtcgatgatctcgtcggggatgcgcaggtacttgatggtgctgccgcggatgtagcactcgggcatccgccagaacttgtccccgtcctgcggagaaggggagcaggttattaacttaccaccgggccgtctggcccagccctgggagcgcgggaggccctgcagatcctgcccagcctgcaccccgtaccacccctgcaagctgcacagtatcagtcccgggacatacgtggcaaagggtccaccctgcaggcaggatctgtcctgaccccaggcaatccttcacccaggagcaagggtgggtgtggtaggcgcagcccccattgtgcactcacaaggaagactggctcctatcctctgcccgtgggcctggctcaggagtggctgactggggctccctccagcctgggatggggctctctctggttggggttcttcac

SEQ ID NO: 7571 - DNA, 547 bp, Homo sapiens
  MAP TO CHR18.3; EXPRESSED IN FETAL LIVER, SIGNAL = 2.2; EXPRESSED IN BONE MARROW, SIGNAL = 1.9; EXPRESSED IN ADULT LIVER, SIGNAL = 2.6; EXPRESSED IN PLACENTA, SIGNAL = 1.9; SWISSPROT HIT: O61735, EVALUE 5.10e+00; NT HIT: AL163203.2, EVALUE 0.00e+00; EST_HUMAN HIT: AI003268.1, EVALUE 1.20e-02
gttcttcctgcaagagctggtgagtgtgcactgaaagaaagtgattctttgtgctttcagcaggggtggtggatccatccctgctgaaaatgagactgtgcctgctgtggctttcacaaggggtggggtccaactcccccttccaacacagagtggcagcaccctgacaacagaggatagactacaaagttgtgtgtcctgtactggaggaagaggttctaccctgaccctcgttatagtggtagccatcagagaggcagatccatggcccacaaaggcactgtgctgggaactaaaggatgaagattttacaaacaaggtcatgagacctgtgacagggatatgatagggaagcagactgcatttcttctagttcaggatgaagagctggtgcacccctccatctctttcctggaggcttcagggcactccatcatgatctcttcccaccatgctcatcagtgcaaattcatccaatgggcagcagcttacctgccatatcatactcctaagtgctatatactggactacagcctgaaatgcacca

SEQ ID NO: 7572 - DNA, 552 bp, Homo sapiens
  MAP TO CHR14.3; EXPRESSED IN PLACENTA, SIGNAL = 2.7; EXPRESSED IN HELA, SIGNAL = 1.8; EXPRESSED IN BONE MARROW, SIGNAL = 1.7; EXPRESSED IN BRAIN, SIGNAL = 2.7; EXPRESSED IN ADULT LIVER, SIGNAL = 2.2; EST_HUMAN HIT: BF196382.1, EVALUE 5.00e-02
acatgttggcagatgactggtactgagcacatgctgaccttctaacaggatcagagaaacccagtttgtgtataacccatccttgctacatagcaaattattgtcattacttgcattacacaaagctgcttgatatacattaaagagaaccttttgaactccgcactcatttcttttctcttttcccatttttctgacttctatagtgagactgccatgtagtcttatcatatgtgatcatactttggacagttaatgaatatgaatgttgtttgtgctaactcttgcagctgtaaaaggctagatatggaatcagtgccagcttttatcttaagaaaagtttcaggaaataatgcaatgtcgggtctgtcagattcaaaggggacatcagggtcgagagaaatgagtcttgtatgtaactttttcctcttgttcccctaaaaggaaaagaaaatgaaagttaagacaggattcccctttctctttttgcagattcaaaagtatggtaaaaattatcagaaaaatatttgcaggctcaaacaactgccctta

SEQ ID NO: 7573 - DNA, 572 bp, Homo sapiens
  MAP TO CHR16.3; EXPRESSED IN ADULT LIVER, SIGNAL = 1.6; EXPRESSED IN PLACENTA, SIGNAL =   2; EXPRESSED IN HELA, SIGNAL = 3.3; EXPRESSED IN BONE MARROW, SIGNAL = 1.5; EXPRESSED IN FETAL LIVER, SIGNAL = 1.1; EXPRESSED IN LUNG, SIGNAL = 3.9; NT HIT: gi14779692, EVALUE 0.00e+00; SWISSPROT HIT: P79100, EVALUE 1.90e+00; EST_HUMAN HIT: BG742636.1, EVALUE 0.00e+00
gacaggactgttggggagacaataaagaacgcaaatattcagtgtaatttttgtctcttcacactcaccacatgcagatccggggtcggggcagcggcggctgcggaaagaaagcgaattggggaaggcagctgcggtgtcctggcccgtagcgaatctccagcaggccggagaagccgctgtaacttgccatctcatctcaaggactaaggagaggcgcgggcgagggagggcttcagcaggccctaggtgctctacgcgagcacagtaaccaccggggtcacacacccctgcctctcctcgcccaagcagcccgggagacgtcccgaacgttagtaagcataatgacaggtggcgcctgcgggggagccggtttataaatattcacgagcagaccagactgtcccgccctcaccggaaacaagttggctccggggtcttcatccgctttcgccgccgccgccgtcgtccactgagtccgcacactcgcacgcgtccgcgcggccgacccatgcactgagctgcgatccttccccgcttcccgccgcagctcggagagatgttcaagctcc

SEQ ID NO: 7574 - DNA, 553 bp, Homo sapiens
  MAP TO CHR14.3; EXPRESSED IN HELA, SIGNAL = 2.4; EXPRESSED IN FETAL LIVER, SIGNAL = 3.1; EXPRESSED IN BONE MARROW, SIGNAL = 2.2; EXPRESSED IN ADULT LIVER, SIGNAL = 2.4; EXPRESSED IN PLACENTA, SIGNAL = 2.2; EST_HUMAN HIT: BG612260.1, EVALUE 2.00e-01; NT HIT: gi14786711, EVALUE 1.30e-01; SWISSPROT HIT: Q92093, EVALUE 4.00e+00
attttcacatggggcttcaggcaatgtggcagaattatatgtgagatattttgaggcaagacaaaccttgcagcatccctcaactcaccccatgacaccaactgcctcggcagggacactgctcttgcaagttccaaagtcagtggagcatttggtgacgttatcgtagcagaaagccataatgttttagatcctatttattcaaattgcttttccaggctttcatcatagggctgcttttagagctgtactggatagggtttaatttgcaaatctgatggggggatatgacaacaatgatagtggacttctaagaaaagtggatctagttcatattggtctccaggttcctaggagaccagaaaataatggctatagtacttgatttaccctttgagaaaaccattgctcactgaggtttgaatctgcttctactgtgtcctgttaaaactctcaggacctactctcccttgagtaaaagtgttaattacatttttaaagctgtaaactcaacacaatgttcttggaagacagtgggaggatgcgtaagtgt

SEQ ID NO: 7575 - DNA, 561 bp, Homo sapiens
  MAP TO CHR14.3; EXPRESSED IN BONE MARROW, SIGNAL = 3.3; EXPRESSED IN BRAIN, SIGNAL = 3.9; EXPRESSED IN ADULT LIVER, SIGNAL = 3.3; EXPRESSED IN PLACENTA, SIGNAL = 3.4; EXPRESSED IN HELA, SIGNAL =   3; EST_HUMAN HIT: BG827743.1, EVALUE 3.00e-03
tagagcgagaggcagagaggcagagcgcagtgtgaggcctgctcatgttgacagaatttgccgtaacgaaatgagtccgtgctccgtgtcatctattaccgaatttcagtaaggtctctggcacccacgacgcccaggagggtaagcctctccttggtttcctatttctgtctcctgattgccagcacatctaggattttttgaaactctaattggttgtcttgatttacgcagagttcccagcgatgccaacggaagaaggcctgtagttgctgaagccagagtcaccagtgtggatctccacttcttcccacctcctcaagcccctcccatacctgtgtttagaaacttcacaggaagcagagttggcaagcatacctgagctgattgctctcgcctctctcaccatcttgagtacatcatcgtcaccctccagagccctcctaaacaaggtttggcaacagcaaaaacaaacactattttacaacatctttggatgcacttccaaaacgcaaaagcaattaatcagtcatctccctgagactctcctcaaggtggctg

SEQ ID NO: 7576 - DNA, 519 bp, Homo sapiens
  MAP TO CHR19.3; EXPRESSED IN HELA, SIGNAL = 1.7; EXPRESSED IN LUNG, SIGNAL = 1.3; EXPRESSED IN BONE MARROW, SIGNAL = 2.3; EXPRESSED IN ADULT LIVER, SIGNAL = 1.5; EXPRESSED IN BRAIN, SIGNAL = 1.9; EST_HUMAN HIT: BF740696.1, EVALUE 5.00e-42; SWISSPROT HIT: P24447, EVALUE 2.80e+00
gtgagcagttgaggggagtccattgatttctctcagaggggaccaaagtccaggggatggggatggtgaaatttatcacagcttcagcctttcctaaagcagcatgatacagcagactttacacttggatccagatcagtctagatctggatctggacctgaggcaagtgactcaactctgagctttaggtttctaaggctaaaaatgtgtgtagtgacaagattgtgtcaggcactatgttgtatatcctcatgataacccaaataccatggctagcacttaatagttgatattcatccagcctgagtctcctgttccttcttgtgcacgagccagctgggaggctggaacatgccagagggcatactaggggttaacctcctgccctttctcatgtccccccagtgtgcacccaactgctggtgtcccgaccagacgaggagaacatcaccagttacctccagctcatcgaaaagtgcctgactcatgaggtaaggccttccctagcatactcaaaa

SEQ ID NO: 7577 - DNA, 546 bp, Homo sapiens
  MAP TO CHR14.3; EXPRESSED IN FETAL LIVER, SIGNAL = 1.9; EXPRESSED IN LUNG, SIGNAL =   5; EXPRESSED IN BONE MARROW, SIGNAL = 1.1; EXPRESSED IN ADULT LIVER, SIGNAL = 0.96; EXPRESSED IN HELA, SIGNAL = 4.7; EST_HUMAN HIT: BF332448.1, EVALUE 3.00e-83; NT HIT: U53530.1, EVALUE 1.00e-115; SWISSPROT HIT: Q14204, EVALUE 1.00e-51
catttaaagaaatgttggcaagctaaatagcatcttatgtttctctcgacagcttcgacaaaatttggatgccctcctgaaccagctgaaaagcttccctgcccggttgcgacagtatgcgtcctatgagtttgttcagaggcttctgaaaggttacatgaaggtaggtggccagtatcgcacggtgatgagtgtccattagaaacgcacctgcacagatcactttgtttactttctccacagataaatatgctggtgattgaactgaaatccgaagcacttaaagaccgccattggaaacagctcatgaaaaggcttcacgttaattgggttgtttctgagctaacccttggccaaatctgggatgttgacttgcagaaaaatgaagcgattgtcaaggatgtactgcttgtggcacaaggggagatggctttggaagaatttttgaagcaggcgagtaataggactgaacggctgctttacgttgtgtttcgggctgttacatagatctgagctatgtaaaaatggagccttgtcatctgtggt

SEQ ID NO: 7578 - DNA, 591 bp, Homo sapiens
  MAP TO CHR18.3; EXPRESSED IN ADULT LIVER, SIGNAL =   2; EXPRESSED IN PLACENTA, SIGNAL = 1.2; EXPRESSED IN BONE MARROW, SIGNAL = 0.78; EXPRESSED IN BRAIN, SIGNAL = 1.8; EST_HUMAN HIT: BF746564.1, EVALUE 1.00e-109; NT HIT: gi14140237, EVALUE 1.00e-112; SWISSPROT HIT: Q99728, EVALUE 2.00e-06
ggcattccttgtgtttcaggagattagcatattaccaataaaaacttttaaataagtatacagaatatttagcctagaacttctgctaactttcttctttcttacagattccacaccaaatcatccatcacaaacaacgcctgcccaaaagaaaactcccagttcttcatctcgacagaaagataaagttaataaaagaaatgaacgtggtgaaactcctttacacatggctgctattcgaggagatgtgaaacaagttaaagaattaataagtttaggggcaaatgtgaatgtgaaagattttgcaggtaagactagtaattcaatacctactattcaggcactaaaatttaaacagatcctggttacaatttaatctacattcttttattcattttgctgaaatgaaagagttctaaaaatactctttattacaaaacttttggagttcgtacataaaacccctgatttctactacaattccatgtcaataattactcatatttttatatactaaacttatactttagttgacatattacttgctgtatagttctttatccaagttaggttttgccctagatgaatttg

SEQ ID NO: 7579 - DNA, 524 bp, Homo sapiens
  MAP TO CHR16.3; EXPRESSED IN BONE MARROW, SIGNAL =   1; EXPRESSED IN ADULT LIVER, SIGNAL = 0.96; EXPRESSED IN BRAIN, SIGNAL = 1.1; SWISSPROT HIT: Q13563, EVALUE 6.20e-02; EST_HUMAN HIT: BG332616.1, EVALUE 1.00e-08; NT HIT: U00936.1, EVALUE 1.30e-01
ctcagccctgtttggaagactacattccccaagcagatgtggactctagcaaaagactttactcagctacaaatgaatcaagtcaaccttaccttgacgtgctttggcgagtgcatccaaggggaccacgtagcctcctccccggtacacagtgagtttgccccagatgggatacccttgacgttggtcctggctctggtactgccattactgagggtggtgcattccagccttccccatagtctgccatgtcttcagcatccagggaatatggtgcacggcatccgttgagatactgcggctgctgggcaagagggcaagagctttcctggaccctcacttgacgaatctgggcactgccaaccagcttggagttcccatcagtgataaagcctaaaaagaaaaacaaggtgggtaaatctagcaatcaaaataatcttaacacattccaagctccccggcctgaggctaatgtgaaattcagcgtacccattatagagacagcccagagaagtttatcacca

SEQ ID NO: 7580 - DNA, 572 bp, Homo sapiens
  MAP TO CHR19.3; EXPRESSED IN FETAL LIVER, SIGNAL = 1.5; EXPRESSED IN ADULT LIVER, SIGNAL = 0.92; SWISSPROT HIT: P71675, EVALUE 2.80e-01; EST_HUMAN HIT: BG686682.1, EVALUE 0.00e+00; NT HIT: gi14760362, EVALUE 1.00e-108
cccggactatgtcaaagctgagacagggggcgcctggggatggaaggcggggtttacgagttaagacgggacagtaagagctcagtccccacctccctcatggatcaaccgcctccggtatgaaatcacttctcttagaccccagccttctcttcccgagcacctctcaggttaaaggctcgggatcagccacctcaggaccctggagtccggactcagccctaccagtctgcgctcggtggtagagcacataggcctcctcgtccatgaccagctcctccccttcgcgtagcggcggcccccggccgggcaggtagacctgggccgggccctcggaacttgtgtcgccggactcggcttccatgggttccccggtttcacacgtgcgccgccgacccttgcgcgccgccatcttcgaaccctctcgctgctgacacccggtaagagcgtcacttccgggtttcgctttccgcctaatgagatccgccctactgcgcggttaccttggaaactcctgggaccgctaatcggagagggtgcggaaacgctggaggagaactcaggtaatggcg

SEQ ID NO: 7581 - DNA, 585 bp, Homo sapiens
  MAP TO CHR16.3; EXPRESSED IN LUNG, SIGNAL = 4.1; EXPRESSED IN BONE MARROW, SIGNAL = 6.8; EXPRESSED IN FETAL LIVER, SIGNAL =  16; EXPRESSED IN ADULT LIVER, SIGNAL = 5.7; EXPRESSED IN PLACENTA, SIGNAL =   5; EXPRESSED IN HELA, SIGNAL = 4.1; EXPRESSED IN HEART, SIGNAL =  11; NT HIT: AF196779.1, EVALUE 3.00e-27; SWISSPROT HIT: P39194, EVALUE 1.00e-19; EST_HUMAN HIT: BI561156.1, EVALUE 3.00e-68
ggcagagaagcgattgaaactcttcatttgaaaaataaaagcattggttttcccttagatattggatcagaaaggtacactttcagcttcaccattcgggattcaccagcacattttgtaaatgcagcttcctggggcaatgaagattacatcaagtctctttctgacagctttagggttggtgactgtggtaagttggcattgattcttaaactttttccatcatagtgttattcctgtggtatgtttatggtaactatactgaaggagttgaaatgagacacagttcgtaattctcaagaactttatcagaaaaagtcaagtgttaagagtataatgcagtggggcacggtggctcatgcctgtaatcccaacactttgggaggctgaggtgggtggattgcgtgagttcaggagttcgagaccagcctgagcaacatggcaagaccccatttctacaaaaaattagctgggtgtggtggcgtgggcctgtagtaccagctactaaggaggctgaagcaggagggtggcttgagccctggaggtggaggttgcagcgagccaacatcgtacctctgcactcca

SEQ ID NO: 7582 - DNA, 585 bp, Homo sapiens
  MAP TO CHR16.3; EXPRESSED IN ADULT LIVER, SIGNAL = 4.1; EXPRESSED IN PLACENTA, SIGNAL = 2.9; EXPRESSED IN HEART, SIGNAL = 2.7; EXPRESSED IN LUNG, SIGNAL = 2.6; EXPRESSED IN BONE MARROW, SIGNAL = 2.6; EXPRESSED IN FETAL LIVER, SIGNAL =   3; EST_HUMAN HIT: BG828047.1, EVALUE 8.20e-01; NT HIT: S53987.1, EVALUE 5.60e-01; SWISSPROT HIT: Q9VKJ0, EVALUE 7.40e+00
actccacctccatgatctgcaggagaacccaaagctatgatgggatttcagagttcattctgcttccagccagaacaaaaacccagtgaccttatggccatccatgaacaaggaattaccagccccctcattggccaagaccctgtatggctactttttacatctggccagtgtgccagtaccatgggaaagcctgctggttagcaatctctgatctttgttacctaccactatcactaaggcggcaatgcccattcattgccacaggctgaatggcttgatcctggattaaacaaccaatcaaccaataccaaatcccattattgaatgctggtgggaaaaggagagtatccctctcctttaaggaaaataaaatatggtccctgccctctaaggtgctcaaagtatgttgggcatggggacaaacagcatacaaaaacaacttgtgctatagagttgactccagacaacaggtacaatgcaattccgttccaaaataaacattcaggggaacagtgaggatttagagaggagcacagtgccaagcctgcaccctagaatctcacagtcccatgagtcccactt

SEQ ID NO: 7583 - DNA, 539 bp, Homo sapiens
  MAP TO CHR19.3; EXPRESSED IN LUNG, SIGNAL = 2.2; EXPRESSED IN BONE MARROW, SIGNAL = 1.3; EXPRESSED IN ADULT LIVER, SIGNAL = 1.1; EXPRESSED IN PLACENTA, SIGNAL = 1.2; EST_HUMAN HIT: AA573517.1, EVALUE 9.00e-56; NT HIT: gi15304094, EVALUE 1.00e-130; SWISSPROT HIT: O76090, EVALUE 2.00e-25
tttcaaacttcttgcgctcctcgcgggtcataaaccctggaggaaaggggtcagggatagctcgccccttgcccccctccacctggtccttgcccggtctctgccctgcctctggccgagtactcaccagcctccaccacgtggtctatggtggggaagcgcttgaacaccgcggtgctgacggagcgcaggatgagcacggccgagagccctgcgtagcgcatgagtgtgcgccggtagaggcggccgcggtcgtcgcgtccgtgcacggtgcccgccaccacgcacatgagcgcgtcgggcagcggcatgcataggtactggctccaccagcggttcaccaccagcgtcacataaaagcctgcaggggagcggggaatgggggctcagtggggacaccagggccaggggtttgggggcccaggttgtgggagagggggcaacgtaaggtctgcatcagggaaacccgagcgtgctggccaacctgaccacgtttgggctgggaacttgggggtccagccctgaggtcagaaaggaca

SEQ ID NO: 7584 - DNA, 600 bp, Homo sapiens
  MAP TO CHR18.3; EXPRESSED IN ADULT LIVER, SIGNAL = 1.5; EXPRESSED IN PLACENTA, SIGNAL = 1.6; EST_HUMAN HIT: BG504151.1, EVALUE 2.10e-01; NT HIT: gi13357558, EVALUE 8.90e+00; SWISSPROT HIT: P16917, EVALUE 2.00e+00
gtgtcttgttgaaggggtggtattaaaggataggggtgttgcacatactaaaagctgtctgtacctgatggatacttgataaacctttgttaggtgaagtcctaattgaaagaaggaaggtatattttgaaatggctccagatgattctgctaaataccccttttcctctcctgctacaacacacacgcatgcttgcacacgtatacacacacacaccacatttgtgcatataagcacatcgcctattgacaatcattgtgaaacctccctctttacagctgtcttttattaaactatttatgacacatatgctttctaaagacagcaggctggtaatttctttttcctcttgacaagcactgttaagaatatacttattttctactattttaaaaagtaatatttacaaaccactagcattttctgaattatatttgacagcgtacactacttgcttcatgatccaaatatagtatattgaatagatgacgatgtccttcacagtcactattgagtcataaggcgctgaagggaagtctggctcatgggaagtgctctctcttacggggagagcaaaggctgggacacgacctttgatt

SEQ ID NO: 7585 - DNA, 524 bp, Homo sapiens
  MAP TO CHR19.3; EXPRESSED IN BRAIN, SIGNAL = 2.5; EXPRESSED IN ADULT LIVER, SIGNAL = 1.8; SWISSPROT HIT: Q90404, EVALUE 1.50e-01; EST_HUMAN HIT: BG770083.1, EVALUE 1.00e-113; NT HIT: gi15309250, EVALUE 1.00e-111
cttcatggccaccagtaaccccagtgggcggaggcgctcctgggctcggagccaggacaaaaggaggagggtggcggtgaccaggcttgcactgagcaccgctgtggggaacagaaggacagaggagtaaggagggggaaggcaagagcccccacacccaccaagctccatacacatggggatgggagttctgcagctcatccctccccacccacctcccctgaatccccggagctctaagcccccagcatgggagggtaagtccctcttaccagcagctgcaataaccccataggcagttgggcttccagactggtctccggcagaggaggatgtggcattcccgacagaggggacactctccagggtcacagggggccccatggttgtggcattcctgagagaggtgacactctccagggtcacagggggccccatggttgtggcatccccttccgggaggatctcattggttcctgcaataagcccaggcgttcagtagttgaggagagagcactgaaggc

SEQ ID NO: 7586 - DNA, 532 bp, Homo sapiens
  MAP TO CHR16.3; EXPRESSED IN FETAL LIVER, SIGNAL = 0.87; EXPRESSED IN BONE MARROW, SIGNAL = 1.3; EXPRESSED IN BRAIN, SIGNAL = 1.3; EXPRESSED IN ADULT LIVER, SIGNAL = 1.4; NT HIT: AF221712.1, EVALUE 2.00e-59; SWISSPROT HIT: Q9UL36, EVALUE 5.70e-01; EST_HUMAN HIT: AW962987.1, EVALUE 2.00e-59
aaattggaatccccaagagcagacaggacttgccacgaaacacctcaaatgtaagcttctgactcctgctctgggctcagccagtggcagttggttcttttgagaacgctgggctggcagaggccagggggctgaaactccatgcctgctagccaggaggtcagcccctgattgcagacctgccagcataagactccaccagcttgccttaaccctgagaccgtcggtgctgacgggggaaccgaggaccatcaggcggcgtggtgcagcggatgtgggcacccacctgcagctcggtctggaagaagaacttctgagggcactgtgagcagtcgtagatcttgtcctcctgcccgtgcacggcaaagatgtgctgctgcaacttgttggcctggacgaagactagacacagacacggctgtcagggccaagctcaggacaccagcccagcctcctgtggcagctgcccccacaacactcgcaggcagggatcactgtggcataggtacagtcagccaaacagtgggctact

SEQ ID NO: 7587 - DNA, 568 bp, Homo sapiens
  MAP TO CHR18.3; EXPRESSED IN PLACENTA, SIGNAL = 4.1; EXPRESSED IN HELA, SIGNAL = 3.4; EXPRESSED IN FETAL LIVER, SIGNAL = 5.3; EXPRESSED IN LUNG, SIGNAL = 3.4; EXPRESSED IN BONE MARROW, SIGNAL = 5.6; EXPRESSED IN ADULT LIVER, SIGNAL = 3.7; NT HIT: AF267747.1, EVALUE 8.50e+00; SWISSPROT HIT: P14544, EVALUE 6.20e-01; EST_HUMAN HIT: AI935380.1, EVALUE 1.00e-104
taggggaaaaacagcacagggcaggaaacgattttccatgtcaccaacctttctctgagggaacctactggccacctccctcttaggaccagcccatcgtccacaacgtggaagtccagcttccgttcaaatcggagttctttcttcatgacatttctttgcaaagtcccggaacccacagctctgagactctggctgtcccccaacccaccccatcttccttgtcctcacccctggtcaggagaagccaaaacatcagtcagcttcccagtaatcaagcctggctttctcacccagggctcgccccagaacaaccaccggcttctttcagtgtagccaaaaggctattggagtcttctcaaatgaaagagattttatcaaaggcttggagaagaaaagaaaaagaggattatataataaaacgtaaaacaacaaacatatacacacaaacaaaaataaacgtgagatatgattctcccggagtgtttagagcaggaatgttcttgggcatctgccttcccccaccagcaccccccacaaggcaaggccagttcaccctcagtgctca

SEQ ID NO: 7588 - DNA, 504 bp, Homo sapiens
  MAP TO CHR18.3; EXPRESSED IN FETAL LIVER, SIGNAL = 2.4; EXPRESSED IN BRAIN, SIGNAL = 2.1; EXPRESSED IN LUNG, SIGNAL = 1.9; EXPRESSED IN BONE MARROW, SIGNAL = 3.8; EXPRESSED IN ADULT LIVER, SIGNAL = 2.8; EXPRESSED IN PLACENTA, SIGNAL =   2; EXPRESSED IN HELA, SIGNAL = 2.5; EST_HUMAN HIT: BF790697.1, EVALUE 7.00e-01; NT HIT: AF104030.1, EVALUE 3.10e-02
agatctcctagctgggggtgatctttaatagctattagcctaatcaagtcttctctttctcattgttgcatattttccattttcacttttcctcaaaatgtatttcatctaggtctcccaattcattaatatttagctgtttgaagaaatattttacattgtttgtgcctgtttgattaccttccttttttgtaatgtttctcttcattccccccacccccttcattagtcttgactgaagttaactatgttgttagtcattctttccttttgcaacttcttagacatggcctgggacggtgccaatggagatgtatttcttggacttgctgagaaaggctccatcccactgatggatgttggctgtgctggcagctccgcataatggaacacttcgcttgatttataaaggacccaacttgtcatttctatgtcctcaccattgtctttattgtccttgcctgtttttacccgctgttcaaggccttctttgattggcttctc

SEQ ID NO: 7589 - DNA, 590 bp, Homo sapiens
  MAP TO CHR16.3; EXPRESSED IN PLACENTA, SIGNAL = 1.6; EXPRESSED IN HELA, SIGNAL = 1.7; EXPRESSED IN BONE MARROW, SIGNAL = 1.7; EXPRESSED IN FETAL LIVER, SIGNAL = 1.4; EXPRESSED IN LUNG, SIGNAL = 2.6; EXPRESSED IN ADULT LIVER, SIGNAL = 2.5; EST_HUMAN HIT: BI553763.1, EVALUE 1.00e-101; NT HIT: X17279.1, EVALUE 9.00e-03; SWISSPROT HIT: Q9XHM1, EVALUE 3.00e-03
accgccctccttattctctcccatcgcctccgcaggcagcgccactctatgcaggccacaggggcctaggcaaggagcccggggcgccggcgcctaggcaaggaatccctgagccaggagagctggaccaggagcacccctggtcgctgcccttgccaggacgccagtagagccggcagccgagtctgctgctcccgccctcagagccgcggcggcggggacaaaaatcctcggcggcgggggcaaaaagtcgcggtggcaaaaagcggcggcgacgggggcaaaaagtcgcggcagcaaaaagccgcggcggcggggacaaaaagccgcggcggcgtgggggcagaaagccacggcgggcaaaaagccgcggcggcaaaaagccatggcggcgagggtgcaaaaagctgtgtcggcggtggggcaaaaagcctggtcgggaaaaaagccgcggcagcggcgaagggcaaaaagccgcggcggcggagggcgaaaagtcgcggcggcgggaggaaaaaagccgcggaggtcaaaaagccgaggcagggtgggggcaaaaagccgaggcggcggggggtaaaaagccgagg

SEQ ID NO: 7590 - DNA, 571 bp, Homo sapiens
  MAP TO CHR19.3; EXPRESSED IN PLACENTA, SIGNAL =   1; EXPRESSED IN HEART, SIGNAL = 2.5; EXPRESSED IN BONE MARROW, SIGNAL = 1.5; EXPRESSED IN FETAL LIVER, SIGNAL = 1.7; EXPRESSED IN ADULT LIVER, SIGNAL = 1.4; EXPRESSED IN BRAIN, SIGNAL = 1.1; SWISSPROT HIT: O95707, EVALUE 9.00e-13; EST_HUMAN HIT: AA480963.1, EVALUE 2.00e-51; NT HIT: AF001176.2, EVALUE 1.00e-51
cctgggtgctctgttctttcatctgctagctcagagggtgggatcagcacccccaacccctgaggcctgcttctctgtggttcccccagcaccacagaggcctgagcctggaactgtcctttttctttgcagtgacaaaatccaaatgcccctcttatgtgggtattacaggaatccttctacaggaaacaaagcacattttcaaaattatcaccaaagaagaccgcctgaaaggtatgtaggtgtttctgagggcattgcttgcgggctgtggctcccagctactgcgttagccttttcctcaaggctccaagagtttgatttgacccctcaagtcagcgcagattgcagatacttgctgaacctgcattaaagcctgcagagaccatcccctgcacccgtggctcccccaagaggtgtgtgtcagtgcagcctgcaaccccggccagaaatggccaaggggaaggaagacctgctcggctgtgcctcaggggacctgggtctgtttaggccccaggagagggcctccacctgccccaaaggctgctgctcccagaggaatgtagccaaa

SEQ ID NO: 7591 - DNA, 595 bp, Homo sapiens
  MAP TO CHR14.3; EXPRESSED IN HEART, SIGNAL = 1.6; EXPRESSED IN HELA, SIGNAL = 1.3; EXPRESSED IN LUNG, SIGNAL = 1.7; EXPRESSED IN ADULT LIVER, SIGNAL = 1.3; EXPRESSED IN PLACENTA, SIGNAL = 1.1; SWISSPROT HIT: P40967, EVALUE 1.50e+00; EST_HUMAN HIT: BI910629.1, EVALUE 5.40e-02
gcctctgttttctccaccagagttgcaccatttgtgtctgtgtcctcagcattgattggaagtaggtactcatgagtgcttcccacaggtcagcgctttgcgaggccctgagaaccagcgcagagctcatgtggagcaccagcatgagtggccctgagctgggcatccaggtaatggcagctggaatgggctgagttaaattcctgggcaccaaccagctcactcagccagtcaacaaacacctgttagactctggacctgggccagcacgatgggagctgcaaggtgtggtgccagatgcatcctggtcctggaggttggcgtcaccaatgttgaataaaaggcaaatacccagatggtgaggacacccagccatgatcccagattgccccccaccaccctcaccccaatccctgccaatgcagacagcactcttcctctgcttccaagctcccgtcggtcctgggctggcctgggcaacacagcctcattccccagctctcaggccagcagcaccctgccacctgctgggcctatgcagtctcacaggtgctggcagatgtccatacattcttcaaaacccatcttcaggctc

SEQ ID NO: 7592 - DNA, 575 bp, Homo sapiens
  MAP TO CHR18.3; EXPRESSED IN BONE MARROW, SIGNAL = 1.8; EXPRESSED IN ADULT LIVER, SIGNAL = 1.1; EXPRESSED IN HELA, SIGNAL = 1.1; EXPRESSED IN PLACENTA, SIGNAL = 1.5; NT HIT: gi15668172, EVALUE 8.60e+00; EST_HUMAN HIT: AA283074.1, EVALUE 2.00e-01; SWISSPROT HIT: P76346, EVALUE 1.90e+00
ctctcttcccccttttcctcaatacataacgcttaaaaatctgttagaagagttctcccacctacctgcaatacccttctccctcgagtaagtcaactccatgtcatcttgtcctccaatgctatcttccagtctttcactttctaacggaagtctgtccataaaaagatgtgtaaggaagaatatactcccccagacatctgtctcaaaatattttttttcccacaaagatagtgttttaggtctatataactccggaacatgataaaaataaatagcagttgtcaaataacaagaaacaaataatattatggtctcataatttaagagaataaattaggattttttcaaataaaaagaaaaattatcttgtttaaactatgtcttttatgtatgtatcatttaaatgatcataactttttcattcttatgtgcaatgtttttctctttatcatgttttcccctatatagtatcaggagattgtcttatcaacaaatggacacaaatcttactaggagaaacaacgtttatctttgctgcttctcctcaactctctacccagcaaaatttggga

SEQ ID NO: 7593 - DNA, 511 bp, Homo sapiens
  MAP TO CHR18.3; EXPRESSED IN BRAIN, SIGNAL = 2.2; EXPRESSED IN ADULT LIVER, SIGNAL =   2; EXPRESSED IN PLACENTA, SIGNAL = 2.3; EXPRESSED IN HELA, SIGNAL = 2.8; EXPRESSED IN BONE MARROW, SIGNAL = 1.9; NT HIT: AF132123.1, EVALUE 3.10e-02; SWISSPROT HIT: Q00991, EVALUE 7.10e-01
aattgctgtgtgcaagatgctgggccagaaaagtaaagcaagattgggtatactctctgttctcaagggatcttcagtctagttgggcaacataggacgctgataaataagatcataacaacacacagcagtatatgctaagtaccaaaggaaagctaaagaacaaagcacaaaaggccccttggaagagaggagacttaagctttttctcaaaggaacagtaatgactgcctggtttccttggaaatgatacttgtcattataaattaatacattgggatgccacttttgagggttgtgtgatgtatcagttcccatgaattcactcaacttgatgtatgctggcataataacactgtgggagttcccaaagcgttattgggataatgagatgggtaatgagaggaagaattcgaagacccagaataactaatagaatcagtctcagaagaaggaatgtgatttacagcccaggtagagaaattgacttggggcaggaaaaagaggattt

SEQ ID NO: 7594 - DNA, 559 bp, Homo sapiens
  MAP TO CHR16.3; EXPRESSED IN PLACENTA, SIGNAL = 4.3; EXPRESSED IN HELA, SIGNAL =   3; EXPRESSED IN BONE MARROW, SIGNAL = 7.8; EXPRESSED IN LUNG, SIGNAL = 4.9; EXPRESSED IN ADULT LIVER, SIGNAL = 5.5; EST_HUMAN HIT: BG183073.1, EVALUE 2.00e-01; NT HIT: X59273.1, EVALUE 5.30e-01; SWISSPROT HIT: O43896, EVALUE 4.00e-03
gtgcaggttagagcgagagggactgcccagccaccggaggtctggctcacccggggttccatgccgcagtgaactggaatctgcactcggggaccaaccaaccactccctgctgcctgctctccaggcctccaactcccacgttcctgggctccaggtcagctgacagcgctgcagggcaggaatgggcaaggggacctgtccagccccccagccaaggcgccttccctcagaagcccggcccacagctcatacacaggcccaaatgcccctcacaccctccttttgtgtttcccacaactctagttaagagcaacccccttgccttgcacttgaggacacatagcttccaggctctgcactaaaggcaaggtagaagagaggagggagggggcagaaacacctcagaaatcactgcagtccaattagccaggcttgcgcccttcatgcttacaaacaggaacgcgcattaacatctgctacaaaagcaaacatttttagatatcttcatcttcacctccctgacactccgtgaaaggactctcagcagccagtgactg

SEQ ID NO: 7595 - DNA, 514 bp, Homo sapiens
  MAP TO CHR19.3; EXPRESSED IN ADULT LIVER, SIGNAL =  25; EXPRESSED IN BRAIN, SIGNAL = 5.7; EXPRESSED IN HELA, SIGNAL =  55; EXPRESSED IN HEART, SIGNAL = 5.7; EXPRESSED IN FETAL LIVER, SIGNAL =  11; EST_HUMAN HIT: AI797902.1, EVALUE 0.00e+00; NT HIT: gi16163056, EVALUE 2.00e-65; SWISSPROT HIT: Q07020, EVALUE 1.00e-25
actcacttggtgtggctgtgcggggttcctggggccttgccgaaatgccggtacacctctcggcccttgcgaggacctagggaaggggaaggagaaccgggtgagacagggatctggcgcccagcttctggcctcccagatccaggagggtgaaggctgccagtagccacacagctcagtccaaacccgtcgaccacgtatcactcaccggagagcaggacagtgccacagcccttaggggagtccagggccagctggtcgaaagtgaggatcttgccccctgccctgaggatgcggctgcgggcccggctggtcacgcgcagtgcacatacctggtggagaggacaaggctggcgggtcagacccctgcgtggtcacccaggggctgccaggactcaccctccactgccttggcgcagcagagccctggtaaccaacactatcgtttactacccggagcaccctgggctgacagcagcagttctcaacacttccggaactttcaccaccacat

SEQ ID NO: 7596 - DNA, 535 bp, Homo sapiens
  MAP TO CHR16.3; EXPRESSED IN ADULT LIVER, SIGNAL = 2.4; EXPRESSED IN PLACENTA, SIGNAL = 2.6; EXPRESSED IN HELA, SIGNAL = 3.6; EXPRESSED IN FETAL LIVER, SIGNAL =   3; EST_HUMAN HIT: AA325506.1, EVALUE 6.00e-97; NT HIT: U33446.1, EVALUE 0.00e+00; SWISSPROT HIT: Q08649, EVALUE 1.00e-19
gaacagagagtggggcagagcctccccagcggccctgagcacctgcctcctgcaggagaaggagtccccggatggaaacaatgtggcctgcatcctgaccttgcccccctaccaacgccgcggctacgggaagttcctcatcgctttcagtgagtggttcctggcctgtctgggagggggagacctgtggggcaggggtgccagggcaggctggatcctaagttcctctttctactgctgccaggttatgagctctccaagctggagagcacagtcggctccccggagaagccactgtctgacctgggcaagctcagctaccgcagctactggtcctgggtgctgctagagatcctgcgggacttccggggcacactgtccatcaaggacctcaggtgagggggcctcccgggccctgggggcaggacttgccctgagatgggccacgatcctgcttcctcataccctgtcaccatcctggccagatcccacaagggcaccaggtctggcatttgctctcatccctttttgcagc

SEQ ID NO: 7597 - DNA, 576 bp, Homo sapiens
  MAP TO CHR16.3; EXPRESSED IN HEART, SIGNAL = 2.3; EXPRESSED IN BONE MARROW, SIGNAL =   4; EXPRESSED IN FETAL LIVER, SIGNAL = 2.7; EXPRESSED IN ADULT LIVER, SIGNAL = 3.5; EXPRESSED IN PLACENTA, SIGNAL = 3.7; EXPRESSED IN HELA, SIGNAL = 3.9; EST_HUMAN HIT: BF923605.1, EVALUE 7.00e-94; NT HIT: gi15318237, EVALUE 2.00e-96; SWISSPROT HIT: O46432, EVALUE 3.70e-01
aatctggtaggcggaggaaggactcagggctatgtgcaggtttaaccctcgcccatgcagcttaccgttgtttcctgagcactgacagtggcctgggcccaaggccacctagaggaaagccacagagcccacctgcaaggcactttgggtctgggttgaagttgctagaatatagaggccgaatagcattcctcttcctgtcttcattttagatgcctcctctggagcctctggtgctaatgggccacttctcttcctgttgcaggccttcagctgaatttcactgcctcctggggagacttgcactacctggggctcactggcctggaagtggtgggcaaggagggccaggcgctgcccatccacctgcaccagatctctgcttcccccagagacttaaatgagctccccgagtactctgacgactcccgggccctggacaagtaagtgtctatcagaagctttactttcatgcccactgggttttggggacattgttctgcctctgagacttcagattcagacatcaaatagaatcgcatatgtccctcccctggccaccctgtgaggtaatgt

SEQ ID NO: 7598 - DNA, 595 bp, Homo sapiens
  MAP TO CHR18.3; EXPRESSED IN HELA, SIGNAL =   3; EXPRESSED IN LUNG, SIGNAL = 3.1; EXPRESSED IN BONE MARROW, SIGNAL = 4.4; EXPRESSED IN FETAL LIVER, SIGNAL = 3.3; EXPRESSED IN BRAIN, SIGNAL = 4.3; EXPRESSED IN ADULT LIVER, SIGNAL =   3; EXPRESSED IN PLACENTA, SIGNAL =   3; EST_HUMAN HIT: BF896335.1, EVALUE 1.40e-02; NT HIT: M36917.1, EVALUE 5.70e-01; SWISSPROT HIT: P04956, EVALUE 5.80e+00
agtgtcttggatgtcctgggtcagcccacgtacgccagtgcatgttggaaggggagagttgattccctctcccaagccaggaggtccgtcggcatgggctctttcataagcatgctttcctacagaaggtctgaatggtcacagtccagtctatagtttaaaagaagtgcaggccttctatttgcgcctgtcttcctcacgtgccttcccccgtttccttctcacttcctaccatggcggtgtagagactctcaaaatcaagagggaaaagaaggaagctcagtacttcttgcggcgagagaagccagtgccggtgcggacactcttggctggtggaatctgtggtgggggtggggggtgccctcactggcagggagcttacagatgcattgggtggtgtgaggagatcacagatgtacttggcctctgtctgtgagcccccaccgtgtgtgccgtggcccctacacttatcccgcccccccgttgtgctccacagagctggaaaaaagaatggtcccgttatcattgtcacccaagcagtcgcttcaacagatgcctttgttcttccaggctgcccagataccaaaaggctgga

SEQ ID NO: 7599 - DNA, 585 bp, Homo sapiens
  MAP TO CHR16.3; EXPRESSED IN HELA, SIGNAL =  10; EXPRESSED IN HEART, SIGNAL =  16; EXPRESSED IN LUNG, SIGNAL =  11; EXPRESSED IN BONE MARROW, SIGNAL =  10; EXPRESSED IN FETAL LIVER, SIGNAL =  18; EXPRESSED IN ADULT LIVER, SIGNAL =  15; EXPRESSED IN PLACENTA, SIGNAL =  14; SWISSPROT HIT: Q9UKN7, EVALUE 2.20e-01; EST_HUMAN HIT: AW391297.1, EVALUE 5.00e-64; NT HIT: gi14777377, EVALUE 3.00e-64
tgcaagccctggaaaattacactagcttctgttgtagacaattaaaatgtgttgattgtactgaataagcggagaaagttaatatgcatgtgttaacaggaaacgtctccagtcgatcagccttgcttctgagcatctgctggctccatttttatcaggttcctgctttccacagcgctcattcccaaaacagctcggcttggtgacatgagaaactttctgtgtttttttttggtttaaaaaaaaaaaacaaccgagaaaccaggctatttctctcagggctgtccacatgcttacaagtatgcacagtctgtgagttgtgtatgttttgtttgttgtttggtttttcccctccttttctaagtgtttgtttggcctcctgtagattcatggggatacggtccagaaccagctggtggtccaaggagtggagctcccatcttacctccccttgtacccgcctgccatggactggatcttccagtgcatctcctaccatgcccccgaggtaactgccaggtggcttcagtgtgacgctcacctcctgtatggtgacagcccctgcccactgtgccctttaacgtt

SEQ ID NO: 7600 - DNA, 500 bp, Homo sapiens
  MAP TO CHR19.3; EXPRESSED IN PLACENTA, SIGNAL = 1.6; EXPRESSED IN HELA, SIGNAL = 1.6; EXPRESSED IN BONE MARROW, SIGNAL = 1.2; EXPRESSED IN FETAL LIVER, SIGNAL = 2.1; EXPRESSED IN ADULT LIVER, SIGNAL = 1.5; EXPRESSED IN BRAIN, SIGNAL =   1; NT HIT: L10038.1, EVALUE 0.00e+00; SWISSPROT HIT: P06870, EVALUE 2.00e-60; EST_HUMAN HIT: BG758556.1, EVALUE 0.00e+00
cttctcatccctccattcccatctttccccagcaattaccagctctggctgggtcgccacaacttgtttgacgacgaaaacacagcccagtttgttcatgtcagtgagagcttcccacaccctggcttcaacatgagcctcctggagaaccacacccgccaagcagacgaggactacagccacgacctcatgctgctccgcctgacagagcctgctgataccatcacagacgctgtgaaggtcgtggagttgcccacccaggaacccgaagtggggagcacctgtttggcttccggctggggcagcatcgaaccagagaattgtatgtgggggcagactgtgtagcccaaggcggggatggggactcctgcgtccaagggagaaagggccagggaagcaggtgaggtcgggctgcagccctttttctcccgggttcgtagtctcatttccagatgatctccagtgtgtggacctcaaaatcctgcctaatgatgagtgca

SEQ ID NO: 7601 - DNA, 524 bp, Homo sapiens
  MAP TO CHR19.3; EXPRESSED IN LUNG, SIGNAL = 0.99; EXPRESSED IN BRAIN, SIGNAL = 1.8; EXPRESSED IN ADULT LIVER, SIGNAL = 1.4; EXPRESSED IN PLACENTA, SIGNAL = 1.4; EST_HUMAN HIT: AI923042.1, EVALUE 1.90e-01; NT HIT: AE000896.1, EVALUE 2.00e+00; SWISSPROT HIT: Q08469, EVALUE 2.00e-10
tgaggggactcaggtaccaccttgctcggtgcctacttctgttcacttcctccccttggtgtccctgcctcccttggccctgctggcccctctcctcaccagtgacactgatgttcttcaccagtgggcagtggtcccagggcagggggtgagcaaaggagtagaagaaattccaggagatgatggtgctgttgtacaagctcaccgaggcgcacacctgggggtggacacggtgggcagagacctggagaccacagagggagatcggggatggcctggggctgggtccctcatttaccagactgtgagcatagctcatgctgcacagccaggggacaagctgcttccagacccggatgttgtccacatgcagccactgccccatgatcacctccatgtataagagcgggatcccgaataagagaagcatgaagaagtacatcaggatgaagctgcctgggaagggagccaggggctgtgctcaggcagccaggagtcctggccctgtccccattttcccctag

SEQ ID NO: 7602 - DNA, 555 bp, Homo sapiens
  MAP TO CHR16.3; EXPRESSED IN HELA, SIGNAL = 1.2; EXPRESSED IN LUNG, SIGNAL = 1.1; EXPRESSED IN ADULT LIVER, SIGNAL = 1.1; EXPRESSED IN PLACENTA, SIGNAL = 1.3; NT HIT: AF417490.1, EVALUE 2.10e+00; SWISSPROT HIT: Q42806, EVALUE 3.10e+00
tgataacttcgatttggggcttcacgtacttcccacctgccctggagggctgcgaccagtggggcttggcattgcctttgaggaacaataaattatggaaggggcccataactcctcgccaccctgcgcgggaactactttgaattacagtgaaacagctttcctccactttccttcctctttcgaaatgtcacggtccagtagacttcggggattcccaaccgaaacaatcccctcccctagtgtccctttggcggggaacgccagccagaaagcaagccaggttgtgactagagttggggcgctttgcatcctgggatgtgtagtcgcgctcctctaccccgttcccatcgcagaagtaatgcgtcttcgttcgtcgctgcgccctagaaggagcagtgcatgctgggggttgtagtcacccaggtggccaccttgtcctcgcttgcttcgctttggtcaagggaactttctgttttagttctgtctattgaagaagggacaccttccagagacgccttccagagacgtaggagacgcaagttctcttcctgg

SEQ ID NO: 7603 - DNA, 533 bp, Homo sapiens
  MAP TO CHR16.3; EXPRESSED IN HELA, SIGNAL = 3.3; EXPRESSED IN LUNG, SIGNAL = 2.5; EXPRESSED IN BRAIN, SIGNAL = 2.3; EXPRESSED IN BONE MARROW, SIGNAL =   3; EXPRESSED IN ADULT LIVER, SIGNAL = 3.8; EST_HUMAN HIT: BI825551.1, EVALUE 0.00e+00; NT HIT: AF332579.1, EVALUE 5.10e-01; SWISSPROT HIT: Q02113, EVALUE 7.50e-01
ggaggtagaggtggagaggctgcaaggaggctgtggcagagtccagaggagacatagcgcctgaagaggggtagtggccacatggagaacagtgggaggtggccaatgtcccacctccactctgacctcagggccagctaccaagacgggcaatgacttcacaatcactgcccaggccttccaccttttaaggccaatatcccagggtcttggctcactctgccctttatgttcacatctggaggccacaccctaccttctaagtcaccaggccatcaagtccagacaaagggatcgaaagagtgagacagtgccagccacctcccacccaagccactagcaagactccacaatgtcagagcaacaaatggacctgaaggatttaatgcccacaaagaggaaatacatgtggaagactgctgaagataggcgcatgtctgacctcacctgtgtgctggagtggctggagcggaggcaggggaagaagaaacaagctcccgaggtgggtaccatccaagagaaatggcaggaag

SEQ ID NO: 7604 - DNA, 567 bp, Homo sapiens
  MAP TO CHR19.3; EXPRESSED IN PLACENTA, SIGNAL = 3.4; EXPRESSED IN HELA, SIGNAL = 2.8; EXPRESSED IN FETAL LIVER, SIGNAL = 2.3; EXPRESSED IN LUNG, SIGNAL = 2.9; EXPRESSED IN BRAIN, SIGNAL = 2.9; EXPRESSED IN ADULT LIVER, SIGNAL = 4.3; EST_HUMAN HIT: W73140.1, EVALUE 0.00e+00; NT HIT: AF135028.1, EVALUE 0.00e+00; SWISSPROT HIT: Q9Y337, EVALUE 6.00e-27
gtctccttctgcccactttgccacatctctgcctctctcatgcccccctttctctcctgcagggtgattctggggggcctgtggtctgcaatggctccctgcagggactcgtgtcctggggagattacccttgtgcccggcccaacagaccgggtgtctacacgaacctctgcaagttcaccaagtggatccaggaaaccatccaggccaactcctgagtcatcccaggactcagcacaccggcatccccacctgctgcagggacagccctgacactcctttcagaccctcattccttcccagagatgttgagaatgttcatctctccagcccctgaccccatgtctcctggactcagggtctgcttcccccacattgggctgaccgtgtctctctagttgaaccctgggaacaatttccaaaactgtccagggcgggggttgcgtctcaatctccctggggcactttcatcctcaagctcagggcccatcccttctctgcagctctgacccaaatttagtcccagaaataaactgagaagtggaatcttcctgtgtctcctccctg

SEQ ID NO: 7605 - DNA, 581 bp, Homo sapiens
  MAP TO CHR19.3; EXPRESSED IN FETAL LIVER, SIGNAL = 5.8; EXPRESSED IN ADULT LIVER, SIGNAL =  13; EXPRESSED IN HELA, SIGNAL =   1; SWISSPROT HIT: O45228, EVALUE 1.00e-12; EST_HUMAN HIT: AI927829.1, EVALUE 2.00e-78; NT HIT: gi14767206, EVALUE 7.00e-90
gtaacccctcctgctggaaccagcacctccgggcctccctcagccgcctgcatcgggtggcacaggtaacccctcctgctgggatctggctccactgcccctgctggacacccggggccctgaccgtcgtctctgtcgccatcagtatgcccgggcccagcacgtgcggctcctggtggatgcggagtacacctcactgaaccctgcgctctcgctgctggtggctgccctggctgtgcgctggaacagcccgggtgaaggcgggccctgggtgtggaacacctaccaggcctgtctaaaggtgtgcagtgtgttccaggaggtacaggctggggtccccacaccctgacctaccagaacctgcctgcgtgccctataggacacattcgagcggctggggagggatgcagaggctgcgcacagggccggcctggccttcggagtgaagctggtacgaggtgcatatctggacaaggagagagcggtggcccagctccatgggatggaagaccccactcagcctgactatgaggccaccagtcagaggtaggcccgggccagctggcctctgcaggaaataa

SEQ ID NO: 7606 - DNA, 543 bp, Homo sapiens
  MAP TO CHR16.3; EXPRESSED IN HELA, SIGNAL = 5.1; EXPRESSED IN LUNG, SIGNAL = 5.7; EXPRESSED IN FETAL LIVER, SIGNAL = 4.3; EXPRESSED IN BONE MARROW, SIGNAL = 4.9; EXPRESSED IN BRAIN, SIGNAL = 3.3; EXPRESSED IN ADULT LIVER, SIGNAL = 3.6; SWISSPROT HIT: Q16651, EVALUE 7.00e-04; EST_HUMAN HIT: AU142128.1, EVALUE 0.00e+00; NT HIT: U33446.1, EVALUE 0.00e+00
agaggccaagagctagggaggccgggggttttcttgggccccagacaagggcacaccccagaaaatgatcacgccggctccctccagtgcattgtccccaccctgcccccacgtcctcacttacctgtccccgaccggagtaatccaagatagagcagaatggccacagcccccagctgcccaggccccaggacccccttctgggccatggcccaggacaagggcccctggggcagactccaggcacgcaaggtaggaagccttggggtggtgtcgaaggcaggacccagatgttggctcagagggaaggatcccagaatccgggctggaaaggggcagcaagtgtccaaggctggcctctaaggcagggagcggccgcaacgggagacgcctggagtatccgaagcgagcagtgtggacgagtcaccagcaccgtctggccacgcagggtcctcccaggagtggctgcacctacctgcccgcccctcccctggccccgcccactggctgggctccgccagctcctcttgccaccaaagtcat

SEQ ID NO: 7607 - DNA, 556 bp, Homo sapiens
  MAP TO CHR18.3; EXPRESSED IN ADULT LIVER, SIGNAL = 4.1; EXPRESSED IN PLACENTA, SIGNAL = 3.2; EXPRESSED IN HELA, SIGNAL = 8.3; EXPRESSED IN LUNG, SIGNAL = 7.6; EXPRESSED IN FETAL LIVER, SIGNAL = 5.1; EXPRESSED IN BONE MARROW, SIGNAL = 5.7; EXPRESSED IN BRAIN, SIGNAL = 7.6; SWISSPROT HIT: O43776, EVALUE 7.00e-73; EST_HUMAN HIT: BF182783.1, EVALUE 1.00e-125; NT HIT: AJ000334.1, EVALUE 1.00e-125
tcgtgttctggactgctctgcccggtatgactgagcaatacaaaaaacatctcccagggctgggaggcaggtctccaagtacaactgagaggattgagtcaaaaatgcctcttccccaaaatagtcaagcttgaagagtgtggcaccaccttctacttgtgtttgcactaatgttggaggagtaacctgttcaaatgcaaagaaggaataaatcaatgctatcgtgagcaccactattcaagtttcaaaacggcaaaaaacatattctttgcaaaagctgacgaatgcatacttacttcatagtaccccctatcaaagaagtgatctctaaagcacctggtgaccatggatcgtgcttttaggattttggacatgttttctcctcggatcatcatgtgtctgttgttgagctggacatcaacgtcagactcctcattgatcaggttgtcagctcctccagcaggggccaacccaattagttcccagaagtcacaactcagctcatggccacctggagcctgcattttttaaaagtggggtccagagaaagagggaa

SEQ ID NO: 7608 - DNA, 594 bp, Homo sapiens
  MAP TO CHR14.3; EXPRESSED IN PLACENTA, SIGNAL = 5.6; EXPRESSED IN HELA, SIGNAL = 6.5; EXPRESSED IN HEART, SIGNAL = 5.5; EXPRESSED IN BONE MARROW, SIGNAL =  11; EXPRESSED IN FETAL LIVER, SIGNAL = 7.7; EXPRESSED IN LUNG, SIGNAL = 6.3; EXPRESSED IN ADULT LIVER, SIGNAL = 7.2; EXPRESSED IN BRAIN, SIGNAL = 7.4; EST_HUMAN HIT: AW519218.1, EVALUE 8.40e-01; NT HIT: AF301002.1, EVALUE 5.70e-01; SWISSPROT HIT: P49467, EVALUE 2.60e+00
agttcttatgggcgttgtggagatgctaaatcaaccacgggtggatcccttgatatataacaaggtgtgttattgtttaagccaccttatgcagttacatggggctgaaaacatccaataccccttcttagaaaagcatcccattgtcatgcattggctgggaggtggtagaacttccagataggctggggaaattgagccataaggggacctttgtctcatgtcacattaaatgtcttgcttggtggtccatcatgcagagctcccctccaccacatagtaagggaatggtaagaaagaaatggttgtttggcttgttagaaaaggcctgagactccacagatctcactgttttcttagaatggaatgggtgagtagccaaacttgtcctctccagagcaacaggaaagtcaaggagaaaaagtcagacctgaaggggctttggtgtggaggagaagacagagtggtggctgccacccacactcatggctgtggaggtctgacgagctctgaggtccagacagaagaggtacctcccaaaagggacagatggggcctgatacctcttaccatccctgatgctacccaacctgt

SEQ ID NO: 7609 - DNA, 515 bp, Homo sapiens
  MAP TO CHR16.3; EXPRESSED IN HELA, SIGNAL = 2.7; EXPRESSED IN PLACENTA, SIGNAL =   2; EXPRESSED IN HEART, SIGNAL = 4.7; EXPRESSED IN FETAL LIVER, SIGNAL = 4.7; EXPRESSED IN ADULT LIVER, SIGNAL = 3.6; EXPRESSED IN BRAIN, SIGNAL = 7.3; EST_HUMAN HIT: AL540465.1, EVALUE 2.00e-59; NT HIT: gi9507032, EVALUE 4.00e-57; SWISSPROT HIT: P74925, EVALUE 9.40e-01
gtgcaggctcactcctggcccagagctcacacagcaaatatatttttggtttatgtaaaagaggctattgctaatctgtgctgttcttctctttaacagaaccacagaataagagaactccagatttgcctgaagaagagtatgtgaaggaagaaatccaggagaatgaagaagcagtcaaaaagatgcttgtggaacgccaccccgggagtttgaggaggttgtggtatgttaactagatttactcattatttttttccctaccttcattcttctttgaaactggttatcctgtacacctttttcatctacctggggctcaggaaagtgagagaggagttcaagatggaaagggaaaatggaaaatgggactgatctgggcttcagacatgttgccctgaagcttttgcttcacaaagcttttagtttttggcaggacaagttgagggggaaagggagaaaaattgggtagaatagggacagttgtataaacagtataaagcatcccactttga

SEQ ID NO: 7610 - DNA, 538 bp, Homo sapiens
  MAP TO CHR18.3; EXPRESSED IN ADULT LIVER, SIGNAL = 1.4; EXPRESSED IN BRAIN, SIGNAL = 2.4; EXPRESSED IN HELA, SIGNAL = 1.4; EXPRESSED IN PLACENTA, SIGNAL = 1.4; EXPRESSED IN BONE MARROW, SIGNAL = 1.3; EST_HUMAN HIT: BG822806.1, EVALUE 7.50e-01; NT HIT: AF189720.1, EVALUE 5.10e-01; SWISSPROT HIT: Q95181, EVALUE 2.20e+00
aaggagcaaagctagagggctcagaggaggtgtgacgggaaagagatctgtggggaccaagatagtcagtatttataacattaccttcactgttgaaggggctgcattccaggtgaggtagacactaagctgggtcagagctatggttggattttattctgttacaaagagtggccatttgttatcataaggggttacaagtaggatggaaacaacatggccagaggctggagttcctgtgggggaagagatggctggaaagacagcgacaacggtggaaacaggctctaattagccaggaacaaaggcagagcaaaggggtttgctgccagcctcgtggtgctaagtacgtgatacaaagggtatggctttccccatcaagtccaccctgtgaaaacagcatgtctacctgcaataccagcctggacacagtgagacaaaagagtctgggggtggacagaggaatggctggctgtgatggtcggatgtctgcaggattcaggatgacaagttgcttggtgagtgtggtgacactggg

SEQ ID NO: 7611 - DNA, 579 bp, Homo sapiens
  MAP TO CHR18.3; EXPRESSED IN ADULT LIVER, SIGNAL = 1.3; EXPRESSED IN PLACENTA, SIGNAL = 1.1; SWISSPROT HIT: Q10087, EVALUE 5.60e+00; EST_HUMAN HIT: AI936760.1, EVALUE 5.20e-02; NT HIT: AF037402.1, EVALUE 2.20e+00
ctgtggttgtgacagatgggcttcactgatgcagacatactgttaggggcttagcaatagattaaaaaaaccaccacaatactgtataacataataaaagtgtattgtaatgtacatcataacttgtggccaaggttaaatttgcagtcggagtatgaaagtcgtattccattatacaaaatagatgttacacagaaaagcattaaagatgagttgactcaaccatttatttttagtttatattttattctattttccttggccttatttatgcaatatatttttaatcatatgaaatggcatcgttatgtgtcccttacccccaccttggactgaggggcagcccgagatcttcagactctcctggctttgtggcttcacattccagggggcttcaggctttcctctgttggaaaatggctgatcatgtgtttctgtttttgcttcattcggagctgcttggcacagctaaggccagcagtggcctctgagggtggcctcttttggtttatgtggaatctttggaaacaaactgtagttctaggggctttccccatcccatcaaggggtgacaaggac

SEQ ID NO: 7612 - DNA, 579 bp, Homo sapiens
  MAP TO CHR18.3; EXPRESSED IN LUNG, SIGNAL = 1.7; EXPRESSED IN ADULT LIVER, SIGNAL = 1.4; EXPRESSED IN HELA, SIGNAL = 1.6; EXPRESSED IN BONE MARROW, SIGNAL = 2.3; SWISSPROT HIT: O14338, EVALUE 1.10e+00; NT HIT: gi11545708, EVALUE 8.60e+00
tgtagaagatgccaatccccaattccccccatccatcctcttgaaaagcacatgtcacatctgcttgctatcagcatttatctcgcagcgtgcgtctgactcatttggaaaattcaaagcacatgtttattcctgctgtggacccagccattactgtgcaatttacaggccctgtgcgacccagagcacacaatgtggtggagagcgctgccaaggagctgccccaggctcttggtgctgctaggtttgattactttgctatcagctttgtaaatggagatggcacccctcagcctctagtgagctctcctgtcacttcctagcctgagtcacaaagaaccctttccttctttgccagttggggaaggggaggatcccaacaccggtgtgtttgggagagtggcagcaggtaatgagtaagaagtacagggctcctgagtttctgcaaacaaacagcatttgtgcaacaactcaaaaagtcctggtcacaaaacaaaactgatgtgctttttctccaaatccctgcagtctcagagcctggtaattgcaaacattttcacatcagctcctctccaccat

SEQ ID NO: 7613 - DNA, 584 bp, Homo sapiens
  MAP TO CHR16.3; EXPRESSED IN HELA, SIGNAL = 2.2; EXPRESSED IN HEART, SIGNAL =   2; EXPRESSED IN LUNG, SIGNAL =   3; EXPRESSED IN BONE MARROW, SIGNAL = 2.1; EXPRESSED IN ADULT LIVER, SIGNAL = 2.9; EXPRESSED IN PLACENTA, SIGNAL = 2.7; SWISSPROT HIT: P28668, EVALUE 1.50e+00; NT HIT: AJ400878.1, EVALUE 8.70e+00
tcttgccaatgcatcttcagcttacctgcgctcatgccctatcttctcacagatcctgaaaattccacctgaaaagcctcgttcactcttctgatgcaagagccatcatgaagccataagtaggaagtgaggggaaaatctaacccagggcactttctggagtcttcctggcagccttcagttaatgattcctaagctgattcctccagagcctaacctttaccctcaccttttctctgaatgagagatctaaatcctagaggagagaaaagaccacaagctgcctggaatactaagggcactgcctgatcaataaagaaatggaacagaaaataaaataggtatcttctactcttagatatatttgttataaccaggaatgtttctgtaacttgtattgcccaggtcctcccagcggaggtcacctcctcagccactacccacgttctgcttcctcctgatgatgcaggacccagccctctgcaaagctccactcccccaggtgtttctggaaggttggcagggggtgtatcactcatgctcatgaatcagtgagcccatgtgcccacctgacaccactaacc

SEQ ID NO: 7614 - DNA, 530 bp, Homo sapiens
  MAP TO CHR16.3; EXPRESSED IN ADULT LIVER, SIGNAL = 1.3; EXPRESSED IN PLACENTA, SIGNAL = 1.6; EXPRESSED IN HELA, SIGNAL = 1.2; EXPRESSED IN LUNG, SIGNAL = 2.6; NT HIT: AF399755.1, EVALUE 1.00e-35; SWISSPROT HIT: Q9XSJ7, EVALUE 4.40e-01; EST_HUMAN HIT: BI821590.1, EVALUE 1.00e-61
gcttttctactgggctgtgggcagcagaggcttgacagacacacagggttggggaaacactcaccggtccccggagatcgatgagctcctgcctcatctgggacacgagggcttccttggctaccagggccctgtgcaggcgctcgttgaactcaatcagctcgccatgcatctctgccacctggaacacaagcacggaaaggtgaggcttagaggcagacattccccagggaccaatcccgccttctctggactctccttcctgacacctgtcagcaaaacatctgtaggctgttggggctggagtcaatgacactgcttacctgtgaaccatgcaatccacccataagctcaatgtgtcttgacctgcttcataccgacacttcagagtcaacagtatgaagttatggtccaaataggatggtatcagatcatgtttggaccttgggctttttttttcctctctctttttttttttttttttttttttttttttttttaataagatctcgctctgtcaaggtcaaaca

SEQ ID NO: 7615 - DNA, 554 bp, Homo sapiens
  MAP TO CHR16.3; EXPRESSED IN FETAL LIVER, SIGNAL = 1.6; EXPRESSED IN BRAIN, SIGNAL = 1.6; EXPRESSED IN ADULT LIVER, SIGNAL = 1.8; EXPRESSED IN PLACENTA, SIGNAL = 1.7; NT HIT: AJ303140.1, EVALUE 0.00e+00; SWISSPROT HIT: P29129, EVALUE 1.20e-01; EST_HUMAN HIT: BI767278.1, EVALUE 2.00e-41
gtaggaggaagggtgggaaggggagggaagggattctgggtgagaggcctcatataggcagagccatgcagctggagtgaaggctggtgttacgggcagcatggcgtctgcaagccttgaggccagcttgaaggaggtgaggctggagggggagtctgggggaggaggtgaggctagatggggatgtgtccagggcaggtagccttgagacccctttatttagccccagctcagggaaccctcccacagtggccttgcaaagcagctgcacgccaggcagccctggggagggtgggagcaggcagctcacctggtgtctcctgtgcttctcgggccggactcagacctgcagagcgcaaggccccgagcagagaccaagcccactgaggacctgcggagctgggagaagaagcagcgagccccgctcaggtatgtgggcatggtgcacatgagcatatgttgagcaccagctgtgtacctgcttctgaaggattcagagcaggaagttttgctctggtctgtgttctcttcagggagccaacacttttgatgca

SEQ ID NO: 7616 - DNA, 592 bp, Homo sapiens
  MAP TO CHR19.3; EXPRESSED IN ADULT LIVER, SIGNAL = 4.2; EXPRESSED IN HELA, SIGNAL = 1.5; EXPRESSED IN FETAL LIVER, SIGNAL = 1.4; NT HIT: gi14756693, EVALUE 0.00e+00; SWISSPROT HIT: P32942, EVALUE 1.00e-39; EST_HUMAN HIT: BG028801.1, EVALUE 0.00e+00
tgcccaggagcttaatgaacaggaccttcctgtgggtcaagccgctccctccgccctcccctttcctctcgggatatccgggccacgctttcggccgttcaagcctcgccctctttccgcgctgtgtccagcttcgggcactcaggcccaacccacgttgcaactgctattggggcaagccaggccccaccttttcggctagtctccgccccctctgccacgcccccagactgctgaggccgcgcccccttcccacgcctcctcttactaaagaccgtcaagttctcccgggcctcccgtctctcgccccctagggtcacgttgcagacgatctcccgggcaccctcctgatccgcgcgcgccgtggctgtggctgtggccgttagcgtgtccccgtggttcatgactgtcgcattcagcatctggtcccccagcgccaggtagacctgggcctctgaggctggaaaaagcccgtctagggtgcagtccaccggccacgacgtttccacctccaagaaccggggggccacgaggcgcgggggggtcacgggcaggactggggagaaaggtgggcatagtacaacccccagga

SEQ ID NO: 7617 - DNA, 591 bp, Homo sapiens
  MAP TO CHR19.3; EXPRESSED IN ADULT LIVER, SIGNAL =   1; EXPRESSED IN HELA, SIGNAL = 1.4; EXPRESSED IN LUNG, SIGNAL = 1.2; EXPRESSED IN BONE MARROW, SIGNAL = 0.92; EST_HUMAN HIT: AV751658.1, EVALUE 0.00e+00; NT HIT: X00264.1, EVALUE 0.00e+00; SWISSPROT HIT: P01229, EVALUE 2.00e-44
ctttattgtgggaggatcggggtgtcagggctccaggagtcgggatggacttggaaggctgcggggagggtctttagaggaagaggaggcctgagagttgggggtggtcacaggtcaaggggtggtctttgggacccccacagtcagaggtgctgcggcggcagggtccacagcgacagctgagagccacagggaaggagaccacggggtccacaccacgcgggcagccagggagccggatggactcgaagcgcacatcacggtaggtgcacaccacctgaggcaggggcggcaggaccgcctgcagcacgcgcatctggaggccgtgtgagtgggggaatgagcatgtgcctgaggccagcgcctcagctgagctcccaagctgaccccacaggtcctggactcaggagcccaggaagccctctgttcctgccttcccacaccccattccccaaccgcaggccagagaggcagaccacccttcctcccccgctgcctctgtgggtctggccctgaggtggcagcatctgcccctggccccaggcagctcaccatggtggggcagtagccggcacagatggtggtgttgac

SEQ ID NO: 7618 - DNA, 520 bp, Homo sapiens
  MAP TO CHR14.3; EXPRESSED IN PLACENTA, SIGNAL = 1.5; EXPRESSED IN LUNG, SIGNAL = 1.6; EXPRESSED IN BONE MARROW, SIGNAL = 1.8; EXPRESSED IN ADULT LIVER, SIGNAL = 1.1; NT HIT: D67014.1, EVALUE 4.90e-01; SWISSPROT HIT: Q9UKP6, EVALUE 4.90e-02
catccggctctctgggaccatagccaacacagcttcaggagctgaagcagaacccctgggggaagccactgaagcagaagctcgctgaggctggggacggggtacacaggatggaagggatctgccgggacaccgactggccgggtctgctccagggtcctgtggtcccacagccccacggtcccacagatgttctgcaggggttggccagtcacttggaggcagtgggtgtctgcaatcacggccctctagggtctgataataactgcaaagatgaatagcaaccctcccaccggccgggccctggggcacctgctgccatttctgcagccaaaggtgtagggacaggcacctttccgcccctctcagcagcacaagaatgggcgctgggcctggaactcttccttccccgagataaagaggccctcacagcctaagtggggcttgtttctgtgtgtgggaagacttttccctgattcaggctctgtgccttcctttgccctccttaaacctgtgcgtc

SEQ ID NO: 7619 - DNA, 514 bp, Homo sapiens
  MAP TO CHR18.3; EXPRESSED IN HELA, SIGNAL = 8.4; EXPRESSED IN PLACENTA, SIGNAL = 4.9; EXPRESSED IN LUNG, SIGNAL = 7.9; EXPRESSED IN ADULT LIVER, SIGNAL = 3.4; EXPRESSED IN BRAIN, SIGNAL = 2.3; SWISSPROT HIT: P14187, EVALUE 4.80e+00; NT HIT: AF083096.1, EVALUE 7.60e+00
taaacttgcgcaacatcctgctcccaagaaagacgtgcacttgctacttcatccttcgctccatcttggtcctcccaactggagagaggacagcctagacgagacttcccacaaccaagatggcggccgtgcactccttgcccacagctggccttttctccactttcggtctccatcgtaacgcggctggctctctcggcgccggcttaggccttgcaagtagggaaatggtgagtctttcccgccccctcatttttgcgacagttgcagcgaaagtcacggcagttggggctggtgtcagctgatttactgcagtggcggcggcggcggcaccggcaccttgcagtatcactggggagacggcggctgtatagcgcttgccgccccacggattatcccagcaggatctacgcaccccgcatcctccgtagttccgccctatccttgtcctccttggctggggcgcccaccggcggtctgataggctacatcgcggcatgagatgaagctgtga

SEQ ID NO: 7620 - DNA, 539 bp, Homo sapiens
  MAP TO CHR19.3; EXPRESSED IN ADULT LIVER, SIGNAL = 2.9; EXPRESSED IN HELA, SIGNAL = 1.7; EXPRESSED IN PLACENTA, SIGNAL = 1.7; EXPRESSED IN LUNG, SIGNAL = 2.1; EXPRESSED IN BONE MARROW, SIGNAL =   3; NT HIT: gi14755767, EVALUE 1.00e-47; SWISSPROT HIT: P17483, EVALUE 5.10e-02; EST_HUMAN HIT: AU143397.1, EVALUE 2.00e-47
caagctctgggtctccactcacctgtgcacaggccttcgggggctctgggggcttctcatcctgctcttccatgctctcctccaggcacagcagggtgctgaggtcctgagctgcactgagagaagccccaagtacagcatgaagatgtaggtctgccggaaccgctgggccccccacccccattagcccctgctcccaggatgcaggatgcattcccatagcaaatgcacttctggaggttcctgccagcttcctgcccaaatacctgtgtatgtactgagagtccctcagtccctctcccaggccaagtttctgcagctccaacctggttcctccaccatcttgggcccctggaccatctacctgtaagcccagcttgtgcccaacatggccttctgcccaccaccaaagtctgcagcaccagtccatccctctcctattcactgggccctgggatccccacaaatatcaggcatatcgaggaccccctggtgttcaccccatcctacccctaccaacctcaatctacagccccaaa

SEQ ID NO: 7621 - DNA, 584 bp, Homo sapiens
  MAP TO CHR18.3; EXPRESSED IN BRAIN, SIGNAL = 1.8; EXPRESSED IN ADULT LIVER, SIGNAL = 1.7; EXPRESSED IN PLACENTA, SIGNAL = 1.5; EXPRESSED IN HELA, SIGNAL = 1.6; EXPRESSED IN LUNG, SIGNAL = 1.9; EXPRESSED IN FETAL LIVER, SIGNAL = 1.2; EXPRESSED IN BONE MARROW, SIGNAL = 1.9; NT HIT: AF090190.1, EVALUE 8.70e+00; SWISSPROT HIT: Q07954, EVALUE 5.70e+00
tgaaacataccggaagagggatcagccacttaggttggtccattacccatgggacaagggagggcactatctcaggtgtcagatccctttaactaacacccctaacctctgcgattgttggagacagacactggggtgagccagcatcagccaggctgcagcgaatcagacaagcacaagcaccaacaaagccttcatttgctgcttccggacctaagtaggggcgagggcacacgaaagggcaaaagggactgtggctatcaagacagccgggctccagtgtcacactgaagccaaaaaacttgtacctggcacaactgtaaggaccagggaggattacccactgggcagatgctggctgggcatctgtcccccacagagaggccactgtgctgagaggcacccctgaagagccttggggctattaggttccatgcatgatctctacttactatggctggtcaattcgggtctccagttccttggccactggtgatgccatattttaagaaatattttaaatgtcaaggaggaagaaaagaggctcattagaaagtcagggaagttgtcctgaggtggtcaca

SEQ ID NO: 7622 - DNA, 524 bp, Homo sapiens
  MAP TO CHR16.3; EXPRESSED IN LUNG, SIGNAL =   4; EXPRESSED IN BONE MARROW, SIGNAL = 5.6; EXPRESSED IN FETAL LIVER, SIGNAL = 2.4; EXPRESSED IN BRAIN, SIGNAL = 3.3; EXPRESSED IN ADULT LIVER, SIGNAL = 5.6; EXPRESSED IN PLACENTA, SIGNAL = 3.4; EXPRESSED IN HEART, SIGNAL = 2.5; EXPRESSED IN HELA, SIGNAL = 2.6; NT HIT: U63479.1, EVALUE 7.80e+00; SWISSPROT HIT: P10667, EVALUE 8.00e-09; EST_HUMAN HIT: AA309565.1, EVALUE 2.00e-66
ttttgtgcaacttgacagcctgattcttcagggtggaaagagcaattgaattctgggcagcaaccccagagccctgtcttctgccttcacccaggagacgtcgggtgtgaccactgaatctcagtccagaatcgagatgggctgcaccagcagccagacccagacgcgctgtcccacagggatggccagggccacagtgtgatggtgcagggctcaccagaaggcgtcctctgtgcacctccatccccacatccccacagacatggacccccgtccccgcgtccccacagatgtgcacctctgtcctgggatccccagagatgtgcacctccatccccgcgtccccacagacgtggacccccgtccccacatccccacagacgtgcacccccatccccacatccccacagacgtgcacctcaatccccacatccccacagatgtgcaaatggccttatttcttcaaagagaaggggacaaaaatcctcaagaaagtcttcttttctctaccctgcatccacctc

SEQ ID NO: 7623 - DNA, 544 bp, Homo sapiens
  MAP TO CHR18.3; EXPRESSED IN BRAIN, SIGNAL =   1; EXPRESSED IN ADULT LIVER, SIGNAL = 1.2; EXPRESSED IN LUNG, SIGNAL = 1.1; NT HIT: AL163300.2, EVALUE 5.20e-01; SWISSPROT HIT: Q99460, EVALUE 1.50e-01; EST_HUMAN HIT: BF133034.1, EVALUE 7.60e-01
tgcctccttctctgaacacctatttctctccacaacacaatctagagttgtatcatgcatgttcttcttatccacagttggcttgcattttagccccaacaatgctgttaacctacccccaggcctagttgtcaaaattaacataaataaatgagtcttgggccacaggaattagagctccttggcacactgaacaaagcaaggtagtgattcttttgaatttgttctgggcataggcagtaggaatggtgaatccatccttcttggattgctcatataggcaatcaaagcccacatctttaaatgctgagacaactggataactgcagtaggtggaagctgaagaagtatagaatgcgtaagaggaaatgctgtgttttctctattaccaagaggccttgaaccatcttgaagagggatccacatatcagatgatttttccgaaacatttcgatgatgtgttggtgtttctggtggtccattgttttccatattatcccttgatttcgaccaaggtctttttagatactctgggtgctgggag

SEQ ID NO: 7624 - DNA, 599 bp, Homo sapiens
  MAP TO CHR16.3; EXPRESSED IN HEART, SIGNAL = 4.7; EXPRESSED IN BONE MARROW, SIGNAL = 1.8; EXPRESSED IN FETAL LIVER, SIGNAL = 3.5; EXPRESSED IN ADULT LIVER, SIGNAL = 3.4; NT HIT: gi14779133, EVALUE 0.00e+00; SWISSPROT HIT: P25129, EVALUE 4.50e+00; EST_HUMAN HIT: BE466150.1, EVALUE 0.00e+00
atactcaccggcttttgtccttgtcagatcctcacactgctggatgctctgagtatggtgcacagtcagaagatgaagaaggccaaggagcagcggcacctgcacaataaagagcacttcagagccaagcagaaggaggaggaggagaagctgaagtggcagaaggacctcaggaagaagctcttccaaattcaggggcagaaggaaagaagaaaccagaagtccagtttgaagggggctgagggccagtttcagtgagcctttggactggagggactgtccctggatctgcagaggtggacagtttcaaacatcacagtttgaatgcctgtgaatgacaagtcagtgggcaagaactcaagagatgtctctacacaaactgtgcctgcaagaggaacagagaagcctggactacttggaccgggttcattctcatcacttggggctgtcgagatttaaagtgatgtaagctgtggttgtgtggattctcttactttcctctgcctgcctcagtttaattattttgtcctgcaaaaataccattaaatttttttttgttagttttggcttagtagttttcattagggatgaatgcctga

SEQ ID NO: 7625 - DNA, 578 bp, Homo sapiens
  MAP TO CHR18.3; EXPRESSED IN BRAIN, SIGNAL = 1.2; EXPRESSED IN ADULT LIVER, SIGNAL = 0.93; EST_HUMAN HIT: AI277526.1, EVALUE 8.10e-01; NT HIT: U34999.1, EVALUE 1.40e-01
gccccttaaaaggaatctggtttattccagaatattctaaagatacttggcaatatcagtggctgcttgcattccacgcccagctcaaggaaatgctgaatgggaaagactgctaccccttgaacaatggtgttcagtcacagatgttgaggtctttgtcaccagtcgtgtatggagttacaaggcaagggaaccaggtatgtgagtctcactttctatttctgggcctaatttacctgaagtgccctggaagaacactatcaatctctcacttcttagtatgtattcacattttaccctacaacttaatgcattttgtaaactttagcaacaatacactcaattttactaggctgatatgagaaaaacattattcatagatttatagcacatatctgtagtcacaagaattctgacaaacaaaatccaactatggtaaaagtataacagatgtgatcatggtgactttacttgaataatccagatttgaagactatttttaaaatttctaccatcaaactaacgatttaatgttattttcagtaattttgaacaatacccaaggaacatccaaacat

SEQ ID NO: 7626 - DNA, 577 bp, Homo sapiens
  MAP TO CHR16.3; EXPRESSED IN HELA, SIGNAL = 1.2; EXPRESSED IN LUNG, SIGNAL = 1.3; EXPRESSED IN FETAL LIVER, SIGNAL = 1.3; EXPRESSED IN BRAIN, SIGNAL = 1.2; EXPRESSED IN ADULT LIVER, SIGNAL = 1.4; NT HIT: AF287967.1, EVALUE 8.60e+00; EST_HUMAN HIT: BI092909.1, EVALUE 3.20e+00
tggcattgcattgtcttttggacatatactctaaggaaaattccttctgcctctccttaattcagaaagaagggaaaaaattaaaatccacagtatcttcttttagcattaagtaatcttaaaatctttttttaatttaaaaggtagtaataaatctacatccccaaactgaattatttgtacaagccctggaattctaaacctctgcgggcctggaatttggggcaattacacctaagggccagacctgcagtaatgccccaaattactttctggagggggtggccagggggtttccattattttaaagttaagacttcaaaccaaatgtttctccctttattgatcttctttcatctcccttcattgcatttcctgtttggcttttacctcttcttctctttttttccaccctggtggtgaacaccctcaaattggtgattgaagaccttgaaggtgctgtttacaaaggctgttaatgcccctgtcctcatttcctgtgttcctgccaacaagcctgacacaaagccctcctcagtagacacactaaaatatcggagagaccccactgagtttc

SEQ ID NO: 7627 - DNA, 561 bp, Homo sapiens
  MAP TO CHR18.3; EXPRESSED IN LUNG, SIGNAL = 1.5; EXPRESSED IN BONE MARROW, SIGNAL = 1.7; EXPRESSED IN BRAIN, SIGNAL =   1; EXPRESSED IN ADULT LIVER, SIGNAL = 1.5; SWISSPROT HIT: O43520, EVALUE 2.00e-19; NT HIT: gi5031696, EVALUE 4.00e-97; EST_HUMAN HIT: AW997038.1, EVALUE 4.00e-18
tcagatatgctctcccagcccttcttactaaggacaatgggtacttgtccaagcccatccaccattctgtcagtcgcatcctaagaagagatcagagaagattctctcctagaccacgcaaaatagaccgatcatctttggcacgtgtggccatgacccacatgaggatttataagcgacctagtcaccgggacttcatgtggttaccttttctgaatggctcccggttctcctctgcttccctgttgactcggttttgttctggttcaacagcagacccctggtcatcaagttcatcttctgtttcatcatcactgtagggaaccacttcgtcattaggctgagaatcctcgtcaaatgtcgtttctgagtctctttctgtactcattctgctggcaaattggaactacctgcttaaaaggaaagagaaaccagagtgaattatgactcttgcccagtttttggttgaatactgcctgcatgctgctacaatgccccttttacagaacattgtctaacatgtaaatattctggaatagtacccccaaattcaacttgaca

SEQ ID NO: 7628 - DNA, 572 bp, Homo sapiens
  MAP TO CHR19.3; EXPRESSED IN HELA, SIGNAL = 4.2; EXPRESSED IN HEART, SIGNAL =   4; EXPRESSED IN BONE MARROW, SIGNAL = 4.1; EXPRESSED IN FETAL LIVER, SIGNAL = 2.9; EXPRESSED IN BRAIN, SIGNAL = 3.6; EXPRESSED IN ADULT LIVER, SIGNAL =   4; SWISSPROT HIT: P21436, EVALUE 1.90e+00; NT HIT: AF112202.1, EVALUE 4.00e-48; EST_HUMAN HIT: BI833271.1, EVALUE 0.00e+00
gagaggggaggagtcatgtggtttgaaaaggagtaggtttaaggcacagcagccaggtggatcctgggtttgaggaatagcaatttgagggggctgagactcgatggaaggatcggttgtgtctgagattttaagggatcaggtttgggggatctagtgtacatctaggcttgggcggacttgggttttgaaggacttggatttggggtctgaggtctgtctgcattccaaaagaccaagatttgagggaccaaggattcatctgggcagggggtttctcaccaaagagcacaagcttggactccaaggtgcgcagatagagaatgtaacaggcgccgaaaaagacagccagagccaccagcaacataggggacgtcaccctggaggaggagtgcagggaggcagcggttagacagctggggctgggccagcccgacggccctggccttctccaccggcgggcggcaagctacatcctggagaccagggagggccaggtgacatttagtcacactgcatcctggccagggtgatggtggggtaggggacctggccctttggtgacaaggtag

SEQ ID NO: 7629 - DNA, 531 bp, Homo sapiens
  MAP TO CHR18.3; EXPRESSED IN ADULT LIVER, SIGNAL = 1.2; EXPRESSED IN LUNG, SIGNAL = 1.4; EXPRESSED IN BONE MARROW, SIGNAL = 1.2; EXPRESSED IN BRAIN, SIGNAL = 1.6; SWISSPROT HIT: P13561, EVALUE 8.50e+00; NT HIT: AB010415.1, EVALUE 7.90e+00; EST_HUMAN HIT: BG988647.1, EVALUE 7.40e-01
tgtgtgaagaagtgatggcgttttagttcagctcacagtgaactcagttggtaattcatcaggagtttctgtgattcatactctttccattcttaggtgttttcctatcgtatgtctgctggcactcatcttcactgtgatttcttatgactggaatgatgctgttgtgatttcacatggtatgcctcggtgcacttgaatttgcaaatcgaggcaaacctgaatgctgttgtcattgttagactgaggttaccctttaagctcttggtccagctatggccattataatcttaggctgtaatggtcttttgagggtgggggttgactactagccacctgtgatgtggactggggaactttggtgcccacactacagagcaaggcagacaagtgaaactgaaacaattaattctgcaactattccatgttactctttgaattcagaagacatcccctatataccttggttttaaaatgacaacacaaaccccccatattcccaatcagatccccttcagcccttgtcagaga

SEQ ID NO: 7630 - DNA, 533 bp, Homo sapiens
  MAP TO CHR18.3; EXPRESSED IN HELA, SIGNAL = 2.4; EXPRESSED IN BONE MARROW, SIGNAL =   2; EXPRESSED IN ADULT LIVER, SIGNAL = 1.9; SWISSPROT HIT: Q61789, EVALUE 4.00e-19; NT HIT: gi15305813, EVALUE 2.00e-86; EST_HUMAN HIT: AA693671.1, EVALUE 7.50e-01
ttgacacagcctttgaggtgagagcagtgagttcattgcatcgcacctgagtgatagagaatcaaataaaaaggttgtgctgtgccatgtgaatctgaaccaaattgctaagtacagcatacagctttttaagaaaatgccacatttttacactgcccatagagaggactcccaatacccacactggtgatgacgttgggccacacaactagtcacctgcttgttttcaagagctgcctcaaaaagaaaataacctcccaatgcaagtaacagccaaagttcctaaggcagatttcctaattgttcctttacagaggaattcccttggtggggctgagtacctgtagttgcagctgtaaatgttcacctggcctgccagaacagacccggagctcttcacattcacatcaaccacaaacagctgagctgcctccgtggaatactcgaccacaaccacgtagtggccaacctgtgggatgcgcagccgcagatgcaattccacctgtcacagaggccaagcagacagactgtga

SEQ ID NO: 7631 - DNA, 596 bp, Homo sapiens
  MAP TO CHR16.3; EXPRESSED IN FETAL LIVER, SIGNAL = 1.7; EXPRESSED IN ADULT LIVER, SIGNAL = 6.8; EXPRESSED IN HELA, SIGNAL = 1.7; EXPRESSED IN PLACENTA, SIGNAL = 1.4; EST_HUMAN HIT: BI261391.1, EVALUE 2.00e-50; SWISSPROT HIT: Q01113, EVALUE 6.00e-04; NT HIT: L39062.1, EVALUE 0.00e+00
gagggtgaaggaagggagactaaggtctgtccagggactgaagatagggaggtaaaggaagcaagaatagagactgaggtccaggctgaaccctagaggacatgccccagcacagtttgggccaaacctttccctagggtctcaacatcggacaaaccagtcccccaaacatgccctagttctccacacacctcatacagacactagtgcccagccctcacctcgtccatcccccgagacagagactcccgagcagacacaggtgcagacgcaggtgcaggccaggagccaggtgcccatgtcttgcctcagggcctcactctccaaggtccagcctgcaaggggctgggctgagggcctgtgcgagccatccctctctggaggggtgctccccatgaattgctccccagcggagtgctcagcgggtctccatctgcactcacacagtgtcctgtgaaagacgctgggcaccactgcccagggtttactgataaggaactgaagctcagaaaggccgattgacccagctgcagactcgtggctgcagggtgtcagatgcaccctcaaactttgatccggactctgacttagccagg

SEQ ID NO: 7632 - DNA, 590 bp, Homo sapiens
  MAP TO CHR18.3; EXPRESSED IN ADULT LIVER, SIGNAL = 0.91; EXPRESSED IN PLACENTA, SIGNAL =   1; EXPRESSED IN HELA, SIGNAL = 1.7; EXPRESSED IN BONE MARROW, SIGNAL =   1; SWISSPROT HIT: P38482, EVALUE 6.60e-01; NT HIT: gi14762663, EVALUE 0.00e+00; EST_HUMAN HIT: AI589624.1, EVALUE 0.00e+00
cttaacttttcagcccacggaaaaattatctttttctaataacaaacacaataattacttacagtttagaagtggttgcatacaagaaatgtcagataaaagaaaactgcttttcggtggtagcaggtatttctgtcccattaaagtaatcacttttgtaaagctagagttgttttcaacaactcgcaaaaataaatcctgttctgtaacagatgtatcctcttccaccaattgtaatgtctgatgttccatttcattcagagaaggcaaatgctttgccatttcacataattctgacaaactgcaggcgtcaagtggtaaagtaatgggcttactacccttgtcctgtttttcaaaaagtggataaagaaaaccacttttgagaccttcctggatcaactgtaaagatccatccaaaatcagctccctgatctgtaagagaattttaagtacattaaaagaacgttgacattaaaaaagaacattgactgtgctttgaatatctgagtttataaactgaaatcaatatccttaacacttacagtaaaataattctgtactacaatgaaaagaatgtgtgagcacgcctt

SEQ ID NO: 7633 - DNA, 575 bp, Homo sapiens
  MAP TO CHR16.3; EXPRESSED IN HELA, SIGNAL = 2.2; EXPRESSED IN FETAL LIVER, SIGNAL = 1.3; EXPRESSED IN ADULT LIVER, SIGNAL = 1.9; EXPRESSED IN PLACENTA, SIGNAL = 1.7; SWISSPROT HIT: Q27591, EVALUE 3.20e+00; EST_HUMAN HIT: BI115554.1, EVALUE 2.00e-01
ccttctcctttcctcaacccacctcgcctctgaacaatgagtcccagttttgcagtaccagagattgaggggcagggcagttagatgcgtctctgcaagtttcctgagatggtgatggcaggtggcagggcaggacccaggtatcctgcctcctgggcctgggctgtgcctaagaggaaaagaaggacattattaaaccccagggccaatccctgagcctaagtagccctgtgccactgcggatgtggcagcaccttttgaggcaagtagggataggatcttttaaaaataagagaacttctgatctcccttaagttggccagagagcccagaccactttccctcctcagtggacatgggacttgaaatgcaaacccgccttcggcactgggatcagcagtaacactggcgagtcttccgaagactgggtggttggctgcgttccccacattccccacactcagagaagccctctctcccacactaccaaaatcacacactgctgagctttgctttgaaacacaacatccaacaaattatgaatcatgaagatccggactcattggccaacaaat

SEQ ID NO: 7634 - DNA, 550 bp, Homo sapiens
  MAP TO CHR16.3; EXPRESSED IN PLACENTA, SIGNAL = 1.1; EXPRESSED IN HELA, SIGNAL = 1.1; EXPRESSED IN LUNG, SIGNAL = 1.4; EXPRESSED IN BONE MARROW, SIGNAL =   1; EXPRESSED IN BRAIN, SIGNAL = 1.3; EXPRESSED IN ADULT LIVER, SIGNAL = 1.4; NT HIT: Z97338.2, EVALUE 1.30e-01; SWISSPROT HIT: P07112, EVALUE 3.00e+00; EST_HUMAN HIT: BF379314.1, EVALUE 2.00e-97
aacgaggtgacagcaagaccacaaactaataaatatgccggtattgacataatgtcggacctcagtatgattgatgcatgtgttgttgactgggatgtcacatgttcaggctgtaatcctggtctcagtatgactgtgaggacggggccaagtcatttcacaatttgggtgagtgttccaagcttctcagaagagcgacgcaatagaaattcaaggtatgaaattcaaggtgtggtctcagagtcattttatcttacagcttctctgctgtgttttctcagtatgtgaaatgggaacatcacttaccatctactcacctcctgtttgagttcaagggaaggtttgcagattggcctgaaggaagacttctcttgaaaaactcaaaccaaagagcacaccgccgtccccaaccctgagccatttctgtccttttcatggaaagggaactgtgttcgccagctcgtaaagccccggcgtctcctcctagaagaaacacccacattgacccagcagtgttcattttcccataaggtggtgctggatagggata

SEQ ID NO: 7635 - DNA, 577 bp, Homo sapiens
  MAP TO CHR18.3; EXPRESSED IN FETAL LIVER, SIGNAL = 2.7; EXPRESSED IN LUNG, SIGNAL = 2.5; EXPRESSED IN BONE MARROW, SIGNAL = 2.7; EXPRESSED IN ADULT LIVER, SIGNAL = 4.7; EXPRESSED IN BRAIN, SIGNAL = 3.1; EXPRESSED IN PLACENTA, SIGNAL = 2.7; NT HIT: gi14777055, EVALUE 1.40e-01; SWISSPROT HIT: P35246, EVALUE 3.20e+00; EST_HUMAN HIT: BF969795.1, EVALUE 5.20e-02
caaatgtgaaaatgggaggggatttaaaaaaagaaactattttctgtattcctactgtatttttatatggggggcaagttacgtatgtccccaatataaaaatgactgtgctctagcaaattttaagcctgctatttatgcttgctaaattcaagagtcttatagtacaaatagtttttctcaagtttttctattgtattcccatttgcattttctcctaccaagcgctctttgagtcccatctctatactttgcaaagacagttcttggaggttcaggctgggcgcgtgcttgcctggcattgggtccgtgttttgtgcggtagtctctgtgtaatacagcttgcctctcacctggagtcatctggcctgcaggcccctgctcccccaaggcccaggatggcccggaggcacttgctctgggtgtgctacttagtgcatggaaccagggctgggtgcaggaagagggaggaaggctgcaggtcaggatgggggactgggagctgggtgagcacctccctgaggatgagcaggcagcaggccagagggtcgggagccctgaggaaccctgcttgttg

SEQ ID NO: 7636 - DNA, 532 bp, Homo sapiens
  MAP TO CHR18.3; EXPRESSED IN BRAIN, SIGNAL = 1.1; EXPRESSED IN ADULT LIVER, SIGNAL =   1; EXPRESSED IN HELA, SIGNAL = 1.5; EXPRESSED IN PLACENTA, SIGNAL = 0.88; EXPRESSED IN LUNG, SIGNAL = 1.4; EXPRESSED IN BONE MARROW, SIGNAL = 0.81; EST_HUMAN HIT: AI681762.1, EVALUE 0.00e+00; NT HIT: gi13647515, EVALUE 1.00e-63; SWISSPROT HIT: Q64689, EVALUE 1.00e-16
ttttatggtctctccggcacccggagggatggacaatgcagatggggttccctagttttctttttttctctcgggtgtgtgtgggagcagagggtggaccaaatgagaggggctccgggacggaacggagcccgcacgcgtaccagccgccctcgccccagccgctgcactttaatggctacctcggcttccccgagctgaggccagcacgcttgtctgtgctcatgctcctctccaggtcacaatttgcgctgaagtttctagacccgtcattcgtgcccattacgaattctctcacccaggaactccaagagaaaccttctaagtggacatttaatcggacagcgtttttacatcaaaggtaggataggaggaaaagatccaaaaggtgcttttaagaattcaagagctcaaaacaaaacaaaacaaaaacaagcaaacaaaaacatctaaaacaacaaacatctatacgccccaccctcaccatcaggtgtatctgcattgttttcttggcatgactgcacaaagcaat

SEQ ID NO: 7637 - DNA, 551 bp, Homo sapiens
  MAP TO CHR16.3; EXPRESSED IN HEART, SIGNAL = 1.7; EXPRESSED IN FETAL LIVER, SIGNAL = 1.9; EXPRESSED IN LUNG, SIGNAL = 6.5; EXPRESSED IN ADULT LIVER, SIGNAL = 1.9; EXPRESSED IN BRAIN, SIGNAL = 4.4; EXPRESSED IN HELA, SIGNAL = 9.1; EST_HUMAN HIT: BF309636.1, EVALUE 0.00e+00; NT HIT: gi8393008, EVALUE 0.00e+00; SWISSPROT HIT: Q9WUI9, EVALUE 5.20e+00
agaccagggtctgcatatcgctgtctagagcccggatctgccgcaccatgtctgtctcactgtcctcagctgggccagagggcactctcgacgcagcttgcctaggtaaacttccgggtcgaagtgcaccccgttcagatcagtcgtgtccaggggttcgggccccgcggggcgtcccgccgcctccccttccgagaagccatagtaaagcatcccgtgtgccttccgccgacgctccggagcctccccctcgggcccttctggggagtccccaggtccagaccccgggctatgtccagcagcagctgccgccgccatagctccaactgcagcccacgggtgtaactttttatatttttaagttggatacatcaagctacttggcttttgctttcatcacatcattgaggaaagcggtggttgcttatggtacccctgtttttactgcaacctgtaatggatgagaatctccctgttgcaaagagcaaaacactgaactaaattgtgctgcaacacagccctgtgttgggggactgggagtgatcatgcaa

SEQ ID NO: 7638 - DNA, 544 bp, Homo sapiens
  MAP TO CHR19.3; EXPRESSED IN ADULT LIVER, SIGNAL =  43; EXPRESSED IN HEART, SIGNAL =  44; EXPRESSED IN BONE MARROW, SIGNAL = 4.3; EXPRESSED IN FETAL LIVER, SIGNAL =  21; EST_HUMAN HIT: AW771808.1, EVALUE 0.00e+00; NT HIT: AF030249.1, EVALUE 0.00e+00; SWISSPROT HIT: Q13011, EVALUE 6.00e-12
cgacttttgctcactccctccgccccggaattccttgtgcccctcgcctgcccgctgccagtctgaatggccatcacctccatgccacccattcccatgcatccaacctctagccccagccttcaggactgcagtctctggagcccctaggtgcatcccagcccctcccacctctcctctatccaagaagggcaccaggttctttactttgctttattgtttgtggggtgaagataaggccttgggcttgagaaactcattgtcataaagttataaactgggaaactgggtcagaaggcatagaaacaactgtcatcgcccatcctccctttctgtggatgaggcgggacaaggccggccccctggctggggcctgggacgcgagggctctcagagcttggagaaggtgacggttttcagttccttgttctcagtcgtggcctggaccgacttcacgaggtcttgggtctgcagcatgctcatgttccaggacgcctggtaccgagggtgttgagagagaacgaggagagagattagcaggggc

SEQ ID NO: 7639 - DNA, 534 bp, Homo sapiens
  MAP TO CHR19.3; EXPRESSED IN ADULT LIVER, SIGNAL = 9.6; EXPRESSED IN HELA, SIGNAL = 6.6; EXPRESSED IN PLACENTA, SIGNAL = 9.3; EXPRESSED IN HEART, SIGNAL =  12; EXPRESSED IN LUNG, SIGNAL = 6.3; EXPRESSED IN FETAL LIVER, SIGNAL =  17; EXPRESSED IN BONE MARROW, SIGNAL = 7.2; EXPRESSED IN BRAIN, SIGNAL =  14; SWISSPROT HIT: P15923, EVALUE 3.90e-02; EST_HUMAN HIT: AA357418.1, EVALUE 2.00e-81; NT HIT: gi14785797, EVALUE 6.00e-90
agcgaagccaccgagtaacgcggagctgggtcagccctgaccgcttacagcccggccgtgctggcactccatgatgtgctgaagcagcagctgagcctgacgcagcagttcatccaggccagccggcacctgcacgcctccctcctgcgctccctggacgcggactccttccactaccacaccctggaggaagccaaagaggtgagcgcagctccccatgggcaggggcagggcagtaggggagcggcagctcccagaggccgggccgaagggatatgggccggggcctgggctccagcgctcagcccagggctgcagggatgcagtggggccatcacctgtccctgtggagggagcctcatttcctgccaccctgtggcaaaagctggtacagggtggggtgctgagctcctgcaccttgcagccagccccgcctgggctgtgtgacctcagactaaagggacctactgttcgtggcactgttttctcccatgggaggggtcctgtccctttccctgagcctcctgagacatc

SEQ ID NO: 7640 - DNA, 588 bp, Homo sapiens
  MAP TO CHR16.3; EXPRESSED IN HELA, SIGNAL = 1.2; EXPRESSED IN FETAL LIVER, SIGNAL = 1.3; EXPRESSED IN LUNG, SIGNAL = 1.7; EXPRESSED IN ADULT LIVER, SIGNAL = 2.5; NT HIT: M32998.1, EVALUE 0.00e+00; SWISSPROT HIT: P11597, EVALUE 3.00e-08; EST_HUMAN HIT: AW450046.1, EVALUE 1.00e-118
gatagggaggagttgggagccaatctccatctccgtactcctaacccaacttccaccacgctggaggagacaccagggttccagctgtgagcctggtgcttgccttctgctacaagccccatcccgacctccttggagacttctagctcaagctctggaggaaatccaccagcaggtgctcagggaagccaaagtccatctgcagcagcaggaagccctgaagggaggggcagtaggagagaggggcgagctgggctgactcccaggccaccaggagggagccaagctggtagaggcccctctgtctgtctccccaacagcccccagtcaccccaggaatcctgtctgggcctctctccccaggaacaggggctggtgaggggggctttgtactcacatctcgagtgataatctcagggttgatgatgtcgaagaggctcacgcctttgctgttcatgagggctgtaaacactacctcgagccctggggcaggggacagagccccagtcagcccttcttggggagcaaggccggcccgaggctctgccaccctgggtagtgggagatgctgagacccttttggaccaa

SEQ ID NO: 7641 - DNA, 590 bp, Homo sapiens
  MAP TO CHR18.3; EXPRESSED IN FETAL LIVER, SIGNAL =  13; EXPRESSED IN ADULT LIVER, SIGNAL = 7.7; EXPRESSED IN PLACENTA, SIGNAL = 7.8; EXPRESSED IN HELA, SIGNAL =   7; EXPRESSED IN HEART, SIGNAL = 7.5; EXPRESSED IN LUNG, SIGNAL = 6.4; EXPRESSED IN BONE MARROW, SIGNAL =  10; SWISSPROT HIT: P57181, EVALUE 4.40e+00; NT HIT: X07221.1, EVALUE 1.40e-01
tatcacctggacaggtacggctaaaagaaaaatgtttgctcaacactttacctcttctggcaaattctgcctgtcctctcttccatcacttaatgaatgtacattttccacaagggtccgtagtaggatctccatttttaaacttagggccattttcagcatttaaagaaaattttgagcctttgctcatgtgggttcactaagtttactttaaatactgagttttaatcaatggggggcttttcaggaggtgtcatctctcaattatgttctgtaaagcaccagccctaattgtttatctttaaatggtttctttttctgctgatgtgagtttctagctctttgggtttggctcctgggcccttgattgcttagaggagaaagggttttatcttacatacagttttgcaggaagattaatattctgagaggagtctgagctgaaaacaatttcctcatggtcagaaataaggacttcttgctgtatcctgtttaactctcttaactattccctttctcttctcattctctgcctagtaggttgtaaatatcactgcttaatgtctgtagtgtggtgtcaattgcatgag

SEQ ID NO: 7642 - DNA, 564 bp, Homo sapiens
  MAP TO CHR14.3; EXPRESSED IN PLACENTA, SIGNAL =   1; EXPRESSED IN LUNG, SIGNAL = 1.3; EXPRESSED IN BONE MARROW, SIGNAL =   2; EXPRESSED IN ADULT LIVER, SIGNAL = 1.2; NT HIT: gi14277125, EVALUE 0.00e+00; SWISSPROT HIT: Q92610, EVALUE 4.10e+00; EST_HUMAN HIT: AW971618.1, EVALUE 0.00e+00
caattgatccctggaagagcctatttaaaggacaggtgactttttcattccatttagggagttatgctattaagtggttgtgctggaagatattttatggtgtggtatctgaagtttacaatatgtcatatattgttttttagtatattttaaatatactaatcgcttaataattttacttttcattgttaaaattccatgtcctaataattcatgtcctgaatctagtaacatgttataaaatatttttatcattctttccaataggattccatatggctctcatatcattccattccatctctgccaagatttggataccgcaaaaatttgtgtttgtggaagattctgtctgaactctttcattcaaggaactactaccatgaatctgcattctgttgcccacactgtggtcttagtagataatttgggtggtactgaagcacctattatctcttatttctgttctctaggctgttatgttaattcctctgatatgttaaagtaatgggtgagaccagaaaaagaaatttcaataacagatcagtttggggtgcatgtatg

SEQ ID NO: 7643 - DNA, 592 bp, Homo sapiens
  MAP TO CHR19.3; EXPRESSED IN HELA, SIGNAL = 2.7; EXPRESSED IN LUNG, SIGNAL = 3.2; EXPRESSED IN BRAIN, SIGNAL =   2; EXPRESSED IN ADULT LIVER, SIGNAL = 2.2; EXPRESSED IN PLACENTA, SIGNAL = 4.7; NT HIT: AF135027.1, EVALUE 0.00e+00; SWISSPROT HIT: P20138, EVALUE 8.00e-33; EST_HUMAN HIT: BI518434.1, EVALUE 1.00e-119
gagctccatcctacctgtgccgtctccttggaagacagtcatggtcaagttctgaggcgggtctgggacagaaagacatggagacccgcatcactgtgagggctggggacactggccctgtctgtccccaggagccgcataaacagggaaggcagagccagtgtcctcctgaccccaccaccagcccagattccgggacccagcacccagtgtccaggcttgacgctcaccccatcagggacccaggcgtcccggcccagcactcacaggacacgttgagatggacggtcttgttcgtggtcacgctggccccagggaaggtcacctgacaggtgaggctggtgccatggtcctggggctgtgggatgagggtgagcaccgaggagcgggtggtggaggggtccaggggggacacggaggtccctatccaggagatcatagggggtgtcccctgctcacaggcccagggcacagagcaggtcagattctgggggcagccggactccagggtgcctgggatgaggatgttgggcctgtgggtcaaggctggtgaagagagggggactcaggatcaggtcagaggatccatggt

SEQ ID NO: 7644 - DNA, 572 bp, Homo sapiens
  MAP TO CHR14.3; EXPRESSED IN BONE MARROW, SIGNAL = 0.8; EXPRESSED IN FETAL LIVER, SIGNAL = 1.6; EXPRESSED IN ADULT LIVER, SIGNAL = 0.98; EXPRESSED IN HEART, SIGNAL = 2.5; EXPRESSED IN LUNG, SIGNAL = 2.7; NT HIT: gi15300984, EVALUE 4.00e-88; SWISSPROT HIT: Q9JHU4, EVALUE 2.00e-44; EST_HUMAN HIT: AU140980.1, EVALUE 6.00e-88
ttgcattcctcctggacttcacaaataacagttgctcagcaaatgtttaatatacaagttcaagttaaaacatgtccaaaatactgtagacactagatatgagtcaaaaggggaatgaggcattataagccttaacattgatcagttctcgtaatgtttcagaatattccgtcaacctcaaggccacttgcttctgattggtgttagtggagcaggaaaaactaccctgtctcgtttcgtcgcctggatgaacggtttgagtgtgtaccagattaaggtgcgtctggtcggtggcctcttaatcccagcaacagatgtgtgtgcagagctcagtgagtaggaatggacctaacttgcctctgcttctgtaggtccataggaagtacacaggggaagactttgatgaagatctacggacagtgttgagacgttctggctgtaaaaatgaaaagatagcatttataatggatgaatctaatgtgttagattctggattcctggagcgaatgaatacccttctggccaatggagaggtaattaggtgacgtgttgcgttgcattacgtgttaccg

SEQ ID NO: 7645 - DNA, 510 bp, Homo sapiens
  MAP TO CHR18.3; EXPRESSED IN ADULT LIVER, SIGNAL = 1.3; EXPRESSED IN HELA, SIGNAL = 0.9; EXPRESSED IN BONE MARROW, SIGNAL = 1.1; NT HIT: gi9631294, EVALUE 7.60e+00; SWISSPROT HIT: O51708, EVALUE 1.60e+00
aaatatgtgaaagggaatgtagggaattacatataattgcctagagctagaactctttcaacatgagggtggagatgacagagaaagtcagtgtgaaatatgaggacacagtaatgactacttcgaaaaatggctgttctagaattacggtctcttggttctactatggctgcaaaatcttattaatttatattattgttaagtaatagtacttaccagctgtatagcaatgagcacatcatgtgactctttgtttctttgttttaaatttgagcccaatatagatacctttgctgtggttgtgaaggttttaaaaataatgttaagcaaccttatttgtagtaaatgtcagataaatgtctgaacagaaacttaggaagagagaacactgcttcaaacatctatttccaatttcattttgcatttgcttcagaaattttatattgtttgagaaagagagtaaagaagagaaaggatataaaaagaatagattcaattctttcctggctt

SEQ ID NO: 7646 - DNA, 590 bp, Homo sapiens
  MAP TO CHR16.3; EXPRESSED IN HELA, SIGNAL = 1.7; EXPRESSED IN HEART, SIGNAL = 1.9; EXPRESSED IN BONE MARROW, SIGNAL = 1.2; EXPRESSED IN ADULT LIVER, SIGNAL = 1.1; SWISSPROT HIT: Q9Y5P8, EVALUE 2.00e-20; NT HIT: gi7019500, EVALUE 2.00e-77; EST_HUMAN HIT: AI675608.1, EVALUE 0.00e+00
ctctgagagtcaccgtcgtgtcgctttggggaaaagatgagcccgcccggttcctctctgtgcacctcatgcctggggctccgtcccgtcctgggtgggttttcacctgcaccgctggcccctcccccgggagcgttggtggagccggctttctcagccaggagcctgttgcggggtcagcggctggagctcaaggtctgctcaggggactttctcgtgctggaggttggctgcggagcagcctgcatttctcggaaaacagggcccagggcctgctccacgccgctgtccacgtcttcaccatcccctcgttgcaggttcgaggccgagctcagacctgtggagcagaagctgagtgcgctgcagtccccgctggcccagaggcccttcttcgaggtgccctcacccctgggcgccgtggacctgtacgagtatgcatgcggggatgaggacctggagccactgtgacgccacccatgagaacgccgctgcggggccgctccacacgtgccacggccaccactgggacaccgccgcttgtgtaaaaactgttgtcttttgtggaaaatgagtgtgtttgcatggaatga

SEQ ID NO: 7647 - DNA, 549 bp, Homo sapiens
  MAP TO CHR18.3; EXPRESSED IN LUNG, SIGNAL =  31; EXPRESSED IN FETAL LIVER, SIGNAL =  12; EXPRESSED IN ADULT LIVER, SIGNAL = 9.8; NT HIT: gi14744534, EVALUE 0.00e+00; EST_HUMAN HIT: AL541012.1, EVALUE 0.00e+00; SWISSPROT HIT: P18669, EVALUE 3.00e-71
gagtcactggtccccatctgcagctacaactcaagatgtctacagatggggtcagtgtgacatgtgcaggtgggaggggcagagggacaagacaggcagggagggtgctcctggggacagtatcctccctgctggccttcacttcttggccttgccctgggcagccacagcttccatggctttgcgtaccatctcttcatcccccagaaactgcatgggcttgataggcttcaagttcttgtcccattcatagacaatgggaataccagtcggcaggttcagctccatgatagcctcttcagagagaccctccagatgcttggcaatgccccggaggctgttgccatgggctgcaatcagtacacgtttcccctccttgatctggggaactatttcttcattccagaaggtcagagctctggcaatagtgtccttcagactctcacaggagggtagcagatcttctgtgaggtctgcatacctgcgatccttactgatgttgctatagaaaggatggttgggctccattggaggtggtgggacatcata

SEQ ID NO: 7648 - DNA, 514 bp, Homo sapiens
  MAP TO CHR18.3; EXPRESSED IN ADULT LIVER, SIGNAL = 1.1; EXPRESSED IN PLACENTA, SIGNAL =   1; NT HIT: AP000062.1, EVALUE 3.10e-02; EST_HUMAN HIT: T77557.1, EVALUE 1.00e-127; SWISSPROT HIT: Q01977, EVALUE 4.80e+00
gtgagcttgcatgtgctttgtaattctcccttttcttccttttagaaacttggatatcgaagagaagaaagcagatgcccccattctgctacctcttcacaaggcctgggggcttccgccacagatttacactgagcggctttcctgagcctgtcccaaaggaagggaaactgaggagcagtgaggtgaccttggaggaggctttttgtgaggcagcaatgaaggaaacagcattaacccagcctgcattttgaagaacaaccagctaacatttctcccagatccttggagaaattaaaattctccacaacattcctggaaagtgtaccatccactcccagtccctcaacagatgctgagctgctcattatgctggcaagtggcaaagtgaaagcaggaagacgttgggagacaatgctatgacagcgttgtctcccaaaacaaagaaacgccttttatccataacttgttggaagttgaatcaccaaaataaaccagaaggaatgttttccca

SEQ ID NO: 7649 - DNA, 534 bp, Homo sapiens
  MAP TO CHR14.3; EXPRESSED IN HEART, SIGNAL =   4; EXPRESSED IN LUNG, SIGNAL = 5.4; EXPRESSED IN BONE MARROW, SIGNAL = 8.5; EXPRESSED IN FETAL LIVER, SIGNAL = 3.2; EXPRESSED IN ADULT LIVER, SIGNAL = 4.4; EXPRESSED IN PLACENTA, SIGNAL =   5; EXPRESSED IN HELA, SIGNAL = 4.2; EST_HUMAN HIT: AW959157.1, EVALUE 0.00e+00; NT HIT: gi11434029, EVALUE 0.00e+00; SWISSPROT HIT: Q04500, EVALUE 1.70e+00
acagagcatccagttctgccctggagcctggcactcccactgcactcctctcagccccaagttttcgctggcaaggggacagcatttataggactcttagtgcatcccctaatcctgtcaatgtctcacctgattccctcggggtccaggacttggtgttccagttgaggtagggctgggcatctggtttctgaaagttgaggtctctggagtctggggaggttgggccatcgaatctgaagatgtgcctgctgtccaggcttgtggaacctgctcctcttgtgccctgctcctcttggtaaggctcgggcattttttaggaacagagctgggaggctcctctagattcagtttgtttagccactcagaaaccatgacatcattacgagagtgctggttttctatggttctcctaaagccatccatttctgtccctccttggcctgactctgggatagaaaatctcctattgctgctcctgagctgagacaggaaatcctttacctgcagggatgggaggagtttgctgggtat

SEQ ID NO: 7650 - DNA, 591 bp, Homo sapiens
  MAP TO CHR18.3; EXPRESSED IN ADULT LIVER, SIGNAL =  12; EXPRESSED IN HELA, SIGNAL = 1.1e+02; EXPRESSED IN HEART, SIGNAL =  52; EXPRESSED IN BONE MARROW, SIGNAL = 7.8; EXPRESSED IN FETAL LIVER, SIGNAL =  40; SWISSPROT HIT: P04406, EVALUE 7.00e-52; NT HIT: AF261085.1, EVALUE 2.00e-74; EST_HUMAN HIT: BE560908.1, EVALUE 3.00e-74
aggtggaagagtgggtgatgctgttaaagtcagaggcgacaacctggtgctcagtgtagcccaggatgccctcaagggtcccctctgatgcctgcttcaccaccttcctgatgtcatcatatctggcaggtcaggtccatgaccaacacgttggtggtggagacaaggaaggccatgccagtaagctttctattcagctccaggatgactttgcctacagccttggtagcaccagtagatgcagggatgatgttctggagagccccgtggctgtcatgccagtttcttggaggggccatccacagttttctgggtggcagtaatggcgtggaccatggccatgagtccttccacgattccaaagttgtcatggatgaccttggctggtggggggcaaagcccttggtggcacaggaggcgttgccgatgatcttgaggctgttttcatacttctcatcgttcatgcccatcagcagagggggcagaggtgatgacccttttggtaccccctgcaagtgagcctcagccttctccatggtcatgaagacaccagtggactccacaacgtactcagtgccagcatcatctcat

SEQ ID NO: 7651 - DNA, 595 bp, Homo sapiens
  MAP TO CHR16.3; EXPRESSED IN HELA, SIGNAL =  13; EXPRESSED IN LUNG, SIGNAL = 7.4; EXPRESSED IN FETAL LIVER, SIGNAL = 3.5; EXPRESSED IN ADULT LIVER, SIGNAL = 5.5; SWISSPROT HIT: P36225, EVALUE 1.00e-01; NT HIT: gi16166201, EVALUE 3.00e-52; EST_HUMAN HIT: BF979738.1, EVALUE 6.00e-88
cccaggaaaggtaagggttcgacacccaggagtcacccaagaagcccgagggccaggcatcgtcgcctgcccagggagagaagggccgggcccgcggcgggtgacagggacgaggccgcggtgtttgagcccacggacgtctggaggcctcgctcggctcccgggggacaggcagccaggactcaccagcaggttggtgctgcgattatctccctccgccatcgtctcggggatgcagtctctacaagcgcaggccacctccccaacgagtcctccaaccgaaacccgcacaccaaccacaacccgagggaacgccccgcaggctgcttatatgggtcggccgcccttcccgacggcccccgcgacgctcgctcctcattggacagaccgagcttacgcctcaaggaagccgggccaaccgaagctcagcgcatggcttgaaatcgaggtcaaaggagacagaggcagcgccgggccgagggggaggggacacggagtgcccaatcagcgcccagggactgcgcgacgccccgcccagcgctgtgggaagcggttcaaccgcctctgcagggggcgctgtccctcagtggttctc

SEQ ID NO: 7652 - DNA, 553 bp, Homo sapiens
  MAP TO CHR16.3; EXPRESSED IN LUNG, SIGNAL = 1.2; EXPRESSED IN ADULT LIVER, SIGNAL = 1.2; EXPRESSED IN HELA, SIGNAL = 1.2; SWISSPROT HIT: Q14586, EVALUE 6.80e+00; NT HIT: M96936.1, EVALUE 5.30e-01; EST_HUMAN HIT: AA424226.1, EVALUE 2.00e-01
ttcaaatttgccacaccaagtagaaggtgttggaaggaaaattaggaattcttaagcttcagaagattagtagtcagagttaaaaaccagacaattaacaagttaaaaaaaaattgtgaagcacacacagctgttatcttccagaaacactgcttacagaggtaattgctcacagattttagggtttacagcaggtatcacaggatttcaaatttaagaggggggtgggggcctgtgttcaaagtcttaagaatatccaagggatgtatgatgtatgcataattacctgaaattgaaactactgtagtttaaacacttgctgaaagaagaccttttatttcatcttctctacaggctgaaggaaagaaaaaacaaaactaacaactaacagaaaaacttttcatgtcgaatatgtagatttacaatatgtgaattatcatcagaagaatgaggttctttgatgattgttgcagataccctgaagaactggcccttgttgtagaagaatggcacagggcacatggtaaaatggccctggccattcctttagaca

SEQ ID NO: 7653 - DNA, 551 bp, Homo sapiens
  MAP TO CHR16.3; EXPRESSED IN FETAL LIVER, SIGNAL = 0.84; EXPRESSED IN ADULT LIVER, SIGNAL = 1.2; EXPRESSED IN PLACENTA, SIGNAL = 1.3; SWISSPROT HIT: P34810, EVALUE 4.60e-01; EST_HUMAN HIT: AA459204.1, EVALUE 2.00e-01
tgtcaggccacacacttttctctcgacagtaagatgaagatgttttagttattggaactcgatgtcacctagaataagaggaggtaccgggaaaaaaagaggggagtggagccggcgtggtggggggaggcaggcgatccctcttggttatcaaatgaaatgactccccaaatatgacaataaatcactgcaggaatcaatcagacaggaggccactgctccatgctgataatgcatcaatcaatatttaatgtttacactttaattaatccacacatgggaagcattctttcagtgacaaaaataaagggatgagaaataaaacaccttttatatcaaggagtggtgagtgcactgtctactgggtggctttgattggagctgtcattgatcaccttgagctcaccagcctccgagtcacatttggatataaagctaatgtagggggtgggggcagaggtttcagcatcccgccttcgaagagtgcagcttgctgggaactgctgtggagcatggattcctgtgaaggaagaacaaagccagggcaaata

SEQ ID NO: 7654 - DNA, 570 bp, Homo sapiens
  MAP TO CHR16.3; EXPRESSED IN PLACENTA, SIGNAL = 3.4; EXPRESSED IN BONE MARROW, SIGNAL =   3; EXPRESSED IN BRAIN, SIGNAL =   4; EXPRESSED IN ADULT LIVER, SIGNAL = 2.7; NT HIT: U32177.1, EVALUE 8.50e+00; SWISSPROT HIT: P20129, EVALUE 3.20e-02
caggcagatttttctctggggcatgttttagcatttccttgacatcctctgcaggctgctccaggcctaggccccatcctcacctctcagagcacacacctgcctgtgttctggcttgtggttcaggagcggacagccatgtgtcacctggctgtgggtctccaggagccattgcaggggaccggccacacggccatattccagaggccctgagcccggaggcactgactgcatggaatcatggatctctgggcttgtggggcctcggggaccttgtgcagaaagcacttcttctggggggttgggcgggcaggaacacatggcttccttacgtgagccacagttcgggtccaactgggaggggctcccagaagaggcttggggacaagaacaggagggaccctggaccctctgcactgtgagctccctcagcaggtctgtggcccgtggagacggcccaggtttccccattcgctggccagaaagtgcagaaagggaactgccggaaccccaagtgtgccagctccagagctgcgttcagtcccagcctgcctcctcagctgactcagt

SEQ ID NO: 7655 - DNA, 563 bp, Homo sapiens
  MAP TO CHR16.3; EXPRESSED IN FETAL LIVER, SIGNAL = 1.9; EXPRESSED IN BONE MARROW, SIGNAL = 2.4; EXPRESSED IN BRAIN, SIGNAL = 1.4; EXPRESSED IN ADULT LIVER, SIGNAL = 1.2; EXPRESSED IN HELA, SIGNAL =   2; EXPRESSED IN PLACENTA, SIGNAL = 1.6; EXPRESSED IN LUNG, SIGNAL = 1.9; NT HIT: gi14778651, EVALUE 0.00e+00; EST_HUMAN HIT: BE867922.1, EVALUE 1.00e-100; SWISSPROT HIT: P19765, EVALUE 1.10e+00
tgccaaaagaagattcaccccaacttattggattttttttctttctcttctagaggaatttaaaagttttgccttaaagcatccagaatatgctaagatatttacaacatacctagacctccagacgtgccatgtgttttcattaccaaaagaagtccacacaaccccctccaccgccagtaataaagtcagccctgaaaagcatgaagagagtaccctcagaccaaaaagatgactgaaagcagtattttccatgaggaaaacacaatagcttttggttgaaattggaaaaggccctattggaaaaacctttaatggggtggggaatgaaggttaaaaatgaaagatttttaaaaacaaaaatgatagaattttttactaaaaatgtttatattaacacttgcttttattggaaaaaatcaagcaatatttcgttttcttttgtgttatattgtactttactgattcatttactggtgatacatatgtttttatggattttccagtttaatttgcatatacaaatgaatgcaatggtctattggtgagcattgagcaacact

SEQ ID NO: 7656 - DNA, 521 bp, Homo sapiens
  MAP TO CHR18.3; EXPRESSED IN PLACENTA, SIGNAL = 1.2; EXPRESSED IN ADULT LIVER, SIGNAL = 1.1; EXPRESSED IN BRAIN, SIGNAL = 1.5; EST_HUMAN HIT: AI902331.1, EVALUE 7.30e-01; SWISSPROT HIT: Q63191, EVALUE 2.10e+00
aggggataacaggaaatgggaaagtgcaatagctgtggctcgatgaggccaggccgaggcagccaaggactcagtgctgaagttctgggtctgcccatcagtcaggcagcctggactccccagagtgccggccaatggtgagtgaaatcaagaatggtggtgagggagggaagtgaaggtttatctatcttgggatctgctttccagggaactcaagaatggccccctcacctggcacaacatctggaacataatgggggggccctgtgttgttgactgtgtgaatctttgatgaatacctgaatgagtaactgtgcacagtgccctgcagtgaaagtgctcaagttaattcatgtttgagaagtgcttcgggatctcaggggagtctgcatgcgaatgtgtggcactcccagctcctgcttcagcaaggtgctctgcgtgtccttcccacagaaccagggttcttgtggtgaaggctcacacacaactttggaagtgcaccaaaccacctctctccttgc

SEQ ID NO: 7657 - DNA, 528 bp, Homo sapiens
  MAP TO CHR18.3; EXPRESSED IN ADULT LIVER, SIGNAL = 3.6; EXPRESSED IN PLACENTA, SIGNAL = 3.2; EXPRESSED IN BONE MARROW, SIGNAL = 3.9; EXPRESSED IN LUNG, SIGNAL = 3.2; EXPRESSED IN FETAL LIVER, SIGNAL =   4; NT HIT: gi12084808, EVALUE 7.80e+00; SWISSPROT HIT: P55068, EVALUE 4.90e+00
ctgaacccaggtctcagctcagtgcgggaataaactcctgtaactcagcatggtccccatttagtgtgggctgcctgggcaagcatgagctccgggagagttggaaatctgcttggcaaggaggtactagagacatttctgagatggcttcaccttgagggcacgtcccttgagagtctaaaatgtataagaatgtcaagctattggcttgtgctttaattgagattagctggcagctaactcagaataagttgcctgcttcacaattttggcctgattgagggttggccttgcttctaaatgtttttatcacaccttcagtggccaagtgaattgaagggaggcttctgcccaaaaagctgagatagtacgagccgtgtgattcctaccctttcctccaggacttgtttctccaaatcccacttggctgtttgggctttcctctgtctttcgtgggtgaagactttgtggtcctggagacatgggccctgatttgagattttacctagaaaaggcaggatgaagctg

SEQ ID NO: 7658 - DNA, 519 bp, Homo sapiens
  MAP TO CHR18.3; EXPRESSED IN PLACENTA, SIGNAL = 1.1; EXPRESSED IN HELA, SIGNAL = 1.1; EXPRESSED IN BONE MARROW, SIGNAL = 1.3; EXPRESSED IN ADULT LIVER, SIGNAL = 1.3; NT HIT: AF188719.1, EVALUE 3.20e-02; SWISSPROT HIT: Q10151, EVALUE 8.20e+00
tgcccgtttagaagctatgcacctagttaggattcctgatggcgtgatgtcagtcatcactatcatcattattgtatgatgcctttggtgttcatttgaaccaccttcaagttgggggagagctggactgagagaatgtcttcaaaaggtgttgtgctactttacccatttgtctgtcttgcttttaggctcatattcatcagttcaggagacctcaatcagaggctgagctgctgcaatgtgcttccacaaacatacacacactgcatccagctgcctgatgggggggacctgctaattggagaagtctgctctggtcccctgtcaccagttggcagacagaacagtctgggccgaagctgattcccagagtcaggcattcatttatctcagtgataacagggtatgtgtagagagagggagcaaagaaagcgaagggcagctgcagttgaggtggggacagtactaatgcctcggcatcaaggacatgcttcacggaggtgcttggcactttattcc

SEQ ID NO: 7659 - DNA, 515 bp, Homo sapiens
  MAP TO CHR18.3; EXPRESSED IN FETAL LIVER, SIGNAL = 1.9; EXPRESSED IN BONE MARROW, SIGNAL = 1.1; EXPRESSED IN ADULT LIVER, SIGNAL = 1.3; EXPRESSED IN PLACENTA, SIGNAL = 1.1; EXPRESSED IN LUNG, SIGNAL = 1.1; EST_HUMAN HIT: BF515376.1, EVALUE 1.80e-01; SWISSPROT HIT: P50427, EVALUE 8.20e+00
cctcctgccattttcatgtcaaggcacatggagacatgtcagtgcacgtgggacgtggaagctgcacaaggggtgttcttgggtgtggacgtgcatggtgggcgcacaggcctctaggaaatgcttcctcggttctgggcaccttcaatcatggatgatggggctggaaacttgcctatagctttttaaagaaaaattaaatattttgaattgaattcagcaatttcttgaacacctactgtttgtgagtgaggcctggcggtaggtgagcatggcgtggagctcgcgggagagttggagatgtgatcgcttctgtccgtgtgtcagcgtgatggcctgtccacgccgctttcttctgactgtgagctggcccatctctgtacgcttgccccacaacctcagcatgccctttggaacatcagaagtcccccacagcctcagcaggtcttctgagaactaggaattagagccccactgtcgtggaaatcaactcgtcatcaagtagggccgacaat

SEQ ID NO: 7660 - DNA, 572 bp, Homo sapiens
  MAP TO CHR18.3; EXPRESSED IN HEART, SIGNAL = 2.1; EXPRESSED IN LUNG, SIGNAL = 2.4; EXPRESSED IN FETAL LIVER, SIGNAL = 2.3; EXPRESSED IN BONE MARROW, SIGNAL =   2; EXPRESSED IN BRAIN, SIGNAL = 2.9; EXPRESSED IN ADULT LIVER, SIGNAL = 2.7; EXPRESSED IN HELA, SIGNAL = 2.1; EXPRESSED IN PLACENTA, SIGNAL = 2.3; NT HIT: AF325111.1, EVALUE 9.00e-03; EST_HUMAN HIT: H53553.1, EVALUE 8.00e-04; SWISSPROT HIT: O54427, EVALUE 3.20e+00
agccctgagagtcccaaaagataacaaagaggttttttgttgttgttgttttcttactctatttcttattaggaagaacctgaaaaattcttcctttaataataaacagagtaagaaaaagtgtgcaaaagcaagtgcctgtgctaagaaggttaattttaaaaaatgtttccttaaaagctaggggaaaaagttttaaaaatttctcagaattatcttttgctcccttttcctcattcctcttacctaagtatcgtttttttcctcttgaacatctccctcccagcctagatcaggtgttcattatcttttatcaggtctatcttaaaaacttcctaactagttcttctacctgcaatttctcaccatcttctcatcctccactcctgaccaatttaactcacctgcaggggagggaggacacttgccttcacttaatctttctaaaaagcagattctgggaggaactcccccagggcacagagattatagttcccattattcagtctggaatttgctccaaactaggtttctaacttcatctcctaaatactccttcccctctatcccag

SEQ ID NO: 7661 - DNA, 551 bp, Homo sapiens
  MAP TO CHR18.3; EXPRESSED IN BONE MARROW, SIGNAL =   1; EXPRESSED IN ADULT LIVER, SIGNAL =   1; SWISSPROT HIT: P49606, EVALUE 2.30e+00; NT HIT: gi11067372, EVALUE 6.00e-50; EST_HUMAN HIT: AU136662.1, EVALUE 6.00e-91
ttccaaattgggattatcttatttctatccatagaaagtagttataggataagtggatggtattaaaattaagttttatccccctttaggttgcatcccagcgcattagctcagtggacctctcgtgttgtagcctggaacatctgcctgccaacctcttctacagccaagacctcactcatctcaatttaaaacaaaacttcctaaggcagaaccctagccttccagctgccagggggcttaatgaactgcaaaggtaagcctgcagaaatgggtagatcattaggaaggggtgggggcagaatgaacttctgcttgttatctcttgaatattctcatgaaaaaagctagtgtgtaaactttctccttcagataacagggtaataggactttgtttattagtgaagacattaccaattctcaatctgaaattttttttaaggttcttgcttttgaaactaatgatttatgatatttattaactggatagagttgtgtaagaacaattctccttaaacaacttttattcctatctaaaaatgcatgtgcaa

SEQ ID NO: 7662 - DNA, 572 bp, Homo sapiens
  MAP TO CHR16.3; EXPRESSED IN HELA, SIGNAL = 4.8; EXPRESSED IN PLACENTA, SIGNAL = 4.3; EXPRESSED IN HEART, SIGNAL = 4.4; EXPRESSED IN LUNG, SIGNAL = 6.9; EXPRESSED IN BONE MARROW, SIGNAL = 7.6; EXPRESSED IN BRAIN, SIGNAL = 5.2; EXPRESSED IN ADULT LIVER, SIGNAL = 5.2; SWISSPROT HIT: P12408, EVALUE 2.40e+00; NT HIT: gi14776130, EVALUE 0.00e+00; EST_HUMAN HIT: BG679364.1, EVALUE 0.00e+00
acatgtaagcaggacctggggccctgccggctgccctcacctttgcacttggtccagtcaggccgcggcgtggaagtgcgctggatctcctgcagctcagagaagaattggtcccgttccttcagcgtgctcatgtgcagctgcatgaggatctcatgctccttgcgaacctcctcgtagctggctctcagggtgtccagctgtgggcaaggacattggccctggccccccacctgtgagaccccgtcctaccctcctggccctgcctgcctgccagcacctgctcctgaagatccttgttggtcttctcctgcatttcaaagtccctcctggggaccacatctccaaagttggccttcatgttgttgagttccatctgcgtgcgggtcaggtcttgccgggtcatcttaagagccagggttaacttcacagggtcctccccccagatgcctgccaggggaaggggcccaccagcccgtgtcaccgtggctttctcaggggttgcctgaagccctctgcccttcctgtttggggttccctggttcttgcccacagcactaccagcctagggt

SEQ ID NO: 7663 - DNA, 591 bp, Homo sapiens
  MAP TO CHR18.3; EXPRESSED IN LUNG, SIGNAL =   1; EXPRESSED IN BONE MARROW, SIGNAL = 0.91; EXPRESSED IN BRAIN, SIGNAL =   1; EXPRESSED IN ADULT LIVER, SIGNAL = 1.3; EXPRESSED IN HELA, SIGNAL =   1; SWISSPROT HIT: P42833, EVALUE 3.30e+00
acccataaaaatcccccaactctgacacggagatttatcacaacagattttggatttatttcatgatttcaacacaactgtgttttcagtacagacttccctggttcttggttgtggtgacaataaagaaatgtatccatgagttacgtggattgcaggtgattctggattgaacacattctttgtttgttttttgtttttttttctttcttcaggaagcatttcccaaaacactgagcagagaattccagaaggactctgagaaaacacatggcctctgcagtcagcagcagatccaaggcctcttctgtggagtctgttccctcttcccacccacacatctctggatacttctgccagccatagattttccttctgtgtttacctcgtttgaggctcaggtgaaaaaccagatgacttacaaaggaatcagatatcgccattggccttttctcacaagccaaaacatcatgccactcgatctgtttttgtttgctttttaacatgaaaaaaatgcaggctgtgtagaatggaaaatttgtgagaaattctattgaaagagaaattcattgaacttggtggacatcgaca

SEQ ID NO: 7664 - DNA, 538 bp, Homo sapiens
  MAP TO CHR16.3; EXPRESSED IN ADULT LIVER, SIGNAL = 1.1; EXPRESSED IN HELA, SIGNAL = 1.1; EXPRESSED IN PLACENTA, SIGNAL =   1; NT HIT: Y10498.2, EVALUE 2.00e-43; EST_HUMAN HIT: BI756608.1, EVALUE 3.00e-43; SWISSPROT HIT: O00142, EVALUE 9.00e-12
aacaaaggccagggttcttctccatgagagaccagaagtcccgaattctgtctgccctcagggagaaagctgaactcccatggggaaggaactgccaagggcaagtgcctcacccactgcccccaagggttggggcccagccaagcacatcctcaagggacccaggagagagacaagagagggaggtgggaggggtgcatctcacctatcaaatcaacagacacgtccatgttcctcaagatccagtcaaaccattccgacagaactacatagtccacttctggcatcttcccactgcaatgagagttgtaagggcttattcacctaagagaaaacttctgggctatgcaattcccccaaaaggatcttgagacggctctcaatgaaaggagtcaccaagggtaccagggcacagtgtgatccgtgcaatactggacatgcagtgacaaggaccctaagcattcccgacctcctgctgcctgggagcggcttatggcacaatgctgcaagggccatggcacggagtgatgggagaatt

SEQ ID NO: 7665 - DNA, 509 bp, Homo sapiens
  MAP TO CHR16.3; EXPRESSED IN BONE MARROW, SIGNAL = 1.6; EXPRESSED IN BRAIN, SIGNAL = 1.4; EXPRESSED IN ADULT LIVER, SIGNAL = 1.4; EXPRESSED IN PLACENTA, SIGNAL = 1.2; EXPRESSED IN HELA, SIGNAL = 1.5; NT HIT: AF050075.1, EVALUE 1.00e-105; EST_HUMAN HIT: BF923097.1, EVALUE 0.00e+00; SWISSPROT HIT: P06867, EVALUE 5.50e-01
cgaaagtcatgtgtgatccgttccccatcaagaccccaggccttctgcagaatatgcatgcagaacaggccacaggtttttgcctcttagaagctgcggaatgagttacagggaacagggcctccagcttcagaacccagaaacctggccaaggcatctgaagctggtccaggggccacaaggagagccccgtccctggctagcaggggtgccatccccactgcagggccagcctagtgcccgctcaccttggtgaacttgtgaaccgttgctctaacacccaccgccaactgcagggccagcgtggtgccactcaccttggtgaatcgctgctctaacacttcatgctcccactgcaggtctttcagctctttctccctgactttcaaacgggcttttgtgcactggaggaaaaacagggagtaggggacagaaagtattcaagattcacagtcatccaagtaacacgggctcctgggagatggcaaggccaaaaataatcgccagaa

SEQ ID NO: 7666 - DNA, 558 bp, Homo sapiens
  MAP TO CHR18.3; EXPRESSED IN ADULT LIVER, SIGNAL =   2; EXPRESSED IN HELA, SIGNAL = 2.4; EXPRESSED IN PLACENTA, SIGNAL = 2.4; EXPRESSED IN LUNG, SIGNAL = 3.7; EXPRESSED IN FETAL LIVER, SIGNAL = 2.2; EXPRESSED IN BONE MARROW, SIGNAL = 1.9; EXPRESSED IN BRAIN, SIGNAL = 2.2; NT HIT: U22006.1, EVALUE 1.30e-01; EST_HUMAN HIT: AW851099.1, EVALUE 7.80e-01
ctgactgaggtggagggatgtaaaaatatagaaggaatctgaattctaatgatttcacacatgtctctaagttattagtattacaagctacctgcatgcattacaagtgagatgtatgcaggaagttggtgcaactatgggccaagatatgttcctggtctgttatgaaaagactgatgcataaatgtatgtttacatgtttttgactaaaataaaatattcaacgtatattgaaactgtttgtttatggtattctcaattcaactcactctttgtcttagcagaccaactattatccctgtggcatgctggtggacctacccacagagttgatatagagattagaagtgagtgtgcgtggtacagggtagatgcctaagaagtaggagttctgagagggtgacgttatgcaacttctcatggtgcatcttgtggttttgacgccttcctcttcaccacgagtcattttactttaggaactattacatacgtgacattgaaagaggcactgtgagaactatggagatttataagtactgactcctctcccaagaggct

SEQ ID NO: 7667 - DNA, 555 bp, Homo sapiens
  MAP TO CHR18.3; EXPRESSED IN PLACENTA, SIGNAL = 1.6; EXPRESSED IN HELA, SIGNAL = 1.8; EXPRESSED IN BONE MARROW, SIGNAL = 2.7; EXPRESSED IN FETAL LIVER, SIGNAL = 2.3; EXPRESSED IN LUNG, SIGNAL = 1.7; EXPRESSED IN ADULT LIVER, SIGNAL = 1.7; NT HIT: gi14734843, EVALUE 2.00e-09; EST_HUMAN HIT: BE780539.1, EVALUE 0.00e+00; SWISSPROT HIT: Q03385, EVALUE 2.70e-01
tggagggatggagcacttaccttttgggcagcaggtccaggagctgttgggtgggggtgaactctctctaggtgcacaggaaggaacatgaggaggtaaaagaggtggcagctctggaaggtgggcaccacgggctcctcctgctgccccaccacgcctgcactgatggagtccacctgcaggtctcatccagatttagggctgatttatttccgcactcagagggataaaggggggccaattaaaacaatgagccctagcaaatgcaaaaacactcatggtcataacatgaagtgaaagtaaaatataaataattttcctagatattcttacaaatatgtgaaagccgattgtacacctgaacagtgctggggtgaaatggtggggctgaaggaaggaaacagactcagggtcccttggattaaaactgtgggtcactcaatagggaaagccaaggcacaaagtcctgtgagtcatcaaggtggagtcctggcagaaggccttctcagccatgtctgggccctggttatagagaccatctctacacccacaccc

SEQ ID NO: 7668 - DNA, 504 bp, Homo sapiens
  MAP TO CHR18.3; EXPRESSED IN FETAL LIVER, SIGNAL = 2.2; EXPRESSED IN BONE MARROW, SIGNAL =   3; EXPRESSED IN BRAIN, SIGNAL = 1.4; EXPRESSED IN ADULT LIVER, SIGNAL = 2.1; EST_HUMAN HIT: BG679404.1, EVALUE 0.00e+00; NT HIT: D00596.1, EVALUE 0.00e+00; SWISSPROT HIT: P04818, EVALUE 3.00e-27
agctcagtgtggtaggctggcaagtcacccttcccgagacagcccaccttcaggcccgtgatgtgcgcaatcatgtacgtgagcagggcgtagctggcgatgttgaaaggcacaccgaggcccatgtctcccgatctctggtacagctggcaggacagctcactgttcaccacatagaactggcagagggcatggcatggaggcagcgccatcagaggaagatctgaggaaccagcagaggaagataaggagggatggtggtttgaaagaccacagctaaaggcaaagtaaaacaggagagaaacagaagccaactcatatggtggagaccaggagagagagccactgggctgcagtgatgtccataacagcctctgcagcgatggcacggagctgagggagactatccatcggtgcaaggtttctgcaggtgtccatttacggctgaagcaatgctcttccatcagagctgaagggatctgggctacctcgtggcaccagatt

SEQ ID NO: 7669 - DNA, 559 bp, Homo sapiens
  MAP TO CHR18.3; EXPRESSED IN ADULT LIVER, SIGNAL = 1.1; EXPRESSED IN PLACENTA, SIGNAL = 1.1; EXPRESSED IN BONE MARROW, SIGNAL = 1.1; EST_HUMAN HIT: AA315965.1, EVALUE 1.00e-101
agcacagcagagaccatgtgggattcagtatcacaaataaaagatgaaccatatacccagattaattaaaattaaacatctctggttgattaaaaaaacttttaaccccaattatttaactttcaataaacgctacaattaaatgactaagaaacaagtcactcgtctgattattttctttatttcaaaatgaccctaccttaaccaatctgcttaacaggttcagaacctcttccttcatcggaacggacgggaaattgaaccattccagcaaatgaagaaaaagttgcctctcctgaatgagatcagcgtagcagattaagttgtgctcaatcttgcagagaatactcttgagagcgcgctccctgatctcggccagctgatgacctgtcaacgaacggcacaaaactattttatttcccgactgcaaagagactacgttatttatgctgtgggcaggagcggcgtgaagacggaataaaccagtttttttcagaagcaggccactggtgccttcgggacgcgaaccgcgaagtttacacaaagtccgagatgggtc

SEQ ID NO: 7670 - DNA, 506 bp, Homo sapiens
  MAP TO CHR14.3; EXPRESSED IN FETAL LIVER, SIGNAL =  14; EXPRESSED IN ADULT LIVER, SIGNAL =  18; SWISSPROT HIT: P08185, EVALUE 3.00e-48; NT HIT: gi11437411, EVALUE 0.00e+00; EST_HUMAN HIT: AV696281.1, EVALUE 0.00e+00
aaacttacagcctttgggggcccagcagacaggaaaactgagccctggagggtgagtccagggaaggaaggatgccccagcatactccctttccacgtgccccactttctggggacacgtgcattgcagaaatcaacatgatggctggaggacttacctgctggtcaggcctgcggaccacctgttaatcgtgtcccggctcagtgcagcgatgactgtgttcatcttccccttgtccggaaggatgaagaagacagtcccattgcccacgtagttcatctgcaccagctggcaggggagctccgagtcatgaaggtaactgatggtgctcgactgcaacatcatgggcaccttcaccacagttgtctcgtccacatagaagttctcctccctggtgcttgccaggtcaaagggctgtgtccatgtgcctaggaagaggaggagacaggtctgtagggcagagaggaaaacacagttccaggtgatctcacgggcctactatccaa

SEQ ID NO: 7671 - DNA, 592 bp, Homo sapiens
  MAP TO CHR19.3; EXPRESSED IN BONE MARROW, SIGNAL = 1.2; EXPRESSED IN ADULT LIVER, SIGNAL = 1.2; EXPRESSED IN PLACENTA, SIGNAL = 1.5; EXPRESSED IN HELA, SIGNAL = 1.7; SWISSPROT HIT: Q08493, EVALUE 2.00e-31; NT HIT: AF157811.1, EVALUE 0.00e+00; EST_HUMAN HIT: AW006350.1, EVALUE 1.00e-98
atgaacgtacaggagcaccccaaacacatctggtcaccccagtctcacgcgcgcgcgcgcacacacacacacactctttcagtcccaaccgcacgtgggcacacccggtcacacagacccacaagccatgatgacaccagcaccctcagctccacccctacgtagaaatagctttttccttccaggcgccagcctcaaccaagcagcagagacccccgccccctggagaagcaaggaccctcccccactcccgccaggccccgcgcgcccctcccccgcgctgcaggaggcccctgccccggccacctaccgcctgcaggaggaaacgggccaggagagccgcgacttcctgagctccggccgcgggctcaggtccctctcgcggcagcccgcggacttgtccggatccgaatagaagcgctgttggatgcggatggggcgccggggttgccgccacaggtgcttcggggctctggtcatgctgtggcggccgcgagagcgactcaacctgctgcaagcctctgccccttcgccgacccccaggttctccatgcgccagagaaaggggtctgggatagcagggagcaggact

SEQ ID NO: 7672 - DNA, 578 bp, Homo sapiens
  MAP TO CHR14.3; EXPRESSED IN ADULT LIVER, SIGNAL =   1; EXPRESSED IN PLACENTA, SIGNAL = 0.94; EXPRESSED IN HELA, SIGNAL = 1.1; EXPRESSED IN BONE MARROW, SIGNAL = 1.1; EXPRESSED IN BRAIN, SIGNAL =   1; NT HIT: AJ006274.1, EVALUE 5.50e-01; SWISSPROT HIT: P54280, EVALUE 9.60e+00
tcatggcatgtggttttgaggaatgagggctcagcctatatggggcagaaacttttccataaaattcagagtataggactggtgagttttctcttcgttcttgttaaccatatatcgagttgttatttgtagctatagtgatataaatatcagaaagagattatattcaaagaatgagcatattgcagaattctgtgggatagtgctttttcttctaaatgtgcctatcactttccttattttaatgctgtcatttttggcagggagctgctgatactacaaggccagctcttactgccattcagttgtcttgattagggaacaactcagcattcctaaattattcacaagtctcaggcattgctgaggactagcaaatgtcaaatatagtaattgtccccatccaggcagaaagaagaagttgatttgaatgtatgcatttaaattaataggaaagcagaactgggaaagtgaccctacctcttccttaagtgcccagacaattaaatgcaaatggattcccagaggagtctcatgccagctgctcctcattcctctcaaacagaaagggaaatgcc

SEQ ID NO: 7673 - DNA, 589 bp, Homo sapiens
  MAP TO CHR16.3; EXPRESSED IN ADULT LIVER, SIGNAL = 2.3; EXPRESSED IN HELA, SIGNAL = 2.5; EXPRESSED IN PLACENTA, SIGNAL = 2.2; EXPRESSED IN FETAL LIVER, SIGNAL = 1.3; EXPRESSED IN BONE MARROW, SIGNAL = 4.1; NT HIT: gi14776064, EVALUE 1.00e-111; EST_HUMAN HIT: BG829912.1, EVALUE 1.00e-111; SWISSPROT HIT: P16301, EVALUE 5.00e-20
ttaggaagggaagagagggcagaattcctggcaacagccccccacgctgggccaggtagggtcttacctgaagccaggacgcgcagggtcttggccacgcccccccagggcgcacccagtgacacgaaggcccggatatacttgtccttccaggcctgcggctgccgctgcagaaagtagagcgtgtacatgttgcccatactgtgggcaaccagcaccacggggcccccatacagctggtacatctcctcgatcatctcgcggagggccaggaagtagggcccgttttcatctgcaggccagagccaggcaggggtcaggtgggaagggtcctggagccggaaccactgagcttttctcaggccagacacaagacgagagggggaggggagggtgctcacattcaaacagagcggtctgggtccccccgccttccatgaagggaggaagccttatatttctccccagggctcacaggcccagaggtcccagggtgggaaatggaggacaggataagactgaccaaaggtggtggctgtgaccactagactggatgccagaggcccagggacaggagacagccaaggac

SEQ ID NO: 7674 - DNA, 596 bp, Homo sapiens
  MAP TO CHR16.3; EXPRESSED IN BONE MARROW, SIGNAL = 1.4; EXPRESSED IN BRAIN, SIGNAL = 2.9; EXPRESSED IN ADULT LIVER, SIGNAL = 2.2; EXPRESSED IN PLACENTA, SIGNAL = 2.1; EXPRESSED IN HELA, SIGNAL = 1.9; EXPRESSED IN HEART, SIGNAL = 2.2; SWISSPROT HIT: P06133, EVALUE 5.80e+00
cacaccactacgttgggaagttcagtttcatgcttacctttcaataaataactaggataacctaccataacaattttaagtatttttactgactaaaaacatccaaccgtagaattttttatcttgcttttcagaattgatgtgttcccagaaaatatctttgggtaaatccattctctcatcaacttccactaagaaattgaagaggaattcccaaatggagatggagaaaccttcaaaagacaaagttgaaaactttcataaaggaggggtttctaataatgggcaactttgtggcacggagctccttcctttactccaggatggttctgagctgggtatgggcacttctctttcctctgtggcctcgtagaggggagtccggaaaccatggctggctcagcaattccacttcctatgctacagattaaagacataaaaagaactaggattcataagttatggaaatgtaaggtctcaattccacaaagaacaagtctagagaaggcagaagctagaaatagatgttgacattacagatcaagtttttggagaaaataaaatcatgatgggatcaaacagggtctggttctcaa

SEQ ID NO: 7675 - DNA, 572 bp, Homo sapiens
  MAP TO CHR18.3; EXPRESSED IN ADULT LIVER, SIGNAL = 1.2; EXPRESSED IN HELA, SIGNAL = 1.2; EXPRESSED IN PLACENTA, SIGNAL = 1.4; EXPRESSED IN BONE MARROW, SIGNAL = 1.2; SWISSPROT HIT: P25119, EVALUE 1.10e+00; EST_HUMAN HIT: BG336660.1, EVALUE 3.20e+00; NT HIT: gi14786537, EVALUE 2.20e+00
ctcctagatttccacgcagctagcaatgcagttgcaatttagattctgctcccctccctcaggagacctgaatttgagatgcattaaccagtagaggctgcttacagcatctgtttcactggtgcaggttttagcaggtccacgtggctccggagccagtggtttcgagagtggttctcccatcatcagatggcagttaggatactgtgtcctagtgaaacagttgtggtggggactttctggtctgcagactgtgagtgtggagatgtggccccgaagaaaggattggggcagcagctccccagtggaagccggggtacccttgccaagttccactctactggtcaaggagccgagctgtgtctgcttctccagccttccaacaattctgtgaacatctaagcccctatgtggaaccaacaactgcttggcacctaggaggcatttattgctgtcagctgaacataataaataataataaatacttactggcacagtagatgatgacagaaatgatgcgggtgactgcactcagggcttgtcattgggtctcggtcatctgaacacactgc

SEQ ID NO: 7676 - DNA, 524 bp, Homo sapiens
  MAP TO CHR18.3; EXPRESSED IN HELA, SIGNAL = 1.5; EXPRESSED IN ADULT LIVER, SIGNAL = 1.4; EXPRESSED IN BRAIN, SIGNAL = 1.4; SWISSPROT HIT: P42697, EVALUE 2.20e+00; EST_HUMAN HIT: AA852760.1, EVALUE 1.00e-48; NT HIT: AB040901.1, EVALUE 5.00e-78
atttcagcctccccagaaaggctataaaaaggctatagattaagagcaacaagaaagtataagtattataaaataagacaatggggcttatccataaaagatgaagccatattgtttaccatacgtataatcttatgaccatgagattctacacacataatacattttaaaaattatgctgtcatataaagtgatttttagacttttaataaaaaacaattctttgggaagctaggctgctaatattctacatttttcttccagaatttaagttcagtaccttctatctgtggcacttcaccatgaagcttggctttgctggagaaaggtgcattctgtagcactaatgcaaagagagatgggatcaaggactgcaaggcagaaagatacatgtggagtttgtgttcatccagtccatgttctccttcctgaaacataaggaggtggaagctaattttagtcttttgaagttacattgctaattggatttatgtatgatgttcttccttactgtggcaaatcaa

SEQ ID NO: 7677 - DNA, 526 bp, Homo sapiens
  MAP TO CHR14.3; EXPRESSED IN HEART, SIGNAL =  64; EXPRESSED IN LUNG, SIGNAL =  43; EXPRESSED IN BONE MARROW, SIGNAL =  82; EXPRESSED IN ADULT LIVER, SIGNAL =  69; EXPRESSED IN BRAIN, SIGNAL =  78; EXPRESSED IN PLACENTA, SIGNAL =  61; EXPRESSED IN FETAL LIVER, SIGNAL =  55; EXPRESSED IN HELA, SIGNAL =  58; SWISSPROT HIT: P39194, EVALUE 2.00e-25; NT HIT: AL163279.2, EVALUE 6.00e-50; EST_HUMAN HIT: BI333554.1, EVALUE 7.00e-69
gtcaggagttcgagaccagcctggccaacatggtgaaaccccatgtctactaaaaatacaaaaaattagccgggcgtggtgacggtcgcctgtaatcccagctactcgggaggctgaggcaggagaattgctttgaacccgggaggtggaggttgcaatgaggtgagattgtgccactgtattccagctggggcaacaaaagtaaaactcagtctcaaaaaaaaaaagaaaaagaaaagtggcccaagacttaaagttatcttttgatctaaaagtaaccatttagcttgcttctataataaagttttattatataatttaaaatgttaatttttgtcttgtagatcataatatcaatctagtgtcaatggaagtaacagtaaatgctgtagctggagcccttaaagctttctttgcagatctgccagatcctttaattccatattctcttcatccagaactattggaagcagcaagtaagtataaacctcctttttatgagagggatgataatggcagtttttgg

SEQ ID NO: 7678 - DNA, 538 bp, Homo sapiens
  MAP TO CHR14.3; EXPRESSED IN FETAL LIVER, SIGNAL = 1.6; EXPRESSED IN ADULT LIVER, SIGNAL = 1.5; EXPRESSED IN LUNG, SIGNAL = 1.4; EST_HUMAN HIT: AV701829.1, EVALUE 0.00e+00; NT HIT: gi14752718, EVALUE 0.00e+00; SWISSPROT HIT: P31602, EVALUE 3.40e-01
tgatggagaaaccaaccattccataggtaatataccgataaggaagttcaacttccatgtgctgtcttgcttttcgaatatcatcacacggtatattgaagattttgcaggctaaaggaatggtgatctttttcattacatctctgattattagtacaaataccatccctatgaggatccgcaatatggcttttccaaacagagtcacagtaatggggggcccagctaaaggtaatgtatctagagaaggatctaatactagacccatgttataagtaacatgagatccacatgcaattccagcaccacttcctagtatctcggctgtgtctcctcgggatgtgctccaggtgtcaagagtgaaagaaaagatccccaaagctaaatgaagcccgatgatgatgaatggagcatatttgtgagtttggttgaagttgtcaatcaggtccacaaatggatagaagacagctaagattaaaatggtatataggaatccagcaataatatcctaggaaaagataaaagtatcgttgtttag

SEQ ID NO: 7679 - DNA, 529 bp, Homo sapiens
  MAP TO CHR18.3; EXPRESSED IN BONE MARROW, SIGNAL = 1.7; EXPRESSED IN ADULT LIVER, SIGNAL =   2; EXPRESSED IN PLACENTA, SIGNAL = 1.5; EXPRESSED IN HELA, SIGNAL = 1.5; EXPRESSED IN HEART, SIGNAL = 1.8; EST_HUMAN HIT: BF509610.1, EVALUE 7.40e-01; NT HIT: AF343072.1, EVALUE 5.00e-01; SWISSPROT HIT: P23231, EVALUE 6.40e+00
cttgttcacattccttggggctgcaggttcctgatggccaaagatgtcaaagtttcagaagaacacacacagcccctatggaagattacactccgcataaactcccagtctattcggaagagacagaatggctgcttggcacaggcactgagtcctggcaaaatctagcttccacttaaagaagctgatagagtgcctcatcaatagctgacttggagctatctgaatcatcctagataattgaatcccacatccagcttttcttggttgctttcttttctcaccatagctctgataatgttctggtcaaacaatcttcttcctgctttcaccactaatctggcctcgacctcattcatcaccagcatgtcagtccccatagaaatgttgtcagcttccatttggaacaagatgatatcttagtcacttaatagtttattatgtaactgactctttgacagcactctgggcacaatgcgttttctcaaccttggtgcagaacaacacgtcccacgccataataggactg

SEQ ID NO: 7680 - DNA, 526 bp, Homo sapiens
  MAP TO CHR19.3; EXPRESSED IN HELA, SIGNAL = 8.1; EXPRESSED IN PLACENTA, SIGNAL = 8.2; EXPRESSED IN HEART, SIGNAL =  14; EXPRESSED IN LUNG, SIGNAL = 7.2; EXPRESSED IN FETAL LIVER, SIGNAL =  17; EXPRESSED IN BONE MARROW, SIGNAL = 6.7; EXPRESSED IN BRAIN, SIGNAL =  10; EXPRESSED IN ADULT LIVER, SIGNAL = 6.6; EST_HUMAN HIT: AU132569.1, EVALUE 0.00e+00; NT HIT: gi14736229, EVALUE 0.00e+00; SWISSPROT HIT: Q07821, EVALUE 2.00e-22
gtccatggagagaggctgaggcggccgagctccggctggaggtaccggagcgccaggacagcaaagatgtcggctgccttagtccgggcaaatgtctgggctgtgagcaagaggaaacttcagcccacctgggccgccctcaccctgacaccttcagcagtaaacaagataaaacaacttcttaaagataagcctgagcatgtaggtgtaaaagttggtgtgcgagccaggaggctgtaatggcctttcttatattctagaatatacaaagacaaaaggagattctggtgaagttattcaagatggagtcagagtattcattgaaaagaaagcaaagctaacacttttaggaacagagatggactatgttgaagaaaaattatccagtgagtttgtgttcaataacccaaacatcaaaggaacttgtggctgtggagaaagctttaatatttgaaatctcaggactcttctggccgtaggttccaggaaagctggtggaagccttggggctcactgcagaaatcat

SEQ ID NO: 7681 - DNA, 554 bp, Homo sapiens
  MAP TO CHR16.3; EXPRESSED IN HEART, SIGNAL =  50; EXPRESSED IN LUNG, SIGNAL =  15; EXPRESSED IN FETAL LIVER, SIGNAL =  16; EXPRESSED IN ADULT LIVER, SIGNAL =  20; EXPRESSED IN HELA, SIGNAL =  11; EST_HUMAN HIT: AL525988.1, EVALUE 1.00e-14; NT HIT: gi14775785, EVALUE 1.00e-130; SWISSPROT HIT: O95947, EVALUE 2.00e-28
ctgggtaggagaataggggggctgtggccctcggctggctcctcattcttccccggcttccagaactggacacccctaaactggattgcttcctctccgggatggaggctgctccccgcaccctggccgcgcacccacctctgccccttctgccccctgccatgggcactgagccggccccatcagctccagaggccctccattccctcccgggggtcagcctgagcctggagaaccgggagctatggaaggagttcagctctgtgggaacagaaatgatcatcaccaaagctgggaggtgaggggctggccagggtccgtgtttctggtgggggtctcttgggaaaggcagagtccctggggagggggctaggactgggtggttcccgaggggctagagctctgcctaggcctagaatctgactatggcctggggcaagggttactctgtggcaggaatcaggagtcactctgtgacaagggttaagggccagtctgtggagtctgtggctgagtttagggaccaatctatggcaagggtcatgggtcagtct

SEQ ID NO: 7682 - DNA, 600 bp, Homo sapiens
  MAP TO CHR16.3; EXPRESSED IN ADULT LIVER, SIGNAL =   1; EXPRESSED IN LUNG, SIGNAL = 1.3; EXPRESSED IN FETAL LIVER, SIGNAL = 1.3; SWISSPROT HIT: P11531, EVALUE 2.00e+00; EST_HUMAN HIT: AA743692.1, EVALUE 6.00e-82; NT HIT: gi14775319, EVALUE 3.00e-52
ccttgctgcagtgaaagagacaaggcatgataaaaacaaactcatcaatagcattcataatactgaaaacctgaggtttggtatcaaaccaaagaaatcacaattaaataaaatttgctctcattccctctccaaagtaattcatctaaaaaataagttaaattgtccccataacttttcctcagatccactatctatttactttttccaagtaactcataaaattccaatcaatatgaaaactgctatggaaccatacatatactaaagggaaggaaaaccaaagaggaaccatttaaatagcattattactgacgaatattatttaaagggcttgagtttcaatctgaattactactattttctaatgatttgaaatgcctaatttaaaaaaagtggcttaaaaattacgtatgtacatcaaactgtaaaggcatttgtttctttgtggggagaggacggatgttcatccacttcttacgttcaatagacatcactctcatcgcacgccggtctttggtccacctaagaaaaatggagttcagaaaaaaacaaagacacacgagcaaaagacataacacaaagggagaggcacaaagt

SEQ ID NO: 7683 - DNA, 576 bp, Homo sapiens
  MAP TO CHR19.3; EXPRESSED IN BONE MARROW, SIGNAL = 1.5; EXPRESSED IN ADULT LIVER, SIGNAL = 1.2; EXPRESSED IN HELA, SIGNAL =   2; SWISSPROT HIT: Q9P0G3, EVALUE 8.00e-29; EST_HUMAN HIT: AW294668.1, EVALUE 6.00e-82; NT HIT: AF283669.1, EVALUE 0.00e+00
accaaaaggaaggggatttgtcagttttggaatcctacaaacttgtggagtggagagtgtttgctcatctactttccccacccaatcctgtccactcctagccatgacacagagccaagaggatgagaacaagataattggtggccatacgtgcacccggagctcccagccgtggcaggcggccctgctggcgggtcccaggcgccgcttcctctgcggaggcgccctgctttcaggccagtgggtcatcactgctgctcactgcggccgcccgtaagtgaccccctcccctgtccctgtacctagtgaattccagagtctaaagccctagagctgagctgagaacctggatctctgtatagaacccaatgtagtggctggctcctggtttgaggtctagagaagagcctggaacaaaaacacagctcgggatgtgggctcctccataaatctcgaactcagcataggttctgaaagcagatgggcagcttggaacccatggacctgctgagaaccgaacatctgatccagtgattcttccagaggccacacattacatcgagaccaagcttagcc

SEQ ID NO: 7684 - DNA, 554 bp, Homo sapiens
  MAP TO CHR16.3; EXPRESSED IN ADULT LIVER, SIGNAL = 1.3; EXPRESSED IN PLACENTA, SIGNAL = 1.3; EXPRESSED IN HELA, SIGNAL = 0.87; EXPRESSED IN BONE MARROW, SIGNAL = 1.7; SWISSPROT HIT: Q64739, EVALUE 3.10e-02; EST_HUMAN HIT: BE221414.1, EVALUE 3.00e-62; NT HIT: gi8923945, EVALUE 2.00e-83
ctgtccgagttcagaaagggaaagtgagtgctgtgccaggctggggcggacagaacacttcgacgggctccggagcccagattcagccaggaacccacaggcaactcggcctacccccagctgaggccctttttggacccgcaggggagagatcttaaacccagcgctttggtcccacccacccgctcccacactgggaggagaccatggctccacacacagcccctgccaggcccacaggggcgggcatgggggcccacctgcctcctgcatgtgtggacagggtcctggagagtgaggagggccgcagggagtacctggcgtttcccaccagcaagagctcgggccagaaggggcggaaggagctgctgaagggcaacggccggcgcatcgactacatgctgcatgcagaggaggggctgtgcccagactggaaggccgtgagtcaggagggcccagcagccagggccatgcaaagagagagcagggcccgggccctgcagctctcgacagccgctccctgaaaccccacgccccaggccactcttacaatg

SEQ ID NO: 7685 - DNA, 575 bp, Homo sapiens
  MAP TO CHR19.3; EXPRESSED IN ADULT LIVER, SIGNAL = 0.99; NT HIT: gi15301333, EVALUE 1.00e-115; SWISSPROT HIT: P28364, EVALUE 7.30e+00; EST_HUMAN HIT: BE410092.1, EVALUE 1.00e-115
attcagggccacgtgttaaggtgaatgtacccctgaaagttgttttgctcttcagtccacaggtcctggctaccctgggaagagacaagaagtaaatgaagaaagaggaagattccaggacctagatatgatttctgtggacacccttcactggtgactgaagtttctaaatagaaatttaaggcagatccagaggagacaaagacagagtatcccaggtgctggccatttcccacaacagaagaaaatgatcaatgcccaggtgactttttctctattttattctctcctttattccatagtggatttgtagagacccgtaagaaatcatttcagaatctagagagaaataaactttaaatctaactccaacatcatggcaaagtaagatcaggaatatagtgtttatgtgattcctacaaaatgactgatgttggaaaataatgcctgactagaagatcctttccattaccttagctctcagtttgcatctgatgtctctgacagccagtacaagaaagtcacactaagttatacagtgactgtggggagaaagcagacaggttcctcaggag

SEQ ID NO: 7686 - DNA, 594 bp, Homo sapiens
  MAP TO CHR16.3; EXPRESSED IN HEART, SIGNAL = 8.3; EXPRESSED IN LUNG, SIGNAL = 1.2; EXPRESSED IN FETAL LIVER, SIGNAL = 3.8; EXPRESSED IN ADULT LIVER, SIGNAL =   1; EXPRESSED IN PLACENTA, SIGNAL = 1.2; EST_HUMAN HIT: AW020146.1, EVALUE 0.00e+00; NT HIT: X78925.1, EVALUE 2.00e-84; SWISSPROT HIT: Q14586, EVALUE 5.00e-69
gaccggttaaaggagatgccacaatccttacatatatatggtttcattccagtatgagttatctgatgcacagaaagacatgaggaatgagagaaagatttgctacatgctttacatttgtaaagttttactccagtatgaattctctgatgtttagtaagggatgaactacagttaaaggctttgccacattctttacatatgtagggtttctctccggtatgaattctttgatgttgagtaaggcgtgaactacaattaaaggctttgccacattctttgcatttatagggtttttctccagtatgaattctctggtggacaataagacttgaggaacgagaaaaagatttgctacatgatttacatttgtaaagtttttctccggtatgaattctctgatgtttagttaggtacgacctacagttaaaggctttgctgcattccttacatttatagggtttctctccagtatgaattctctcatgctgagtaagggctgaagacactttaaatgatttaccacattctttacatttgtaaggtttctctccagtatgaattctctgatgcacaagaagatttgaagaatga

SEQ ID NO: 7687 - DNA, 534 bp, Homo sapiens
  MAP TO CHR18.3; EXPRESSED IN ADULT LIVER, SIGNAL = 7.2; EXPRESSED IN PLACENTA, SIGNAL = 6.9; EXPRESSED IN HEART, SIGNAL =   6; EXPRESSED IN HELA, SIGNAL = 5.9; EXPRESSED IN LUNG, SIGNAL = 4.4; EXPRESSED IN BONE MARROW, SIGNAL = 7.5; EXPRESSED IN FETAL LIVER, SIGNAL = 8.5; EXPRESSED IN BRAIN, SIGNAL = 8.7; EST_HUMAN HIT: BF796746.1, EVALUE 4.80e-02; NT HIT: AF223391.1, EVALUE 7.90e+00; SWISSPROT HIT: P50168, EVALUE 9.90e-01
tctgcctatgggctcaaaactgggctggttaactgttggggataaaataaggcactctctcagtgcttaaaagtgaactcctattctgatttatggagtgttctagctatctatgaagcacagaatatatatagcatactctaaagaaagacgaaatttaataactgccaaagtgttgtactcccttaacctaacatttcaagagtgcatgaaggaagcaaagtgctctgaatggcacagccaaatggcagcaaatgtttggcaatttggaataataagatcaacactgctcccagtgaaattcccaaggcgggaatgcaaggcctgaagctaccagaacacccctactcccacctgaaggaaaaaatacgttttcacagataacaaaccctccctttcagggcagaaggcaaggcacaggtagcaactgctgactgcatcactgaaactgaagacttcaaattccaagaagataaatctaacattgaaaaagtaaattattttgttcttttctggaggtggaggggtagtcat

SEQ ID NO: 7688 - DNA, 522 bp, Homo sapiens
  MAP TO CHR14.3; EXPRESSED IN PLACENTA, SIGNAL = 2.1; EXPRESSED IN HELA, SIGNAL =   2; EXPRESSED IN LUNG, SIGNAL = 3.1; EXPRESSED IN FETAL LIVER, SIGNAL = 1.6; EXPRESSED IN BONE MARROW, SIGNAL = 1.8; EXPRESSED IN ADULT LIVER, SIGNAL =   2; NT HIT: J00922.1, EVALUE 3.20e-02; SWISSPROT HIT: P31814, EVALUE 8.30e+00
aaaatgacagtggtggagggggacataatatatgagttatacaaacacatttaatctttgtgaaatttttcccagctgtaactcaatctttccttcatctttgcttcctgaatactccacctcctccagtaagtggaaagccttcaatatcttgtggtccatatagaggtcactcttcactctcatattttctaccttgtctctgatagtctttagctcagcttgaacttagtaggtaacttatatgtgaacataggagctaacctgagaatgcgtcagattaatggtgtttaaagtacatgaaagtgatcagcttctgtgaattttcttccccttacagttgtgcgtatggcctgattcatcagtgaaacatccaggaacttcttcagattccgcagataccgactttttgcttgaaagattaaacgttgcacattcttttctagacctaggccaacgttattaaagggagctttgttttagaagttttaattcaataattgctgatgtcctgttcattcc

SEQ ID NO: 7689 - DNA, 548 bp, Homo sapiens
  MAP TO CHR18.3; EXPRESSED IN PLACENTA, SIGNAL = 0.88; EXPRESSED IN FETAL LIVER, SIGNAL = 1.7; EXPRESSED IN BONE MARROW, SIGNAL = 1.5; EXPRESSED IN ADULT LIVER, SIGNAL = 0.96; SWISSPROT HIT: P41800, EVALUE 1.00e+00; NT HIT: gi6226515, EVALUE 8.10e+00
tccctggtttcagaatgctcccacattcaaatatcttgtctctctcagcctctattactagaatatcagaaatgctgtcccatgccctggtatatctacctcaggaaagcattagagaaatgagattttttttttctgtcatgttttgcctcttcctccccccttataaaatataaatattaacagaacagttagtttggtattatggaacccaaggggaaaagacaaagaacgtgtaatagaattggtgcaaaatcctcctaaatatctagggtaggccacttgttcatctgggcaactcacactgagacaataggactagataatgggaaggtatatttgaaactattcgcagatataaaattataccttatttatacttctcataatttttattcttaccttcaggcctcagccatgtagacgtgaaatcagtatggcaatgcacagacaaggaattcaaatacttaacctcatcatgaaaattaatctggaaaaataaaaataaataataaatcaatctcttacaatcttcaaaccatccttgc

SEQ ID NO: 7690 - DNA, 509 bp, Homo sapiens
  MAP TO CHR16.3; EXPRESSED IN ADULT LIVER, SIGNAL = 3.4; EXPRESSED IN HELA, SIGNAL = 6.1; EXPRESSED IN PLACENTA, SIGNAL = 3.7; EXPRESSED IN HEART, SIGNAL = 2.9; EXPRESSED IN LUNG, SIGNAL = 5.1; EXPRESSED IN BONE MARROW, SIGNAL = 5.1; SWISSPROT HIT: Q03211, EVALUE 1.90e-01; EST_HUMAN HIT: BI907485.1, EVALUE 1.00e-100; NT HIT: gi14775155, EVALUE 7.00e-99
agagcagatacggcatcaggggtgtcaagagcttccacggcatgcccaaggtcacggaggatgagaagtagagcaggcagccccaggagaggggccgtgttctatctttaggtctgcctgcctgctggggtaatgcccgcagtagctcaggagaggaggagaagccatggaggggagggagtggagaggcagagggaagaagcactcacctgtggaaggaggtcatacgggctttcagagcctgcacgaaggggaggatccagtggtggcgcagaaccacactctgggacaggctgaggtggaacaccttcatccttaccagccgggggacatatgtctgggcatggggcagcaacacatcaagcagatccaggaactcctccttggcttcatctggaggggaggagtaaagagggcgggccgttctctcagccaaggtgccatggctgaatgaagaagcccagaaggcagagggaagtccttattactctgggtttggggagaaaatt

SEQ ID NO: 7691 - DNA, 533 bp, Homo sapiens
  MAP TO CHR14.3; EXPRESSED IN ADULT LIVER, SIGNAL = 1.1; EXPRESSED IN PLACENTA, SIGNAL = 1.2; EXPRESSED IN HELA, SIGNAL = 1.5; EXPRESSED IN LUNG, SIGNAL = 1.6; EXPRESSED IN BONE MARROW, SIGNAL = 1.5; NT HIT: gi14777514, EVALUE 2.00e+00; SWISSPROT HIT: Q92444, EVALUE 5.00e+00; EST_HUMAN HIT: BE891956.1, EVALUE 3.00e+00
cttgcaatggtgagaacacgggttttggggtcagacaggtttagatcccaggcccattctggcccatgcctgccgagtcgccctcgggtgcctgagctgtggtttcatctgtaaagtgaggctgagcagccccggggtccaggcagggccccaggacgacatgcacagagccactcaggaagtgccagtcactggatacagaaggctcaggggctgtcgctgcagctgtcactgttgctcgttcacagctaagaagggttggacaaagttggagccacccaggcagggtcccatagttctaggatcaagcgggaagctcgggtcacatgggcctctctaccctccagccaagggcatgacaaccactggggaccttttccttctactggccagtctgcagagcgagagactctcccaattaccagcaagtgtgaggctccctatctgggcaactgcacagcactgacctgcctgaccccaaaattgcggcatcttcctcccaggaaggaccctggaggccctttctttcatgt

SEQ ID NO: 7692 - DNA, 591 bp, Homo sapiens
  MAP TO CHR16.3; EXPRESSED IN HEART, SIGNAL = 3.4; EXPRESSED IN LUNG, SIGNAL = 4.1; EXPRESSED IN FETAL LIVER, SIGNAL = 3.8; EXPRESSED IN BONE MARROW, SIGNAL =   4; EXPRESSED IN ADULT LIVER, SIGNAL = 3.2; EXPRESSED IN BRAIN, SIGNAL = 3.3; EXPRESSED IN PLACENTA, SIGNAL = 2.5; SWISSPROT HIT: P53941, EVALUE 1.50e+00; EST_HUMAN HIT: AW951242.1, EVALUE 8.30e-01; NT HIT: AF002719.1, EVALUE 8.80e+00
accctggtatccatcacaccacaagagcatttcctgatttgggtttcagtagtatggcataactggaatcctcacagagtgtgccttcacgttgccataaatacacatttatcattacgttatttattggttcgttctactcaaggagaactaataggaaaagaagtagaagtatcagggtatctgtttggctgaaaacaatgtttgcttatacatattatggtgccaccaagagcaacaataaaattccctgatataatgtactcaaaaatttgtagaactttttgtgagccagcagagaaaaggaaaatctcccctcacagaaaagaaagacactgccagatgctgattgcttccaccgttcacaggatcatgaagacgccagatcctgctggcttgcattctcagaggagggaataccaggtggaattgtggccatgcggcattgtcatgaagaatatgagatttgcagctgtcatggcaaggaaaccctggagcttcagagattttagattttattagattttactgaatgtttaaggaaccattcttcaagtagaatgatgaatacaggcagattccaaaaatctg

SEQ ID NO: 7693 - DNA, 501 bp, Homo sapiens
  MAP TO CHR16.3; EXPRESSED IN PLACENTA, SIGNAL = 1.1; EXPRESSED IN HELA, SIGNAL = 4.5; EXPRESSED IN HEART, SIGNAL = 4.1; EXPRESSED IN BONE MARROW, SIGNAL = 2.2; EXPRESSED IN ADULT LIVER, SIGNAL = 2.8; EXPRESSED IN BRAIN, SIGNAL = 2.2; NT HIT: gi14775217, EVALUE 5.00e-84; SWISSPROT HIT: P15711, EVALUE 9.10e-01; EST_HUMAN HIT: H16836.1, EVALUE 0.00e+00
acagcggtagtgtgggtttctttacagtttaactggtacacccgccgagccatgctggctgccatctacaacacaacagagctggtgatgatgcaggactcctctccagactttgaggacacttggcgcttcctggaaaaccgggttaatgatgcaatgaacatgggccacactgccaagcaggtaggtggggactagccattggggaaccctctttagaaggcatacctattctcctcaggtcacagctggtcttgctcccttttggcctcagctgacagtcctgagggccttcccaagggcctggctggttcttcctcaggccagcccttccctaagagccacactttgctcatttgtgattgtgttgtccaaagctctccttccagtaacgtggcccccttgtcttcaccttttggggctcataggcctcctgatttgtcctgcctgtctcaagtttaactttgtgttggtggcctaagggaacctgacactgactcc

SEQ ID NO: 7694 - DNA, 501 bp, Homo sapiens
  MAP TO CHR18.3; EXPRESSED IN BRAIN, SIGNAL = 3.3; EXPRESSED IN ADULT LIVER, SIGNAL = 1.5; EXPRESSED IN PLACENTA, SIGNAL = 1.7; EXPRESSED IN LUNG, SIGNAL = 1.6; EXPRESSED IN BONE MARROW, SIGNAL = 1.5; NT HIT: gi16178449, EVALUE 0.00e+00; EST_HUMAN HIT: AV752839.1, EVALUE 9.00e-56
tctatattggggaaaggggggatcctaagtttcataaccctaatttagaaacaatttgcatctttaaaaaaaattacacattccttattcccaggcaagctatagtcagacagatgatgaaagtaacatgaaaactggtgatgatggagagccctgtggccacacagaggaggaagacagcagcctggcagcagcctcaccgaagagaggaaccaccacacccagcagctcctgacagacccccacccctaaagatgtgtcctgatgactatagtgcagctaactttttgttctcagatttgtagtgcataggtgtgtgtttcaagaaggaaaaaaaaagacttctgttcaaagttaacttatcagctacatcctctgtaacgtggttcatccctggttaaaaagcaaacaaacacaggctgaaaacccatgctgctgttatacacaatggcagtattaacaagcattttaaacctttgcacatgatattgaacctgttca

SEQ ID NO: 7695 - DNA, 573 bp, Homo sapiens
  MAP TO CHR14.3; EXPRESSED IN ADULT LIVER, SIGNAL = 1.3; EXPRESSED IN HELA, SIGNAL = 2.3; EXPRESSED IN LUNG, SIGNAL = 2.2; EST_HUMAN HIT: AI631683.1, EVALUE 4.00e-15; NT HIT: AF083468.1, EVALUE 5.50e-01; SWISSPROT HIT: Q9WVL4, EVALUE 1.10e+00
tcattccacaagagcaccagctttctagaagcctttcagcaactccatgactggattagatggccttccaatgatcccctggtaagaacagtcccccggtttttgacatttgtcatcttccccacatcgagagttcctagagggagctctctttctctcattaatttcatgggcttggcacagtgaatagacgtggcaggaacttggaagatagtcattgaatacagagcaaatccaaaactgtggtgttgagcaaaggggctctgcagagagtcggagcagaagggagcccaaatttggggtgagctagaggggaagtcaggaggatgcagtgtgtgacaggagtccaggacaaaggatagcagtccagacaaatggaaaatatgttgggagatttctgaagacagaataccaaccacaatggcagctttttatctggtcacctccatgaacttgcatcaaccaaagaagccagagtggcgcagatactcttccaaccaaactatcccagttttaaaatgcagtgcacacctggctctacggatctgaactggcatacaggtcagcctccat

SEQ ID NO: 7696 - DNA, 504 bp, Homo sapiens
  MAP TO CHR19.3; EXPRESSED IN ADULT LIVER, SIGNAL = 2.8; EXPRESSED IN HELA, SIGNAL = 2.7; EXPRESSED IN PLACENTA, SIGNAL =   3; EXPRESSED IN BONE MARROW, SIGNAL = 3.5; SWISSPROT HIT: P32042, EVALUE 7.00e-01; EST_HUMAN HIT: AL560878.1, EVALUE 4.00e-95; NT HIT: AF217796.1, EVALUE 1.90e+00
cgaattgagtcaggggtctccaccggcgcttaatcatggccgagatcctcctgcttctgcctgtcctttggtagacacacgctacaagtcagcttctgtccatcgaggaagggaacgaactaacaacaaagaacaattaagagaaggttggccccgtgaaaacaagggaccattgaagagcgagtaaaggcttggccacgttctggccccgccccaccccggtcgccctgacaacagcgccggcgtctgggctgagcttcggactcgcagccagcctcccacaggccaccgcgcgcgctcacttgcgcatgcgcctcggagctggcttcaaccagcgaaggctgaacccgcttccagggtcctcgccgagctgggagttaggatccgagggggctaagagggataagaaaacttctctgggtgcccacgtggtactgagcgcccttgggagggctctggagaagaccatcgccttccagggtagctccctccctcaaaggtttg

SEQ ID NO: 7697 - DNA, 511 bp, Homo sapiens
  MAP TO CHR19.3; EXPRESSED IN FETAL LIVER, SIGNAL = 1.6; EXPRESSED IN BONE MARROW, SIGNAL = 0.67; EXPRESSED IN ADULT LIVER, SIGNAL = 0.96; EXPRESSED IN HELA, SIGNAL =   1; EXPRESSED IN PLACENTA, SIGNAL = 0.98; SWISSPROT HIT: P01125, EVALUE 1.20e+00; EST_HUMAN HIT: BF848432.1, EVALUE 7.10e-01
ctcaccaactttttctccgcagttggaaggaattcaccatcacccactcattcacacactcttccaccccagtagaaagctgttcactgtcagccactcagtcatcacaatgggaacctgtttactatcagccacttgttcaccacagtgggaaccagttcactgttcacacactcattcatcacagcgagaacctgttcaatgtcaccccactcattcatcacagtaagaacctgttcactgtcaccaactcactcaccatgataggaaccagtttactgtcacccattcatttaccagagtggaaacctgttccttgccagccactcagtcatcacactgggaaactgttctcacccactcacttgtcacagtgggaaactcttcactgtgagccactcaatcactactgtgaaaaacctgttcactctgagtcactcgttcaacacagtgagaagctattcactgtcagccacatattcaacaagtaagaacctgtccactgtcagcc

SEQ ID NO: 7698 - DNA, 500 bp, Homo sapiens
  MAP TO CHR16.3; EXPRESSED IN HEART, SIGNAL = 4.1; EXPRESSED IN FETAL LIVER, SIGNAL =  16; EXPRESSED IN ADULT LIVER, SIGNAL =  10; EST_HUMAN HIT: BF115864.1, EVALUE 0.00e+00; NT HIT: gi16161253, EVALUE 0.00e+00
tcaaacatcaccttgtttttccactcattcaacacttttttttttaaattatctaataggttggcactcatcatgagcccctgttctcattctgcaaatggtgaagctctctattgtcctgaccccacagttcctgtcccatgaccagggccagctcaccaaggagctgcagcagcatgtaaagtcagtgacatgcccatgcgagtacctgaggaaggtgagtgagtgcagacagatggggcctggtgcccttgagcagttcccgggtctcagctgccacacatctcatagccggtgatgctgggggaagcttacgcagtcacagtactggcttcttcctctttttctttccatacaagtggcttagggatggggtagagtagttgacttatttggatgaaaaccactatcttctgtcagaaactcaaaaggaatcattgctggcatggtaacctaaagaaaaacaaccagacaagtgcccaacgacacttaaaaaggtg

SEQ ID NO: 7699 - DNA, 550 bp, Homo sapiens
  MAP TO CHR16.3; EXPRESSED IN LUNG, SIGNAL = 1.3; EXPRESSED IN BONE MARROW, SIGNAL = 1.4; EXPRESSED IN ADULT LIVER, SIGNAL =   1; EXPRESSED IN PLACENTA, SIGNAL = 1.4; SWISSPROT HIT: P51828, EVALUE 3.00e-23; EST_HUMAN HIT: BI823791.1, EVALUE 1.00e-79; NT HIT: gi14779965, EVALUE 9.00e-80
ggtctgggacctgatgctaccctgcctgtcccccgctggtccctccgccggtcgctttgctggtccctctgctggtctgcccacccacacccaggagaacctgctgctgtcagtgcttccggcccacatctccatgggcatgaagctggccatcatcgaacggctcaaggagcatggtgaccgtcgctgcatgcctgacaacaacttccacagcctctacgtcaagaggcaccagaatgtcaggtgggcggtgagacgtgtgattagcatatcccggggactgggcccaccgttccaccggcccccaggcggcctccccgccctatctggaggctcagacccctgcccatatagggattgggagagggccccatggttccaggtcaatctggggccctccctgggtctcagaacccccacttgtgggcaggatcagatcagggctcttaaattagagaatttagattggtattgaaagatctagcacacccccaaaactgtaaaactgtgtgagcaaacatagcttttgtgaaggaaggggtcctttcag

SEQ ID NO: 7700 - DNA, 506 bp, Homo sapiens
  MAP TO CHR18.3; EXPRESSED IN ADULT LIVER, SIGNAL = 1.1; EXPRESSED IN HELA, SIGNAL = 1.4; EXPRESSED IN LUNG, SIGNAL = 1.4; EXPRESSED IN FETAL LIVER, SIGNAL = 1.4; EXPRESSED IN BONE MARROW, SIGNAL = 0.66; SWISSPROT HIT: Q92750, EVALUE 3.00e-35; EST_HUMAN HIT: AA457205.1, EVALUE 1.00e-42; NT HIT: gi15305410, EVALUE 9.00e-86
tgagtgtgaaatgaggcacccactaatgtatcatagtaatacatgcctaaatatttaatacctttaatttcagtctgtggctgtgccaaccagtgtcgtcacagttactcctggaaagccattgaatactgtaactaccctgaagccttcaagtttgggagcatcatccactccttcaaatgagcccaatcttaaagcagagaactcagcagctgttcagattaatctttctccggtaagctcttacttgcaccttacataaatcttgttccttgcaagttcttttgaattgtttgctcactaacacttgtgtttgcttatatttacattttcatatttagacaatgctagaaaatgtgaagaaatgcaagaacttccttgcaatgttaataaaactagcatgtagtggatcacagtccccagaaatggggcaaaatgtgaagaagctggtggaacaacttttggtaagtagtgctataaaatcctgcaaattctggaggaatcca

SEQ ID NO: 7701 - DNA, 504 bp, Homo sapiens
  MAP TO CHR14.3; EXPRESSED IN BRAIN, SIGNAL = 1.3; EXPRESSED IN ADULT LIVER, SIGNAL = 0.92; NT HIT: gi9625671, EVALUE 1.90e+00; SWISSPROT HIT: P48634, EVALUE 1.60e+00
tgctgcagacacattaaggctctgcaagcagttactatagtaggtaaccttgcatgtttcacaaagtgtggcattttcatttcagcctatgttgaataatgaataatttttcctgccccctgctaaacagtgaatgatgagaagccctttggtaattcagtgatgttgaattaatctgttggtagattatccatattttctccaaagccaccatccccttattctaggtttctcccacttcctgcccctccttccccgacaaatgctatcacatacctggaaaggagatggcactccattcccgaatacagatccagcatctgacagcaatgccagcagcgggaacttccagtgtgggaatgtagatgggagtggtgcaacaggccacctgggcattccagacaatccagatacagtggtactgcccggcagcctcagcacccaccctgaatccacctggccgtgaggcatcacgtggcattgcctcccaaggaaaacaatccc

SEQ ID NO: 7702 - DNA, 514 bp, Homo sapiens
  MAP TO CHR19.3; EXPRESSED IN BONE MARROW, SIGNAL = 1.2; EXPRESSED IN ADULT LIVER, SIGNAL = 1.4; EXPRESSED IN HEART, SIGNAL = 1.7; EXPRESSED IN HELA, SIGNAL = 2.8; EXPRESSED IN FETAL LIVER, SIGNAL = 1.3; NT HIT: gi15303823, EVALUE 3.00e-61; SWISSPROT HIT: O73673, EVALUE 8.20e+00; EST_HUMAN HIT: BE877320.1, EVALUE 4.00e-61
aacggctgaaattggaagtgcagaagtatgaggtcaggaaagaccctggggaggggcgggagccagcgggcctggctgagtcactgctgggtggggtggggggtcggggacaggggaggtgttcggagcggggggtctccagctgttttccatcacagtcttggctgtgcgtgggtgatctcagggaacctctgggtccaaagtgggctgaccccggagctctgccctggaacgattttcctgtcccctcctcccaggcgtggctggcagaagctgaaagtcgagtccttagcaaccggggagacagcctgagccggcacgcccggcctcccgacccccccgctagcgccccgccagacagcagcagcaacagcgcatcacaggacaccaaggagaggtgaggggtgacgtcagagtgggtctgttcccagggtcccaggagggcctgtctttatctgccgaattatccccaaacagctctgaagagcctccctcagaagagagccaggacacc

SEQ ID NO: 7703 - DNA, 586 bp, Homo sapiens
  MAP TO CHR18.3; EXPRESSED IN ADULT LIVER, SIGNAL = 1.2; EXPRESSED IN PLACENTA, SIGNAL = 1.3; EXPRESSED IN HELA, SIGNAL = 1.3; EXPRESSED IN LUNG, SIGNAL = 1.2; EST_HUMAN HIT: AV732256.1, EVALUE 5.30e-02; SWISSPROT HIT: Q45657, EVALUE 3.30e+00
tttagacgggatggatgagctgatggatgatgtacatatagttgaaactcaggtaatgactgtgacatgttttgcattaggttatgataatgtgaaaacaatcaaagtaatatttttttaaaaaactgccaagaagaaaagtgaaataataaactccattatatcaagtgctctgatttttcaaatgccttcaacatcttcagtcctagtttaggaggtgctctgcctaacaaaacacaaccagttgaaatcttcagtggggtggaggagggagtgatgttagggacgttttcagattcaaaactgaataacccatatatcagctctataaagaacagtgatgacagaagatggtaggtaaattagctcttgcatttttttctttatactatttctgtattgtctgatttttttaaaaaacagttattcatataattagttacacaattaaaaattatctattttttaatggagtaaaaatcagtcattagtattcttatagatttagtaactatctacaattaatgactcttggagggaagaagagttaatataagattggatgagggcaattttaatgcaagtt

SEQ ID NO: 7704 - DNA, 546 bp, Homo sapiens
  MAP TO CHR14.3; EXPRESSED IN FETAL LIVER, SIGNAL = 1.8; EXPRESSED IN BRAIN, SIGNAL = 2.5; EXPRESSED IN ADULT LIVER, SIGNAL = 1.8; EXPRESSED IN PLACENTA, SIGNAL = 1.8; EXPRESSED IN LUNG, SIGNAL = 1.7; SWISSPROT HIT: O75882, EVALUE 1.70e+00; NT HIT: gi14784700, EVALUE 3.00e-58
tggagtgatgctgttgcttcctcctctgcacctagattggcaaagggacgggccctccctctcccaccaaggaccggaagaaggatgtttcttccccgcagcgggcccagtccagcccccaccgcaggaacagccgcagtgaaagacggtgagagagggaccacgcctgggtgggtccaaagagggtttttttcctttcctctcatcgtgtgggtccctttttttttttatctctctcccacccttctctctttttcgctcccacccaagggaggtgacttgggatggtgggtttagaggtttgtgtattgacatttcccacagcaaggcagttctacttccccagagaaaccaaactctgctagcccactagtctgagcatgggttatgtgagagaaaaggtagaaaggatggggcccctgcaaggcagtgagccacccaggaatgtcatgggggagggcgtgaatattagatggctttgaacataactttgccccccacccaagagtctggtttttgtctgtatccaggtagcaagaacaagcc

SEQ ID NO: 7705 - DNA, 510 bp, Homo sapiens
  MAP TO CHR18.3; EXPRESSED IN FETAL LIVER, SIGNAL = 1.5; EXPRESSED IN ADULT LIVER, SIGNAL = 1.6; EXPRESSED IN PLACENTA, SIGNAL = 1.5; EXPRESSED IN HELA, SIGNAL = 2.1; EXPRESSED IN HEART, SIGNAL = 2.1; SWISSPROT HIT: Q11194, EVALUE 2.10e+00; EST_HUMAN HIT: AW015748.1, EVALUE 7.10e-01; NT HIT: gi13648719, EVALUE 4.80e-01
tcagacaatttcctacaccaggtagaatatgtagagatgtataccatggtagaaaaaaaaacaaacaagcaggatatttcggagcctgagttgtacaataccacctgctgcattttctatgtcctacagatgagtaatgaagaagtagaagtgttaagtgtctgggctcattattacttaatgcagcagaggaagtctcaggcatttcctaattagagcagaggaaaaagacttgattaatccgtccctggaaagagagtctgatcacacttcatcaaaatattcttaagtatagcaccagaataacagattaagagttgaacatatcttagagattattttgttaaacccaaatgaagctgaaagagaataggtctccagctcaaagtcacagaccagactcgagattggcacttacattccttctgggtgctcccacttagcttcccaccaacatgctctataaggaagtggtggaaagcactgcccccgctctgctctcacatatgc

SEQ ID NO: 7706 - DNA, 596 bp, Homo sapiens
  MAP TO CHR16.3; EXPRESSED IN ADULT LIVER, SIGNAL = 2.2; EXPRESSED IN PLACENTA, SIGNAL = 2.7; EXPRESSED IN HELA, SIGNAL = 3.1; EXPRESSED IN BONE MARROW, SIGNAL = 3.8; EXPRESSED IN FETAL LIVER, SIGNAL = 2.9; SWISSPROT HIT: P56974, EVALUE 1.00e+01; EST_HUMAN HIT: BE770340.1, EVALUE 8.40e-01; NT HIT: gi16178926, EVALUE 5.70e-01
ttagcctttctgcctcctccctcatcccatgtctcctagaactgccatgaagctgacgtgcagcatgtgctcgctgctgggcataggtggccagcccatggctccttcctgtacccgttgctggcaggtcccgtgccccggggcagctcctgccaccagtcctctcctctgccctccctcgcatctactccttacgtgcatctgtcaaggggcgctgagcaggtgtgtctgtgcttcactcaggtctcgttagtggttgtcagtaagctctgaattcttccatagaacccttaaatccttcctcaatccccacagcccacgagcaagcctcctaaatccaatcaattaacacagcccagaaagtggatccatttgcaggaaagctataagcttgcacctaatcgtccttccctaggggaccggttagagcaactgtaggacggcaggaaggagccctctatggacctgaaaacatcaaggagaacggtacatgttgattggaaatatgtccgtgacatatattgctaagtttaaaaaacttaggctccaaagcagcagatgagtatgattgcagtagcttttgaaacggtcgtgtt

SEQ ID NO: 7707 - DNA, 558 bp, Homo sapiens
  MAP TO CHR19.3; EXPRESSED IN FETAL LIVER, SIGNAL = 2.3; EXPRESSED IN BONE MARROW, SIGNAL = 1.5; EXPRESSED IN ADULT LIVER, SIGNAL = 1.4; EXPRESSED IN BRAIN, SIGNAL = 1.7; EXPRESSED IN PLACENTA, SIGNAL = 1.6; SWISSPROT HIT: Q62217, EVALUE 1.40e+00; EST_HUMAN HIT: BG479553.1, EVALUE 8.00e-04; NT HIT: AL096805.1, EVALUE 5.30e-01
ttctgtttgtcccccaagtcctctttaagagttctggttcctgccacagcatcagtcagccttttggaattgttctagaacatgttttctgcctgaggctctcaggccagttggatggtggcattttacgaaaataaagcagcattcctatctgccctaaagcccatggaggtgctcccggtcagagctgcgctgtacctgtgtggggtctctagtgtggctggaacctgtcctttttggcccctagttgaggaagagctgggctacgcccccaccacctgccagcccagtgtgtgcgggacgtatcagaggagaccgatgcccactcagccttgctggtgctgctcatctgtgctggcttgcagtccggcctggggtgtttggagagagtgaggaggagggtgaggctgaccttcaaccttgtgtctcaggcagccctggcagcctcagtgctctcctctttcaaatgggcacactgctgttgggatctgtctgtgcaggcagcagccggcagaggatctcagcccccaggacggggctactctccatgcactggca

SEQ ID NO: 7708 - DNA, 576 bp, Homo sapiens
  MAP TO CHR16.3; EXPRESSED IN ADULT LIVER, SIGNAL = 1.2; EXPRESSED IN PLACENTA, SIGNAL = 1.8; EXPRESSED IN HELA, SIGNAL = 1.2; EXPRESSED IN FETAL LIVER, SIGNAL = 1.5; EXPRESSED IN BONE MARROW, SIGNAL = 1.2; SWISSPROT HIT: P23975, EVALUE 6.00e-48; EST_HUMAN HIT: AU132072.1, EVALUE 0.00e+00; NT HIT: X91117.1, EVALUE 0.00e+00
ccagagggctgtcagaagtctccaactcttgagttccggcgtgccccaacctctgtttccaaatttttccagcggacgcgcgctcttttctgggaaccctgcgtccgctcagcgcgcgctcatcccagtgtctaaggcgctcccgggtggtcttgggagttgcaagtagggaggaacggccgggtaaccacctcttttccctttatccaagcagagcctcggcgtgcccccaggaccggtaaagttcctctcgccagccgcatccatgcttctggcgcggatgaacccgcaggtgcagcccgagaacaacggggcggacacgggtccagagcagccccttcgggcgcgcaaaactgcggagctgctggtggtgaaggagcgcaacggcgtccagtgcctgctggcgccccgcgacggcgacgcgcagccccgggagacctggggcaagaagatcgacttcctgctgtccgtagtcggcttcgcagtggacctggccaacgtgtggcgcttcccctacctctgctacaagaacggcggcggtgagcgtggggtcgggctgggaatttgaatctggga

SEQ ID NO: 7709 - DNA, 577 bp, Homo sapiens
  MAP TO CHR19.3; EXPRESSED IN PLACENTA, SIGNAL = 3.2; EXPRESSED IN LUNG, SIGNAL = 4.9; EXPRESSED IN FETAL LIVER, SIGNAL = 2.7; EXPRESSED IN HEART, SIGNAL = 1.9; EXPRESSED IN ADULT LIVER, SIGNAL = 3.3; NT HIT: gi14755555, EVALUE 1.00e-66; SWISSPROT HIT: Q16587, EVALUE 1.00e-09; EST_HUMAN HIT: AV720317.1, EVALUE 0.00e+00
agccttagaccatggctgtctcttcctccctgctcttttaggaccagatggcctttgaggatgtggctgtgtacttctcccaggaggagtgggggctcctggacacagcccagagggccctgtaccgccgcgtgatgctagacaacttcgcacttgtggcctcgctgggtaaggtcctagatactccatgaaatgggcaactgataacaagctgactggccagggctgccccctcacctccctggtggctgacgagcaggcctataccttgcagccaggagccatgtggaataggggtctggtcctatagacatgcagtctggttggctcaaccactccctgtggcgctgtccggctgtggcctctccgagccttggctcagtccccttcctttggtgccctgggcacagttgctgccctggggatgaatgagctattcctgtgagccccttgccctgtgccatctttagattctgcagttgcacagatgacattttctgtttccgtgaagccctgactcctgccctctgtttggaggtgggttatcttgagctggggctggactctaacctgcacc

SEQ ID NO: 7710 - DNA, 539 bp, Homo sapiens
  MAP TO CHR18.3; EXPRESSED IN FETAL LIVER, SIGNAL = 4.7; EXPRESSED IN LUNG, SIGNAL = 4.1; EXPRESSED IN ADULT LIVER, SIGNAL = 1.8; EXPRESSED IN PLACENTA, SIGNAL = 2.8; EXPRESSED IN HELA, SIGNAL = 4.1; NT HIT: gi16163883, EVALUE 1.00e-108; SWISSPROT HIT: P34649, EVALUE 1.00e-12; EST_HUMAN HIT: H47429.1, EVALUE 0.00e+00
ttgttgtacttgtgagctggcaacttgtactgacttgattttttttcttccacttagcatggaggatgaaaaggaagatagtaaagttatacctacagaatgtgccatcaaggtatttaaaacaacccttaatgaatttaagaatcgtgacaaatatattaaagatgatttcaggtttaaagatcgcttcagtaaactaaatccacgtaagatcatccgcatgtgggcagaaaaagaaatgcacaatctcgcaaggtaaagaaaatattgtgctagacgtaatcttgggtaaatacctttttgcattaggataaaaaaatccatgctttcttttacattcatttatagaaataatgaaaggccaggtgtataacctcgattcatacttttaggatgaaaaagccattttcttttttctttcctcaatgaagcttgagggaaatctgggcattttctgccttagacactttatcatatatctaaatgccatttttaaattgcttttatcacgaagtaaaacttccagcatccaattaggc

SEQ ID NO: 7711 - DNA, 596 bp, Homo sapiens
  MAP TO CHR16.3; EXPRESSED IN ADULT LIVER, SIGNAL = 2.4; EXPRESSED IN PLACENTA, SIGNAL = 2.8; EXPRESSED IN FETAL LIVER, SIGNAL = 2.2; EXPRESSED IN LUNG, SIGNAL = 3.8; SWISSPROT HIT: Q9Z1S5, EVALUE 2.00e-04; EST_HUMAN HIT: BI830266.1, EVALUE 1.00e-110
agccacttcaccccatacacactccctgaagcccctccaggactccagcctggctgcaaacacccatcctggactttgcctggccctccaggctctgctgggggaagcgacctgagaggcccctgcctgggctgtaggtggggacagggcagacccttgggcagcggagcctctctggatgggtgttgaggcaccctgcagaaacagctccccacaggcacccttgccacacccctgggactacaggcacttagggtacaccagaggcatgaagtgtggagggggttggccaacggccaagctcaaataggggttcagataggagaggtcaatgtgggctcctctgagccccagtgacccccttctccccacccacctggtgacaggcatctcgaacccttggcccccatggaccccctgaggcgctccccctctccctgcctgtcctcgcagccctccagccccagcaccccaccctgcgagatgcttggtcctgtgggcattgaggctgtgctggaccagctgaagatcaaggctatgaagatggggtttgagttcaacatcatggtggtgggtgagtgagaggtagggcccac

SEQ ID NO: 7712 - DNA, 546 bp, Homo sapiens
  MAP TO CHR18.3; EXPRESSED IN HEART, SIGNAL = 1.8; EXPRESSED IN LUNG, SIGNAL = 1.6; EXPRESSED IN FETAL LIVER, SIGNAL =   2; EXPRESSED IN BONE MARROW, SIGNAL = 1.7; EXPRESSED IN ADULT LIVER, SIGNAL = 1.6; EXPRESSED IN HELA, SIGNAL = 1.2; EXPRESSED IN PLACENTA, SIGNAL = 1.9; EST_HUMAN HIT: F33374.1, EVALUE 1.90e-01; NT HIT: gi4505816, EVALUE 5.20e-01; SWISSPROT HIT: P39083, EVALUE 3.00e+00
tgaggctatgctgcaatgtcatctatttttgggctttgctgccctcttcccctcatgcctcatgcagcattgctgatgctgcaaaacagaggataccatcccttgctggaaacccaacctcagcacttccataggcctcgccccaggttgggacctctcactggctgggttacccacttttctgttcagagacgggataaccagagggcaacacatctgattataaaagtgcatattgcagggtttaggcaagtaagaatacattctgaccaggaccagagaccccactctggctctaacaagctgtgtgaatcattgagttgcctcacctctggatgagaggtttggatctgataagtcctaggattccatcagtttcatattccacacccctatctttggtgactaggataagagaagatgaatcgaaacacctctcctgcatctatttatatctatacccaagctgagcgagcagctttgttcttcttaagttggagatgcaaagtgttcccatcataaacaagagcccagcttaatctgacg

SEQ ID NO: 7713 - DNA, 548 bp, Homo sapiens
  MAP TO CHR19.3; EXPRESSED IN HEART, SIGNAL = 3.5; EXPRESSED IN HELA, SIGNAL =  59; EXPRESSED IN BRAIN, SIGNAL = 3.8; EXPRESSED IN ADULT LIVER, SIGNAL =  14; SWISSPROT HIT: Q24186, EVALUE 2.00e-17; EST_HUMAN HIT: AI220956.1, EVALUE 2.00e-63; NT HIT: AB007149.1, EVALUE 0.00e+00
atgccaccacctcttgtctcagtgggcctatgggtgacaacgtggctggcagcatcagttgggagtggccccagggtgctggaggaccgcagtctgtccttctagcctgacccctgctgtcttcctaggccatctggctgctgtgcacaggcgctcgtgaggctgccttccggaacattaagaccattgctgagtgcctggcagatgagctcatcaatgctgccaaggtgggtgagggcactccggttggggggtcttaagttgggcatttgtgggggtccttcagaattcagagctgtgtgtctccttgcagggctcctcgaactcctatgccattaagaagaaggacgagctggagcgtgtggccaagtccaaccgctgattttcccagctgctgcccaataaacctgtctgccctttggggcagtcccagccacctgtgctgttgtctgtcttcggtggggggatgtgggtggcatagccctggtggccttgggagctgctcaccttcctgacctgttggcctgtggggacctggaagtattgct

SEQ ID NO: 7714 - DNA, 567 bp, Homo sapiens
  MAP TO CHR18.3; EXPRESSED IN ADULT LIVER, SIGNAL = 2.1; EXPRESSED IN HELA, SIGNAL = 3.8; EXPRESSED IN LUNG, SIGNAL = 3.5; EXPRESSED IN FETAL LIVER, SIGNAL = 3.5; EXPRESSED IN BONE MARROW, SIGNAL = 2.4; EXPRESSED IN BRAIN, SIGNAL = 3.6; SWISSPROT HIT: P36543, EVALUE 6.00e-16; EST_HUMAN HIT: BE564792.1, EVALUE 1.00e-58; NT HIT: gi14776833, EVALUE 7.00e-59
gcagagacttcagggcagagaacaccatacacatcacctctagactaggttgctgggagccagaggaagatcttggtgaagtgcatgcagccaccatctgctcccatcacctaatgctgcagaaccaactggagctgtgctactttgagataaactagaggtgggttcctgatcatattacatgacactctctcccattgttagcaattaggcaaagacattagtgacagaggggcatccactgaaaaagacagagcaatactcgaacagcaaagaggaagccacttagacattcttgtttcttcaaatatcagaagcttccacatcatagcaggagggctagggatggacttcacctcccaaaagctgttggcatttggaccaaacaaggctccccggacttctggcatcatctgctggcctgagatccagtcggcttttcagggtgttggaaacctttattttacaatccccattgtggatctcaactccaccaactatgtcctcaggcaggtaggactcctgggcaattgggacattaacaattgtctgtggtggggattttgt

SEQ ID NO: 7715 - DNA, 574 bp, Homo sapiens
  MAP TO CHR16.3; EXPRESSED IN PLACENTA, SIGNAL = 1.5; EXPRESSED IN HELA, SIGNAL = 1.6; EXPRESSED IN FETAL LIVER, SIGNAL = 1.6; EXPRESSED IN BONE MARROW, SIGNAL = 2.4; EXPRESSED IN ADULT LIVER, SIGNAL = 1.3; SWISSPROT HIT: P24592, EVALUE 3.20e+00; EST_HUMAN HIT: BI489716.1, EVALUE 2.00e-01
aacgaaagcaagacccactggttttgagtgtgtttttctgtttcaccatttggtatccttgaattgacacagatactgggaaacacaaagtcttggccatagcagaggctcccagcactctgggggaaagaagagcctggagttgcttattcctacatctcccactgacccactgactagcagggtgactgtctttcttgatctcagatgcccacttgaaaaaagaacagtaaaaatacagcccgtacccatgtgtgaacaggctgctgatgaggtcttccctcctcatgtctaggccttcggactgcaggccttctctcctaggggtcttttcccacccccacactcaggagcgtgtacagatgttccctcttcctccaagaaagtgtacctgaaatatgccatacgtgtgcccaggagccacagccacaagcagggacatctcaacctcaggacctctgcatggcatcatcaaggagccagagacccagaaagcctggatgccaaaggtcacgtggaggtgagtgaccaccaggagcagaaatgagcgctcccgtctcccaggaagaatgaa

SEQ ID NO: 7716 - DNA, 518 bp, Homo sapiens
  MAP TO CHR19.3; EXPRESSED IN FETAL LIVER, SIGNAL = 2.3; EXPRESSED IN BONE MARROW, SIGNAL = 1.6; EXPRESSED IN BRAIN, SIGNAL = 1.9; EXPRESSED IN ADULT LIVER, SIGNAL = 1.5; EXPRESSED IN PLACENTA, SIGNAL = 1.4; EXPRESSED IN HEART, SIGNAL = 1.6; EXPRESSED IN HELA, SIGNAL = 1.2; SWISSPROT HIT: P91924, EVALUE 1.60e+00; EST_HUMAN HIT: AA724281.1, EVALUE 4.00e-67; NT HIT: gi12044850, EVALUE 1.90e+00
caaaccaagccacacatcacatcacatttttttttccataaatgtaaaaatgtttttaataacctggcacctgggtgtttttaattctggtcacactaaaccagcccagtgaggttttgttcatctgtctaggaactgccagaaatgctcaacaccagtgggctgagccttcctcacaaggaagatttgacctggcaaataagagccacctgtggcacttcagtgaatgttctctatcacccctttgaaatgtggccaagtaccacgtaccattatatttgcttccatcatcaccatctgtcttccgaaaagaggcctaaacttcattttcattaccataaatatccaacttctgccataaagacgaaaagactagagggtgactttacatcacacactcttggaaaaaattagagttcttgtcttgatggaagttctaaagagtgggtgagacattaagtgactaccaggagctagataattgctgttttactaacagatgttcattttcatttcca

SEQ ID NO: 7717 - DNA, 514 bp, Homo sapiens
  MAP TO CHR18.3; EXPRESSED IN FETAL LIVER, SIGNAL = 2.5; EXPRESSED IN ADULT LIVER, SIGNAL = 1.1; SWISSPROT HIT: Q13336, EVALUE 6.00e-32; EST_HUMAN HIT: AV721423.1, EVALUE 1.00e-102; NT HIT: gi14765931, EVALUE 1.00e-105
ggggaaaaggcagaaaaatcagcttgactaaatagtaattttaaaaaatcccttagaccctaatgctctggagtagaacaaatgctttaaatggcaagatgaaggcagaaaggccaccatagtcctgagcatctaggagactctgacacccgtggacagttgaccaggaggccattgcgtatcttgcagagccagggcgaatgtgagaagccagtgtctcttacctccagggcactgaggtcagaccaggagatatttggagctgtagttataggtatgaccagtttggctggaaagaatggattgtaatgtcctgtggctgaaaggtacattgacaacgccatgttgaaagggagggtgaagacggggaggtcccatttgctgagcatggaattcaatgcacttgagaaaattgggctaaaaaaagaacagagcaaaagaatgtgcatgtgacaaagcaggctgacacacggaatcgctatactctggaggggctttgtttcacctgccaaca

SEQ ID NO: 7718 - DNA, 565 bp, Homo sapiens
  MAP TO CHR18.3; EXPRESSED IN ADULT LIVER, SIGNAL = 1.7; EXPRESSED IN BRAIN, SIGNAL = 2.2; EXPRESSED IN HELA, SIGNAL = 1.6; EXPRESSED IN PLACENTA, SIGNAL = 1.8; EXPRESSED IN FETAL LIVER, SIGNAL = 3.2; EXPRESSED IN BONE MARROW, SIGNAL = 2.5; NT HIT: AJ240082.1, EVALUE 1.40e-01; EST_HUMAN HIT: BI597702.1, EVALUE 2.00e-01
gagtcccagcatttgtagccactgttatcacaattgccctgaaggccaagttgcaggattttatcttagcttacccattagctcaccatattccagaaaaagcaggtgtctaacacttccaccatctgaaaacaggactcgagtgtaagctgaaatatgtaaaactgagtggcagtgggaatcaattcagccatttttttctttccataaatacttattgagcatctgcttatgtttcaggttcagaaaagaaaatggatagttttgtctgagatctcagtaaaattacatgtaggaaatttaccattactatgactaattaaaacaaataataacaagtatttgtaaaggtctttgcaatttacaaaatgctttcagataacagtactcacataattaagtggctataatcactttacccacatgtgctatacctgctagaaggatactttgtaacctctcaggttaattgctcagtttttaaaggttaataatatatgtcagcttaaggaaagtgtggaaaaatttttccaatccccacatgaccctgcctgtcttgtaggag

SEQ ID NO: 7719 - DNA, 571 bp, Homo sapiens
  MAP TO CHR18.3; EXPRESSED IN HELA, SIGNAL = 1.1; EXPRESSED IN BRAIN, SIGNAL = 1.5; EXPRESSED IN ADULT LIVER, SIGNAL = 1.2; EST_HUMAN HIT: BI084863.1, EVALUE 8.00e-38; NT HIT: gi4505330, EVALUE 5.00e-38; SWISSPROT HIT: Q99747, EVALUE 3.00e-08
gccaaattccaggacatgagaattggaaaagtactgttctaggatatttcccctcaggtgtcccgtggaagttactatagcatttataaatctctgtttatacaaacaaagactctgaaagttaaactccaggtgttttcaatactgccaggttattgactttattaaacagatgtaaatttgaccatgatcctctcttttgttttagaaaacaattgctcaagtcttagttcatctacacagaaatgactatgtagctgcagaaagatgtgtccgggagagctataggtaagacgttgtctgggccctcttgacttgcagtggcgacacctctgtgtctacaactaagattgctgctaggacacatgttcctggccatgaaactgtcatttctaaatcttaggagtgctcatctaccatttcatcttttacagtgggtgttttacaccttttttttttttccctttcctgtatttttctctaggggacctccatggaagtgaatgactttagtcattttagtcattttatttgccttctaagaaaaaaagaacaagaaaaagggggaaaa

SEQ ID NO: 7720 - DNA, 555 bp, Homo sapiens
  MAP TO CHR14.3; EXPRESSED IN ADULT LIVER, SIGNAL = 1.9; EXPRESSED IN BRAIN, SIGNAL = 2.2; EXPRESSED IN PLACENTA, SIGNAL = 1.9; EXPRESSED IN HEART, SIGNAL = 2.9; EXPRESSED IN LUNG, SIGNAL = 2.6; EXPRESSED IN FETAL LIVER, SIGNAL = 3.9; EXPRESSED IN BONE MARROW, SIGNAL = 2.6; SWISSPROT HIT: Q09475, EVALUE 4.00e+00
tcccagagggttttgctatggctaggatagcaggtaccaggtttagtatataaattgctgggatccaacaccatggcttcagcattggaagtaaaagtaaatagaaaaactaattgtcaggtgagagcaaagttgagattcaatggaagaatccaaggtgtcaagtccataggggcatatgtgttgagtggcaagaaaccaaccaacatcaaaggctttgcaatggcaggctggcaggaaaaagctagtatgttcagttggcagaacatcaagaggcttctataaacaacagtagaaacagagacagagcttatggttgctttgattttgggaaggtaactgttataggtgagttttgatactatgagaacatactcaataaatatttgtcctctttcagttctttccctatgtcctttctcctctatctctaacaatgctcctaccttaaaagcactaattttcccatttcctcttaaaagctattgccttttaaaaaatttattcattccttttctattgagcttctgtccaagccactctgccaaaacaaat

SEQ ID NO: 7721 - DNA, 552 bp, Homo sapiens
  MAP TO CHR19.3; EXPRESSED IN PLACENTA, SIGNAL = 1.6; EXPRESSED IN HELA, SIGNAL = 1.1; EXPRESSED IN ADULT LIVER, SIGNAL = 0.92; SWISSPROT HIT: P20138, EVALUE 9.00e-72; EST_HUMAN HIT: BI770340.1, EVALUE 0.00e+00; NT HIT: gi16193256, EVALUE 0.00e+00
tgtcctgaggtccctttgaccttcccttgtggctgcttctgaagcctgtgcctcacctgtcacatgcacagagagctggggagatttgtaactgtatttggtacttcctctctccatccgaaagaagtatgaaccattatccctcctcctggcgtctacgatgctcagggagcagttgttcctactgggatccccaaggaggcggaatctgccctgagtctcctcctgtacttcttgatctagcttgtttgtggccactggagagtccctggatataatggctccttcccggaaccagtaaccatgaactggggagttcttgtcgtagtagggtatgggatggaagaaagtgcagggcacgaggacgcacaaaccctcctgtaccgtcactgactcctgcacttgcagccagaaatttggatccatagccagggcccctgtggggaaacgagggtcagctcggcccagcccgacaacccctctccccacagccactcacctgcccacagcaggggcagcagtagcagcagcggcatgtctgaggaagcagct

SEQ ID NO: 7722 - DNA, 504 bp, Homo sapiens
  MAP TO CHR19.3; EXPRESSED IN HELA, SIGNAL = 3.9; EXPRESSED IN PLACENTA, SIGNAL = 3.2; EXPRESSED IN HEART, SIGNAL =   3; EXPRESSED IN LUNG, SIGNAL = 4.8; EXPRESSED IN FETAL LIVER, SIGNAL = 4.7; EXPRESSED IN ADULT LIVER, SIGNAL = 2.3; SWISSPROT HIT: Q13351, EVALUE 1.00e-09; EST_HUMAN HIT: BI523767.1, EVALUE 2.00e-56; NT HIT: U37106.1, EVALUE 0.00e+00
gacccccaagtctctccttctttggagacccaatgtctgtttttacccagcacctggaccctcaaaccctgaaccccccaacccttgatatttgacttggctttggacacagggttagtctttaaccccagccccagacaggccaacgtgaagtttgtgccccagaaacagtgcccccccgccgccttgccttgctttgccttatcagaggctgcagccaatcagctaaggacagagaggagccctcgaaggggctatcacagcctcagagttcacgaggcagccgaggaagaggaggcttgaggcccagggtgggcaccagccagccatggccacagccgagaccgccttgccctccatcagcacactgaccgccctgggccccttcccggacacacaggatgacttcctcaaggtggggcctagaaggtggggtctaggtgggctggctggaatccagggccacagtcacagatcttggggtccagacctgcatcttgacct

SEQ ID NO: 7723 - DNA, 563 bp, Homo sapiens
  MAP TO CHR16.3; EXPRESSED IN PLACENTA, SIGNAL = 1.1; EXPRESSED IN HELA, SIGNAL = 1.3; EXPRESSED IN LUNG, SIGNAL = 1.5; EXPRESSED IN FETAL LIVER, SIGNAL = 1.2; EXPRESSED IN BONE MARROW, SIGNAL = 1.2; EXPRESSED IN ADULT LIVER, SIGNAL = 1.1; SWISSPROT HIT: Q9HIQ4, EVALUE 5.40e+00; NT HIT: AF342999.1, EVALUE 3.40e-02
taattggggccttttctgcttagggatcctgtcctatcttatctcttggtatcactggacccagttctgcagtggggaactatcctagcctacagaggagaaataatgcttgtgatgcttgtgacccttttgctttggtaagtcaaacaggtttcaagcccctgtaagagccttttatttttactcaaaatggaaatcttgctgattaatattcaattatgtctctggaacatctgcacacatacatgcacatatacacatacaagtaccacccctcctcccttgcacatactttttcgaaatattccattgatttattttaagcccagtagaaagtggtcactataaattttaataactgtcatttaaatatatgacattaaatatatgtcatttaaatatatgtcatttaaatctataatatagtcataatatcagaaattagaaaatatatagaaatccaatataagagacaaatgggtggatagatagatgatagatatagttttgcaatgctaagtatgaagacaataataataaaaagcatggagatggattggaac

SEQ ID NO: 7724 - DNA, 563 bp, Homo sapiens
  MAP TO CHR18.3; EXPRESSED IN BONE MARROW, SIGNAL = 2.1; EXPRESSED IN BRAIN, SIGNAL = 1.3; EXPRESSED IN ADULT LIVER, SIGNAL = 1.2; EXPRESSED IN PLACENTA, SIGNAL = 1.6; SWISSPROT HIT: Q62178, EVALUE 1.20e-01; NT HIT: U41741.1, EVALUE 3.40e-02
ctcaggctcatggaaggaaggaggaagcacagctagctttttttttttttttttttccagcagaaccatatgaaatttacatatatacggcatggcctgctccaaaaacttacagtctaaatttagccacattgctcccacgccggccaccacaattgataactagaacactcaagggccccataaaaagcacgtgcaaagtttccacctttgtctagaatccctggggctgactcagtcaaaggggtcagatctctttccaacggtgtgcggagaaagaagtggcctcctcttgtttttaactctgctgctcctcctgctcagatcctgcgccctggatgcggacggacttccaggctccccaggcagcacccagctaggacccagtgacaactcttgggttggtagcaacagccctgtgaggtcagggtcccaggagcagcaggggtctccaggatatatagcagcaaaaatctcacccttccaggccaaaccagcccttgccacgggccacaagccctttgctcagaacctaggtcagctccttgatatcccttgtcccc

SEQ ID NO: 7725 - DNA, 508 bp, Homo sapiens
  MAP TO CHR16.3; EXPRESSED IN ADULT LIVER, SIGNAL = 1.6; EXPRESSED IN BRAIN, SIGNAL = 1.9; EXPRESSED IN PLACENTA, SIGNAL = 1.6; EXPRESSED IN FETAL LIVER, SIGNAL = 1.6; EXPRESSED IN LUNG, SIGNAL = 1.5; NT HIT: AF111710.1, EVALUE 4.80e-01; EST_HUMAN HIT: BI519286.1, EVALUE 1.80e-01
tgtgttcttgcaccaggaagatgggagtgtcatgagaaagaggagaaagcacatgaagcgacggcttcatttatccatatgaataattaaatattgagatacattttcaagtggtcatcttgttccacttttctttcagctttcggtgtcccctggacactcccttaaaaaaatagattaaacccttcagccttcatgcattcaattaattctcatcatacctgccttatttggatgccttcagtgctttttgagttcatcataattccccagcagatcttctacaaatctgaccccacacttcctctccagtgcttttcctactcacctccacaaaagctgtttgtccaattttgtttgattctcttctgctgttttgaggtgcctgtgttttcaacctgaatggattttctctgctctccccttggcgggagatgtcttctacatctaccaggatgacttttatcttggcctgttcagatcctacacaacctccaaggcacatctt

SEQ ID NO: 7726 - DNA, 523 bp, Homo sapiens
  MAP TO CHR14.3; EXPRESSED IN HEART, SIGNAL = 2.6; EXPRESSED IN HELA, SIGNAL = 2.7; EXPRESSED IN FETAL LIVER, SIGNAL = 2.9; EXPRESSED IN BONE MARROW, SIGNAL = 2.8; EXPRESSED IN ADULT LIVER, SIGNAL =   3; NT HIT: AF070670.1, EVALUE 0.00e+00; SWISSPROT HIT: P35814, EVALUE 3.00e-16; EST_HUMAN HIT: AA854244.1, EVALUE 2.00e-93
gggagtcattgcacacacacacgcacgcatgcgtgcacatatgtatttttttctccctgaaagtaacattttcactagaacaagtataactgtaattggcacagctgtaaaggttctcaaggctttgaagagcaaaaagaaaactaaaatattctcaaatttttttcttcccagggaagtcgagacaacatgagtgtgattttgatctgttttccaaatgcacccaaagtatcgccagaagcagtgaagaaggaggcagagttggacaagtacctggaatgcagagtagaaggtggatcatttaacaaaaaataagtagctttattaaagaaaaatcttcaacacaatcaaactttaacattttagcttttagatttttatgtgtctttgacagctagtgtctagtgtatgaaagtggaaaaggacatttctgtagtagctgttaagatgtatgcagttgtcctatcacagttatattagaaataacaactagtgtggaaagtaacccacattctgttcagga

SEQ ID NO: 7727 - DNA, 594 bp, Homo sapiens
  MAP TO CHR16.3; EXPRESSED IN HELA, SIGNAL = 2.9; EXPRESSED IN LUNG, SIGNAL = 2.8; EXPRESSED IN BONE MARROW, SIGNAL =   4; EXPRESSED IN FETAL LIVER, SIGNAL = 3.8; EXPRESSED IN ADULT LIVER, SIGNAL = 3.7; EXPRESSED IN PLACENTA, SIGNAL = 2.8; SWISSPROT HIT: P47896, EVALUE 9.00e-07; EST_HUMAN HIT: BF515223.1, EVALUE 0.00e+00; NT HIT: U85249.1, EVALUE 0.00e+00
tggtcctccctcactttctgtccagcactggaaccccaagggacagagagtgtgtgacagctcctgcaggaagctggtcagacaaggagagtgctgggttaaaggggataaatttggaaggtatccagggacctgatcagggaggatcgtgagtcccaaggagagaagtttggatttcttcctccagtcatcatgaagcttggagggtttgggggcagctgccttggaagggctgaaaagaggtggacggcactggtgagacaatcccttccccccccctctacccgccagccacagaagaaggactccgcagctcttggatacagcactttaatgccagtgggcctttaggatagggaggagttgggagccaatctccatctccgtactcctaacccaacttccaccacgctggaggagacaccagggttccagctgtgagcctggtgcttgccttctgctacaagccccatcccgacctccttggagacttctagctcaagctctggaggaaatccaccagcaggtgctcagggaagccaaagtccatctgcagcagcaggaagccctgaagggaggggcagtaggagagag

SEQ ID NO: 7728 - DNA, 515 bp, Homo sapiens
  MAP TO CHR14.3; EXPRESSED IN PLACENTA, SIGNAL = 2.1; EXPRESSED IN HELA, SIGNAL = 1.8; EXPRESSED IN LUNG, SIGNAL = 1.6; EXPRESSED IN ADULT LIVER, SIGNAL = 1.4; SWISSPROT HIT: P21457, EVALUE 8.20e+00; EST_HUMAN HIT: R82101.1, EVALUE 4.60e-02; NT HIT: AE008678.1, EVALUE 4.90e-01
ctagccctgttgcaggtagcaaattgaacaaaatgagtattatttatattcacctggcataatttgttattcgactttttctgatggcagtcatggaactggagcagttaaacctcattctccagggtactggtgctactgccaagagcggaaaactttcatcttccaaaacctcaatcagccagtttctcatctgcatcccataaatcatcaagaaagaacaagctcattatctcagcaccagggacaaaagtcttttacatgacactgaacttctgactactgcaaaacatggcagcttgccatcatatgtttaacaggtgtgttggtccctttaacagactgggccagaagtttgaggatatggtctgaaatttcaattttgttacgtgttgtgacttgcactgggcccaaatccagaggtaattgggcctagtggtctgaagagttacttgggtgttctgtaattttagtagatttggagaaagagaggtggggatgtctgtccctgaaga

SEQ ID NO: 7729 - DNA, 550 bp, Homo sapiens
  MAP TO CHR19.3; EXPRESSED IN ADULT LIVER, SIGNAL = 1.2; EST_HUMAN HIT: BI906741.1, EVALUE 2.00e-57; SWISSPROT HIT: P20138, EVALUE 7.00e-30; NT HIT: AF277806.1, EVALUE 0.00e+00
agacacggagttcccatcactttgaggactggggacactgaccctgtctccccaggagccccataaatggggaaggtggagccagcatcctcctgacccccaactcccagccaagattccaggacccagatccttgagtctgggtcccacatccaactggcctcaaggaatcccgatcaaagacccagacgtcctggcccagaactcacaggatatgttgagtcggacagccctggtcatggtcacgccggccccaggcaaggtcacctgacaggtgaggctggtgccatggtcctggggctgtgggatgaggctgagcatcgaggagcgagtgatagtggggtccagggaggacacggaggcccccatccaggtgatcgtggggggcgtcccctgttcacaggcccagggcacagagcaggtcaggttcctggggtggccagactccagggtccccgggatggagaaggtgggcatgtgagtcagggctggtgatgaaagggagacaggcaaaatgagggtgttggggtctgaagtgtggtgctgagga

SEQ ID NO: 7730 - DNA, 578 bp, Homo sapiens
  MAP TO CHR16.3; EXPRESSED IN HEART, SIGNAL = 2.3; EXPRESSED IN ADULT LIVER, SIGNAL = 1.1; EXPRESSED IN BRAIN, SIGNAL = 1.3; NT HIT: gi14785613, EVALUE 0.00e+00; EST_HUMAN HIT: AU119080.1, EVALUE 0.00e+00; SWISSPROT HIT: Q08024, EVALUE 2.50e+00
ccaaattatgattttgtcattgcaggcaagaagacaacaagaccctagtcctggttccaatttaggtggtggtgatgacctcaaacttcgttaattaatagcacagcagatgtgtgctgcccatctttacatacacattgcttctagttggcagaaataattgattaaaagaccagaaactgtgataactggaggtactacggtctatttctcaaccttaggcagtaatagacatcacaactgccatggttttgcactatgattataatacctgcatttctaattttttaagcatgtagccagtaataatttgaagttttttttctatgccagcttaccttgttggcattattttagggagttgaaactatcaactgtaaagctccttttcttccactttaatttaaaagttcatgtcatttaaaaaccagtccagaaattaaaattgtatcacgagggttttctctaatcattttttctatttttttttttgtacttctagatgttttggttatacagcttcattttagatgagcattcttattttttgttttgtttgccccatttccttttgtgtt

SEQ ID NO: 7731 - DNA, 587 bp, Homo sapiens
  MAP TO CHR19.3; EXPRESSED IN BRAIN, SIGNAL =  19; EXPRESSED IN ADULT LIVER, SIGNAL =  18; EXPRESSED IN PLACENTA, SIGNAL =  17; EXPRESSED IN HEART, SIGNAL =  17; EXPRESSED IN HELA, SIGNAL =  14; EXPRESSED IN LUNG, SIGNAL = 9.6; EXPRESSED IN FETAL LIVER, SIGNAL =  26; EXPRESSED IN BONE MARROW, SIGNAL =  20; NT HIT: AL163202.2, EVALUE 4.00e-05; EST_HUMAN HIT: AW418960.1, EVALUE 3.00e-31; SWISSPROT HIT: P07538, EVALUE 4.30e+00
ttaaatgcatggcactccaggaggcagagtggacacagctcttcatctgacacatgtttagctgaaaaaaagccatttttcctcttttgtcttctttggaaatcctttccagatgacattctctggagaagttacacctgcatcttgagaaaattcctttaaagttgtcagcaccacctgtttacctgctagtctcacacccacagaaaaaagaactaagacctgtagaaaaagcccacccatttctgtcctttataacagcagagattcaggaacaatgagctgctccatgaatataaaaatatgtttctttatttttgtcttcaggtgctcgcccttgccacaaacaccagcaatttctgctacagtaatggaaatatgggtgacactgacctctccctatcaaacccaaacagaacagactctgtgaccaccttttagtgtaaaggagaaacttaactcttatgaatgtatcttgaaccccacacacttgattctgtcctcaccttagagtcacatgagacacaattaaaacaatgtgaatactttcacctagaacaataaacagaacctgtggagagagcctg

SEQ ID NO: 7732 - DNA, 563 bp, Homo sapiens
  MAP TO CHR16.3; EXPRESSED IN ADULT LIVER, SIGNAL = 1.3; EXPRESSED IN PLACENTA, SIGNAL =   2; EXPRESSED IN HEART, SIGNAL = 3.2; EXPRESSED IN HELA, SIGNAL = 4.4; EXPRESSED IN LUNG, SIGNAL = 2.7; EXPRESSED IN FETAL LIVER, SIGNAL =   4; EXPRESSED IN BONE MARROW, SIGNAL = 0.77; EXPRESSED IN BRAIN, SIGNAL = 1.6; NT HIT: gi14775162, EVALUE 0.00e+00; EST_HUMAN HIT: BI224582.1, EVALUE 0.00e+00; SWISSPROT HIT: P52742, EVALUE 2.00e-13
cgggaaactgaagccattactctccaaaccctgtttcatcttcccaagcatgtcggaaagctggcaacagccgccacagacgcagccgcagcagccacagccaccgcagcctcagcaccatgcagagccaccgccagccctggcagagcacacgctgcctccgggcacggcggagaaccccctgggctgtgccgtctatggcatcctcctgcagccagaccccggcctgcagcccccacaacacgcacccctgcaggcagcaggagagccaggccccaaatgtggcgtgtgtggtcacgacctggcgcacctgtccagtccgcatgagcaccagtgtctggcgggccatgaccgctcattccagtgcacacagtgtctcaagatcttccaccaggccactgacctgctggagcaccagtgcgtgcaggctgagcagaagcccttcgtctgtggggtctgcaagatgggcttctcactactcacctcactggcacagcaccacagctcccacagtggcctggtgaagtgttccatctgtgaaaagacctacaagccagctgagg

SEQ ID NO: 7733 - DNA, 513 bp, Homo sapiens
  MAP TO CHR16.3; EXPRESSED IN FETAL LIVER, SIGNAL =   5; EXPRESSED IN LUNG, SIGNAL =  11; EXPRESSED IN ADULT LIVER, SIGNAL =   5; EXPRESSED IN HEART, SIGNAL = 3.4; EXPRESSED IN PLACENTA, SIGNAL = 6.1; SWISSPROT HIT: Q12788, EVALUE 1.00e-43; NT HIT: gi13627994, EVALUE 7.00e-99; EST_HUMAN HIT: BG767515.1, EVALUE 1.00e-98
tcactgtagccagcgaactgcggggtggcagggagcaggagatgtgagccaggacctgtgtaagaggagggctggtgcccgcagcctccagactgagcaagggcaggtgtgcacctgtttctgcagccgcagggagcgagcctcgtagagcaacaggttgtggtcggcggtggcggtgaggaccacgccggcggtgtgtgccagggtgcagtgggtcagctcctgcccagggcccggcggctgggcctgcgtgtacacacactgcccagaagctgcctcccacacgcgcagagtgcctgtgtgggtggggacagggctgctgagactctcaggtccacaggccttccccagcccctaccgcctgcccatgtcccggcccaacacaccttggtcgccagctgtcagaaagtacagccctggggacttcacacccagctgggacactggctcctctggcaacagcacagcagcctccacgctctggagacgaattgggtcacaggctgctatcat

SEQ ID NO: 7734 - DNA, 523 bp, Homo sapiens
  MAP TO CHR19.3; EXPRESSED IN ADULT LIVER, SIGNAL =   6; EXPRESSED IN PLACENTA, SIGNAL =   6; EXPRESSED IN HELA, SIGNAL =   6; EXPRESSED IN FETAL LIVER, SIGNAL = 5.6; EST_HUMAN HIT: AW294668.1, EVALUE 1.00e-30; SWISSPROT HIT: P31020, EVALUE 6.40e-02; NT HIT: AF161221.1, EVALUE 0.00e+00
tttcctctgacactccccaccctggtttcctgactccaccactagatccaccacctccagcaactgggaaccctcccctgcccaccctgccctggggtcccctcccaggattccttctagattatagcatcttccctgggcgggttctcatgaacaattgtggctgcttttttggccagacaggggagggaggggatgggatcagggagtcctggaatgggaactaggcaataaaaaaaaaaaaatgtcagaagcagggcggcgggaggtgggggcagggccagctgtccttaccagggataaaaggctttgccagtgtgactaggaagagagacacctcccctccttccttcatcaagacatcaaggagggacctgtgccctgctccacatcctcccacctgccgcccgcagagcctgcaggccccgcccccctcgtctctggtccctacctctctgctgtgtcttcatgtccctgagggtcttgggctctgggtaagtgccccttgctgtctctgcctctc

SEQ ID NO: 7735 - DNA, 597 bp, Homo sapiens
  MAP TO CHR19.3; EXPRESSED IN ADULT LIVER, SIGNAL = 0.92; EXPRESSED IN BRAIN, SIGNAL = 1.1; EXPRESSED IN PLACENTA, SIGNAL = 1.1; EXPRESSED IN LUNG, SIGNAL = 1.3; EXPRESSED IN BONE MARROW, SIGNAL = 1.1; EST_HUMAN HIT: BG753262.1, EVALUE 4.00e-15; SWISSPROT HIT: P46824, EVALUE 1.00e-26; NT HIT: AF166267.1, EVALUE 2.00e-34
cttcccttcctttcccattcttgctgtcccctcccctgacctccctaggtgctccatggtgacagagggggcaccaggatccttccacttgcacccaatgggtccctgccgttcctgcccccagccatggctggccgcagtgctcaccggtacaccagcgccaggatgttgagcatggtggccacgtcagggtggcagtggcccgagctgcgctccaggtcctccaaggcctggcggcacagaggcaccgccacctcatagcggccctgccccgcgtactggatcacgaggttatgcagggtccgaaggcgggcagggatctcatagccaccctgctgagcagctgctgctcctgcggcctcaggacctaggtggggtggggtgggctctgggtcactgcaagcctcctgcccctccagcctcgcatgaggggacacgtgcctcagaactgccggactgcctaactggcccctgggactatgggcccccacgctaacttctgagataggagtcactagcatctaaccagctggtgggatgcatcctggcctcgggacaggaacacggcagcccacctgccctgtgggatgtgaatac

SEQ ID NO: 7736 - DNA, 591 bp, Homo sapiens
  MAP TO CHR16.3; EXPRESSED IN HELA, SIGNAL = 1.4; EXPRESSED IN LUNG, SIGNAL = 2.2; EXPRESSED IN BONE MARROW, SIGNAL =   1; EXPRESSED IN FETAL LIVER, SIGNAL = 0.9; EXPRESSED IN BRAIN, SIGNAL = 1.2; EXPRESSED IN ADULT LIVER, SIGNAL = 1.3; EXPRESSED IN PLACENTA, SIGNAL = 1.4; NT HIT: AB039999.1, EVALUE 1.40e-01; EST_HUMAN HIT: AA663728.1, EVALUE 0.00e+00; SWISSPROT HIT: P32618, EVALUE 5.70e+00
gtgctgaaggagaatccaggtgaggaagaggagaagtgcatggatgttacagtcagaggaatcccgaggatgcactgcgactatctcagaagctgtagatgaatgcatcatggcaccgaaaggaggcggacgatacgatgttgaagagcttggcagaaatccaagcacatagggcctattcagagcataagggagagtcactgaatgctctcaccctagaaagtggcatggtaacttatgtcaggttaaagggcctctattagccctaacatctccacccatctacgattgtgagaacaaatttccatttagaaaaggcaggtgatgcatacagtggtacaatatacaaactgccttcataccccctaactcatcaaatccccataatgatcctacaaagttggtattgctggcagggaaaacgaggctcaaaacagtcacagagcaagtagacatctgtacctcagtgccatgactctgcatcctgccccctttctgacactcaatcacagtcttcctgggatcactgaagatctgtatggaacagatgcttaaaccacgttgttgacttgtggacatggtgcaaaaatg

SEQ ID NO: 7737 - DNA, 550 bp, Homo sapiens
  MAP TO CHR19.3; EXPRESSED IN ADULT LIVER, SIGNAL =   1; EXPRESSED IN BRAIN, SIGNAL = 1.4; EXPRESSED IN BONE MARROW, SIGNAL =   1; EXPRESSED IN FETAL LIVER, SIGNAL = 1.3; NT HIT: gi15302718, EVALUE 4.00e-97; EST_HUMAN HIT: BI850724.1, EVALUE 6.00e-97; SWISSPROT HIT: Q03173, EVALUE 5.30e-02
catgatcacctgccctttgcgctgcaggaacatcacctgcggagcaggaacgctgacagcctccactgccggcacagcccagccggcacagcgcaggctcgcaaggccacccgcctcccgcctttgccaccctcccaaagccctgatgcttcctgcaggtcaaaggtacctcatgggctctgcagcagggccggtgtcccagccgctgaaccagggtccacccaggactgagtccagagcggagtgagcggccgggcctcccggcgtgttcccagccccaggcctcctctcaccttgaagcagttctcgtcggccatgcagcgctcagccttccactggtagctggtctccctagcagcgcggacgcagcgggaggacaggttcccaccagcggcaccccgcttcttctcgttcaggtagagctccaccaccttcaggcagacgtcatcgctcacgaggtggtgcagctggcgggaggaaagcaggtggtgcggccaccccgcctcctgcgggagtccccacctcacccacagaggaagtcgacaaaggc

SEQ ID NO: 7738 - DNA, 509 bp, Homo sapiens
  MAP TO CHR18.3; EXPRESSED IN BONE MARROW, SIGNAL = 1.4; EXPRESSED IN FETAL LIVER, SIGNAL = 1.1; EXPRESSED IN ADULT LIVER, SIGNAL = 1.2; EXPRESSED IN PLACENTA, SIGNAL = 1.4; NT HIT: AB023204.1, EVALUE 1.00e-108; EST_HUMAN HIT: BG721572.1, EVALUE 1.00e-108; SWISSPROT HIT: Q9H4G0, EVALUE 1.10e-01
ataccaacattccccagctctcaatatctaggacagaaaagtcttaagacacacacttacctctacatcacaggtatattctgatccatcgagaagtatcactttgcactgcatgcttttaggctttttgacaatctttaatggagaccgagagagtttactgctagatgatttctgagaaagtttatcgtcttctaattgctgatattcgagctgttttgcagccctggcagcaaactcctgttccttgtcagtgacctgtgaagagcaaacaatcaacagttttcattgcaaggtgggaaataaatattgcattgctcatgcaatagcacaaaactgctttctatttcatagaggagaggtattgaattaggatattaggaatagatataaatatacagatatttataatatttgcctaaatactgtttgccatttaaatgtatcaataaggccttatttcattttaactccaggacttactttagaaccactgagttagcaaatgc

SEQ ID NO: 7739 - DNA, 506 bp, Homo sapiens
  MAP TO CHR18.3; EXPRESSED IN ADULT LIVER, SIGNAL = 1.2; EXPRESSED IN PLACENTA, SIGNAL = 1.2; EXPRESSED IN FETAL LIVER, SIGNAL = 1.5; NT HIT: AL163213.2, EVALUE 4.80e-01; EST_HUMAN HIT: BF839903.1, EVALUE 2.80e+00
gaccaggtcctgcaaacaaccagagacaaatataagcaggtgtgcatatcatatcaaaatactgcattttccttttcttgcatttttaaacattagtcgcaactttgttttgttttaatttagtggaaaataaatgtaatcgctgtaatttcatgtataattattagtaaaatgccacttttaccttttccatggtcctcatttattgtccccattctctctgtaagcagaatctcccccaggtgcttcaaattttcaatgctcaattccagattgatattctttcctctaccattaactaaagctttatctgtgaaatgattattttgtcccattttttcttgattaaaacaaaccaaaagatgaaattaagagagaagtaagtagaataaagctctctttattacctttaccttcttctaaattgttcattgagtagcttgtgaggagaggtcattaaaagcatcattagttgaaaaacacaggcttgtctttccacatcccct

SEQ ID NO: 7740 - DNA, 564 bp, Homo sapiens
  MAP TO CHR14.3; EXPRESSED IN HELA, SIGNAL = 2.5; EXPRESSED IN LUNG, SIGNAL =   2; EXPRESSED IN BONE MARROW, SIGNAL = 4.3; EXPRESSED IN BRAIN, SIGNAL = 4.1; EXPRESSED IN ADULT LIVER, SIGNAL = 2.9; EXPRESSED IN PLACENTA, SIGNAL = 2.3; SWISSPROT HIT: P09260, EVALUE 2.40e+00; NT HIT: U32326.1, EVALUE 5.40e-01
ctgtacctcccaccaaaaccgacaaagtagatattgccaaatggaggtgaggtttagatgcatggcagccagaaggaataatagattcctgctacacctgagaactagagtggcaagatttctagcaccatataatttactccttcatccacatgagtataagatgctcctcccctcagccctgtgattctcagatcatcagtatgtatatatcagggcttgtggttcaccagagtgttctgtggactatgagtggtgtcatcagagatcctgagtcatgcatagctactatttaaaaagaagatagaaaaaaatttttagtacttgtgaaagcttggtgctggtgaatcaatgctctgtggattgaggctaaagaacactgtgtccagagtaactgcattttggatgaaaaataaaagggcttctgtaaactcgtaattattcttctggttgtgttcatggtaaatgccaacagtatggatgtcagcttctaactcagccaatttgttgaccagatccagtttatatttaccagaactcatctcccagagttcctccacgata

SEQ ID NO: 7741 - DNA, 512 bp, Homo sapiens
  MAP TO CHR19.3; EXPRESSED IN BRAIN, SIGNAL = 1.4; EXPRESSED IN ADULT LIVER, SIGNAL = 1.2; EXPRESSED IN HELA, SIGNAL = 1.5; SWISSPROT HIT: P06601, EVALUE 9.40e-01; NT HIT: gi4758549, EVALUE 2.00e-56; EST_HUMAN HIT: AL529052.1, EVALUE 9.00e-56
acaccactcctctgtggtccctgctgtgggtctaaccttaggtcatctggaagcattgggtcttgacgaccagcagagtgccccggtctcccaatatcaaggtcccccaatatcagttgagcgcctggctgactcacaggtgcccaggcaggcataggggagtagggagtgctgacctggtgggaggcgagccccagggctggactggtgagctccccgccatcctgagatttctccctggccagcctggctgcttccttcacttcctggaacttctcggcaaactaagggagtggggaggaaaagacagtaaaaccccagcccatcctcccaaacaggtcaccatcactcagtgacagccccgccactttcgaaccgtacccatccccttatcacacaccttggaagaaggagagaaactttgaaaaatgatgtaccatggtgggtgggcaggtggcatcagatcacagaggtggcatttaaatacattgggccacattgagaaagggaaa

SEQ ID NO: 7742 - DNA, 508 bp, Homo sapiens
  MAP TO CHR16.3; EXPRESSED IN LUNG, SIGNAL =   1; EXPRESSED IN ADULT LIVER, SIGNAL = 1.2; EXPRESSED IN BRAIN, SIGNAL = 1.9; EXPRESSED IN PLACENTA, SIGNAL = 1.4; EXPRESSED IN HELA, SIGNAL = 1.4; EXPRESSED IN BONE MARROW, SIGNAL = 1.6; EST_HUMAN HIT: BG426848.1, EVALUE 2.00e-78; SWISSPROT HIT: P04849, EVALUE 6.10e+00; NT HIT: X51910.1, EVALUE 1.90e+00
ggctgctgctacaaaacctcgcatttctgttcacatccaatggctctctctttgttgttactatgcaccgaggagcaatgggcatctcgtaaaagctatctatggtcccaactactgagaaagactttcagatctgcctaagctctgtgaccctccaaagtgatgttctattgagagtcaagatgttagggctacctctgacttatgccaatctctctctcatcatccctcctcttctctccgcagctcagcccagggcagcgcacagtgcatcgaccaccctttcctggttccacagacgctgggcatagagccagtcctctaagctttggcctccaccaagagttcaggcttttccagcacaaaagccagagactagcaggttagttttggttgccaccctgcagaattaagcacagtactaaagtgggagttcgcttgctttctctctctctctctctcctcccctccttaattttgagaagtaaggtggaggagggaagagaaa

SEQ ID NO: 7743 - DNA, 500 bp, Homo sapiens
  MAP TO CHR19.3; EXPRESSED IN PLACENTA, SIGNAL = 1.9; EXPRESSED IN HELA, SIGNAL = 1.9; EXPRESSED IN HEART, SIGNAL = 2.2; EXPRESSED IN LUNG, SIGNAL = 2.6; EXPRESSED IN BONE MARROW, SIGNAL = 2.6; EXPRESSED IN FETAL LIVER, SIGNAL = 1.5; EXPRESSED IN ADULT LIVER, SIGNAL = 2.1; EST_HUMAN HIT: BF527542.1, EVALUE 4.00e-61; SWISSPROT HIT: P33485, EVALUE 3.10e-01; NT HIT: gi14763465, EVALUE 3.00e-61
tcttaaaatggtgtaggggtggggggtcctttggagctttggggcagggaagacagaaatgaatcttaaatcattgagcaaatacccattatgtgcctggccaggactaccccactgtgaggccacagagaagactcgcacacagggcctcaggcctcccagagtgtgcgggagaggaggacgcggagatggaaccaggccagccccgggcggttcccacttagagagagacccgggccgctcctgtgtcccacctgggagagacacctgctcccccaacggttgactcagggatgtggaagtcctacctgggaagatcttcgtcctgccattcctccttcacgtccacgttttccatccggagcgtggcttcggtggtccccatgggagctgggaagaggcactggcttgaagcagggatgacccctgaaaggaagccgcagaggaatgggttttactggacaatagtcctaatgacaatcgtctaccccatgcagctc

SEQ ID NO: 7744 - DNA, 515 bp, Homo sapiens
  MAP TO CHR16.3; EXPRESSED IN HELA, SIGNAL =   4; EXPRESSED IN HEART, SIGNAL = 2.1; EXPRESSED IN LUNG, SIGNAL = 4.3; EXPRESSED IN BONE MARROW, SIGNAL = 3.4; EXPRESSED IN FETAL LIVER, SIGNAL = 3.2; EXPRESSED IN ADULT LIVER, SIGNAL = 3.2; EXPRESSED IN PLACENTA, SIGNAL = 3.7; NT HIT: AE008558.1, EVALUE 3.10e-02; EST_HUMAN HIT: BF876353.1, EVALUE 9.00e-56; SWISSPROT HIT: Q83953, EVALUE 6.20e+00
gacttcttccctactggcccaaggacttacctggccacccctcctggaacccagcctcctccagctcccccaagccctctgccttgggagcggacaccttagcagaagggccgtcctccagaccctttgcagccaggcctctctgctcacagatccctgaggacatccggaggttggtgcccagagcctagccccaggctcatgcaaattctgtcttccagttcagcagctgtggcctccttcactcggccttttaaaagaaattcttgggctgactcacacttcctttgtctccagctgggttcactcaagtgtcgctgttttgcaaggctgaggtttgagtccctcagaagcaatctctgatgcaggggcgctgtgtgcttcattgaacttcgaatgaaggtcaggccccccagaaaacctcataccaggacagttgggaaactacccctcactggtggtcagggcattctgggttggagaaactgctttggggctttggcaggtgttcattt

SEQ ID NO: 7745 - DNA, 508 bp, Homo sapiens
  MAP TO CHR18.3; EXPRESSED IN HELA, SIGNAL =  11; EXPRESSED IN HEART, SIGNAL = 5.4; EXPRESSED IN BONE MARROW, SIGNAL = 2.2; EXPRESSED IN FETAL LIVER, SIGNAL = 5.1; EXPRESSED IN ADULT LIVER, SIGNAL = 2.2; NT HIT: AJ000334.1, EVALUE 2.00e-86; EST_HUMAN HIT: BE300043.1, EVALUE 1.00e-114; SWISSPROT HIT: O43776, EVALUE 1.00e-39
ctgatgtagccaagtccacggtatttgaaaagataaacaaacttacacattttggctctgggagacttggatcatttttaatggtaatcttctttgcttcttccaggttcttttctcttcgtaaactatcttctgcctaattttaatgatgaagcagtttgttaacatggttgccagagttctaactttaacaacgttcacgatggcaaggtcaggactcacctctttcttttcccgggattcactcttcatttgttccctatgccacatctttttaatgttcttcaactgtgatttagaaataacattccacctctcattttctttttgtgaatctacgtaaatggtaggaaatggttctttccctactgtcatcaaagccttgggtagggaggagagaaaagacagttcttgaacattgtacaatacttaaaatcaaaataacatctcaagtataaggcaactggaacaatctaagcataaagaccccaacagccaaaagctgata

SEQ ID NO: 7746 - DNA, 587 bp, Homo sapiens
  MAP TO CHR14.3; EXPRESSED IN ADULT LIVER, SIGNAL = 2.1; EXPRESSED IN HELA, SIGNAL = 2.7; EXPRESSED IN LUNG, SIGNAL = 3.5; EXPRESSED IN BRAIN, SIGNAL = 1.5; SWISSPROT HIT: O51066, EVALUE 7.50e+00; NT HIT: gi9845288, EVALUE 5.60e-01
ttagaatgtcagttgggggcccacaacacagcgcccctccctctctggcctccccctgaactgctcccacacactccccagctcttaccatcccctccttccctgcctcccgtaggctgcagtctcaggctaaagctgctgctggacaccctccacaaatacatccctcctcaaccacagccccagcttcatccacattggccaatccccatatcgattatatctcttcaaaatcagaaccctggaaaaaatcaaatcaagctttgtctgctcaggtgttaggatttctctcctaataataacaacaaattcaatgaaaatcatagacacgtcttctagaaacagcttctcttatattttcatggacccaaaccatgtctgagagatgggacggggcacagatgccagtagaaaggggacatcatctggggacaccacccctggccccaactccacttctggctgatgctggcctggtgatggtcctagtccatttcagggctatgcccaacatcagattctctgcagccccaccttttttcctaaagacagaacctgctaaggaaggaaggatgagctgctccaaa

SEQ ID NO: 7747 - DNA, 503 bp, Homo sapiens
  MAP TO CHR16.3; EXPRESSED IN FETAL LIVER, SIGNAL = 1.2; EXPRESSED IN BRAIN, SIGNAL = 1.5; EXPRESSED IN ADULT LIVER, SIGNAL = 1.9; EXPRESSED IN PLACENTA, SIGNAL = 1.6; EXPRESSED IN LUNG, SIGNAL = 1.5; EXPRESSED IN BONE MARROW, SIGNAL = 1.8; SWISSPROT HIT: P08923, EVALUE 4.10e-01; EST_HUMAN HIT: BG548365.1, EVALUE 7.00e-78
ggagagtgcttcagggactgagagggggtgggttagagaagatcattggcataggagtgaaagggaggctggaaaaggagatgggacaaatgtcccagacagtggagatggaaggaatggggacacagctgggctgaggtgggggaagagctacagggatggactggaggctggagcgtggaatgggaaggagacccagatagggagggggtgggtgtgatatggccatccttggcctgtggacctttcctgaccatctccctccccttcaggacccggagcgtctctgcttcatctccaccacgcttcagcccttccatgccccgctgggagggctggggacccagggccgctggaccaacatggagaggatgcagctgtgggccatgaggctggacctccgcgatctgcagcggcacctccgcttccaggtagagcccggccaccctccaccaccccagaccacgtgggaaagaagactcgctggctcattcagtgatccc

SEQ ID NO: 7748 - DNA, 598 bp, Homo sapiens
  MAP TO CHR18.3; EXPRESSED IN FETAL LIVER, SIGNAL = 1.4; EXPRESSED IN ADULT LIVER, SIGNAL = 1.5; EXPRESSED IN BRAIN, SIGNAL = 1.5; EXPRESSED IN HEART, SIGNAL = 1.8; EXPRESSED IN HELA, SIGNAL = 1.1; EXPRESSED IN LUNG, SIGNAL = 1.4; SWISSPROT HIT: P53634, EVALUE 4.40e+00; NT HIT: gi16117438, EVALUE 1.40e-01
cctaggaagaacaggcatcgttattcgcctgaggaagagccacagcggcagataattgtggcttctccgaagcgaagcacaattctagtgcttcagctctcctgaagtacaagaactctgatctccaatgtagagggctgtgttctgtcctgtgttgctactaacccaggttgtaactgtttccttgcaaaacaacttggagggtaatattatttcatgagaaaaaaaaatggccaatgataattaattaccttttggtcctgagggccatggacatctgagagggattgaaatcggggtttgccccggtatcccttaccatcattgttgcttgggtgtgcttcttgccactttccataccgctgactgacccattgagcagcgaatgggctagggaaggcaggaaattggcttgttccccagaagcatcacattgtggttgtagcatgacccagttatgtcaggagcagcatgtctcacagagggaaatagcctggagcctggccagggcaggagagaagccacatggttggtgagtactggatgctctctctgtggcaggaagcagcctcctagctgtgtgccatcttggaagctt

SEQ ID NO: 7749 - DNA, 586 bp, Homo sapiens
  MAP TO CHR19.3; EXPRESSED IN PLACENTA, SIGNAL = 1.2; EXPRESSED IN BRAIN, SIGNAL = 1.3; EXPRESSED IN ADULT LIVER, SIGNAL = 0.94; EST_HUMAN HIT: BG831713.1, EVALUE 1.00e-49; SWISSPROT HIT: P40603, EVALUE 1.50e-02; NT HIT: gi16177105, EVALUE 7.00e-50
ggcaaagcaagttctccttgaaaacagcctgcattgtgagttggggccttgggctgggagggtgtggaagtagacgaattacttccaagaaaaagttggcttttagccccaaaactctccccacaggtgcccccaaaagtaagcctgtcctagagcccctgacacccccacttgggtctcctcgacctcgagatgctagaagttttacccctgggcgaaggaacacaggtaaaggcggtggatccctgagtcccagccctcagccccacttccctaggacccgggagctgggctcacacagggctctggccctccctcccacagctccatctcctgggccctctgtgattcgccgaggccgcaggcagtctggtgagcactcacccctaagggtgatccaggcatcggggtgggagctgggctcctgacatcactgtgtcctccccgcagagccggtgaaggacccttatgtcatgttcccacagaacggtcagtgactgccccggttcagcctggtccatccctgtctgtcgcccggtgggatgtctggggcgggttggggaggggtggttgcttcagctcatca

SEQ ID NO: 7750 - DNA, 550 bp, Homo sapiens
  MAP TO CHR16.3; EXPRESSED IN LUNG, SIGNAL = 5.2; EXPRESSED IN FETAL LIVER, SIGNAL = 9.9; EXPRESSED IN BRAIN, SIGNAL = 6.1; EXPRESSED IN ADULT LIVER, SIGNAL =   5; EXPRESSED IN PLACENTA, SIGNAL = 7.5; EXPRESSED IN HEART, SIGNAL = 6.5; EXPRESSED IN HELA, SIGNAL = 5.9; SWISSPROT HIT: Q16254, EVALUE 6.00e-43; NT HIT: AF250378.1, EVALUE 0.00e+00; EST_HUMAN HIT: BI772280.1, EVALUE 0.00e+00
tggagcctgataagtcctgggtggggcaagtagggggaggcctggagtttggggttatctaggaggatgggcatcctgggtgggagaggacactgtggtcctgacccggagtcgggcaggagccaagcctgcttacaattctacccatctcccatcccttaccacccatctctagggtctcaatgggcagaagaagtaccagattcacctgaagagtgtgagtggtcccattgaggttctgctggtgaacaaggaggcatggagctcaccccctgtggctgtgcctgtgccaccacctgaagatttgctccagagcccatctgctgtttctacacctccacctctgcccaagcctgccctagcccagtcccaggaagcctcacgtccaaatagtcctcagctcactcccactgctgtccctggcagtgcagaagtccagggaatggctggcccagcagctgagatcacaggtgaggcaccatgggagcttgtgacagaggcccaagaggtagtatctctgtgttgtggaacaccatgctcagagttggaa

SEQ ID NO: 7751 - DNA, 572 bp, Homo sapiens
  MAP TO CHR18.3; EXPRESSED IN ADULT LIVER, SIGNAL = 0.95; EXPRESSED IN BRAIN, SIGNAL = 1.2; EXPRESSED IN FETAL LIVER, SIGNAL = 1.1; EXPRESSED IN BONE MARROW, SIGNAL = 1.7; SWISSPROT HIT: P07768, EVALUE 8.30e-01; NT HIT: AF109906.1, EVALUE 2.20e+00; EST_HUMAN HIT: BF675940.1, EVALUE 5.10e-02
ccctttttgtcatgggtttgtatgtgtgaatgtatgtgtgtgatcattttctacaaaggctgaacatccaataattttcatttttatttgagctttgcttccctttgtgaaacaccctacagagttcttccatcctattccatcaatctctctttactgtgtgttttattattttctccttacacatttccttccattcttctgtatattcttctattccttttttctaggaggaagaaagaggcgcttctattgctacttctactgctcttgatgcccccagtgcatcttcacatgctcctctttgtcctaaatggtcagtgcttggcactggtgcagctgcagctgcccgtcatcaggcttcccctggtgaccacttttcccagtcccttttcaatccattagttgacttcaggaagcaatactaaaagcattcccttggcgtgtggagtggttctgaggttcaccttttaaccaagtttctgaacaatagaattttctattcattttctctccagaaatcaagttattttagggagaaagaacatgtttcctggcagaggactttcttg

SEQ ID NO: 7752 - DNA, 513 bp, Homo sapiens
  MAP TO CHR14.3; EXPRESSED IN LUNG, SIGNAL = 2.2; EXPRESSED IN BONE MARROW, SIGNAL = 4.1; EXPRESSED IN ADULT LIVER, SIGNAL = 3.6; EXPRESSED IN BRAIN, SIGNAL = 5.2; EXPRESSED IN HELA, SIGNAL = 2.7; EXPRESSED IN PLACENTA, SIGNAL = 2.8; SWISSPROT HIT: P14974, EVALUE 1.60e+00; NT HIT: AY046056.1, EVALUE 3.10e-02; EST_HUMAN HIT: W87482.1, EVALUE 1.00e-106
tgtctcagaccctggggtagagttgagggagggcagacaatggttagtttccaaactccctggacataggggccccttgctgccttctgccttcctccatagagtttagaaggtttgtttccaggaaggagctccttcctgccaggtttgtcctctctccagcttctcagcagtgcagggtgcttacaacacagcccacaggcctgcctgcactgggctgtgtgggtctgtagacaaggttctcaactctgcctctgcgtctgctcctctccgtcctactgggcctttctgctcccccttacctttccctgcctgagccctctcactgtttttgtgcctgcctttgttgtagaattctagatggcagcatgcttgcaacttgggaaggatgaggcccttgtctggagacattatccctatgagctctgaggtcttgtctccttctgtagcatccccaccaatgtggccaaagccaagggccctcatctgatcagtcctcctgattctggtcca

SEQ ID NO: 7753 - DNA, 560 bp, Homo sapiens
  MAP TO CHR16.3; EXPRESSED IN ADULT LIVER, SIGNAL =   3; EXPRESSED IN PLACENTA, SIGNAL = 3.6; EXPRESSED IN HELA, SIGNAL = 4.8; EXPRESSED IN LUNG, SIGNAL = 4.9; EXPRESSED IN BONE MARROW, SIGNAL = 4.3; EXPRESSED IN FETAL LIVER, SIGNAL = 3.1; EXPRESSED IN BRAIN, SIGNAL = 3.8; SWISSPROT HIT: Q63627, EVALUE 1.10e+00
ttatctccaggaatggggtgaagtccaggcaccctttcacagaggctctgtgagcatgcagcctcctgggccccatgcacctgccgtctcaccccaccctctgggcggcagtgggcacagccctgagggacgccacagtgaatctgaacgctgccactgtctgagtgccagcgcaagcctgcgcctcaggtttctccagagggagtaaaacctcagggcctgctcttgctgtcacctgtgtgggatactgcaaatggcaggagtgtggaggcagctgaggggggggctccaggatgagcaggacctggtgaaggaacaagggcccttgggtggggcacaacggcccccacccctcgtggctctgtagcttgcttctgtctggccttgccctggcccttcctggtcctccacataggcctgctcatgcaaacccacagctctcaggcctggagagagtgcggcaaacacacagcctgcctctgccccccggcagggtaccagcttttggggtcatatcacatgctccaagccagcactccagctctccagggaagaaatca

SEQ ID NO: 7754 - DNA, 521 bp, Homo sapiens
  MAP TO CHR16.3; EXPRESSED IN ADULT LIVER, SIGNAL = 2.4; EXPRESSED IN BRAIN, SIGNAL = 3.1; EXPRESSED IN PLACENTA, SIGNAL =   3; EXPRESSED IN LUNG, SIGNAL = 2.6; EXPRESSED IN FETAL LIVER, SIGNAL = 3.1; EXPRESSED IN BONE MARROW, SIGNAL = 2.5; SWISSPROT HIT: Q62318, EVALUE 2.80e+00; NT HIT: AF318581.1, EVALUE 1.30e-01; EST_HUMAN HIT: BI116232.1, EVALUE 1.80e-01
gatgcctccaaaaagcagactggtttccctttccctgcaatgcctctcctctatcccccagggaccgcatgggccatctggagtgggtctttctggagcgggtctttctggagctttctatgcattcatctaaacatgtatgtacagagggtgaggcagttgcctcttctctgtgtcatcacatcagggtcaagggcagggacatctgtggctgggggcttcctccctggacagccattgctggagaggagaagggagggccgggagggggaagccaagggcctggaggtaggggccaggccgagccacctacgacaggggccctgggtccaaggcctggacgggcagccagtgtgggctggatgtgtctggaagggctatgtgaccgtgggccttcactagcatcaccatcttgcagatggaggctgtgaggggtggactcaacaccagtgtttctcggagtgaggaccgggctgcccagggaatcacagggggttctagcctgtgtgtggaaggacatg

SEQ ID NO: 7755 - DNA, 506 bp, Homo sapiens
  MAP TO CHR18.3; EXPRESSED IN PLACENTA, SIGNAL = 1.2; EXPRESSED IN FETAL LIVER, SIGNAL = 1.2; EXPRESSED IN BONE MARROW, SIGNAL = 1.6; EXPRESSED IN ADULT LIVER, SIGNAL = 1.1; SWISSPROT HIT: O43103, EVALUE 3.60e+00; EST_HUMAN HIT: N79158.1, EVALUE 1.80e-01; NT HIT: D70898.1, EVALUE 8.00e-03
aacttgagcacaggagatgtgctctccatccactcatctacccatgggtgtgtgacaagttttttttttttgcttttgtgcaggatgttttctactgcgaggcacagcgaatgcttaaacaatgccatggaccccctcccacttcaggaacacattgtagcggagtctccaaggcaacagtgtagtcttgtagtaagtgtgtgaccctgtttactttttgttgttgcattgcaggtagtgtcatttacatcctttggaaaatgtttgttattctagtagttttctcagaaggcacacactgtaaaacaaaacaaaaagtcaatgcagtagaggagaagcaagatgatgcacagtgttgggtgcacagaagatgccacctgctagtggttaaacttgattaattgaatcttggtgatcctgtatcagggcctataacatgtacacctgatactctcagcttacgtgtttttgttaaaatattgattggtttttatttcttggattaa

SEQ ID NO: 7756 - DNA, 573 bp, Homo sapiens
  MAP TO CHR18.3; EXPRESSED IN BRAIN, SIGNAL = 2.1; EXPRESSED IN ADULT LIVER, SIGNAL = 1.7; SWISSPROT HIT: O08789, EVALUE 4.30e-02; EST_HUMAN HIT: AW504777.1, EVALUE 8.10e-01; NT HIT: AF387969.1, EVALUE 5.50e-01
acagcacactgacatctggccacttatgttttttctggagcaagatacaagtcccctaattaattatggatcaaaccatcaatgcctaaaagaggtgagtttcattctcataaaaggagctcagtttttttaaaggctttcatgtgaattttcagagcctggcagcatctttctgctgtgcttaatagcgaagggtgaatgcttcattttctaccaaaacacgccttccacgtgtggggatctccaacgggcgtctggagctcttggctggagaggctgcctctgccccagtgccaggtgcgctggagaaaacaggcatgggagcacaggaaggatcacggctgtcgcacaggaggcatggagctgacgggacctccaggggcacaggatggggtcaggataggcgaggacctttggatggcaggagatggcagagcattgagaaagaacagattctgcggagctgcgaggtgagagcgagggtagtgggtttgggctctgctatgcgaagccggctttgggtgtccttgcattgctgggcccttgggggcaggttcttgcacctctgttggc

SEQ ID NO: 7757 - DNA, 511 bp, Homo sapiens
  MAP TO CHR16.3; EXPRESSED IN PLACENTA, SIGNAL = 3.1; EXPRESSED IN HELA, SIGNAL = 2.9; EXPRESSED IN FETAL LIVER, SIGNAL = 4.7; EXPRESSED IN BONE MARROW, SIGNAL = 3.9; EXPRESSED IN BRAIN, SIGNAL = 3.3; EXPRESSED IN ADULT LIVER, SIGNAL = 2.6; SWISSPROT HIT: P41876, EVALUE 2.80e+00; NT HIT: AF287270.1, EVALUE 4.90e-01
atgggacttttccatttcccaccagatgttagttgaacagagtgagccacgccaggctgtaaaacaaatcccagcgttccctgcagccgcgcaggaattatattcgcctgtcagggcccagtgcaagcataacacagacctcctctcccctcgcccagcgtggaaggcgttttgacccccgctgagaaacatgaaggtcgtgacccactggcttccccatctgccctttcctcaccaggggatatctgacaacagccctgttatttatgcagcttaatgcaatccagaggccattggcacattgcagaaagagggagaaaggaggggtgcctggctcctcagaacccggtttcactggctgcgtgttgagcctgacatcagactggtacggggaggacaggatggtggctttctgcagcagggagcctccgaggtggctcttcctggatgcaaacttgagcaaaccaacaaatatttacccaggctctgctgggttcaaggcgtattttca

SEQ ID NO: 7758 - DNA, 583 bp, Homo sapiens
  MAP TO CHR14.3; EXPRESSED IN ADULT LIVER, SIGNAL =   3; EXPRESSED IN HELA, SIGNAL = 3.3; EXPRESSED IN PLACENTA, SIGNAL = 2.7; EXPRESSED IN LUNG, SIGNAL = 4.2; EXPRESSED IN BRAIN, SIGNAL = 2.4; SWISSPROT HIT: P07387, EVALUE 8.50e-01; EST_HUMAN HIT: BG256699.1, EVALUE 5.30e-02; NT HIT: AF252284.1, EVALUE 3.60e-02
catttcacaagttgggggagcactcccacgagatctgggatggggaagccaagaagagccaggcttgtgaataaggtggatgcagggggcagccagggtggggctcagagttggccaggcccagacccgacacacaggagaagctcagttgagctgtaggtacagacagtagagtcgggtcaaagtggagacggagggaccagagcattctagaagacagtgaaggaaggggctctgccaggccggggcagaggcaaaggcagaagagccaggaagcacttgtccccaaagacaatcgaagacctccctggagactaacagaatgagcacttggatctggacagctcactacataaaggaaaaagatgatgattacattcctgccacatccatgtcctcatgccgctcctcattcttattgtttcaacctgcaacccccaccacaagtcacaagccagtcagtcacccctcctcccacctcttcccgccctacaaggccggttctgcacagaggcctcacggtcaggtggcagcaccaagaccctcaagaaggtgagagtggggccaggacgtcactccatat

SEQ ID NO: 7759 - DNA, 597 bp, Homo sapiens
  MAP TO CHR16.3; EXPRESSED IN BRAIN, SIGNAL = 1.1; EXPRESSED IN ADULT LIVER, SIGNAL = 0.92; EXPRESSED IN BONE MARROW, SIGNAL = 0.62; SWISSPROT HIT: Q9XHM1, EVALUE 1.30e-01; EST_HUMAN HIT: BE247362.1, EVALUE 0.00e+00; NT HIT: AB011128.2, EVALUE 0.00e+00
ctgccctttgttttctcgtcttcaaagcagtgacatcacaagggttgagataatattgttaaatgttagtttggggagaataattctttggttcaaatgatctattttcaaataagtttttctcaaggtaccatatttatctctcatctctcttctgggctttttgcaggagctgagaagaagcctggaacttagtgtaaatctacaaaggaaacaaaaggattgttccagcgatgagtatgactctattgaggaagacatactctctgagcctgagccagaggacccggcactggtgggccatcccagacatgaccgccctccttccagtggcgactggactcagaaagatgttcacggggaacaggagacagaaggacgctcttctccaggcccagacaccctcgtggtgctggaatttaacccagcttccaaaagtgagctctgtcttgtatatcatttctttgccattggtgtctctgcatctaatagcaggacttaaacttccagtggtcctttgagttcctctttgggtagagtgtctcacaggccagggaggtatatcagtcaggtctctgttgattgcaagacgcagag

SEQ ID NO: 7760 - DNA, 576 bp, Homo sapiens
  MAP TO CHR18.3; EXPRESSED IN FETAL LIVER, SIGNAL =   4; EXPRESSED IN ADULT LIVER, SIGNAL =   2; EXPRESSED IN HELA, SIGNAL = 3.3; EXPRESSED IN PLACENTA, SIGNAL = 2.5; EXPRESSED IN HEART, SIGNAL = 1.6; EXPRESSED IN LUNG, SIGNAL =   4; NT HIT: gi16163883, EVALUE 7.00e-62; EST_HUMAN HIT: AU120927.1, EVALUE 1.00e-61
gttggtactcccacaggtgcatgccattggtcttaaggctagctgtgcaggagaaggtaaatggtttgatagagttctttcccattgttcaattttaacatggaaaaggcacctcctactctcataattggcaacctctgtttacttaagcacattacattagtttatattgccttattttgaatagtgttgctgaaggaccatttattactggagaaaacattgatacttccagtgaccttatgctggctcagatgctacagatggaatatgacagagaatatgatgcacagcttaggcgtgaagaaaaaaaattcaatggagatagcaaaggtattataaccttattgtgacaacttcattgagtggtagaaaacactcataatgtgctcctaagtaaatcttcaactatttttgcttcttaagtttccatttcctttgaaaattatcgaaaagtgcatccttatgaagacagcgatagctctgaagatgaggttgactggcaggatactcgtgatgatccctacagaccaggtaccaaagtttttactttctgggggcagcagaatagaggta

SEQ ID NO: 7761 - DNA, 512 bp, Homo sapiens
  MAP TO CHR18.3; EXPRESSED IN PLACENTA, SIGNAL = 2.3; EXPRESSED IN FETAL LIVER, SIGNAL = 2.7; EXPRESSED IN ADULT LIVER, SIGNAL =   2; EXPRESSED IN BRAIN, SIGNAL = 2.5; EST_HUMAN HIT: BI459488.1, EVALUE 2.00e-75; NT HIT: AB037749.1, EVALUE 1.00e-75
tccaaggaaggagttgatgggggagggtttaagataataaggtataattttgaaatcttgtttaatggaaatccttaggaatttctgctgaaggaaatgtcagatcaagacacaagctgatgagtccaaaagctgatgttaaacttaagacttccagggtgactgatgcttcaatctccatggagtccttaaaaggcacaggagattcagtagatgaacaggttagtatttttttcgtctttttttttccttgctctccagtctttatgagtgctgaccaaaaagggtagaagaacctttgaaagtatactaggtgatcaacaaacattcttaaaagatacagaggattccaggatcctttgatgatgccaggtttgagcctaaattatctggattactcaagggttttgctccaaaacatctgacttgctgtaagcattagccatgataatgtattatcttgatatgtctcaaaagaactacattctgatctgtgtggcattggtaaatca

SEQ ID NO: 7762 - DNA, 501 bp, Homo sapiens
  MAP TO CHR19.3; EXPRESSED IN BONE MARROW, SIGNAL = 1.5; EXPRESSED IN BRAIN, SIGNAL =   2; EXPRESSED IN ADULT LIVER, SIGNAL = 1.4; EXPRESSED IN PLACENTA, SIGNAL = 1.4; EST_HUMAN HIT: AW946414.1, EVALUE 4.50e-02; SWISSPROT HIT: Q00467, EVALUE 2.70e+00
gacacactcaatgtcacccgcttggctcagaaccaccctcctccacaacttagtatagagaccactccccaccccagcatggaccctggtggccacgactgctgtggaaagggggctgctctaggcagtaggtggactctatgggggacttggagtgaggacaggctgatccagcctggagtcaggtggctgaggctatagaacccctactccatatcatcccatgctccctctcgtttcttttcccaaacctgtgcctccctctgttccaattttccctgcttctcttgccttctcccttccacctcccagtactcttgccacttcatcctggaaagcaggtttggaaatagacgactccacttaccttcatcagagacctttagggacgccttgcagccaggcctgtaatggccctgggcacagtgcacccagggtgagagcttcatctctgcaggcgtcttccccagtggcacgttcccagaggtgtcttgaggagcc

SEQ ID NO: 7763 - DNA, 558 bp, Homo sapiens
  MAP TO CHR16.3; EXPRESSED IN PLACENTA, SIGNAL = 1.1; EXPRESSED IN HELA, SIGNAL =   1; EXPRESSED IN LUNG, SIGNAL =   1; EXPRESSED IN ADULT LIVER, SIGNAL = 0.94; EXPRESSED IN BRAIN, SIGNAL = 1.1; SWISSPROT HIT: P57737, EVALUE 9.00e-30; EST_HUMAN HIT: N39489.1, EVALUE 1.00e-126; NT HIT: gi13648926, EVALUE 1.00e-94
tcacctgcaaaataggagggcggctggggccaccagcttctgagcagccaaagccctgggctccaccaagattccccgagccaccatggaacagggtatatcattccagacattattcctgggcgagttgcatccactggattagcaaaggcctgggcctaggtccatgctgtacatccacctggggtgaggggagtgggcagccgggactcaaagagtgcagggcgggcggggacggcatcctcacacgtggttccatgtccctgccacctgccaggccccagttccaagttccgccatgctcagggcactgtcctgcaccgagacagccacatcaccaacctcaaggggctcaacctcaccacacctggtgagagtgacggcttctgtgccaacaagctgcgtgtggccgtgccgctgctcagcagcgggggacaggtggctgtgcttgaggtgagggccccaccccaccagggctgcccctcagttccctgcctgtggcaaagacgcggagggccttagctacccacacaacacagggagcacaaaccttgtgtc

SEQ ID NO: 7764 - DNA, 557 bp, Homo sapiens
  MAP TO CHR14.3; EXPRESSED IN ADULT LIVER, SIGNAL = 2.4; EXPRESSED IN PLACENTA, SIGNAL = 2.1; EXPRESSED IN HELA, SIGNAL = 2.3; EXPRESSED IN FETAL LIVER, SIGNAL = 2.4; EXPRESSED IN BONE MARROW, SIGNAL = 2.4; EXPRESSED IN BRAIN, SIGNAL = 3.1; SWISSPROT HIT: Q51856, EVALUE 3.10e+00; EST_HUMAN HIT: BG107850.1, EVALUE 7.80e-01; NT HIT: AY048200.1, EVALUE 5.30e-01
ctgttactgaatccccaggctgagacaaaagatgcagggttttgatattttgaagatgagaaaactacctaccttgtaaacttcaccaggagtcattgtctaaccatgttttagttactcaactacaggttttggcattcagtttctctgccatactatacaccactaatagattgtatctatatatttccctgcttccttatcctccggcttgataaagcttccccacatgtactcataagagtccgtgtaacatctctgcattctgtgacaatggcgagatctttctatttagaagcttactaggatgtaccgttatttaagaggaggtcacccacatacctgatctgttctgtctctcaactctgtgtccacaaactcctgaggatccttggttttgaagttcaagaataggagcagaggaatcttcggtgacagacagtggggacagttgtctactgatgccactgtgtgaactggggcagttggctcctggtttacatctagtgactgatgatctggaggtacctggaaagacagagttcacgccagtttga

SEQ ID NO: 7765 - DNA, 519 bp, Homo sapiens
  MAP TO CHR18.3; EXPRESSED IN LUNG, SIGNAL = 1.1; EXPRESSED IN FETAL LIVER, SIGNAL = 1.5; EXPRESSED IN BONE MARROW, SIGNAL = 1.3; EXPRESSED IN BRAIN, SIGNAL = 1.4; EXPRESSED IN ADULT LIVER, SIGNAL = 1.2; EXPRESSED IN PLACENTA, SIGNAL = 1.3; EXPRESSED IN HELA, SIGNAL = 1.3; NT HIT: gi15301173, EVALUE 1.20e-01; SWISSPROT HIT: P39670, EVALUE 9.50e-01; EST_HUMAN HIT: BG397477.1, EVALUE 1.80e-01
agtctcctctgctcctgtggaccagctcagagaaaagcaagtaagtctccctcacctcctgcccatgggccagtccctcacttggagcccacagtggacatcagcagccctgcttgctctttcatgtggagctatggaaactaagatcctcttatacgtcttccgaaagctccagggcatgcggagagtaatgtcccatcttcttcctggtacaatgttccacggctccttttcatcttccccttttggactataccagtattccagtattccagaccttttagaagtctctaaccagaagcagctgccaatttatggaaacacaaatgtccccatactccaggagacacatgctcttctagacatttatgccaaggcagacctgttagctcagcagccttctcatagagcaaaaagatgccagcctcccattttggcaggtgaacttatattctctagggtaattctcctggtgtggttcaaaatattctttcttcttccccctaaagctaggagagg

SEQ ID NO: 7766 - DNA, 510 bp, Homo sapiens
  MAP TO CHR16.3; EXPRESSED IN BRAIN, SIGNAL = 1.6; EXPRESSED IN ADULT LIVER, SIGNAL = 1.5; EXPRESSED IN PLACENTA, SIGNAL = 1.7; EXPRESSED IN HELA, SIGNAL = 1.6; EXPRESSED IN LUNG, SIGNAL = 1.6; EXPRESSED IN BONE MARROW, SIGNAL = 2.1; NT HIT: gi13627223, EVALUE 1.00e-38; EST_HUMAN HIT: AI064839.1, EVALUE 0.00e+00
acaaaagaatcccaactgcccaccagtgacaaaaatttggcattacctgttgcagggaaaaaacaagacagtaggaagacgatcgaccataaattcccaaggaaggtcattctgagacacgtcaatcctggtaaagggaaagaacagaaatggcagatgatcagcccaagaaacaccaacttgaaagaaccttctcagataacttcaagaacctggtgcattttttacaccccacattgggctagtcccttctcgatgaatgtactaccaggtgtgagctgggcgctgatacttccaagacatacaacattctactacgtggacgctttccactgagtggcaatgtgatgtcctgaaagtaaaaatgaacttgcagaaaatgccgcactgacacctgaggagtcattcactcctcacctgacaggatctagccaagtattttaatccctgaatagctctgggaaaagaaaggaaatcattgagcaaaatacatcaagcccctctgaagat

SEQ ID NO: 7767 - DNA, 568 bp, Homo sapiens
  MAP TO CHR19.3; EXPRESSED IN FETAL LIVER, SIGNAL = 1.2; EXPRESSED IN ADULT LIVER, SIGNAL = 1.1; EXPRESSED IN PLACENTA, SIGNAL = 1.8; EXPRESSED IN HELA, SIGNAL = 1.4; NT HIT: AE004960.1, EVALUE 2.00e-03; EST_HUMAN HIT: AA280725.1, EVALUE 0.00e+00; SWISSPROT HIT: P16753, EVALUE 4.20e-02
ttttcattcgggtgttttgctgcaagcagaggaagggaggaggcccagactggggggcaccagaaatcccaggacggctggggcgtgaggcgccaggtttttcagagaaagcctggcagagcagaagtgggggaacagaggcggcaggtgtgcagccctgagctgaaggaagctcaccctcccgctggctgctctcaggagcctgcagtcaccaggcctgagccctgcagccctccctctcctgcccttgacccccaccttcccttgggaatggcagctaccgcctcctccctccagggctgcaccatcagcgcagccatccgaatggggatgcgaattctctgcttggctccagccctggagcgggtctcccagcctggagagcgtgtccgaggaaggcttcttgcagcctgcgggcccagctgcctccatccctccctcaccctctcctctgccccctgaggacattcgctcagacttctgagcctttgtaccgacttccttcccttcctccctcccagcttgcgtccccagccctgcccactgcacactgtccctggatgaggac

SEQ ID NO: 7768 - DNA, 518 bp, Homo sapiens
  MAP TO CHR18.3; EXPRESSED IN HELA, SIGNAL = 1.1; EXPRESSED IN HEART, SIGNAL = 1.6; EXPRESSED IN ADULT LIVER, SIGNAL = 1.2; EXPRESSED IN BRAIN, SIGNAL = 1.7; SWISSPROT HIT: P71715, EVALUE 1.60e+00; NT HIT: gi14729706, EVALUE 0.00e+00; EST_HUMAN HIT: BF222621.1, EVALUE 6.00e-97
gctgcagattgtttgctcagatgggaaaacaattagtctttgtgcagaaaacacagtgattgcttggcttggaaatttacactccaagattccaggacaaacacagcctatgtgggctccacagtcatgactgatgagacacccgtggtttcctcccctccaccacacacggcctatgctgcaccagccactgaggaatagggctatgagccatacagtggtgtgtgcctgccaggaactcaaattgtctatgctgctaatggacaggcgtatgctgtgccctaccagtactcgtatgcaggactttatggacagcagcctgctaaccaagtcatcattcaagagtgatatcgagacaatgacagtgacctggcagtgggcatgttggcaggagtggccatagtcatgcccttagggtctctattcttggtcttctagaggccgtaaggtcttgatgtgcctagctcctgataaccctgtgtgcagtaatatgatttacagggcatttctgtttgtga

SEQ ID NO: 7769 - DNA, 581 bp, Homo sapiens
  MAP TO CHR19.3; EXPRESSED IN PLACENTA, SIGNAL = 1.1; EXPRESSED IN ADULT LIVER, SIGNAL = 0.93; SWISSPROT HIT: O60259, EVALUE 3.00e-21; NT HIT: AF251125.1, EVALUE 0.00e+00; EST_HUMAN HIT: AW965060.1, EVALUE 0.00e+00
actggtctcaggggacaatgcttttacccccattggctacaggggaccaatcatgccaaagaactggtaaaacgctgggacagcaggaaaagggacgttgtggacatctcagatgcaaggctgttctcattctccctgtctagggcgattctggaggccccctggtgtgtgatggtgcactccagggcatcacatcctggggctcagacccctgtgggaggtccgacaaacctggcgtctataccaacatctgccgctacctggactggatcaagaagatcataggcagcaagggctgattctaggataagcactagatctcccttaataaactcacaactctctggttccttgcctgtctctgttttggccctgtggggagggctggatggggatccgggattgttcctgctggcagactaggtggggatgtgcagaaaccaagttctcatggtcactttggccatcaccactgcctaaagtgatccctcgttttctggaagaacttgggtaagagctttatttcaggggagaaaatacatacaaaggtcttcaaacattcagtgggctggtatgtgaaa

SEQ ID NO: 7770 - DNA, 545 bp, Homo sapiens
  MAP TO CHR14.3; EXPRESSED IN PLACENTA, SIGNAL =  10; EXPRESSED IN HELA, SIGNAL =  11; EXPRESSED IN HEART, SIGNAL =  10; EXPRESSED IN FETAL LIVER, SIGNAL =  17; EXPRESSED IN BONE MARROW, SIGNAL =  17; EXPRESSED IN BRAIN, SIGNAL =  12; EXPRESSED IN LUNG, SIGNAL = 8.5; EXPRESSED IN ADULT LIVER, SIGNAL = 8.4; NT HIT: AJ006345.1, EVALUE 5.00e-38; EST_HUMAN HIT: AA171400.1, EVALUE 1.00e-42; SWISSPROT HIT: P39193, EVALUE 1.00e-13
aattagcaggacatggtggcgcatgcctgtaatcccagctactcaggaggctgaggcaagagaatcacttgaacccgggaggtggagtctgcagtgagccaagatcacaccattgcactccagtttgggcaacagagcaaaactgcatctcaaaaaaaaaaaaaaaaaaagcctctaactagatccaaaccaattaattattagagccaatctaatcctggatccagtccagtttctgtcatgacttccaaacccagtttggatcagaaaattgctcagagaactcagagagctcaaaacacaaatccatggagctttggaatccaagagagaagttatgatgatccccagttgctgcaagagagcaatggacacaatgggcccggtgggtacctcgattagtcacgcagcattcctgggggtcactggaagctctacttcagatcccacttctgatgtcatctgttaaaagaaaattcttagccaaattaaatttaacagagtttaattgagtaaagaatgattcacaaatcaagcagcctcct

SEQ ID NO: 7771 - DNA, 504 bp, Homo sapiens
  MAP TO CHR14.3; EXPRESSED IN HELA, SIGNAL = 1.5; EXPRESSED IN FETAL LIVER, SIGNAL = 1.6; EXPRESSED IN BRAIN, SIGNAL = 1.9; EXPRESSED IN ADULT LIVER, SIGNAL = 1.2; EXPRESSED IN PLACENTA, SIGNAL = 1.3; SWISSPROT HIT: P25021, EVALUE 7.00e-01; NT HIT: AB041645.1, EVALUE 8.00e-03; EST_HUMAN HIT: BI712919.1, EVALUE 3.00e-03
agggaggaaaaagatggctgggaagagggttaggaaagccaaagccatcaagctccacagggacctgggcctgggattggggaagagcttaggggagcttatcagagtcagcagcgactctacccaacactgagtggacaactggtgtcaaggcagcagcagcacatgtttttctggaagaagaatggtggaatgatagtcacaggagaatgttgcaagctgcagacaagagctctgtttcattgacagctggacaagaatgctcgcaaagacttagcagaaacacagaagctgtgtccaaaaactggaagtctggtagacagggggagagacaaagacagagagacatagagatgctaaagaacatgtctttagagatgcatctgtgaggaaggtaaccagaactgtcagccgggagaaataaaacaaagaaggggaaacaattcccaccatgtggccaaaggtgtaagatctggaactagacggcttgggttcagatcctct

SEQ ID NO: 7772 - DNA, 565 bp, Homo sapiens
  MAP TO CHR18.3; EXPRESSED IN FETAL LIVER, SIGNAL =  11; EXPRESSED IN ADULT LIVER, SIGNAL = 1.3; EXPRESSED IN BRAIN, SIGNAL = 2.5; EXPRESSED IN HELA, SIGNAL = 3.3; SWISSPROT HIT: P12750, EVALUE 6.00e-57; NT HIT: AB015610.1, EVALUE 4.00e-79; EST_HUMAN HIT: BG760539.1, EVALUE 2.00e-69
ctgagagtctccccgtcatcattttcctaaggaacagacttaggtatgcactgacaggagatgaagcaaagaagatccgcatgcagcagttcattaagatcgatgacaaggtcttgactgatataacctatgccactggttccttagatgtcagcattaacaagaccagagagaatttccatctgatctgtgacaccaggggtcacctattacacccgaggaggccaagttattcaaagtgagaagaaactttgtaagcacaaaagaaatccctgatctggcagctcatgatgctggcaccatctgctgccctggccctcatcaaggtgaatgacatcgttcagactgacttggagactggcaagattactgatttcatcaggttcaacactggtaacctgtgtatggtgactggaggggctaacctgggaaggattggtgcaatcaccaacagagaaaaacatcctggatttttcgatgtggttcatgtaaaagatgccaacagcaacagctttgctacctgactctccaacatttttgttattggcacaagcaacaaatcatg

SEQ ID NO: 7773 - DNA, 508 bp, Homo sapiens
  MAP TO CHR18.3; EXPRESSED IN HEART, SIGNAL =  12; EXPRESSED IN ADULT LIVER, SIGNAL = 1.2; SWISSPROT HIT: P52179, EVALUE 4.00e-27; NT HIT: gi4505312, EVALUE 1.00e-87; EST_HUMAN HIT: T57005.1, EVALUE 9.00e-96
gtaaatttgaatctgcaaaatatctgtttaccttgtccagagagatccactgtcttctgatgtccagttttgccatcaaagagctccatgacatacttccctttgtcattcggggtgggctcgttgatttgtagccagatctgctctccagtgaccccggtcttaactctgtctgagtacctaatggcggacccactgtgaaaatcgaagaaaacttccttagcatttgcttccatccagggctgatctttactttgtctctcattgaagctcttgccataaagttttgtaggctttcaaaaaacgagggatctgcatatgttattcttctgcttcagaaaaattatgggccatgacacacagaaccgggattccagggcccaaggtgtgacagtctgaacatttatttgttaataactcctcatagcagtctgaggcccagtgcaaatcacaatactaatacttctcggtggcattaattatctttgtttttgtttgggtttatttg

SEQ ID NO: 7774 - DNA, 529 bp, Homo sapiens
  MAP TO CHR16.3; EXPRESSED IN BRAIN, SIGNAL = 1.3; EXPRESSED IN ADULT LIVER, SIGNAL = 1.1; EXPRESSED IN PLACENTA, SIGNAL = 1.2; EXPRESSED IN BONE MARROW, SIGNAL = 0.76; SWISSPROT HIT: P26327, EVALUE 1.70e+00; NT HIT: gi13631241, EVALUE 5.00e-01
tttcattagcacatgtgagcggcacctgaggcctccagtggctcctccaaatggcttcagctgcaggtgctctgggctctgaacagggcaagggtagacacagggatggcatggttgaggcagaacctggaagggcatgggtttcaggaagtggggtttattacagtccaaatgacaaaaccttctgtgccgagttgcatgccgacagtgctcagactgcagcaaggggatggatgcagccccttctggtgagtgtccccctcaccatggtgacagggtgtcttatgtctgggatttacccgacaatgacttttccagcttgccccaggcaggtgctctgatctgacccaaggcctggttcatcaggattgagcagcttttcttggactggagctggggatccctaactagactgggcaaaccctggagcttggcactaggaggggaagaaaagcgtctgcctgtcgggtggggtgtctgaaccactgtgggagttgctgaagttatttgagctgaattgccaaaggat

SEQ ID NO: 7775 - DNA, 534 bp, Homo sapiens
  MAP TO CHR16.3; EXPRESSED IN HELA, SIGNAL = 1.6; EXPRESSED IN LUNG, SIGNAL = 1.3; EXPRESSED IN ADULT LIVER, SIGNAL = 2.3; NT HIT: AF289667.1, EVALUE 7.90e+00; EST_HUMAN HIT: AW612024.1, EVALUE 1.90e-01; SWISSPROT HIT: P14349, EVALUE 2.00e-01
tcctctgaccagcctaaagctgccggggtcctcccagctcagggacgctgtcctcacaggaatgcctaatggggcttcctccctgcccatcccaacccctggggccacacattgcttattttggattacaccgggcagcctgtgccccggtcagaggcagggagagcttgggcaggactggggagtgtgactcatttctgtctacccagccaagcaccaaaggcgatgctggcaagcgggagacggtccacagccactcaccagcagccagaagccaggctcaggacagccaggcctcagcttacacagaggccaccaaagaatggcccggcaggatgccaaacctcatttatctgagcggagcaaggccgcctggtcagtgtccactccacacccaggccctcctctctttgctgcggccacagcagacacgccagctgccccatcgctgcacaatgccaagcctccgtccacctcgccctgaacgcccttcccccgtgtccctcctatctccgtgaacgtggcatgagagaa

SEQ ID NO: 7776 - DNA, 570 bp, Homo sapiens
  MAP TO CHR19.3; EXPRESSED IN ADULT LIVER, SIGNAL =   5; EXPRESSED IN HELA, SIGNAL = 5.8; EXPRESSED IN PLACENTA, SIGNAL = 5.5; EXPRESSED IN LUNG, SIGNAL =   6; EXPRESSED IN HEART, SIGNAL = 2.6; EXPRESSED IN BRAIN, SIGNAL = 3.4; SWISSPROT HIT: Q20799, EVALUE 3.00e-10; NT HIT: gi13430867, EVALUE 6.00e-07; EST_HUMAN HIT: BI825710.1, EVALUE 2.00e-69
gaggagatgaagaggaggggtgaggtgggaatgtaggttgatgttggctttgggtcagggttgcatgcgattctagaactggccggggaaggagctgaagaaggaatggggatgggatggggatgggttggggttgggtggcttgggaggtcccggtggggctgcgcttggggcagggatggggacggagacagaggcgagcaggggctcctccagggtcctccctccacccaggtctactcctccaagacgaacttcaccaacctgctgggggggctacagagcatggtccaggagggcggcttccgctccctgtggcggggcaacggcatcaacgtgctcaagattgctcctgagtatgccatcaagttctccgtattcgagcaggtggggaatgaggggcctgcttcccccagctcaagcccaaacccctcccatgcccccaaaactccaggcccttgttcaagcacacactcaccctccagaccccaggcctcttccctgcgcgggttttgtgtcggagggtggctgacttctctctcaccctcctctctcctctcccagtgcaag

SEQ ID NO: 7777 - DNA, 533 bp, Homo sapiens
  MAP TO CHR16.3; EXPRESSED IN ADULT LIVER, SIGNAL = 1.4; EXPRESSED IN PLACENTA, SIGNAL = 1.8; EXPRESSED IN HELA, SIGNAL = 3.1; EXPRESSED IN LUNG, SIGNAL = 2.7; EXPRESSED IN FETAL LIVER, SIGNAL =   2; SWISSPROT HIT: Q13144, EVALUE 5.00e+00; NT HIT: gi14775221, EVALUE 4.00e-91; EST_HUMAN HIT: AL516946.1, EVALUE 6.00e-91
aagaatgtccctaggccagccttacctgaaggagaagacttcttggtgatggaaagcttaagctgcctagaagaacccacttcaaagtttggttttttgcctgtgatctgaacaaacagcaggttgtcactttcatgaccaaggtgttctcgaacagactgtacttcctcaggggttaggggctcccgctgcagctagaattcaagacatcaaaaggattagttcaccctcctctgtaaaatggtttactatgtctacctacacaggagtcaaagactcatttctgtgcattaaggatgtaacagtggatggtaacagataacactttatgcctcacattcagtttctcactgatcagaaccctagagtataacctttgtctgcatgtttacttggagcctaccccttggaaaatgtaaaagtacttaaaaaacattagggatgaggcatatactagttatttgggatgtaatacaattatgaaaatgaaccagatgtggtcctactgtgtaacaggaaagaatgcccacaat

SEQ ID NO: 7778 - DNA, 530 bp, Homo sapiens
  MAP TO CHR18.3; EXPRESSED IN BONE MARROW, SIGNAL = 2.2; EXPRESSED IN FETAL LIVER, SIGNAL = 1.4; EXPRESSED IN ADULT LIVER, SIGNAL =   1; EXPRESSED IN BRAIN, SIGNAL = 1.5; EXPRESSED IN PLACENTA, SIGNAL = 1.2; SWISSPROT HIT: Q10690, EVALUE 1.30e+00; EST_HUMAN HIT: BF514307.1, EVALUE 0.00e+00
gcacaagtgacatttggaaccataataccttaaagtcaatatcattacttctgatatttactgtcagctccgtggcgccggtgaagtgggaaagttcatccatctctcctaacgctgctgcgttgccaagagtgtccctctccccacctttcctttgtgcgattccagttaattgtttggctgtgttaacaccccccacacccagcccatcttccagcagagtcagggggagggtgggcttgctgagaggaggcggcatggtgcggtgcagcccagggaggtgggaggggaaccagccctgggtataaagagccaggttccagcaccgacctgaacacagcctgtgggtcatttgggtctcagtgactccatctgtggaggagacctgggcatggtgacactatatatgtcccaggatacaggcattcattcaagtattcatcaatccttcgggcgagaactcagccttcccctgccccccagcccaactttgtgaggctttggtttcctctgagcacaatgtggaggaa

SEQ ID NO: 7779 - DNA, 572 bp, Homo sapiens
  MAP TO CHR16.3; EXPRESSED IN LUNG, SIGNAL = 3.2; EXPRESSED IN BONE MARROW, SIGNAL = 3.7; EXPRESSED IN ADULT LIVER, SIGNAL = 2.1; EXPRESSED IN HELA, SIGNAL = 3.3; NT HIT: AF208527.1, EVALUE 8.50e+00; SWISSPROT HIT: P07883, EVALUE 1.90e+00; EST_HUMAN HIT: BI760173.1, EVALUE 0.00e+00
ttgtcttcatgtctgccagggggaggtgggaaggaggtgggaggagggcgtgcagaggcagtctgggcttggccagagctcagggtgctgagcgtgtgaccagcagtgagcagaggccggccatggccagcctggggctgctgctcctgctcttactgacagcactgccaccgctgtggtcctcctcactgcctgggctggacactgctgaaagtaaagccaccattgcagacctgatcctgtctgcgctggagagagccaccgtcttcctagaacagaggctgcctgaaatcaacctggatggcatggtgggggtccgagtgctggaaggtgagtgagccccaattcctctggctggacactgggaagctagctctcagctttgtcccctgccctgctctgtacgcctgggacctggcagactcctggccccagtatagcctgcctcggctataaggagagaggaggccaggggctggatcttcctggcggctgtggcccagctaactgttacgcaattttttagaagtaggaaagatttaaaggcaacatgggaagggatttgggaatta

SEQ ID NO: 7780 - DNA, 503 bp, Homo sapiens
  MAP TO CHR18.3; EXPRESSED IN FETAL LIVER, SIGNAL =   1; EXPRESSED IN ADULT LIVER, SIGNAL = 1.6; EXPRESSED IN BRAIN, SIGNAL = 1.4; NT HIT: AJ249089.1, EVALUE 1.90e+00; EST_HUMAN HIT: BG766934.1, EVALUE 7.00e-01
taggactggggcttcatcagtcatgtatccacaatagtcatataggaaattcgtatggacttgaattactagctgaaactcttccccaaagtgtctttgtttaaaggagagaaaaaccactgttcactaagtgtcccagccagattactctgtcacttgctacagcatctcagtgtctggaattccacatggcttcttactgtattttagagacttcctgcttgtagtaaaccacttcctttgcgagtacgtctgctactgtacttgtctgctactgtactcgcagcgttccagaccctcactgtcactttgttaccctacaactatattcaatttaacaaaaagggaccctcagagctgggaagggaccatctggaccagctagtccaggaagctcagggtgtgttcctaacagtgtccaaagcagactccatagagttgggcttggagaaggggtgagtcaaactggggtgctcaatgcctctaccagctttcaccctgct

SEQ ID NO: 7781 - DNA, 536 bp, Homo sapiens
  MAP TO CHR19.3; EXPRESSED IN ADULT LIVER, SIGNAL =   1; EXPRESSED IN PLACENTA, SIGNAL = 1.2; SWISSPROT HIT: P09401, EVALUE 1.30e+00; NT HIT: gi16175862, EVALUE 5.00e-38; EST_HUMAN HIT: H55572.1, EVALUE 1.00e-14
cacagaacctgcatccactcatggtgatcttaattttttctctctctctttgtcctgtgccactggccattacccgcaggagacctgtgccaggatcctcctgtatcgaggtgccgacaaggatgtgaagaacaacaacggacagacccccttccaggtctggggctgcaggggatgtgctggagtttccagggctaaggaaagggtgacagtgacacccagtggataaggaaggggacaatgaggaaagcaaggagacaggccgtggagggggagctggaagaagacagagggcggcattgtcggagtggaaggtttgggtcgggccagggacctcgccacgttccctgccctctctctgctgcctgggcccccctggccgacctgcctctaccccctccctccaggtggcagtgattgctgggaattttgagctgggggagctgatccgaaaccaccgagaacaggatgtgggtgagtgacagggagctcggactgcacagagaacctggggcggttgaggtttcatggtggga

SEQ ID NO: 7782 - DNA, 573 bp, Homo sapiens
  MAP TO CHR19.3; EXPRESSED IN ADULT LIVER, SIGNAL = 1.4; EXPRESSED IN PLACENTA, SIGNAL = 1.6; EXPRESSED IN HEART, SIGNAL =   2; EXPRESSED IN BONE MARROW, SIGNAL = 2.3; EST_HUMAN HIT: AW137466.1, EVALUE 0.00e+00; SWISSPROT HIT: P48378, EVALUE 1.00e-15; NT HIT: gi14769193, EVALUE 0.00e+00
acaggctgccatgtatcctcggtgccctgcctggcgtgccggagcagttctcggaacgtgcacttccttctctccctctcgtgccctcctgatgatggacactgaccctacccctccctccgcagatgacatgggcgatgagcagcgtggcagcgaggcgggcccagacgcccgcagcctgggtgagcccctggtaaagcgggagcgcagtgaccccaaccactccctgcagggcatctagcagccccggccggcgcctcctcgaggttccaaaagatgccgcctggtcactctgggaacctggatttcaccggctccaccaaattagtgcctcttagatgatgtgatgtttactttgactcaagcgggggctcccggggtcagtgttcaagaaggaaagcagttgttgaagctacagaagcccaggccagggctcccactggctgtagctgtgctctgggtccccaggtccctgcgcagccaccagggccccaccagaccatgggttccttattctggacaaaccctcctctgctggaaccctggactttggccccagtccctttaagagct

SEQ ID NO: 7783 - DNA, 558 bp, Homo sapiens
  MAP TO CHR14.3; EXPRESSED IN LUNG, SIGNAL = 1.4; EXPRESSED IN BONE MARROW, SIGNAL = 0.99; EXPRESSED IN ADULT LIVER, SIGNAL = 1.2; EST_HUMAN HIT: AA420866.1, EVALUE 2.00e-69; SWISSPROT HIT: Q12815, EVALUE 3.10e+00; NT HIT: gi14784510, EVALUE 1.00e-69
aaagcccaactttgcatttgccatcagaaaatgagaactgtggtgggtgggaggacaaggaggccaggagccaagtgccttttcttgccttgcccatatttgctcttaaaccaacatcgtaaacataatggctaccagtgtgaataccaaacaatggaaattgcacagaacttgatattatctcagccaagaagatagtttggatctgcaagtgatgctgcactcaaaaatgtggatatgccctctgaaagcgttccagccttcttttcccctgtgtgtgtgtcgtgtgcaaactcacactcttccttaatgctacggctctgtgtttgtccctcagacaagttggatggcttgaggactggtactaaaaggaaacgtgactgggaggccattgccagcagaatggaggattatcttcagctccccgatgattatgatactcgtgcttctgagcctgggaagaagagggtaagagactttgtcaataactgccaacaaatgaagggcccatttaggcatctggttttaggaagttacaggcagatgatcacatggatg

SEQ ID NO: 7784 - DNA, 572 bp, Homo sapiens
  MAP TO CHR18.3; EXPRESSED IN BRAIN, SIGNAL =   3; EXPRESSED IN LUNG, SIGNAL = 3.5; EXPRESSED IN ADULT LIVER, SIGNAL = 3.9; EXPRESSED IN PLACENTA, SIGNAL = 3.8; EXPRESSED IN HELA, SIGNAL = 3.9; EST_HUMAN HIT: AA723726.1, EVALUE 2.00e-01; SWISSPROT HIT: Q9SMV7, EVALUE 5.50e+00
  unsure 44
  unsure 74
  unsure 82
  unsure 259
  unsure 445
  unsure 492
ctgagaggagatgagctggcctagggaccctgaatcaggagaangctgagccttgggattcagtacaggtgagngggtctgngggactgtccccacctgcccccttgctgcctccctctctggccttcggacccttgccctgtgagtttgagtcaggcctttctgcaggagcctgggacaccacagtggctctatgtagaagtcaccttttgctggggtggtggcgcgcagccatctctccaggtaactgattatacantttgatctgctacattatccttaccaggcgcacggcacacgatagacggccctggagttctgtggggacttttcgcagccgaactctgttgtctaatggggtttccgctggcgtctggcacactctcctgcatttcacccatcgcaggataatttataacataatggggcttttttttcctttacnatcatgcgggagcataaattatggccagtttgtcctcggctttcaanggagacagacaaagcagggctattccagcatgggcggggggaggtttctgcaggggaggaggaggacagggtggtctaca

SEQ ID NO: 7785 - DNA, 515 bp, Homo sapiens
  MAP TO CHR19.3; EXPRESSED IN BONE MARROW, SIGNAL = 2.9; EXPRESSED IN FETAL LIVER, SIGNAL = 2.3; EXPRESSED IN BRAIN, SIGNAL = 2.1; EXPRESSED IN ADULT LIVER, SIGNAL = 3.1; EXPRESSED IN PLACENTA, SIGNAL = 2.8; EXPRESSED IN HELA, SIGNAL = 5.9; SWISSPROT HIT: Q13936, EVALUE 1.20e+00; NT HIT: gi14769535, EVALUE 0.00e+00; EST_HUMAN HIT: BE265037.1, EVALUE 0.00e+00
cagctggacaaggagagcagatctgggcaagggggctaccccatttgagggtcctgcttgggaagacgaggggcctggtggggagtacagagaagagtttggtaaattcaaggggtaaagtcttctcaccctcagggagacccaggcactggattcccagctaaaattcctaaaagatctctcctctccttcccgtggtccctggactccacctcccatgctcaccagcttcctcctgctctcccgaagcctggccatcactggtctcatcctctttggcagcctggctcgagccggcctcctggcttgagctggcccctgaagcctgttctagtttctgcttcttagcagcctggccctccgtaatcttctccaggagctcctgacgacgggtctcccgggcctcagctgccaaggcgctctgctcctggaagctctcctcttgctggcgcttgaaggatgtcagggcctgagaagcacacttcgctggaacctccaagcttatggtcccttca

SEQ ID NO: 7786 - DNA, 529 bp, Homo sapiens
  MAP TO CHR19.3; EXPRESSED IN LUNG, SIGNAL = 1.3; EXPRESSED IN BONE MARROW, SIGNAL = 1.1; EXPRESSED IN ADULT LIVER, SIGNAL = 1.3; EXPRESSED IN BRAIN, SIGNAL = 1.2; EXPRESSED IN HELA, SIGNAL = 0.99; SWISSPROT HIT: P53899, EVALUE 2.20e+00; NT HIT: X75639.1, EVALUE 5.00e-01; EST_HUMAN HIT: BF700018.1, EVALUE 2.90e+00
agggagcatgttacaggaccaaaaacaaaaacaaaaaacccaaccacttggttgacagattctgggtcaaatagtctgcatttgactcctattttaatattaaaggtcttcatggtgggtctctagaaatctgcagtggtgatcttcccttgacctgtgaaagaaaagctgggctaggaattgaagcaggttgttgaagcctccctacttctggccgcctgtccattccccaaacttgagttggaggtagcggtgttcacacgctgcttcctcactggtatagccagaatcagcctggtgatagggaatggctacgaacagcaacccgtgtgtctggtggtcgggggcagtggggcggtcctgcctggaatggggcttgtgtgtcttgtctgtttgcgatagccgtgctgatttgcagttgatcaacctttggcctgagtagaaatgcagcgtgagtaactgacgctctgtgttttgggtgcagatgtgactaaagctcatttctacatgttagtgcagtggctgggtc

SEQ ID NO: 7787 - DNA, 505 bp, Homo sapiens
  MAP TO CHR16.3; EXPRESSED IN ADULT LIVER, SIGNAL = 1.9; EXPRESSED IN HELA, SIGNAL = 3.6; NT HIT: gi16164562, EVALUE 4.00e-88; EST_HUMAN HIT: BG260802.1, EVALUE 5.00e-88; SWISSPROT HIT: P56945, EVALUE 8.00e-25
aaacagtgcagggttaacggcgccagggccacttgggggaataggaaaggtgggaaccccgcagcaccgtccccaggcctggccggggctgagaagatgcagctctcggcccagggccaagcagaggcacagacttgccgccctgccctcccaccgctgcgcaccccacacctacctcctggccatactggctgggaagcagcccccgaaccgggggcacatcatagatgtcctgtggccccggggccagcaggtgtcgcgggatgtcgtactcgtcctgctccggctgggcggcctcgtatacatagccctgccccacgcgggtgggcaccaccacctgggggcagagagccgacttcactgctgccctcaaaccagcccttagggaggctccactcacacctgggagccacgtccttttaggaggtgggcagggcacaccaggtggaagggacggggctccccaaggatgccagttctcaccccctctgcaccatctgacctt

SEQ ID NO: 7788 - DNA, 517 bp, Homo sapiens
  MAP TO CHR18.3; EXPRESSED IN PLACENTA, SIGNAL = 2.8; EXPRESSED IN HEART, SIGNAL = 3.7; EXPRESSED IN BONE MARROW, SIGNAL = 5.3; EXPRESSED IN FETAL LIVER, SIGNAL = 3.2; EXPRESSED IN LUNG, SIGNAL = 8.2; EXPRESSED IN ADULT LIVER, SIGNAL = 2.2; EXPRESSED IN BRAIN, SIGNAL = 2.3; SWISSPROT HIT: P13285, EVALUE 2.80e+00; EST_HUMAN HIT: BG910551.1, EVALUE 7.20e-01; NT HIT: gi15594346, EVALUE 7.70e+00
cctgcatattactgtgggcgatacaggttagctatcctaaatacgtttttacctttttaactcttaattatattaagccatttgcaagaatgggaaaaagcaggaaattcataggtggtgttgaaattgctgattctacacaaaggtaccagaatgtctacatttcctctgtaaatgtcaaaggaaactttggaaacccacctcagagttggctggtgattattcggacaggttatcatcctgtctgcaaccttctagttctcttagttcataccaagcagcatgatattccatgtcctgcacaaaggagagcaccaaaacagccttcacctgctgcgtatgccccactctgaataaaaaattaagaaggccaaaggacggaatgtgttaaatattagcaaaagcaggtattgcagaatgtctatacatttctgggcaggtggagattattgaaagatttttagaaataatcttcgttcaccacattccagtgccaggccctggacttctgtctcta

SEQ ID NO: 7789 - DNA, 504 bp, Homo sapiens
  MAP TO CHR18.3; EXPRESSED IN PLACENTA, SIGNAL = 1.8; EXPRESSED IN BONE MARROW, SIGNAL = 1.8; EXPRESSED IN FETAL LIVER, SIGNAL = 2.7; EXPRESSED IN ADULT LIVER, SIGNAL = 2.3; EXPRESSED IN BRAIN, SIGNAL = 1.9; SWISSPROT HIT: P54155, EVALUE 3.50e+00; EST_HUMAN HIT: AV731894.1, EVALUE 1.80e-01; NT HIT: AY058385.1, EVALUE 4.80e-01
ctggtttaggcagctcttggcttagacaccctgccttccaaacacaatctgttttcaagattcctggggaatttcaggtccaagagaaggtttggtgttaacttccccaaactcagtctccttcctctctttccactccactaaggcataggggagacccacttgcccagactcagttttcagcttgtgggacaaagctgtgttcttggctctagaagaagcttctgttctctccaagctctgtgttgtttcctttccttcataactttgctccgccaatgggccaagcatggctccattctgctctacccccagaggcttttggaaatggaaaaatacaaaagatgctgagaggtcacatttaaagaagacagccactcttaataggatatacaatcagaagttccagaatgcaggcagaagctattcctttttaggccccacgatagcaccaagttctttctagtgtggatcctgcaattggcaaagtgccagaaagtgcaa

SEQ ID NO: 7790 - DNA, 596 bp, Homo sapiens
  MAP TO CHR18.3; EXPRESSED IN PLACENTA, SIGNAL = 1.1; EXPRESSED IN FETAL LIVER, SIGNAL = 1.7; EXPRESSED IN BONE MARROW, SIGNAL = 0.8; EXPRESSED IN ADULT LIVER, SIGNAL = 0.94; SWISSPROT HIT: P73079, EVALUE 3.40e+00; EST_HUMAN HIT: AV708973.1, EVALUE 3.00e-19
agagcattgcagtttcggagacagacacaacctatctacaatacgttggtggttattcctccattttattctaaaattataacttttatacagtaagaatcatatctggtatttgctagtaactaaagtctgtaagtttggttagaatataatgattggcattttaatttggctcagacaccaaattttttcactagaaagttcaaattggccattttaaaccttccttgaaagtttgctttcagtattaaccagcctaaaattcctaaggaagattttctggatggcttgatatctatgttttaattattatttaaacacatacaaaacaaaaatctttggattaatgaggttattataaatcgagcaactctatttagcctctttttctgttcatcagcagaatcattttcccagtgtcagcatctggggtcactgagacgggccagccagtcccacttccacatgcgggttcctggggcttctcgcactggttgtgttggaggaagttaaacattttctcggacgtggtgttgctccctccctgggagggagaccagtcacgtcgcctgggaaccctctgggagaagaggatc

SEQ ID NO: 7791 - DNA, 585 bp, Homo sapiens
  MAP TO CHR18.3; EXPRESSED IN BRAIN, SIGNAL =   1; EXPRESSED IN ADULT LIVER, SIGNAL = 1.3; EXPRESSED IN HELA, SIGNAL = 0.88; SWISSPROT HIT: Q9ZCN2, EVALUE 7.40e+00; EST_HUMAN HIT: BG115542.1, EVALUE 8.20e-01
gtagttttgctttgcaggggtgtttacattgcaaatccacttacagagacaaagattagctcaattgagttcagcatcacatggctgttcctttctttcaccttcctagccctgtagttttcagtaaaagaataatcccatgaggcaatttgggaattaatattttaatatctattatgagaaagaaaataacagaaacccagcttccaacattaagaataggctcaggacctaccttaagtggaacacttctagttccttttataccatggtaactgaacttctgggcatcatagtttgtttctgtcatcagaaccagcagtcctaagggacatttggctaataaagtttattttcctgcattttctctttttgtaggttcattaccattgcctgtgtatggagtcaaagaggaatgatgaagagtgaacttgaggagccatcatgaatagaaatactttttccctatacatatccctaacagagttggaatgaaaaattggttcaaggaagtgtttcacagtgattgctcagtgggtcatctagttcagacattcatgaacagcgttctgtcatcacccacag

SEQ ID NO: 7792 - DNA, 508 bp, Homo sapiens
  MAP TO CHR18.3; EXPRESSED IN FETAL LIVER, SIGNAL = 1.6; EXPRESSED IN BRAIN, SIGNAL = 1.3; EXPRESSED IN ADULT LIVER, SIGNAL = 1.6; EXPRESSED IN PLACENTA, SIGNAL =   1; EST_HUMAN HIT: AI379264.1, EVALUE 2.80e+00; NT HIT: AE001789.1, EVALUE 1.20e-01; SWISSPROT HIT: O67531, EVALUE 9.30e-01
catggagctgctcagcatagttccactaaaatccaatgtactgaggagatgtggtgcattgcacataaagcatcactacagacgtcaagaggagttgggtcatatttgacatagatcaatgtccaaaatgacatatctatttggagtagataagattggtgagtctaggaagaaaggaaaagtcacaaggatagaaccacaagacccagcggaaatgacaaaggctggtcagagaggcagggaaaccaagaagagtgtcacatcagccaaaggagacatgactatcaagaaagagagaaggtcaacagctccaaatgatggggagctcaaatggactgaggtcattgctggctttggtggtaagtgtggaggcaaaacttcattgcttttggagataagtagaaacaatttgtgcaaaggggggtagagaagtataaaccactctcgagaactacggtttcaaaggaaagaagagataggtggatagtcaggaatgtggaggtggaag

SEQ ID NO: 7793 - DNA, 522 bp, Homo sapiens
  MAP TO CHR16.3; EXPRESSED IN PLACENTA, SIGNAL = 2.6; EXPRESSED IN FETAL LIVER, SIGNAL = 1.8; EXPRESSED IN LUNG, SIGNAL = 4.2; EXPRESSED IN BONE MARROW, SIGNAL = 4.5; EXPRESSED IN ADULT LIVER, SIGNAL = 2.3; NT HIT: U15422.1, EVALUE 0.00e+00; SWISSPROT HIT: P04554, EVALUE 2.00e-10; EST_HUMAN HIT: AL036224.1, EVALUE 0.00e+00
aagttctggttgagggggtcacctagggactctgggtggggacgggggttagggggctggagcttttgtcaggtggggtgggtccccgcctccctcctgtgcctggggtggtcagggacatggagggcaaggcgggggcgcaggcagacctctgcgatgcctcctccggtgcctgcaggagcgtcttttgcgccttctgcaggagcgatgctgccgcctgtggatccggtgcagcctccttcgagagcagtgtctgcgcctatagtgagactggccatgggtcctctcgtagacctcgacgtgctccgggctcagcccttgctcctcttggccgtggtgtccttgctcttgcccatgcaactgctgcctgtacacctcgtgcgagcgttcgctcaggctcctcacgcggtatcggaccatggtgttgggagatctggtggctcctgggctgaggctgcagtgggccctggagtaggggaggagggcggaggcctgcccacctgcccttggtgttactgttgg

SEQ ID NO: 7794 - DNA, 566 bp, Homo sapiens
  MAP TO CHR14.3; EXPRESSED IN FETAL LIVER, SIGNAL =   3; EXPRESSED IN ADULT LIVER, SIGNAL = 2.2; EXPRESSED IN BRAIN, SIGNAL = 2.6; EXPRESSED IN HELA, SIGNAL = 2.7; EXPRESSED IN PLACENTA, SIGNAL = 2.8; SWISSPROT HIT: Q00184, EVALUE 4.10e+00
ttaccagaactgtggcagggtgactgattgtggtattctctttgtattctctatgctgaatcatttgccagaacttccaatatatgattgcaaaactagacttttttaatgttatcttgtctcagatttctaagcctgaaagattgaggctgttgctgaacgatgcttaattaaccaaggcattgagctccaaccatgaggctttgaggagtttgatatctagcccctcttggcatcatatgctaagactggctgtgaggctatgagaatcttaagtacctgcacgctgttcataagtggtactctaaaactcctgaggaaataagggagactggaattagtgggattagcttgtgggattagcttgtgtcctttggcttagcctctttctctccagaaatttcacttttggctcagtcctcacaggggaagaaagtcttgtccaaagatggcgtctaccctgtgctccactgtgtatcccagaggagagcatctttactgtggaatggacttccagctgactcatgttggggaaaggtgagctggggcataggcacctcatagct

SEQ ID NO: 7795 - DNA, 599 bp, Homo sapiens
  MAP TO CHR18.3; EXPRESSED IN HEART, SIGNAL = 2.6; EXPRESSED IN BRAIN, SIGNAL =   4; EXPRESSED IN ADULT LIVER, SIGNAL = 1.6; EXPRESSED IN PLACENTA, SIGNAL = 1.5; EXPRESSED IN HELA, SIGNAL = 1.6; SWISSPROT HIT: Q9XGW1, EVALUE 2.00e-03; NT HIT: gi14768990, EVALUE 8.90e+00; EST_HUMAN HIT: BI602716.1, EVALUE 0.00e+00
gagtgcgatgtcactgatggccttggcctggccacccccaggggcacctggggcccggtccagggggaagagtgccctgtggtgggggctgcccgcggccaggaactccaccgcgtagaagtggccgcaggaacccagcacgggcagcacgtgtgggctcaggtcctgcagcaggctgaagtagacgtactcctcctgctgcagcagggcccacaggctggccagctgtccccgccagcgtgggccccgcctgcccggccaccacggccccaggctgctgttggacaactccaggcccagagcgctcttgacctccccagccaccatcaggaggagttcggcctcgggcatgtcctggccaccctcccctgcctcctcttccaacaggctgaggggcgggaagctggagaaggcctcctccttggacttgaggaccacgggccggccgcgccagtcggcctgcagcaccttcttgcctctgttgtagtgcaggcagcgttggaacagcagctctcccgccacacacaggtcctcgcagaggtccccggccagcgtgccgccctggtagtcctggcactggaaggaagggaacagtcggt

SEQ ID NO: 7796 - DNA, 592 bp, Homo sapiens
  MAP TO CHR16.3; EXPRESSED IN HELA, SIGNAL = 2.9; EXPRESSED IN LUNG, SIGNAL = 3.2; EXPRESSED IN ADULT LIVER, SIGNAL = 1.6; EST_HUMAN HIT: AW167539.1, EVALUE 0.00e+00; SWISSPROT HIT: P51511, EVALUE 2.00e-59; NT HIT: gi14775137, EVALUE 0.00e+00
tctttcggcctacaacaaccccatctgagaaatgggtacaatcatcctttctcgcctccccttggagatggtgggacaacagactgaaattgagtgtagtgatctggagacaaacacaggggaactctctcctcccagccccgcggctgctgaacccactcagcagggtgttgttgcccagctccggggccacctgccctgcccctcaccctggccagctgtcctcaccatgcaggtcagtgctggagaaggtccagggctcatctgcgtcaaaatgggtgtccccgcctaggccggggccagggaaataggcgtgggccagaaagccaccggtgccatcaaacggcgagctgtcgccgtggaagccagaggcaaagagtaccatgatgtcggcctccttctgtcgccgcagccggatgtcctcatagggcacctcctggaagaccaggggcgtggcctgctcccacacgcggaaggccctgcgcaccgcctccatcgagtggtaccagcccaacttctccgtgtagttctggatgctgggggtgggtgggagatgagtgagcggatgcagggccaagggcctactatcctc

SEQ ID NO: 7797 - DNA, 572 bp, Homo sapiens
  MAP TO CHR16.3; EXPRESSED IN PLACENTA, SIGNAL = 1.3; EXPRESSED IN BONE MARROW, SIGNAL = 1.9; EXPRESSED IN BRAIN, SIGNAL = 1.1; EXPRESSED IN ADULT LIVER, SIGNAL = 0.96; NT HIT: AY027807.1, EVALUE 2.00e-03; EST_HUMAN HIT: AI761203.1, EVALUE 3.00e-31
acagcaggaactgcacattgagttaataaatagttgaatgaatgaatgacctaatgtaggtgaagacttcgcgagaagcacaaaaggggaggggcgggccgtgtagccaagaggacggccaaacggggaggcctcctctttgtcctcgcagatgctggagcagcgactggcccgggagatccgtgccctggagagaagcaaggagcagctgctctcggagagtgagcctcccgcgccaggtgggcggggggagggggatgtgcccgggcctcggccctgcccctgacgcccgcccaccgacagggaggctggtgcgcgccaagctgcgggaggtggagcggcggctgcactcgccgcctgaggtcgagggcgccatggcggtgaatgacgggtgagaggggaagggaggagtgggcgaggagggcaggggcagggcggaggggaacccgcccaggtcccccgctccgcccccgactgccgcttccccggcctgtgcctccctcggcgtcgtcgggtctccgcgtctcggtggcttcctcctcgtcccctggactctcgctctcttcctcctg

SEQ ID NO: 7798 - DNA, 555 bp, Homo sapiens
  MAP TO CHR16.3; EXPRESSED IN FETAL LIVER, SIGNAL =  30; EXPRESSED IN HEART, SIGNAL =  25; EXPRESSED IN ADULT LIVER, SIGNAL =  29; EXPRESSED IN BRAIN, SIGNAL =  27; EXPRESSED IN HELA, SIGNAL =  32; NT HIT: X55448.1, EVALUE 3.40e-02; EST_HUMAN HIT: BG114486.1, EVALUE 2.00e-04; SWISSPROT HIT: P36158, EVALUE 5.30e+00
cctgggtgatagagcgagactctgtcttaaaacaaacaaacaaacaaagtaaatttaaaaaattgttataacactttttttgataagaaaaagaatcaagcaatatgttactgatcacatgtcattgatacctccatgtaacttcttcaatcagcagtcactaagtgttcgttgcgtgtcaggcactattctaggctttggaaataaagcaataaacaaaactaagtcatcaccctcatggaacttacattctcatgggtggagagaaacaataaataaacaaataggtcaagcgatacaaaatgctacagaaaaaaatgaattaaaagtagaaagaaggtggtgggagatggcagctattttacgagagtggttaaggatggcctttctcatcagggaagactggagcaaagatctggaggacgtgggaatggagaaagctgcattccatgaagaggaagcagcaagagccaaaggctcaaggcaggagtgtgtgtaaaatacaagataataatatgcagatacttaaaaaagaatgaggcagatctgatatgg

SEQ ID NO: 7799 - DNA, 536 bp, Homo sapiens
  MAP TO CHR19.3; EXPRESSED IN FETAL LIVER, SIGNAL = 1.8; EXPRESSED IN ADULT LIVER, SIGNAL = 2.3; EXPRESSED IN HELA, SIGNAL = 6.8; NT HIT: gi15303823, EVALUE 1.00e-105; EST_HUMAN HIT: AW850722.1, EVALUE 1.00e-103; SWISSPROT HIT: P13611, EVALUE 8.80e-02
ctctgttagcacccctgagccacccttgtccctgtccttacagaagctccaagacatggatgaacgcagggccacccgcctgggtgccgggtatgggctcctgtcggaggccgagctggaggtggtgcccataatagccaagtgcttggagggcatgaaggtggctgcaaatgctgtggatcccaagaacgtgggtgcctggtctgggtccactgggctacgggaagggcagagggaggtccccataggctaggcactcgactgctcatccactgtccccctcccccaggactcccacgtccttatagagctgcacaagtcaggttttgcccgcccgggcgacgtggaattcgaggacttcagccagcccatgaaccgtgcaccctccgacagcagtctgggcaccccctcggatggacggcctgaactccgaggcccgggtcgcagccgcaccaagcgctggccttttggcaagaagaacaaggtgggggccgggacccttgggatggtgggggagaaggacagtgaagtgggga

SEQ ID NO: 7800 - DNA, 566 bp, Homo sapiens
  MAP TO CHR14.3; EXPRESSED IN PLACENTA, SIGNAL =   1; EXPRESSED IN BONE MARROW, SIGNAL = 1.3; EXPRESSED IN ADULT LIVER, SIGNAL =   1; NT HIT: L11910.1, EVALUE 8.00e-31; EST_HUMAN HIT: AA886129.1, EVALUE 1.00e-30
tgcatcaggttgttgtgagctttaaatgagataatcctagcaaagtgcctaactcatagaaagagctcattagatgctggccatgatggtagtgatgataatgacagtgaccagagaggcaaagtaagtatcccaaattcacacagctggctagtggatgagcaggaaatagaatctgagtataatgtcgcttctgctatagcatccctgtgggttaaagtttcagctaaggactgatagtgaaaatgattctacctgaatcttttttttttaaactcggagccagcagacaacttcttttttgttatttttatttttaatttttatggatatataatagttgtacatatttatggaatatatgtgatgttttgagaaaagcatatgatgtataatgattaaatcagggtaattgggatatccatcatctcaagcatttatcatttctttgtgttaggaacattccagttctaatgggaatgttagaaatattccatttattctaggtattttgaaatacacagtaaattactgttatctatagtcaccctattgtgctaccagtt

SEQ ID NO: 7801 - DNA, 585 bp, Homo sapiens
  MAP TO CHR19.3; EXPRESSED IN PLACENTA, SIGNAL = 1.7; EXPRESSED IN HEART, SIGNAL = 3.4; EXPRESSED IN HELA, SIGNAL = 5.8; EXPRESSED IN FETAL LIVER, SIGNAL =   5; EXPRESSED IN BONE MARROW, SIGNAL = 2.4; EXPRESSED IN ADULT LIVER, SIGNAL = 2.1; NT HIT: gi14759134, EVALUE 1.00e-115; EST_HUMAN HIT: AW901235.1, EVALUE 1.00e-115; SWISSPROT HIT: Q06841, EVALUE 2.20e-01
atgattctgtcttcagggcgcaaaccagaagaagagggtgtggaagataacgggctggaggaaaactctggggatggacaggtatgtgcagccttgcgagtgagtagcgtggtggatggaccagtggcggtcacatgatggttcggtctggttgtgtcacaggaggatgttgagaccagtctggagaacttgcaggacatcgacatcatggatatcagtgtgttggatgaagcagaaattgataatggaagcgttgcagattgtgtcgaagacgatgatgctgataacctccaggagtccctgtcggatagtagagagctagtcgagggggaaatgaaagagcttccggagcagcttcaggaacatgctgtaggtaaccggcaatgtctctagaatgtgccctgaatgtatcagttccacaattaaaataggtgatcagtttcatattgggaagtaagttgttctgtaatgccagttcagtagaataagggtcagttggttcagatgattctgaaccaatttgttttgttgaaaggtgatgtcttataacatttcatatgtacttgctatccatttgcggcatac

SEQ ID NO: 7802 - DNA, 556 bp, Homo sapiens
  MAP TO CHR18.3; EXPRESSED IN BONE MARROW, SIGNAL = 1.7; EXPRESSED IN ADULT LIVER, SIGNAL = 2.1; EXPRESSED IN PLACENTA, SIGNAL = 1.8; EXPRESSED IN HELA, SIGNAL =   2; EXPRESSED IN HEART, SIGNAL = 1.6; NT HIT: AF160023.1, EVALUE 3.40e-02; SWISSPROT HIT: P46645, EVALUE 1.40e+00
ctaagctgttcccatcccagatgctggggactctggggattctctgactctgcaatgtccccaactcctgctctccagtcagacctgcaccattgcatctgcagctagctctgcagtcatgccccaagtaaatgctggttaagtaatctgattataatcttagaatttataagtctgtgatttatatcaaatattcatggtgtatatgacagcttcctttgtcatatgatatagaaatatctgttacattatatagaaattagtgcactgaaaaaagtttactttttaaaaaatcttgactatttttgtccccactctttaattctgctgtcattaggagattctcatatttaaaagtgctcaaagcaaggtattctgttgtagcctgtcttgaaggagtaccacctgtcttcagcctgctaatgaaaattggaattctctgaggaaagctctgtcatctagaatcttctgaccagtggatgagtcagctcagggcctcttctctgcatcttccttggactcggactgtgggaagccctgtggaaagcaggatgat

SEQ ID NO: 7803 - DNA, 552 bp, Homo sapiens
  MAP TO CHR14.3; EXPRESSED IN ADULT LIVER, SIGNAL = 1.5; EXPRESSED IN PLACENTA, SIGNAL =   2; SWISSPROT HIT: P75077, EVALUE 3.00e+00; EST_HUMAN HIT: BE172224.1, EVALUE 2.00e-53
tggatgaatcagaatggcacttaagctttgtttctgtccttttgtcactacacatatatttattgttactataaatacttttttgtatattttgttctcatggttaatatattcctttgattttttttgtagtctcttcatcatgaactgtctttatatgttcaacaactaaaaatagatattgaaaaaggaaagcttagtgacaatattttaaaacttgaaaagcaaataaataaagaaaagaaacttatccgtagaggaaggaccaagggtctcatcaaagaacatgaggtacaataaagtgtttccacttaaattttgtcatcattttggggtttatcttaaatggttgtgtgtatctttagcctaggatgaaacctgttctgaaaattaccctagccctcctctccccggggatgatcacttctttgcttcacactctcagcagagcctgtacttcttactttttagaagtgagaaaattcggcactgagttaatattttatgatttcccttgatgtgtctcagtggcccctgtcctcagactctggt

SEQ ID NO: 7804 - DNA, 569 bp, Homo sapiens
  MAP TO CHR19.3; EXPRESSED IN HELA, SIGNAL = 6.1; EXPRESSED IN LUNG, SIGNAL = 3.3; EXPRESSED IN BRAIN, SIGNAL = 7.2; EXPRESSED IN ADULT LIVER, SIGNAL = 4.4; EST_HUMAN HIT: AW162067.1, EVALUE 0.00e+00; SWISSPROT HIT: P36954, EVALUE 8.00e-20; NT HIT: Z23102.1, EVALUE 0.00e+00
tgctgtaccccaaggaagacaaggagaaccgcattctgctctacgcggtgagcgccggggtcttccccggcaggtccacctgttcccagcgtggccccgccctgccccctgcctctgtgatcggactccctgttcgccctccgctgcacctcaagtgatcctgactctcatgtcctgcccatccccaaagagagtcctgtcgtcatatcctccgggatcaccctgccctctcctcccaatcttgtctggaatccttccgtgaccccctttcccccacactcgccctctcgtagtgccggaactgtgattaccagcaggaggccgacaacagctgcatctatgtcaacaagatcacgcacgaagtggagtgagtggcgggccctgagctgggggcgggggtgttggctctggaggctgggtctgagcgtaattttgcacccccgcgtccctgcagcgaactgacccagattatcgccgacgtgtcccaggaccccacgttgccgcggaccgaggaccacccgtgccaaaagtgagcgttcagctggtactggggaggtaaagtgaggctc

SEQ ID NO: 7805 - DNA, 563 bp, Homo sapiens
  MAP TO CHR14.3; EXPRESSED IN ADULT LIVER, SIGNAL = 3.4; EXPRESSED IN BRAIN, SIGNAL = 4.3; EXPRESSED IN HELA, SIGNAL = 3.5; EXPRESSED IN PLACENTA, SIGNAL = 3.5; EXPRESSED IN BONE MARROW, SIGNAL = 4.3; NT HIT: AF162853.1, EVALUE 5.40e-01; EST_HUMAN HIT: AI079576.1, EVALUE 7.90e-01
caaacatgaggcagaactttgatcaagcgttggataattcataagtcatgctccgtcataaccaggaggatggtgtggtcatgtgagtgggatgggaactgaagggagacctgactctgacttctgcagccttgccagtcctgagcctggggcagcagcattagttcgggttggggctggtggtgcttggcagaccctttacctgtgtcaagggagcttgatgaagaaattctaggagctttgtaaatacttgggtattcagattgagacagggaaatgattaaatctgtaaggtaacatttcttcacaccaagtggggagcttttgggtagggccttatgttatgaagaacctttgaatgtaaatgtgaaactggatgacagttaccaaattacagccacccagctactttctctctctgtactagaaatttatagtagatcctgatacggacacgtttgcaaaagaaagaagcaaagttagcagcaatagcttgctgtagtgactttgggatttagaatctggacaacctcacttttaattcctgtctgctgtgaattgct

SEQ ID NO: 7806 - DNA, 550 bp, Homo sapiens
  MAP TO CHR19.3; EXPRESSED IN HEART, SIGNAL =  35; EXPRESSED IN BONE MARROW, SIGNAL =  12; EXPRESSED IN ADULT LIVER, SIGNAL =  37; EXPRESSED IN HELA, SIGNAL = 1.9e+02; NT HIT: gi4503482, EVALUE 0.00e+00; EST_HUMAN HIT: BE730960.1, EVALUE 0.00e+00; SWISSPROT HIT: P13639, EVALUE 8.00e-67
actccgcttcgttctgattgacgtggctctaccaggctgtatgaggtccgccttgctaggaaaagcttttaaggatgcgtctgtgtgtaaggtcacctctttctccaggcaagagtgggacttaacctctttttgcagaaatctgacccggtcgtctcgtaccgcgagacggtcagtgaagagtcgaacgtgctctgcctctccaagtcccccaacaagcacaaccggctgtacatgaaggcgcggcccttccccgacggcctggccgaggacatcgataaaggcgaggtgtccgcccgtcaggagctcaagcagcgggcgcgctacctggccgagaagtacgagtgggacgtggctgaggcccgcaagatctggtgctttgggcccgacggcaccggccccaacatcctcaccgacatcaccaagggtgtgcagtacctcaacgagatcaaggacagtgtggtggccggcttccagtgggccaccaaggaggtgaggcacggctcagcatgtgcagaccacacccgtttccaggctctagagggacctc

SEQ ID NO: 7807 - DNA, 600 bp, Homo sapiens
  MAP TO CHR16.3; EXPRESSED IN HELA, SIGNAL = 4.5; EXPRESSED IN PLACENTA, SIGNAL = 4.1; EXPRESSED IN FETAL LIVER, SIGNAL = 5.2; EXPRESSED IN BONE MARROW, SIGNAL =   4; EXPRESSED IN ADULT LIVER, SIGNAL = 5.4; EXPRESSED IN BRAIN, SIGNAL = 7.1; NT HIT: gi6005979, EVALUE 0.00e+00; SWISSPROT HIT: Q60980, EVALUE 3.00e-32; EST_HUMAN HIT: BE541391.1, EVALUE 1.00e-126
catgtcattcacagcatcccctcagtctgtcttccaagtaagatgggttacctgaatgccatcccagtcgtggtgcagtctctgcccatggtgtatactactttgcctgcaaatgagggccctgcacccaatacagtcccactcattggaggagatggtacaaatgctggatcagtgaaagttgaccccgctttcatgtctctactggagattccaagtgacagtgaggagagtgcaattaagagtggatcctcaatctcacagagtctgcagggactaaagcaagaaccagcagcaatggcccaaatgcagggaggagtcgcttgacttgagaagaagacggatgcaccaatgtgactttgcaggatgcagcaaagtgtactccaaaagctctcacccgaaagctcaccacagaattcatataggagagaagacttataaatgcacctgcgatggctgctcctggaaattcgctcactcagatgagctcactagctctttcctcgagcacacaggcatcaagcctttccactgcacggactccaactgcagcttttctggttctgaccacctgtccctgcaccactgtcgccatgatac

SEQ ID NO: 7808 - DNA, 544 bp, Homo sapiens
  MAP TO CHR16.3; EXPRESSED IN ADULT LIVER, SIGNAL = 1.8; EXPRESSED IN PLACENTA, SIGNAL = 1.5; EXPRESSED IN LUNG, SIGNAL = 1.6; EXPRESSED IN BONE MARROW, SIGNAL =   3; NT HIT: M32992.1, EVALUE 0.00e+00; SWISSPROT HIT: P11597, EVALUE 2.00e-09; EST_HUMAN HIT: BI771118.1, EVALUE 1.00e-67
gcaatgcagctaggaccttctcaccaaagaacttgaccttgaaggcgaggtcaggagggggtgatgacagctccactcagcccatctccctcccagggcactcctctctctgggctagtgtggcagccggcttcagggctggcttcaggccagggaggctcctggcatagtgggtgtccatgaaaagacccctggcagggcagacagatgcactgatacttacacaccaggagggcaggcttggtgatgcggcacacgatgcctgcctcgtgcgaggtgcctttggagcaggcatgggcattgcccagcagggccagggtcaggactgtggcagccagcatggttatcaggcagtggtgtgtaagtggcccgagccgttcagcctggagcccgtatatgtatgtctgcccagcccccacggaacatgaggctcttccgggcagcagggtcttcctggccccagagattcacctccttcctgcccagccccctgcggcctcctctagagttcagagccagacattcaacaagagcaccccaactt

SEQ ID NO: 7809 - DNA, 588 bp, Homo sapiens
  MAP TO CHR14.3; EXPRESSED IN ADULT LIVER, SIGNAL = 4.8; EXPRESSED IN BRAIN, SIGNAL = 7.2; EXPRESSED IN PLACENTA, SIGNAL =   5; EXPRESSED IN HELA, SIGNAL = 5.4; EXPRESSED IN FETAL LIVER, SIGNAL = 4.9; EXPRESSED IN LUNG, SIGNAL = 4.2; EXPRESSED IN BONE MARROW, SIGNAL = 6.5; NT HIT: gi14784510, EVALUE 1.00e-100; SWISSPROT HIT: P42637, EVALUE 7.50e+00; EST_HUMAN HIT: AV747986.1, EVALUE 1.00e-52
agcgggtgagtacagacaggaagactaggtagagattagtgctttgctttcaggtgaaaaaaaaatgaggtcagtgaattattaaataaaaaggaatggcagaggagaaagagaggacaggattgagctgaactgttcaggagctggaatggttaggacttggattgtccagagagttttctctttgtgacttaaaatatatggcttttcccagttttcctgggttagtttttaattttttaaacttgcggtttcaaatgagtcattctaccccttagactgtccagagagggagggggctctttgcatatttatttttcctaaagctcagcctaatgctatgttctttttaggtcagatgggcagacctggaagagaagaaggatgcagataggaaaagggccataggttttgtggtcggacagactgattgggagaagatcacagatgaaagtggtcacctggctgaaaaagccctcaatcgaaccaaatatatatgagacttagtttttgaacggagtcattattcctctaaggtaagagtacacagtcatataaatagcctactgtgtggttgcttcaaagggt

SEQ ID NO: 7810 - DNA, 544 bp, Homo sapiens
  MAP TO CHR19.3; EXPRESSED IN PLACENTA, SIGNAL = 2.2; EXPRESSED IN HELA, SIGNAL =   2; EXPRESSED IN BRAIN, SIGNAL = 2.6; EXPRESSED IN ADULT LIVER, SIGNAL =   2; NT HIT: gi4885402, EVALUE 2.00e+00; EST_HUMAN HIT: BF511074.1, EVALUE 2.00e-13; SWISSPROT HIT: P20186, EVALUE 1.00e+00
gcatcacttgaaggagaccctgccttaaattcagaacttgacttctgcccacggctaaagttaattcattcaacaaccccccatgaagcaatggagccaggctccctcaggcccaggcaagaaagggtcgtggagttggggtcgccagcactggtttatggatttgaggacctaggaccagagtgagttggggatgggaggaggcagtgcttgaggcccctctgagcagcaaacctggacccgaggttcagttcccgcagacctaattaccctaatttgccacatgcactaattacctcctgggtgccaggtggctgggcggggctgccccaatttccggaggtaggtcggggcccgattatttttggctgtggcgtccttgaagcctccgccatcagcagcgcttgaagggcagaaagtggggcggagaaattgaggccacatcaggggaggcactgcgggaattgggggtcggctggccttggagctccctgaacagggggccttgggcccaaggcctgagagtctttggcacctagccaga

SEQ ID NO: 7811 - DNA, 562 bp, Homo sapiens
  MAP TO CHR14.3; EXPRESSED IN BONE MARROW, SIGNAL = 0.8; EXPRESSED IN ADULT LIVER, SIGNAL = 0.98; NT HIT: gi14748350, EVALUE 0.00e+00; EST_HUMAN HIT: AA625205.1, EVALUE 0.00e+00; SWISSPROT HIT: O30869, EVALUE 9.20e+00
tgtgctttaaccactgctgcaaaagagacaagtctgcatttatttgtgcaggaaaccagccatttaattgttctagagttttagcatttaaaaatcgtatgaaagtctacatcagctgaattgtcctagcttgataagcacttggagggggacttggaaggtgagaaagatactgcattttctcatgagtctccaagcccacttgaaaagtcacactgaaaggatgcaaatagccgtctgcgattttggcggccctccggattgtggtgacaatatgttgtacccggacattcccaaatttaaatttggcagtgaaaattccacaaagatttctggtaactttgagctataaataccttaaaaataatagattgatgattttctttatttcctagagaatttattttataaatactttgtttacattttagattgtacttgtctttatttaaaatgatgaatctagtctgaatcagctgttattccaagctatcatgcttaagctatgtcaacagcatttatttgtactaatgctaatatttccatcaaaatttgcctgtgg

SEQ ID NO: 7812 - DNA, 500 bp, Homo sapiens
  MAP TO CHR16.3; EXPRESSED IN FETAL LIVER, SIGNAL = 1.7; EXPRESSED IN LUNG, SIGNAL = 1.6; EXPRESSED IN BRAIN, SIGNAL = 1.2; EXPRESSED IN ADULT LIVER, SIGNAL = 1.9; EXPRESSED IN PLACENTA, SIGNAL = 1.7; EXPRESSED IN HELA, SIGNAL = 1.6; EXPRESSED IN BONE MARROW, SIGNAL = 1.9; EST_HUMAN HIT: W45576.1, EVALUE 1.10e-02; SWISSPROT HIT: P14590, EVALUE 1.10e-01; NT HIT: AL163249.2, EVALUE 4.70e-01
ttcctgttcatctccttgccttcgcttcagcgggatctcccagcgcacccatgtccaggtctagcggggcgggaggcacccaggggggcttgtgcaggaaaaccggtccggattgcccgaggacggtgaccggcctcggtcttccggcctgacttgcggcctgggaatgagagggaaagtccagccttcccgcaaggagatcctggctccaggcaagcccggaagggccagataacgcagcgaaacggcctctgcgcccgcgtccgagatttcgcgctgccgctgctgcagcgccgagactgcgctcggctgggctgtgtcttcctcggggtccattgcgtcctgggctcgcacaggggtcgcgagtgaagctcccacggctgcgggacgccgcaaaagcgcgcccagcatgtgcaagtcacaagcttaaaacgcaaagggctcctgagtctggtgcgaaattatgcgccctgcgtgcatgaaggacccctaggatcagc

SEQ ID NO: 7813 - DNA, 540 bp, Homo sapiens
  MAP TO CHR18.3; EXPRESSED IN ADULT LIVER, SIGNAL = 2.5; EXPRESSED IN PLACENTA, SIGNAL = 2.3; EXPRESSED IN HELA, SIGNAL = 2.9; EXPRESSED IN LUNG, SIGNAL = 3.7; NT HIT: AJ276505.2, EVALUE 2.00e+00; SWISSPROT HIT: P26572, EVALUE 5.10e+00; EST_HUMAN HIT: BG400871.1, EVALUE 3.00e+00
caaagtcaggaagctcagcctggcatccctgcacagcaatggggccaaggtcaccctccctcactccaggtgctcccttttcttggtccttttcatgctgtcctctctgtttctctgtatgctgtctttctctgcctcagcaggtaccatggccatgcccagccatcccaggcccggtttaatcacctcacagactgatttgcttcactgaattccagtttctcattcttgggaaggattagaggacccagcttgactcagatgtctactattaatccataaatgggcagagacacacattcagaatgtcacagatgcccacgcctggtataaatagaatacagaatggtaggcatccccaaatgtgcctccagcatcttgcctagttcccactagtggagcagtcccagctgtactccccaccttcgtctctgaccacatctcagtctgcctcaccaacctcctcctcttccatttatcctcaacaactggctgagaacattctattccttctaaatctgggctcttttcctgagcttt

SEQ ID NO: 7814 - DNA, 574 bp, Homo sapiens
  MAP TO CHR14.3; EXPRESSED IN BONE MARROW, SIGNAL = 5.2; EXPRESSED IN BRAIN, SIGNAL =   4; EXPRESSED IN ADULT LIVER, SIGNAL = 3.7; EXPRESSED IN PLACENTA, SIGNAL = 3.9; EXPRESSED IN HELA, SIGNAL = 3.1; NT HIT: gi14748626, EVALUE 0.00e+00; SWISSPROT HIT: Q13671, EVALUE 1.00e-07; EST_HUMAN HIT: AA418280.1, EVALUE 0.00e+00
catgtgtcagaaccacagggtataactgctggggctgtgagtgtccttccaggggccaggggatggggatggctgtgctgttgggcaacagaaccaggtggcaggatccctgcatctggtttcctcaccctcgctctcttgtttacctgcagaagcaattgtagagtctgccttgtacaaatgtgtcctgaagcccctgaaggaagccatcaactcatgcctgcatcagatccacagcaaggatggttcgctgcagcagctcaaggagaaccagttagtgatcctggccaccaccaccactgacctaggtgtgaccaccagcgtgccggaggtgcccatgatggagaagatcctgcagaagttcaccagcatgcacaaggcctactcacctgagaagaagatctccatcctgctcaagacctgcaaactcatctacgactccatggccctcggcaacccaggtcagtgggcagccgggaggggtctgggtgaggagctctctttgtatgggtccatgaccccaccctgaccaggactccagagcccttggaaggccccagactttccagattca

SEQ ID NO: 7815 - DNA, 523 bp, Homo sapiens
  MAP TO CHR14.3; EXPRESSED IN HELA, SIGNAL =  12; EXPRESSED IN LUNG, SIGNAL = 6.1; EXPRESSED IN FETAL LIVER, SIGNAL = 5.7; EXPRESSED IN BRAIN, SIGNAL = 1.3; EXPRESSED IN ADULT LIVER, SIGNAL = 4.9; EXPRESSED IN PLACENTA, SIGNAL =   5; NT HIT: gi15812219, EVALUE 6.00e-90; SWISSPROT HIT: P12947, EVALUE 4.00e-39; EST_HUMAN HIT: BG494841.1, EVALUE 4.00e-92
atatgttgcagggatggaggagtgactataaatctcatctattcccatttgagctagctccattctcctccagtgtttcaagaaataccttcagggaaccgctgctttctttctcccacaatctgtagttctcttgctttccaacttgggcccggcaggatcgctcttgcaaagaaggatggcaagaagaagagcctttctgccatcagcattcacaagcgcatccatggtgtgggcttcaagaagtgtgcccctcgggcactcgaagagatccaaaaatgtgccatgaaggagatgggcactccagatgtgcacattgatactaggctcaacaaagctgtttgggccaaaggaataaggattgtcccataccgtatccctgtgtggttgtccagaaaacgtaacgaggatgaaaattcaacaaacaagctctatactttggttacccatgtacgtgttaccgttttcaaaaatctacagtcaatgtggatgagaactaaccactgattgtcgaatacatcaa

SEQ ID NO: 7816 - DNA, 575 bp, Homo sapiens
  MAP TO CHR19.3; EXPRESSED IN BONE MARROW, SIGNAL = 1.6; EXPRESSED IN ADULT LIVER, SIGNAL = 1.5; EXPRESSED IN PLACENTA, SIGNAL = 2.1; NT HIT: X64180.1, EVALUE 0.00e+00; EST_HUMAN HIT: BI910506.1, EVALUE 1.00e-70; SWISSPROT HIT: O00401, EVALUE 1.10e-02
tcgaacaggtctgagggttcgaatctgagaccatggatctggggggctcctgaggccgagacttcacggtttcgccgggtctgggggccgccaaagtcggagttgcggggtgcggagggggtacgggccgggcgcttaccgccgcacacgtccggagttctgggagtcggttccactgccgctcccgggcctcccgcagcgtccggctccggagggcggggccggtgactcaggccgcaactctcgggtcggacactgcaccgcggccctgctgtcgcccgcgcggtcctagagccgaagcggacattgcgcatgcgcaccccacaccgcccggctagctggatccaggtctgggccccgccctacgcgtttccagcgccggaggtcttaatcccgccctgactcggtaggcgggggtcttcccgacacccctcaggtctgggtggaggcacccgcggacgagaactcggaggggacccaccccccgagtgtcgtagtgtgaattttcaccctagggcatgccaatatccttccagggtggcggttttcggtccgctcactaagggactccgcac

SEQ ID NO: 7817 - DNA, 502 bp, Homo sapiens
  MAP TO CHR18.3; EXPRESSED IN BONE MARROW, SIGNAL = 1.5; EXPRESSED IN ADULT LIVER, SIGNAL = 1.3; SWISSPROT HIT: Q9JL04, EVALUE 1.80e-01; NT HIT: gi14727465, EVALUE 1.90e+00; EST_HUMAN HIT: AA573782.1, EVALUE 1.80e-01
gaataactgtagtctctgaatttggacaaaaagaaatgcaaattgcaggagaagaatgtgctaaatgcagatactcatcacgatctcaaattgtagtcattttttttcttcaaaataacaatacaaaaattccttgcacttttgtatcattccgtacagttctaggggtccttacagttatggtccatagcatcctcagcaacagagttggctatataactcacacttgccctaatcatggtatccaggcacattatatacatatagaattttatgtgcagtcactgggagataaaggtaaaaattatttgctttgaggttactagctgggatgatataagcctggaactatctatttatagtttcatccctccatgtctgcaccacagcctctaaccccctcaacaaggaggaaaatgagcagaggaggaggtgcaggggatgggtggtgtggggccgagatgacaggaaaatgagaaatagaaagacagagaatcactca

SEQ ID NO: 7818 - DNA, 526 bp, Homo sapiens
  MAP TO CHR16.3; EXPRESSED IN PLACENTA, SIGNAL = 0.99; EXPRESSED IN HELA, SIGNAL = 2.4; EXPRESSED IN LUNG, SIGNAL = 1.8; EXPRESSED IN ADULT LIVER, SIGNAL = 0.93; EST_HUMAN HIT: AU139060.1, EVALUE 5.00e-82; SWISSPROT HIT: P72052, EVALUE 6.40e+00; NT HIT: gi16166324, EVALUE 3.00e-82
gaggcaaaaacctgagcaagcaggcaggcaggcatcttctccccaacacacattccaggcttctggagtcctggcagtaataatagtaaaaacaaaaactaaaacataaagagaggagaatttatattgtaatcaagagactgttcctttagtgagactcgtgtgatcatcttcttggtacctttgcaagtttcctccctctcccttgtgtctcctcttaccatgctttctccccagacagcttataacctgcaactcatcttgatttgcagccaaactgattatccaccagacactcagcgtcttagaagatattgtggagaatatctcgggggagtccaccaagtctcgacagatttgctaccagtcgctgcaggaatctgttcaggtctccctggccctctttccagcttttatccatcagtcaggtaggagctggcccagaggccccactggtgggtggtgctaacaagggccagaatacccacttagatctgtagaacacactgagtcggtgcagtacagg

SEQ ID NO: 7819 - DNA, 575 bp, Homo sapiens
  MAP TO CHR16.3; EXPRESSED IN FETAL LIVER, SIGNAL = 1.2; EXPRESSED IN BONE MARROW, SIGNAL = 1.7; EXPRESSED IN ADULT LIVER, SIGNAL = 1.3; EXPRESSED IN BRAIN, SIGNAL = 1.4; EXPRESSED IN HELA, SIGNAL = 1.4; EXPRESSED IN PLACENTA, SIGNAL = 1.2; SWISSPROT HIT: P03010, EVALUE 2.50e+00; EST_HUMAN HIT: BG462117.1, EVALUE 1.30e-02
caaagcagtcggtcatcttgttagttctccaaacagcacatcttccctagatcaagactccagtggaaacacaatggtcacaaaagtggtttttgtgtcttggttttctgggtctcccactcccccctccctccaatatctattctccattattggccagacaaagctcatcccaagatccctgcgtctccgttgtagcgaacatctgtcctttctcacctgcgcatttacccatctgcgtctccacgaaatctttcatcccatcgacaatgtaaggattcaaagtaaggaggttcacgttgtcaaagaagccttgatctgaatgccttccccccactttctccttaaatgagttgttaacaggaacccaagtgtctgttgaacctaaaatactttttttttaaaaaataacatttcaaggtaacttacgggcgcactttaagaagcgaggactcagcgtgtccctggcggcttcctccttgaagctctggtcttcagggctgtgggaggcatccaatcagacaggccgccgctgagggccaggggaggagggctgccggggttttatttcagat

SEQ ID NO: 7820 - DNA, 532 bp, Homo sapiens
  MAP TO CHR14.3; EXPRESSED IN ADULT LIVER, SIGNAL =   1; EXPRESSED IN BRAIN, SIGNAL = 1.9; NT HIT: D31787.1, EVALUE 7.90e+00; SWISSPROT HIT: O52538, EVALUE 5.70e-01; EST_HUMAN HIT: BF361964.1, EVALUE 1.00e-115
gtaaagatggatggaagccgaacaaggttctaatctacctacttctaggtgagcctctgcacacccagtgagaacacgcctacagaaagcttggcccggctggtggccatggtgtttcagtggtttcactccactgcgtatatgatggatgatgaagtgggaagtctggtggaaaagctgaagcctcagtttgtcaccaaatggctgaagaccgtatgtgatgttcgcttcgatgtcatggtcatgtgccttcttcctaaacccatggaatttgccagggtaagtggaggcctacagctcacaccttgttagagaggaggacttggggagaagtgctgccttagccatgtgggtattatcagtgtctgcagaggaggaacatctctccttattttaattaatatagctaaatgaatttagtaactgtatcttggatgatgtgctgctttgatgttgatttgggatgaggaagaatggcaagatgcatttgtgaggtatctttaagaatttaagggaccattctttctcgaca

SEQ ID NO: 7821 - DNA, 561 bp, Homo sapiens
  MAP TO CHR14.3; EXPRESSED IN HELA, SIGNAL = 3.9; EXPRESSED IN PLACENTA, SIGNAL = 3.7; EXPRESSED IN HEART, SIGNAL = 3.5; EXPRESSED IN LUNG, SIGNAL = 4.8; EXPRESSED IN BONE MARROW, SIGNAL = 5.4; EXPRESSED IN ADULT LIVER, SIGNAL = 3.2; NT HIT: AJ224982.1, EVALUE 2.10e+00; SWISSPROT HIT: P31629, EVALUE 1.10e+00; EST_HUMAN HIT: AA328020.1, EVALUE 7.90e-01
tcagtactgtgcgatccaggacaggcccccttccgtgtgcggcctgagagatgctgatttgttagcacccacccgcttatctgttatccatccacaggccagcacgtggctctgcacatgcatcccaagtcccgacatcaggcagggccccggtaccttctcagccctgcactcactcggcacacgaacctccaggcagcaaatgaatacattcacatgactgggggccccacgccagtgtcggaagtaccctcgcaggctttttcatctatgacaagagatgcaggttagaaaggcaactcggaaaggaaagctatccacttctgttcttttaaagtattgggtcaattctaagggagcattcttgagatagcaagatagattttattttttatttatcatgtttttaaaacaaaagctttaaaataaaaaaacagctaatggttgcaaatgctaacagcttttgcatttagcatttgcaaccatttcactattttttttcttgaaattcacagtcaaaataaaatatagaaaccagttgctgaggtgggtaaaaggtcg

SEQ ID NO: 7822 - DNA, 512 bp, Homo sapiens
  MAP TO CHR14.3; EXPRESSED IN PLACENTA, SIGNAL = 1.7; EXPRESSED IN HELA, SIGNAL = 1.9; EXPRESSED IN FETAL LIVER, SIGNAL = 1.6; EXPRESSED IN LUNG, SIGNAL = 1.7; EXPRESSED IN BONE MARROW, SIGNAL = 2.2; EXPRESSED IN ADULT LIVER, SIGNAL = 1.5; SWISSPROT HIT: P34573, EVALUE 8.20e+00; EST_HUMAN HIT: AA707638.1, EVALUE 9.00e-53
tgagacacaattgctttgccttttagctggaccactcaggtagcttgaagaggatggatttggaggatgaggcagtgccactcctttttcctccatgctcgctggtgaagataatgaggaacagtgaactagctaaaggtaaagaagcaaagtattctgacaagccaaaaatttgatgataaaacatagagggactcagaatttacattagaggttagattcttaagaaatctgtgtggcaaaaacagaagctcatatcctgtgtagttactactactcctgctgtgatttaactttgtttatagcctaaaacacataaaaatatcaaactttccctgccatgtgagcagcggccacttcaaaaaatctgtgcaagcacgtgtatacttgaaatataaagagataaatgttctcaactaccaccattcaacaaataacttagaaatctgagcagagagcaggtcaaatttaattctttcccttggcccaagagaggctggttgtcttttgga

SEQ ID NO: 7823 - DNA, 571 bp, Homo sapiens
  MAP TO CHR18.3; EXPRESSED IN HELA, SIGNAL = 1.3; EXPRESSED IN BONE MARROW, SIGNAL = 0.73; EXPRESSED IN BRAIN, SIGNAL =   4; EXPRESSED IN ADULT LIVER, SIGNAL = 1.1; NT HIT: gi15305878, EVALUE 2.00e-84; SWISSPROT HIT: O18896, EVALUE 1.40e+00; EST_HUMAN HIT: AU119897.1, EVALUE 2.00e-84
aagaggtggaaattttgggggcaaccactgaatatgatttcgtaaagaactgagtaatctttggagatgtcttttactatgtgagatctgtttacttgtaagcttatgtaagtgtacctctgtttgataaatccacttcagccttatattaggtgcaggttctgtgaaatccctgaggaggtagttaacagatggattgttgagggacaaagtaggctgcttaggtttcaaagcctgaggcatgaagggagggatccattgttacggaagcctcacacccaagttcaattcattaactatgaacctgctctgccacagattccgagtccgaaaggtccctgagtagattggaagcagtgacagcacgctcctttgaagaggaaggagagcatttgggcagtagaaaacacagaatgtccgaagaaaaagactgtggtggcggagatgctctctccaatggcatcaagaaacacaggtaggatcgcctctgacagttgtcactgctgcgtttttacgataaagtacatttggattcataaagaaatatatgtcttgtcttcatttttccccg

SEQ ID NO: 7824 - DNA, 559 bp, Homo sapiens
  MAP TO CHR19.3; EXPRESSED IN ADULT LIVER, SIGNAL = 1.2; EXPRESSED IN PLACENTA, SIGNAL = 1.2; EXPRESSED IN FETAL LIVER, SIGNAL = 1.3; SWISSPROT HIT: P51461, EVALUE 9.10e+00; NT HIT: gi14762597, EVALUE 1.00e-32; EST_HUMAN HIT: BG422023.1, EVALUE 0.00e+00
caggagctggggaactcacttgtagcgcagccgctcctcaccgctatctggcggctcctgggtgacccaggccaccattgcttgcaggtggggtggctgcagcaggaagtccagcagcttgcggttgacgaccttgcactcctgcagcacgtcttcctcgtccagcagctcgggcaggctcaggtcctcccgctccagcagcgtgtccaggtgcgagcttgtgtgcaggtcaaacttccaaaacatggcgccctgcaggcatagacacaaccagcgccgcgtcagacgccccagggagtccccactggacgaggcactgaccacaggggctgagtgcccaccttgggcacagcctctccccaagtcccagccctctgcctcatgctgagcccggccccgccccgggactgcccgcaggctcactgcctccatcactcaggcttaaggctcccagtgagcaccaggctcctgcagttgccctcgagcctgcccctcttcccccatctccagcctcccggccgcctcgcctgaggtccagggggtcatttcacacctgagg

SEQ ID NO: 7825 - DNA, 549 bp, Homo sapiens
  MAP TO CHR19.3; EXPRESSED IN ADULT LIVER, SIGNAL = 2.7; EXPRESSED IN HELA, SIGNAL = 3.3; EXPRESSED IN LUNG, SIGNAL = 5.9; EXPRESSED IN BRAIN, SIGNAL = 1.8; EST_HUMAN HIT: BF848561.1, EVALUE 1.00e-116; SWISSPROT HIT: O43765, EVALUE 2.00e-10; NT HIT: gi16177788, EVALUE 2.00e-43
aggtgaaagtcacagggtgggtttgggccctggaggcccaccaggtggtgagagagaatcctctcctgcaggggaaggtgaagggctgagagggattctctcccgggccactgcgagggcctgcagtgggggtggcggtcaggctgtcccggctgcgagtcacgcgctctctcctgcagcatgtccggcatgatttcgggtggcaacaaccccttgggaactcccggcaccagcccctcgcagaacgacctggccagcctcatccaggcgtgagtggaactgcttccaagaggacggaggacgtgggcggcgggcagggctcgcaggcggaagggaaggaggagagcgaaagtgctgcgtcccctgctccgaagggcccagcgtcctccagcgaggggtcaggcctgtctttggggtggagggcccgaggggtcagctggggatggacggaggcagcaggcagcctcctggccctggctgagccccatgtgcccttccccgcaggggccagcagtttgcccagcagatgcagcagcagaacccagagtt

SEQ ID NO: 7826 - DNA, 592 bp, Homo sapiens
  MAP TO CHR19.3; EXPRESSED IN FETAL LIVER, SIGNAL = 7.8; EXPRESSED IN BONE MARROW, SIGNAL = 1.9; EXPRESSED IN ADULT LIVER, SIGNAL =   1; EXPRESSED IN HEART, SIGNAL = 6.8; EST_HUMAN HIT: AI122756.1, EVALUE 3.00e-93; SWISSPROT HIT: O43345, EVALUE 6.00e-16; NT HIT: gi16163774, EVALUE 7.00e-56
accgtgcttagtaaagaggatgtaatagaatattccagaaaattaatcccaaactactacttaataacagaaagttcttaacatttagaaaatattttaaatttgtagctccttaatttcactacccagtactcatgaatcaaaaataagtgctggcaaatagattttaacatatgggcaacaatattttatactactaaatttttgaaattaccactactctggagtgaaggatacagaccagcttgggaaagtaaaacgttcaggccaagataaaacatcttgaagaaatttttttctacagagataatttctcaagattttttaaaaacaaagatcagaaattcctgtatgcaaagcataaattaccaaaaattattcaagaaaatagagaaatgaaacttttagggtatataaggaattgtgtattagagttattctcacccaagaagaccaggtttctgtagttctctaaaatcactttcctatacaaatcctgttgagcagtgtccaggcattgccactcctccagagagaatttgatggccacatccctaaatgtcaacggcccctgaaaaacacatgcgtgcgt

SEQ ID NO: 7827 - DNA, 505 bp, Homo sapiens
  MAP TO CHR16.3; EXPRESSED IN LUNG, SIGNAL = 1.5; EXPRESSED IN FETAL LIVER, SIGNAL = 1.4; EXPRESSED IN BONE MARROW, SIGNAL = 1.5; EXPRESSED IN ADULT LIVER, SIGNAL = 1.4; EXPRESSED IN PLACENTA, SIGNAL = 1.1; EXPRESSED IN HELA, SIGNAL = 1.1; SWISSPROT HIT: P31695, EVALUE 2.70e+00; NT HIT: Z54202.1, EVALUE 1.20e-01
aaaacacttcaccggacagggccttggaggccccgcccccacagggatggagggggctacacagggaggtaggaacgggctcaatcttaagactcccagctgtcctgggataatccccccaagctgtggagactgatgggcaacatccagcagcctctggacaagggctgctgcagaaagcccttcaaaggagcacccgaacacatcctgttaagagaaagggtgtttgcggccatctctgaagtcctggggggcttccagttccctgtgtgagtcaagatcctcaacaatggacaagaaggggctcaaagaggccagagggcccttagagggcgcctgcttggtggcagcaggtctaagaccagctctcactattaaccatggttcctggggtgcattaagaaggattctggggctctgccagggcttcaggcagatcaggactccacgttgactctcagctctggggtcagaagttgtgggaggctgattgacgaatgggagt

SEQ ID NO: 7828 - DNA, 600 bp, Homo sapiens
  MAP TO CHR18.3; EXPRESSED IN LUNG, SIGNAL =   1; EXPRESSED IN BRAIN, SIGNAL =   1; EXPRESSED IN ADULT LIVER, SIGNAL = 1.2; EXPRESSED IN PLACENTA, SIGNAL = 1.1; EXPRESSED IN HELA, SIGNAL = 1.2; EST_HUMAN HIT: AL542356.1, EVALUE 3.00e-62; SWISSPROT HIT: P52917, EVALUE 3.00e-09; NT HIT: AY051732.1, EVALUE 3.70e-02
acaatccatttcccaagctgctggtaatcaagatccaggagtggatcttgagatctcacataaaatcacctaaaagcaaagaagctctgacatcattttgtaccactgtattacactagaacttatttttaaaaacaaaattaagaattcctacccgaacgagtttttctgaatcccctctccatttgctgacaatggtggatgcagaaatgttaaagaaggttgttttacattcagtggccacagctttggccagtaaagtctttcctgtacctaaagagaaacacataaaagatgagcaggcatttcaactccatccccctgcttatagacagaagtcagtctcacacacaaggaaggaagtgactgctcagctctcgtgtgccccagtcctgaagtgaggacagaaggggcaactcatcctctgcacacacacttaacactgacatcaaaataggaagctgtgtttacctggagggccgtacagcagtagtcctttccagggagaaagaattcctgtaaatagctgtggatactaaggaaacaaggaacaaggatgaggtttggtaccaacacatcagcctgcatactctcagcaca

SEQ ID NO: 7829 - DNA, 530 bp, Homo sapiens
  MAP TO CHR14.3; EXPRESSED IN PLACENTA, SIGNAL = 1.3; EXPRESSED IN HEART, SIGNAL = 2.8; EXPRESSED IN LUNG, SIGNAL = 1.3; EXPRESSED IN FETAL LIVER, SIGNAL = 1.9; EXPRESSED IN BONE MARROW, SIGNAL = 2.1; EXPRESSED IN ADULT LIVER, SIGNAL = 1.7; SWISSPROT HIT: P39685, EVALUE 3.80e+00; NT HIT: Z72698.1, EVALUE 2.00e+00
tcaaaaggcattctgcttccaccaggtagtgggtatttacttcagcgtgagcacctgcttttggggaaccctttggggacatcaatctgccctttctgcctcctcttcccatgcaagatgtcaccagcatcaaactgtgtgatctccacctgacacacctgtagaatgccctctggaaatggtgcgcccagcagtgtccccagagcttcctcgtccttgagtttaaagccagcgtgcccacaatgctgcttcctggtctcctgtgtcctggcgagagatgattaatggcctagccacaccggtgtgttgtatttaggtctctccccaagcagatagatttttctttccagataaagtggaggcaggcccttcctggactgcaggtccttgcccacccctcctggctggcggtctatgttagggaattcggaaaagtaaatgaattgataagacagtgtgggagggggatgactgcactttcagtggcccttgtaaacaatgtaaagtcaccttgatgtgccgggactaat

SEQ ID NO: 7830 - DNA, 594 bp, Homo sapiens
  MAP TO CHR14.3; EXPRESSED IN FETAL LIVER, SIGNAL = 2.3; EXPRESSED IN BRAIN, SIGNAL =  12; EXPRESSED IN ADULT LIVER, SIGNAL = 2.6; EXPRESSED IN HELA, SIGNAL = 1.8; EXPRESSED IN HEART, SIGNAL = 3.8; EXPRESSED IN LUNG, SIGNAL = 1.8; NT HIT: AL163300.2, EVALUE 5.70e-01; EST_HUMAN HIT: BE383632.1, EVALUE 0.00e+00; SWISSPROT HIT: P35289, EVALUE 3.00e-14
gactaacctgtgccctttggtttccagtcattcacgcgtctgacagagctggtgctgcaggcccataggaaggagctggaaggcctccggatgcgtgccagcaatgagttggcactggcagagctggaggaggaggagggcaaacccgagggcccagcgaactcttcgaaaacctgctggtgctgagtcctgtgtggggcaccccacacgacacccctcttccctcaggaggcccgtgggcagacaggggagccggggctttgccctgctgctgtcctctcgtgtgatgaccctattgagtatcagtagccactactccccctgcctggccctgagagcggctctgctgtcatctcaagcagcccctgtccccagcccgtccaccctggagtggtcttcttcagcctgtttccccagccacaggcctgctacgacccccacgatgtgccgcaagcactgtctcaccatcccgcacccaccagacaacagccagggctggagtccaggccactttcagctgctcctttctccgtgcatcgtgtctcttctctgctttttctctcttcccccacttctctttctctgacccctccc

SEQ ID NO: 7831 - DNA, 508 bp, Homo sapiens
  MAP TO CHR18.3; EXPRESSED IN HEART, SIGNAL = 2.2; EXPRESSED IN PLACENTA, SIGNAL = 2.1; EXPRESSED IN LUNG, SIGNAL = 2.1; EXPRESSED IN FETAL LIVER, SIGNAL = 2.3; EXPRESSED IN BONE MARROW, SIGNAL = 2.7; EXPRESSED IN ADULT LIVER, SIGNAL = 2.2; SWISSPROT HIT: P27761, EVALUE 9.30e-01; NT HIT: X62549.1, EVALUE 1.20e-01; EST_HUMAN HIT: AA524741.1, EVALUE 1.80e-01
ggttcagactggctggtttcctagatcagatgctatggctttcatcctgtggtaatctcaggtctcagattttcctgcactaaggagttggaacatccaggaagattgaaatcagggtctctgtcatagagatttctttctccctttgctttttcatgtctcatacttaacatttttccatcagatctcaacatttatcttaattctgatccaagtagtaaaccataccgtggggaacatcagatgcagggcctggctggctggggagcatccttgcagaagcggcatcggtaagtgaaggttcagggcctgagcatgtaaaggacagcccaggatttggacatcacttgactcttactaaagaagttcttccttttccccatgtgtaagaatatgaacctgggttaaggcaccttttgttgtaaactattctaatatctcttaaaaagcacgttgggctttcctgttgggattctttgaagccgatggcagtggtattgtgtggtgc

SEQ ID NO: 7832 - DNA, 520 bp, Homo sapiens
  MAP TO CHR18.3; EXPRESSED IN FETAL LIVER, SIGNAL = 1.8; EXPRESSED IN ADULT LIVER, SIGNAL = 1.7; EXPRESSED IN HELA, SIGNAL = 1.4; EXPRESSED IN BONE MARROW, SIGNAL = 1.8; SWISSPROT HIT: P07197, EVALUE 5.50e-01; NT HIT: AF307353.1, EVALUE 4.90e-01; EST_HUMAN HIT: BF342157.1, EVALUE 4.70e-02
agtgttggggagtgttgagcatttgtttctccactcctgatgtttatttccaagtgaagggatatcaaatccctcctgacgtctctctgcctggtctttatttagctgataagtttaacagcagaaagtgagcatgccatcgtctacctcttcctcttcctttatcttggaaatgagttgcctgtaggaagcaaaggtcctgccctgatggtggtgcgatttgggaatgtgggaagaactgccgtggtccagaggtgctatgctgaacgggtggtctccttgttgtactactggattccttcgggttccttatgactgtattacttgtttcattcttcttatctgggggatgttttaatcagtaactagagaagaaagatactactaagacaaggaggagattgcaaggttgagagataagaagaataagattggagaggacaaggatgctacttttcacccagtcactgggtccttgggtgtttatttgctggagtattgatgtgaaagccatgtgcag

SEQ ID NO: 7833 - DNA, 539 bp, Homo sapiens
  MAP TO CHR19.3; EXPRESSED IN FETAL LIVER, SIGNAL = 0.9; EXPRESSED IN BRAIN, SIGNAL = 1.8; EXPRESSED IN ADULT LIVER, SIGNAL = 1.2; EXPRESSED IN HELA, SIGNAL = 2.4; EST_HUMAN HIT: BI918955.1, EVALUE 0.00e+00; SWISSPROT HIT: P05790, EVALUE 5.10e-02; NT HIT: gi9910259, EVALUE 1.00e-109
ggaaactaacctggggaaccagcgcacctgctaggctcaccttgaggaagcgccgatagcctcgcacagctgtctcaggcagtgggtgtgagcgcaggaagcgcagatacaggggccaaattcgagagtgctgcgtgatgggcagtgcccggagggcacggtcgaaggtgcggcgggtgtgtgtgacgcgcccctggtccatgaggaactggcagtaatctagccacagacgaggcatctgggggtgtggggagaggcggctggggctaagccacggactccatggcctggccacagacactcgatgtcctgtggctgagccacacctggggccaccacataaatgcggcgggacccagaaacccccagctccaggactgagtccagcccaacttcccatgcaaagaagcaacaggaatccaagcccccatccctaacatgctgagcccagcccctgtccccgccccacccaccaccatggactgagctccacttcccgattcatcccctcgccgagccccaaaccttgtgcatgaaca

SEQ ID NO: 7834 - DNA, 567 bp, Homo sapiens
  MAP TO CHR18.3; EXPRESSED IN ADULT LIVER, SIGNAL = 2.7; EXPRESSED IN PLACENTA, SIGNAL = 2.8; EXPRESSED IN HELA, SIGNAL =   3; EXPRESSED IN HEART, SIGNAL = 3.2; EXPRESSED IN BRAIN, SIGNAL = 2.8; EST_HUMAN HIT: BG722402.1, EVALUE 1.00e-79; SWISSPROT HIT: P54771, EVALUE 1.40e+00; NT HIT: gi13385147, EVALUE 1.40e-01
agggttagggagaggcagaggggaggggtgctggagaaagaaatcagctctagtttagaaaacctttctgctccagggccaggttgtcgagggggttgttgtcaccgcctcccctaccctcctcgctctgtggcagcacataggactcatccactggcaacagctccctggacagctggccatcatcttcctccactgccagccaacgttggcatggaaagtagtacctgtgggggtggatagggaaagattggaatgtcctcttagaaaggtctcgtccaggagcagtcatgggctgagaatgagaggccctctatggggtcccaaactctcccctgtctgcccctgacagcattgccctgctattctacccagcctgggaatcactccattagtcatttgcctggggtagagaacaaacttggggacattggctctagacactccattgaaaattgttatgtgacctgcctggagcacacagagcctcaatcagggtcatattggatggaagtatctagaaggagagggacatacggggacctttccaaccctttccagaatgaa

SEQ ID NO: 7835 - DNA, 567 bp, Homo sapiens
  MAP TO CHR19.3; EXPRESSED IN HELA, SIGNAL = 2.4; EXPRESSED IN PLACENTA, SIGNAL = 2.7; EXPRESSED IN FETAL LIVER, SIGNAL = 3.1; EXPRESSED IN LUNG, SIGNAL = 2.2; EXPRESSED IN BONE MARROW, SIGNAL = 1.8; EXPRESSED IN ADULT LIVER, SIGNAL = 2.5; NT HIT: AF408408.1, EVALUE 3.00e-18; EST_HUMAN HIT: AA889338.1, EVALUE 1.00e-110; SWISSPROT HIT: P23323, EVALUE 1.80e+00
tgcaagcagactacaggtggaatgtaaatcaccctgatctacgagagtaaaaggcatccgcagcaggctccatccatccggcttctttgagactcttcatggattttgaagtctacaaagtgtgcataaaaatactcgtacttcaaaaagcaagaaggcaaacggtataatctcatgatctcaaatttataacggtggtacaggcccagcgagcctttgaggaccaccgggtgcgcacccagcctgtccaccagtgtggagctgtttgctcactcatcatcctagtcatcgttgctgcccttgttggcctggctgccaccaaagagctgaggcaacggctgctgggcgctgccaccgtctggaaagcctgcactggccgcgacacctgttgcggctgcagcagtggctggaaggcgtcaggaggcagcttccaggtggtgggaggtacagcgggcagggcctcgaagcctctgggcagcacattggcctggcgggcttgggggcccgggctgctgctgcttgctgggctgggtttaggagcaggcgtggatcacttgcactgcacag

SEQ ID NO: 7836 - DNA, 500 bp, Homo sapiens
  MAP TO CHR19.3; EXPRESSED IN HELA, SIGNAL = 3.6; EXPRESSED IN PLACENTA, SIGNAL = 2.9; EXPRESSED IN LUNG, SIGNAL = 2.8; EXPRESSED IN FETAL LIVER, SIGNAL = 2.3; EXPRESSED IN BONE MARROW, SIGNAL = 2.5; EXPRESSED IN BRAIN, SIGNAL = 2.8; EXPRESSED IN ADULT LIVER, SIGNAL = 1.6; NT HIT: AF243529.1, EVALUE 6.00e-62; EST_HUMAN HIT: BG749006.1, EVALUE 1.00e-39; SWISSPROT HIT: Q50650, EVALUE 3.50e+00
ggtgatggtggtcaggactcagaccagagggcatgatcattgcggtagccagagctcaccatgttggggagattggaagcatgagtctgcctgacactgaacttagaactctcccctcccagtggatgcggagattgtctccatcgacactttcaacaagtcaccccccaagcggggtctggttgtggggatcacgttcatcaaggtacctagagccccctccacctcccttcgccctcctccttacacacatggtgagttccactgagccgccccggatccctcctgccacccctgccctcccctgaaccccgtgtcctccgccaggattcaggggacaagggcagccccttcctgaacatttactgcgactacgagcccggctctgagtacaaccttgactctatgcccgtgagtgaggcgtggacgggaggagggagagagtccccagcaggtcccccatgctaacctgcctgtgccctgcctacagagagctgcct

SEQ ID NO: 7837 - DNA, 555 bp, Homo sapiens
  MAP TO CHR14.3; EXPRESSED IN HELA, SIGNAL = 2.2; EXPRESSED IN PLACENTA, SIGNAL = 2.1; EXPRESSED IN HEART, SIGNAL = 1.9; EXPRESSED IN LUNG, SIGNAL = 2.5; EXPRESSED IN BONE MARROW, SIGNAL = 1.6; EXPRESSED IN ADULT LIVER, SIGNAL = 2.5; SWISSPROT HIT: P20156, EVALUE 5.30e+00
ctctcatctgaggagccagcatcacaggatgtactggccaacagtccttttcctttccccagtacacagtcttgggggatgtcagccagagtcaggacttgtagagtgtttgtcatttctcattaataaaagtaaaaattctgaatagcattgatcacaatttgttagaactgaaacttaggtcattctcattgtgatgatatttttttctttgtgttctctcaccagtcactcctgaagccattggcttcttgtctgctgttggggtctttattgttcttctggccgtcctcttcctcttcatcaacaagaagctgtgttttgaaacgataggaggccttcctttcctggagcatcgagggaaaagaaagcattctaaagacaagactgggattcacaaggggctgggtaagcattatgcttcaaattctcctgggcttggcaacttgctgtggtctgggtcagggtggacatgatgaatcgactttactaaagaatacattatctttatgaaagtaatgttctccctagagctcaaggagcagatgggaagag

SEQ ID NO: 7838 - DNA, 589 bp, Homo sapiens
  MAP TO CHR14.3; EXPRESSED IN ADULT LIVER, SIGNAL = 0.92; EXPRESSED IN BRAIN, SIGNAL = 1.1; EXPRESSED IN PLACENTA, SIGNAL = 1.2; EXPRESSED IN HEART, SIGNAL = 4.5; SWISSPROT HIT: P32940, EVALUE 3.80e-01; NT HIT: U77933.1, EVALUE 5.60e-01; EST_HUMAN HIT: AA247746.1, EVALUE 4.00e-58
acacagataccgcccaagacctacagacccaacaatagcatcattgataagtccttttgcatttccatttttagaagtgcacagcagagtgatattctgagccagagtcctccagaagaatgggtaagtacatgcaaattgctgagtctctgttcattgcatccaaaacgaaagtcaccagcgtgctgtataactcaagaaaatacgagagagagggaaaagcaacatcacagtttgactacaagcggtttccagtaagtactgcagccgaaaatccccaccagccaaagaatcttttgcaagatctgtataagaaagttgaaagcatgcattacctgttaggctctgaaacaagggtacaattcaggggtaatacaaaggattttcttgaaagtgtcttaattcagaacatgctccccgagttttccttctgccctggccccaagcttctggctgctctgccaggcagttctgaaacgctgtcctttgaagcagggagtttattttggggccaccgcatgaccaacgttgacaagccaaactataagatgttatacatctcagatttcctgtttggaggttgcactga

SEQ ID NO: 7839 - DNA, 598 bp, Homo sapiens
  MAP TO CHR16.3; EXPRESSED IN FETAL LIVER, SIGNAL = 4.6; EXPRESSED IN ADULT LIVER, SIGNAL = 7.2; EXPRESSED IN BRAIN, SIGNAL = 7.8; EXPRESSED IN HELA, SIGNAL = 3.5; EXPRESSED IN LUNG, SIGNAL = 2.4; EST_HUMAN HIT: AW135053.1, EVALUE 0.00e+00; SWISSPROT HIT: Q04762, EVALUE 5.00e-54; NT HIT: gi14776732, EVALUE 0.00e+00
tcctctgcattagagctggccagacaatgcaaatgtagattttccaactacacagtttattagtaaagtatctcaacaattctcagagcagtaaaaaccaaggcatccccaacactgcatgcgtgactagaccagcaagaagtcctcaacttgcaccagtccacatggcagcagggggcagtggtgagtcctccggagcccagtgcctgggcctgactggccccattgatgagtgagctggatgacagggccgctggagataggacaatcggctcacagggtcctttcatgtccgatccccttagcattccgagggagccacaggaactggggcggtcgtgcaagcgtcggcatgaacaggggtctgtttggagtctgaatgctctgctgcctctgggtggcctcagccacactgggaacgactgtctataaccctgggaactcgaagtgttccatgctcactcgggaagcactgataaccttccccataggggaaacgactcacaaacacaggactccgtcagtagtttctgcagagaaacttaaaatcatgaaaagggtcatcaatcaacagatctcagaagtcactgtgcaggga

SEQ ID NO: 7840 - DNA, 543 bp, Homo sapiens
  MAP TO CHR16.3; EXPRESSED IN LUNG, SIGNAL = 2.5; EXPRESSED IN BONE MARROW, SIGNAL = 1.9; EXPRESSED IN ADULT LIVER, SIGNAL =   2; EXPRESSED IN HELA, SIGNAL = 4.8; EST_HUMAN HIT: BF892668.1, EVALUE 0.00e+00; SWISSPROT HIT: P40600, EVALUE 4.00e-02; NT HIT: gi14774701, EVALUE 0.00e+00
agcatgaggctttatgtgggggtgtggtttgagagaggatcactaagctcaaccctgacaggcactgtacacccctggctacagagcggtctatccaagggcagggaggtctagcctggactagcaggtgccgacacgaggccgcgtggaacagccacagccacacagggcctgctgggcagcctgagcccctgacaccctggctgggtttctccatcctgccacacacgaagggagagggcgagtggcccagagagccgtgaagggctgcctgcagacgaggctcccgccccagtgaacggggaacaccagcaacagggaggagcctctcactccacggcacggctacaaaacctggtagctggagctggactgcagctggccgaggtcactcaggtgccagtggtcccccgcaggcacgagcttgcccccgatctgtgcacgtaccgtgccgtcagccagggggaacacgttcagggaggtggggcgctccttcctgctgaaatggggggcgagaggagaggaagcgatggttagagggtg

SEQ ID NO: 7841 - DNA, 503 bp, Homo sapiens
  MAP TO CHR19.3; EXPRESSED IN BRAIN, SIGNAL = 1.2; EXPRESSED IN ADULT LIVER, SIGNAL = 1.1; NT HIT: gi16162962, EVALUE 9.00e-55; EST_HUMAN HIT: R35628.1, EVALUE 1.00e-54; SWISSPROT HIT: P05128, EVALUE 2.00e-06
tcatccaaccaggagaatgcttttagggtgtttcctgcagtttttcctctcttctatttaactgacatgttgcataattaacagcctgctgatttacatagcagataaagagaggcagaatagtacagagatgcacagatctgaggcatccgagataggaaatgagagaacctgagaaggagagagatcaagctttggtggtttggtctgatctctcctgagggtgtggtcaggtgtgcatgtggggcgtgtgatgggtcaggcatgttcccggtggggtgaggagggtgtggaaggtttggggaaaggcagttgggcatgtccctgactctctatcccctccactttgatagcctcccttcgatggggaggacgaggaggagctgtttcaggccatcatggaacaaactgtcacctaccccaagtcgctttcccgggaagccgtggccatctgcaagggggtgagagccccctgactcccagcttctccaggctcacaacca

SEQ ID NO: 7842 - DNA, 517 bp, Homo sapiens
  MAP TO CHR18.3; EXPRESSED IN ADULT LIVER, SIGNAL = 1.8; EXPRESSED IN PLACENTA, SIGNAL = 1.3; EXPRESSED IN HELA, SIGNAL = 1.3; EXPRESSED IN BONE MARROW, SIGNAL = 1.3; SWISSPROT HIT: P48318, EVALUE 2.00e-16
aggtatctgtgcaatcagcaagtaactgttccagagattcagggtggtcaggcagttctaaggtaaacccaaccaaaccttcaagtagttgatgaggatgatggaagtccaatatttcactcttaccatcaaaggtgtttttgcatactgtagaagaatatctaccacttgcagcagaaaatattttgttaagtctttgtcatctttgcatagcaacaaatctagagaaaagagataaactacaaagtcagtagctaaatggcaaagaaaatttccaagagatagatagaattgtcatcattgtcaactaaagatattaaagtgccatgtcaaatagcaagtcaagtagcattttcccaaatcttatcaaccatcttcattcaatgtcccattggacaacctttatttttcaccaaaaattaaccatttaaaattaatgccattggagcaggtgtcccttcaagacctcctagagatgtattttatttgattgtactgccacaaaatgatctggtca

SEQ ID NO: 7843 - DNA, 558 bp, Homo sapiens
  MAP TO CHR18.3; EXPRESSED IN FETAL LIVER, SIGNAL = 3.3; EXPRESSED IN BONE MARROW, SIGNAL = 2.1; EXPRESSED IN ADULT LIVER, SIGNAL = 3.6; EXPRESSED IN PLACENTA, SIGNAL = 2.6; EXPRESSED IN HELA, SIGNAL = 2.7; SWISSPROT HIT: Q29116, EVALUE 1.60e-01; NT HIT: AF305426.1, EVALUE 2.10e+00; EST_HUMAN HIT: BE280280.1, EVALUE 7.80e-01
acgggtggtttagcacagactgctatagacattaaatgctagttccagacacccactagcggcgttctgggagaggcctgcgagttgttgggcactggaacacacttttctgtggttcacaccggaaacttgtaggttctgaaagtggagggggaaatggggctgcagttgggagccatcacccgctgggggctcacagtgagtgcagcctcggtcatgggctctgctgacgcacctggggaaggagacggcaggtgtgcagaggcaccgtttagctgccacaggagctgccaggaaaggcacagtgatcggatcctcccctgagcgtgcactgtctagggcagctgtcctagcttctcagcaggttgtcatctgcggctcaccagagagagatgctgccctggtgactgccactctgctggctcgggaccctggcaggttcaggagctgatggtatctggagggtgggtggcatttgttggctggagctgagagccagctcctggaggagtcacagaaggagaaggggtgggtgggtccagccaccatcctactgat

SEQ ID NO: 7844 - DNA, 502 bp, Homo sapiens
  MAP TO CHR14.3; EXPRESSED IN HELA, SIGNAL = 1.6; EXPRESSED IN LUNG, SIGNAL = 1.4; EXPRESSED IN BONE MARROW, SIGNAL = 1.4; EXPRESSED IN FETAL LIVER, SIGNAL = 1.3; EXPRESSED IN BRAIN, SIGNAL = 1.4; EXPRESSED IN ADULT LIVER, SIGNAL = 1.4; EXPRESSED IN PLACENTA, SIGNAL = 1.5; EST_HUMAN HIT: AV760642.1, EVALUE 7.00e-01; SWISSPROT HIT: P56373, EVALUE 7.90e+00; NT HIT: AF111167.2, EVALUE 0.00e+00
agcgtcatgaggagacttcccaagatggaagggacttgaggtctggaaccgagggtgaccggcagggtgggttttggagagtgagaaacgtgggcccaatctaatgttcagtggaaggttctttgtctccctaagccctaaaatccagcggtaaatcatcaataacatagcaaagttttagccaccttccctgtctcagttccttctttgttaaatgagagtcacggtgcttgccctgcaatctcagagactcagttcaaatgattgtcagccccacaggtgggggagccggtgtctgattccggctgtattgtcagggcctcagtgctcagtacaggtttggtggaggaatggacgccatagcctacaatcccaaaagctgcagccgcaggaggcagcgtggctggagaagggtcccgagccagaagagggcgctcttcagcaaaacaaggtttgaaggaaaccgccaggatgtttctgcaggatggcagatggaattcac

SEQ ID NO: 7845 - DNA, 576 bp, Homo sapiens
  MAP TO CHR19.3; EXPRESSED IN ADULT LIVER, SIGNAL = 2.3; EXPRESSED IN FETAL LIVER, SIGNAL = 1.7; EXPRESSED IN BONE MARROW, SIGNAL = 1.7; EXPRESSED IN BRAIN, SIGNAL = 1.4; EST_HUMAN HIT: BG188522.1, EVALUE 1.00e-112; SWISSPROT HIT: P47929, EVALUE 1.00e-34; NT HIT: gi16163130, EVALUE 1.00e-112
tcaggaaggaatgaactgggagtagggtctgggatggcgagtctgggccacgccttcccgctaggacgcccaccccttggacacttggctggtgctcgcctcgtcctgaccctgctgtctctctgtccctcggacccaagtgggagttgtttaggcgagagagagggtcgaaggacacccttctccgccttggccacgacttccctacccccctcaccccgccccgaacctccctgccttccaccaatagcctggctttgcccaaccctctgctccagggacctaagtcttggcgtccacgcccctgtcgcagagacgcaccttgaagccgtcgtctgacgcgatgatgagcacctcgaagggctgcccgcgctggaaaggaacgcccggcccgcgctcctcgcggccccaggagccttgctccttgctgttgaagaccacctccgacgtgtccagccgggggttgaaatgcagggcggcatcggagccctgctcctccccgcacagcaggtttacatggaacctggaagagggggatggtggccgtcagggctcagaaaccacccagaccaagaa

SEQ ID NO: 7846 - DNA, 594 bp, Homo sapiens
  MAP TO CHR19.3; EXPRESSED IN PLACENTA, SIGNAL =   2; EXPRESSED IN HELA, SIGNAL = 3.3; EXPRESSED IN HEART, SIGNAL = 2.1; EXPRESSED IN LUNG, SIGNAL = 3.9; EXPRESSED IN FETAL LIVER, SIGNAL = 2.9; EXPRESSED IN BONE MARROW, SIGNAL = 2.2; EXPRESSED IN ADULT LIVER, SIGNAL = 2.3; EST_HUMAN HIT: BG007072.1, EVALUE 0.00e+00; SWISSPROT HIT: P54545, EVALUE 7.60e+00; NT HIT: D86566.1, EVALUE 8.90e+00
ctagggactgccacaggttccatacgagtgtgatagtcgctgccctgggttttggtttctattggtctgaaaattccttaccagttaagtggctgttactcctcagtggactcagaggacaagctggccacatctgcaggggagtgaacttaggttgtgtgatggactcttgagtctgcaagatgccaacttggctgcatccaaggctcccttgtggcacagcacccagggctgctctgtgagtggctgctgcctgcaggggctggagagaggaggaagggtgtgcacagtgaggagatgaggcatgctctgtgtcttttctctccagcacctccatgtactcgcctgtcagtgtaagagttgggctgcttgacttctgtgggttatttactttgtggaagttaggtggaattaggggcaaacaagaacatggttctcacaaagtgattatgcctgccaagttttttgcttccttagctgtagtcgtctgaagtggtgtgggtttcattttattctgctcctttatattctgaaagttactgagatgagagggtgacagctatttacttccaagcatccctctccagcagattc

SEQ ID NO: 7847 - DNA, 501 bp, Homo sapiens
  MAP TO CHR14.3; EXPRESSED IN HELA, SIGNAL = 2.2; EXPRESSED IN PLACENTA, SIGNAL = 2.4; EXPRESSED IN HEART, SIGNAL = 2.7; EXPRESSED IN FETAL LIVER, SIGNAL = 2.5; EXPRESSED IN LUNG, SIGNAL = 2.6; EXPRESSED IN ADULT LIVER, SIGNAL = 2.9; EXPRESSED IN BRAIN, SIGNAL = 2.5; NT HIT: gi14752752, EVALUE 6.00e-90; EST_HUMAN HIT: AA461242.1, EVALUE 9.00e-90; SWISSPROT HIT: P17081, EVALUE 2.00e-21
tttttctgactgatggctcctttagttctagtagagaaagaactaccagattccagggttgaggaagaaacgggatcccagtgcgctgtagtggactcttacctgaaatctgaccttggaactacatgggacacaccttacacaggctgtacaaacccttgtctgctcttcccacaggaggactacaaccagctgaggccactctcctaccccaacacggatgtgtttttgatctgcttctctgtcgtaaaccctgcctcttaccacaatgtccaggaggaatgggtccccgagctcaaggactgcatgcctcacgtgccttatgtcctcatagggacccaggttaaaatgtgggcgatggcagggtggagcgggctgcaaaaatgggaagaccctttaggtacctcgtgaacatcctattctgccaaacgctatggaagtgtgtctcagacatgtcaatcctatgaacagaagttcttaaggtgtgcgtgatgatttagc

SEQ ID NO: 7848 - DNA, 541 bp, Homo sapiens
  MAP TO CHR14.3; EXPRESSED IN BRAIN, SIGNAL = 3.9; EXPRESSED IN ADULT LIVER, SIGNAL = 3.5; EXPRESSED IN PLACENTA, SIGNAL = 2.9; EXPRESSED IN HELA, SIGNAL = 3.7; EXPRESSED IN HEART, SIGNAL = 2.8; EXPRESSED IN LUNG, SIGNAL = 3.4; EXPRESSED IN BONE MARROW, SIGNAL = 4.6; NT HIT: AF033272.1, EVALUE 2.00e+00; EST_HUMAN HIT: BE254921.1, EVALUE 3.00e+00; SWISSPROT HIT: P32759, EVALUE 5.00e-09
ttagcagaatcactgactgggtaagtgaatagatggatacatatggggttaagtaacagaataaaaaaaattggtcccaacataaaggcctggtttgtccctcctatgggtggcttgatgattctataattttccttgcaggtcactcataaggccatgatgacgctggatgagaggggctctgaagctgctgcagccaccagcattcagctcacccctgggcctcgcccagaccttgacttcccacccactctgggcactgagttcagtcggcccttcctggtgatgactttccacacggaaacaggaagcatgctttttctggagaagattgtaaacccactgggataacgccccctcagacatgctgggtgactcagagagaacagaatggcctacacagcagggagcttctattacagcctcaagtttaaggaaaagttgcatatacctgagttcttttgcttggtttccacaggaaccaagtgggtaaggatagtaatggtgatcaaggctgttctccctgcacacaggcagtaat

SEQ ID NO: 7849 - DNA, 560 bp, Homo sapiens
  MAP TO CHR14.3; EXPRESSED IN HELA, SIGNAL = 1.3; EXPRESSED IN PLACENTA, SIGNAL = 2.2; EXPRESSED IN FETAL LIVER, SIGNAL = 1.1; EXPRESSED IN LUNG, SIGNAL = 1.4; EXPRESSED IN ADULT LIVER, SIGNAL = 1.3; SWISSPROT HIT: P05997, EVALUE 1.20e-01; NT HIT: AJ243122.1, EVALUE 0.00e+00; EST_HUMAN HIT: BE394876.1, EVALUE 0.00e+00
aagaaatggctgtgcctgtctgaagcacctctgttggggttcccttgttgagcccacactgtggggaagataggatgctcacaatcccacaggcccagcaggaccagggaagcaatgccggtaagggtcatggagagaagaaggatgccccggcggccaaatcggtccacggtgacccccaggaagacacaggccagggctgcggtgccgctggccagcagagagcacaggtagaagtccgatgggctccctcctcctcccacaggctggtagcagtggcgaatggcatgggcaatgaagctgtgagaaggggtggggaagcaacgaacagagcctgaatcccctcccgcagccttctacagtgctgatggtcctccgcaggggtccccgggccttcccacccagccagcccccattccagctactggcctggccctcagcccagacacccaggctcacttggtgaagcccaggataagcagatttttccagatgttgcggtagttgaggagggaagcaaaggaaaaggaggatgttgcagggagagggcaggtattctc

SEQ ID NO: 7850 - DNA, 536 bp, Homo sapiens
  MAP TO CHR14.3; EXPRESSED IN ADULT LIVER, SIGNAL = 3.8; EXPRESSED IN BRAIN, SIGNAL = 5.3; EXPRESSED IN HELA, SIGNAL = 5.2; EXPRESSED IN FETAL LIVER, SIGNAL = 7.1; EXPRESSED IN LUNG, SIGNAL = 2.6; SWISSPROT HIT: O75360, EVALUE 5.00e+00; NT HIT: gi14784202, EVALUE 0.00e+00; EST_HUMAN HIT: AW167476.1, EVALUE 0.00e+00
aggcattgaggggatagatgaatactaaatggttgtctgggtcaatactgccttaatgagaacatttacacattctcacaattgtaaagtttcccctctattttggtgaccaatactactgtaaatgtatttggttttttgcagttcacagggtattaatatgctacagtactatgtaaatttaaagaagtcataaacagcatttattaccttggtatatcatactggtcttgttgctgttgttccttcacatttaagtggtttttcatctttcctccctcctcccacagcctggctatacagtgcatccttgaactgtcagcccacagcagcaatatgcttattctatccacatccctaacatcatgcattcacaaggtcaaagttctggtccacaaacccttccctatagaagttcaatggctgcgaaagaatttgtagtaaaccaggcctcccaggatggcgagctccagtaagatgataatggaaagcagcagcttgttggttgtcactctacaaagagaagcaaagtgggg

SEQ ID NO: 7851 - DNA, 532 bp, Homo sapiens
  MAP TO CHR18.3; EXPRESSED IN ADULT LIVER, SIGNAL = 2.4; EXPRESSED IN HELA, SIGNAL = 2.8; EXPRESSED IN PLACENTA, SIGNAL = 2.9; EXPRESSED IN HEART, SIGNAL = 2.5; EXPRESSED IN LUNG, SIGNAL = 2.6; EXPRESSED IN FETAL LIVER, SIGNAL =   4; EXPRESSED IN BONE MARROW, SIGNAL = 2.6; SWISSPROT HIT: P54737, EVALUE 7.50e-01; NT HIT: J03050.1, EVALUE 5.10e-01
acatgataggagggctgcacgcttagaaccggggctgcacacggggctgtggacgtcacagcctcgtcatcagagggggcatctggactcctagcagagcgggaagagaggaattcccggcctgtggagcagtgctcctggaggcggcctcgacctgctcctaggacccatctgccggctgctgctcctctgtctgggagactctctcacctgagcgtgactcggtgtctgcagcgtcactgcagtgtgtgaaggccagtacagggacccttcctctgtgctcctccacagccaccatgcgggttttgttggatgtgttgatggagtgcacgtggtacccactgtcagggtgctctctgcaagtgccgcacccccaagcgacatttattttgtactgaaataacatctctagtgtctactatatgagcttgtatctcatatgctcccatatatacttgtttcacacttaaaatctcacatgtagtaacggttgctttcaataagtacacatgggcatgatttcctgtaaagg

SEQ ID NO: 7852 - DNA, 541 bp, Homo sapiens
  MAP TO CHR16.3; EXPRESSED IN ADULT LIVER, SIGNAL = 1.4; EXPRESSED IN HELA, SIGNAL = 1.7; EXPRESSED IN PLACENTA, SIGNAL = 1.3; EXPRESSED IN BONE MARROW, SIGNAL = 1.4; EST_HUMAN HIT: BE264766.1, EVALUE 1.00e-45; SWISSPROT HIT: Q02067, EVALUE 6.60e+00; NT HIT: gi14779206, EVALUE 9.00e-46
ctgtacacatgttgggctggggccagaagcgggtgggctgagccaattcttcacctctgaaaaatgcagcggcttcggagaccaggtaagcgcatccagaaagcagacaccactggcgacttttgaaagacaaacagcctggcacgcagccgccttcaggcagagctgtcacactcaagggttcccatctgctagtcttacctttttcagaaacggcgacggatcccaccacaactaaatccacgaggactctggagtccaagcctatggggacactgtagttcctcacaccctgcacacagagatacggattggaaaacttcaactccagctgcttcctcattttataattcatgatcaaagtgcactcagggtttgaatcaacctcttggacaaaacagatgcaggcacacgcaacaccggagatgtggcgtttcaggagaagccgcattccagaaaccgctttagggcacagtttccccagtctctttcccagaaaggcggccaagaggaactcacagcacaaattcataggctgcca

SEQ ID NO: 7853 - DNA, 577 bp, Homo sapiens
  MAP TO CHR14.3; EXPRESSED IN ADULT LIVER, SIGNAL = 1.6e+02; EXPRESSED IN HELA, SIGNAL = 4.4e+02; EXPRESSED IN HEART, SIGNAL = 1.2e+02; EXPRESSED IN FETAL LIVER, SIGNAL = 1.3e+02; EST_HUMAN HIT: BI462196.1, EVALUE 0.00e+00; SWISSPROT HIT: P40429, EVALUE 3.00e-73; NT HIT: gi14591905, EVALUE 0.00e+00
ctggtgctcgatggtcaaggccatctcctgggccgctggcggccatcgtggctaagtagttactgctgggccggaaggtggtagtcgtacgctgcgagggcatcaacatctctggcaatttctacagaaacaagttgaagaatctggctttcctcggcaagcggatgaacaccaacccttttcgaagcgcctaccacttccgggcccccagccgcatcttctggccgacagtgcgaggcatacatgtgcgccacaagaccaagcgaggccatgcctccctggactgcctcaaggtgtttgacggcatcccaccgccctacgataagaaaaagcggatggtggttcctgctgccctcaaggtcgtgcgtctgaagcctacaagaaagtttgcccttctggggcgacaggctcaagaggttaggtggaagtaccaggcagtgacagccaccctggaggagaagaggaaggagaaagccaagatccactactggaagaagaaacagctcatgaggctacggaaacaggccgagaagaacgtgaagaaaaactgacaaatacacagaggtcctcaagaccc

SEQ ID NO: 7854 - DNA, 536 bp, Homo sapiens
  MAP TO CHR16.3; EXPRESSED IN ADULT LIVER, SIGNAL = 1.5; EXPRESSED IN BONE MARROW, SIGNAL = 1.2; EXPRESSED IN BRAIN, SIGNAL = 1.9; EST_HUMAN HIT: AL528102.1, EVALUE 9.00e-90; SWISSPROT HIT: Q10398, EVALUE 2.60e-01; NT HIT: gi16165513, EVALUE 6.00e-90
ctgcagctgagaatagcacggcaggcctggctggagcccacacaggacagccctgggacagtgaggacccagccccgccgctgcacacacctggatgtggccgtggtggggccctttgtggccgtacatgcactccactgtggcagccttcctctccatcaggtggatcctgaacagaggcttgaatctcatagggtcatcgacgtgggggtcatggggaggcaggtacatccacccgatgatgaacaggccgtccacctacaggaggagatgggcaaaggtccatgagtggctcccgggccagagcaagggcggccccgcacggctccccgcactgcaatggcacagagaagctcctgccagaccagcacatgggacctgcacgcccaccctcgaggtgcctcgaatcccagcactatcttccagctctgagatgcaggtggacaccaggaggaggcagaataatccagaaagtgacacggggtgaggtgccgaccagacagagggaaagggggtgcatctcccaacaggaaaga

SEQ ID NO: 7855 - DNA, 599 bp, Homo sapiens
  MAP TO CHR14.3; EXPRESSED IN FETAL LIVER, SIGNAL = 4.7; EXPRESSED IN BONE MARROW, SIGNAL = 4.3; EXPRESSED IN BRAIN, SIGNAL = 5.2; EXPRESSED IN ADULT LIVER, SIGNAL =   5; EXPRESSED IN PLACENTA, SIGNAL = 2.8; SWISSPROT HIT: P39929, EVALUE 4.00e-05; NT HIT: gi14750838, EVALUE 5.00e-97; EST_HUMAN HIT: AW863668.1, EVALUE 3.00e-99
ctttcctccctagaatgccccaggcagcgaaagaattttataggaagcaaggggcagatggatgtctagccatcacaagtatctatactgcaaattcacattctgagaggctttaaagtttaaagtgtgatagcaagccactcttcccagtgcctgggtcccctccacccctccccccgtacccacatgtcctggtaggccttcttcatgctttgggcagcaagctccatggtacgaaggacttctgcattggtagtggcattctcaatggcctcacgctgaaactccagggtggataatgtcccgtcagtttgtgccagctgctgttcgaatcttttcttcctccgcaaagcctgtagggcagctgacccagcccataccctgaacatcaagagtcagaagcacctgcttcccatctgggccctccccataggcttgtttccctcattacctctcttattcttggtcccatacttcttggctgtttgtagctcctgttgaatcttctgctccaaaaattcctgtttcttgatcagtatcttctctgtctccttcagtttctgtattgcttcttcaggggttggccctttctccttctt

SEQ ID NO: 7856 - DNA, 544 bp, Homo sapiens
  MAP TO CHR18.3; EXPRESSED IN FETAL LIVER, SIGNAL = 1.5; EXPRESSED IN BONE MARROW, SIGNAL = 1.4; EXPRESSED IN ADULT LIVER, SIGNAL = 1.8; EXPRESSED IN PLACENTA, SIGNAL = 1.5; EXPRESSED IN HELA, SIGNAL = 1.1; SWISSPROT HIT: P28527, EVALUE 8.80e+00; NT HIT: AL163248.2, EVALUE 5.20e-01; EST_HUMAN HIT: AA731592.1, EVALUE 1.90e-01
tgggattattgatgagaaaaggtactctgaagacagtttctttatgagtaaaataagtttagcatgtgtgtgtatttggaggtataactttaagttattcacaagattcttcttataacttgtgagctatctgagggtgtaacagctttcacaaggtcaggaatcagggagataatggctaggaataggtgcgtatgcaggcagagttggttatgtgtggaggggaggtatcagaggagacaatgaggtaaactgaaggattcttctgctgtttcattaagaaggataagtagctgtattagctaggctcaataaaggcttagctgatacgaccagaaaagtagagaataatttattcttctttcatgacagaaagtgaggcagctctgctccatgaggtcattcagggacatgagtcccacccagcttggagcccttagaatttacacggtcaaaactgattcatccccattgccttttcctcaccagaaaagtgagaaaagtaagtctgaaccaggtaatttccttctgggcaatttgttgt

SEQ ID NO: 7857 - DNA, 529 bp, Homo sapiens
  MAP TO CHR14.3; EXPRESSED IN BRAIN, SIGNAL = 1.3; EXPRESSED IN ADULT LIVER, SIGNAL = 1.1; EXPRESSED IN PLACENTA, SIGNAL = 0.83; EXPRESSED IN FETAL LIVER, SIGNAL = 0.92; SWISSPROT HIT: Q01955, EVALUE 1.70e+00; NT HIT: gi14736676, EVALUE 2.00e+00; EST_HUMAN HIT: AA781931.1, EVALUE 2.90e+00
accgtcaacattgtcactgccaccatcatcatgatcatgaagatcatgccttctctttctttaggactgaaactgcctaacttaatgaggatagattccactcatatcatccccatctccccacctcagaacctgggtcaggcatttggtccacctgagttgcagatcagatgcccatcagatgtcccgggaactcgtccctggtttggcacctgctgaaggccctgctgcagctgccttttctgcctttgaactgtaagataggggctcaagtgtcccccttggagtatagccaggggagtccacccctccttgtgggcctggaaatcccctgcagccgggttccagcaggaagatccagtgatttgcataaggcagtcattttctgggcccagatggctgaacccccagccctcccccatcaagatgcacatccctcctgctctatggtccagtgattaaagcaaacatattcaaagcaacgagttgagccaaatcaaaggaaagacgaagaatgcagaaaacccca

SEQ ID NO: 7858 - DNA, 509 bp, Homo sapiens
  MAP TO CHR14.3; EXPRESSED IN FETAL LIVER, SIGNAL = 1.5; EXPRESSED IN ADULT LIVER, SIGNAL = 1.1; EXPRESSED IN HELA, SIGNAL = 1.2; EXPRESSED IN PLACENTA, SIGNAL = 0.91; EST_HUMAN HIT: AI800073.1, EVALUE 5.00e-14; SWISSPROT HIT: P34373, EVALUE 6.20e+00; NT HIT: AJ310932.1, EVALUE 2.00e-09
aaacctctcctgcaaaatgctttttcaggtggcaacgtaccaattctaacaagtttgtgggagtaatggggaggagggctaaccctctattttctttcagaaaaagggttaggcacaaggagctctaaaggcttgtccgaagtctgctgaaaactcacaaaccactcagaaccaggtttcccacacccaattaattccaagtggtactgtatccgattacccccattttccaagagatagtttattttttcccctcttttcccctccccactacactttccacttagccctttttgaactgcaaaataacctctcaactcccctcaccagaccattctctacagagcaaattcatctacgagatccaagacgcaactcccaccgccaggcggtcgcctcagaagggtaagcagaaagcatgcccacttggccacttttacaacttatttctgctcagaaatgcaccaactcaactacccggtagataaggcaccagctagcagagacct

SEQ ID NO: 7859 - DNA, 517 bp, Homo sapiens
  MAP TO CHR19.3; EXPRESSED IN ADULT LIVER, SIGNAL = 1.6; EXPRESSED IN HELA, SIGNAL = 0.99; EXPRESSED IN PLACENTA, SIGNAL = 1.1; EXPRESSED IN LUNG, SIGNAL = 1.7; EST_HUMAN HIT: AA399955.1, EVALUE 0.00e+00; SWISSPROT HIT: Q9UKR3, EVALUE 5.00e-33; NT HIT: AF135024.2, EVALUE 0.00e+00
tggagagaaagtcaggctcctgcttacctatcagcaacatcctcattttgtgaactcttctgttaacccccagtggaggatttggtacttcctgagaaaataatgtcacccctttgccctaattcatctccacttggtcaagaatagcaactgccataggtcggcaaattcatcttcagttcctggtcacccagggcaataatccgacccttaccccaaacccagaaaccacaaccccagggctcctctgccccctggatcccagttttctaacaatctctcttctttaccaggtgtctcccaggagtcttccaaggttctcaacaccaatgggaccagtgggtttctcccaggtggctacacctgcttcccccactctcagccctggcaggctgccctactagtgcaagggcggctactctgtgggggagtcctggtccaccccaaatgggtcctcactgccgcacactgtctaaaggagtatgtgggggccgggggagcatggggtagggatgag

SEQ ID NO: 7860 - DNA, 585 bp, Homo sapiens
  MAP TO CHR14.3; EXPRESSED IN ADULT LIVER, SIGNAL = 8.4; EXPRESSED IN PLACENTA, SIGNAL = 7.8; EXPRESSED IN LUNG, SIGNAL = 7.9; EXPRESSED IN BONE MARROW, SIGNAL =  11; EST_HUMAN HIT: BI907971.1, EVALUE 2.10e-01
cttctgtctccagcctccagcccagggtgtgcgcacctgcagctggcctcagtgacactcgctgcagcggaggtggctccggggctccttttacctttgttcctttctttaagcattcaacttcttttcccactgccattaaaatcatattaagtaattctgaagtgcttcccataaacaccaaatgagaagtacaaccgtgagaacaattacctacctgtgtggaataggttattattttaatttgtaatctgagtgacattcattttagagaagagagtattggggtgtgcaccctccccacatgccccatttactgaacaaagagtgagccacttttttcgtcttccttaataggtagctttaacctcactgccttgttaattatgatacctgagggtaaattcctgtttactggcttttaaacattacaatttttatctgccatcggacacaaagagagagctaagttcaaacttattttatggcttatagaagctgaaagtcagacaaggttaatattgtcagatgatgataaatatgtggtaattttaactttaaagtggacagccctactttgacggt

SEQ ID NO: 7861 - DNA, 566 bp, Homo sapiens
  MAP TO CHR18.3; EXPRESSED IN FETAL LIVER, SIGNAL = 1.8; EXPRESSED IN LUNG, SIGNAL =   2; EXPRESSED IN ADULT LIVER, SIGNAL = 2.7; EXPRESSED IN PLACENTA, SIGNAL = 2.6; EXPRESSED IN HELA, SIGNAL = 2.3; SWISSPROT HIT: gi12643568, EVALUE 3.20e+00; EST_HUMAN HIT: W25820.1, EVALUE 5.10e-02
gtttctggctgcatcctctcttccatgtgatctctccatttagtgcagtgctaggcccaactcagtaagtacaggatagatggttggataaacacaacgttgttagtttgtacattaattccatttgccagtgaaattttaagccctggttttgtccagaggcctgacccccaacctggaaaatggcaaacccaattccagacaaattcttaaccccagccctgactcctgcagccatgatgacagcgagatgcaccagaagcaccaccataggttcaccgaaaggacccatcaaaggcaaccgatgcaagaatagtcccagtggtgctggaaaaataaagacaatggaacaactgattaattcaggagagaacattgtgccactgcctattctctgactctcctggcagctggggttcagccttgcccacagagtgttccttaagagcaaggactgaagtcacttttgggttccaagactaaatttcacctccaaaatttagattctggttaatttgcaccaaagtgggagggctacacagaccccaggggtcccaatgactatg

SEQ ID NO: 7862 - DNA, 585 bp, Homo sapiens
  MAP TO CHR18.3; EXPRESSED IN HELA, SIGNAL = 1.1; EXPRESSED IN FETAL LIVER, SIGNAL =   1; EXPRESSED IN BRAIN, SIGNAL = 1.2; EXPRESSED IN ADULT LIVER, SIGNAL = 1.3; SWISSPROT HIT: P22813, EVALUE 2.90e-01; NT HIT: AF188125.1, EVALUE 3.00e-64; EST_HUMAN HIT: AW896708.1, EVALUE 7.00e-20
ctgttcctgtagtggggagcaccctcgctccacttgtcatagcctattccctgtccacagggaggttacccataactaggggcctagttgtgtcttccctattgaaggtgacctctcccagggcttattgacaaactttctttatctgatgcagcaaactgagttttctaaatacatttccaggctttttttttaaacttgaaatgtcactggatcttactttttacaacaatatggagtagattgtgaatttctttcttccttgcaggtgttcgatgccggagactattccttgttgtgttcaggtcctagtgaaaatggacagacatggaccgggggggactttgtctcatcagataaagtcatcatttggacagaaaatgggcaaagttatatttacaaactacctgccaggtatgcagcaagtaataaattaggacagtcatcaaaagtaaaagattcagaatttagggtacaacctgactttaagaaaatgtatgtattataaatatttaactttgataaaacacttcagaacttcttaagttagatttttaattccaatttaacttctaagtgcaaaaa

SEQ ID NO: 7863 - DNA, 547 bp, Homo sapiens
  MAP TO CHR14.3; EXPRESSED IN LUNG, SIGNAL = 1.9; EXPRESSED IN FETAL LIVER, SIGNAL = 2.2; EXPRESSED IN BRAIN, SIGNAL = 2.7; EXPRESSED IN ADULT LIVER, SIGNAL =   2; EXPRESSED IN PLACENTA, SIGNAL = 2.3; EXPRESSED IN HELA, SIGNAL = 2.2; EST_HUMAN HIT: BI829340.1, EVALUE 3.00e-06; SWISSPROT HIT: Q9UKJ8, EVALUE 2.00e-33; NT HIT: X87207.1, EVALUE 8.10e+00
aataaacgtggcctgctctgggagtttcagccagttttaccttttcagattcttgatctatctcttccccttcagtcttacatctactagcctctcctggtctttcttctgacacaagcagagatactacatgctcaaatttggaagaagcctccaggtgtttgatttcgtaagtcaagtcatccacctgcagcatgccatgcagacctccacggcaggtgtccaatgtggccgcagacccaggaaccccttccaggtagcagtcatagtaacagtctcgtgggacaaaagggtagttctcctgcatggccccttggtcattatcagtaaaaacaggtaaatgtctgggcatcatgttcttcttgagcttcatgtgaatcacgtgtctttggccccggaaacgcatgctgtaagagagctggtctggcatctcaactccacccctcttgtggggcactttcctggggatcacaatttctgaggaagtgaagcgccatcctggtgggtcatgaaaacaatagacctgggacaagagtgcccagaggac

SEQ ID NO: 7864 - DNA, 561 bp, Homo sapiens
  MAP TO CHR18.3; EXPRESSED IN BRAIN, SIGNAL = 1.1; EXPRESSED IN ADULT LIVER, SIGNAL = 1.1; EXPRESSED IN PLACENTA, SIGNAL = 0.96; EXPRESSED IN HELA, SIGNAL = 0.88; EST_HUMAN HIT: BE926243.1, EVALUE 2.00e-01; NT HIT: gi14602241, EVALUE 2.10e+00
tttccgaaaacatctccaccagctgaagtacaaagtacatactattaaacttttgagttgtgtcgttatctagagaagatgggtcttgttaaaatgtaatcttttcttcagcaattaacttattactgcctttagcacacttaggtaaattaacacaactatattacagatatgaatatttatctaggatgaccaataaaatgaggagagttggtctgcctacctcacactggtcatgttgggagctccagaaattgccaaacagggtatgagggaaatcttgaggtgaacagaaatggtgaaacgtagaagaagggatgccatctcacagtggaggggaacaatcttgctgtctctaggagagtaaaggtgattcagcttcacaggggttctgacctaggatccagtgtaggtctccataaatgtggtgagttaataatgatgctttctgggatcttcttgttttcaatgatgggcactgtggaggcaccaactgtagcagaggacatgccaatagaccagaggcaatagcatcatcacacaaaggtcaggagatgagcc

SEQ ID NO: 7865 - DNA, 588 bp, Homo sapiens
  MAP TO CHR19.3; EXPRESSED IN ADULT LIVER, SIGNAL = 1.9; EXPRESSED IN PLACENTA, SIGNAL = 1.8; EXPRESSED IN HEART, SIGNAL = 2.9; EXPRESSED IN LUNG, SIGNAL = 1.7; EST_HUMAN HIT: R44214.1, EVALUE 2.10e-01; SWISSPROT HIT: O15354, EVALUE 6.60e-01; NT HIT: AF032095.2, EVALUE 2.20e+00
aggctggaccacaggatatgtattgggtgccctccccacccacttggagtcagctagaccccaccttccttcgcagtggataagccctggctggggttgggggttccccgttgagcaggcaccagccgaaggaggccccccagtggccgtggtgttacggtgaggtggacggagagcaggcagtgaccacggggctcccgaaaggacagggtgaccttcgagtcactacccatgtgcatcgttccaacagcagcaaagacactcccggagcaggcagcaaagccaatttcaggtgaaagatgagttaagtgggcagaaatgagctccgggctgagaaatttctgcatgacaaaaattccagggagcaggacagaccttaggagcagctgagcaagagcctctggaaggactcagggggataggaggggagggaagggatgaaaaacaagatcgggacatgcaataatgtggtgaatgggggcaggaagggggcaggaagatactggggtctgcacaatgcggggagaggggttttccctgcccctcaatctgaaatggcagcccctgtctcttgcttttccccctacc

SEQ ID NO: 7866 - DNA, 565 bp, Homo sapiens
  MAP TO CHR14.3; EXPRESSED IN PLACENTA, SIGNAL = 1.7; EXPRESSED IN HEART, SIGNAL = 1.9; EXPRESSED IN FETAL LIVER, SIGNAL = 1.3; EXPRESSED IN ADULT LIVER, SIGNAL = 1.8; SWISSPROT HIT: Q62415, EVALUE 7.00e-34; NT HIT: AB018314.1, EVALUE 1.00e-109; EST_HUMAN HIT: F12232.1, EVALUE 0.00e+00
ctgtacagagacacgggcagctagtttcccagtaagtaacctgagtgctcacccccagcaggtttttgggcacatagccctcccggtctccaaggcgagcccaccaccactcagtctcgctttcgtccttgcgcctcaggatggtgagggcgtccccttcgtggaaggacagctcgtcactgttctgggcctcgtagtcccacagagcatacgccacacctttgttcatcacacccagcttttcctgcacccctggagccagagagcaatggtcaggcctcagcagagggtggcctgcagcaagggaccctgctcgaggaacaggacacagtcgtgctgctgccgaggctgctctcagcaggccccacagaggccagcgagggagatgagacactattgaagactagggcccccacccgatacctcccctgcccggcccagctgctgctcctgctgccggccctttctaagtcctgcaggacagacaggacaaacgagctcctgagccccagggcaagagtgtgctgttcttaaggtgacgcttagcaatcacagccagaacaga

SEQ ID NO: 7867 - DNA, 511 bp, Homo sapiens
  MAP TO CHR14.3; EXPRESSED IN FETAL LIVER, SIGNAL = 3.3; EXPRESSED IN BRAIN, SIGNAL = 1.4; EXPRESSED IN ADULT LIVER, SIGNAL = 4.2; EXPRESSED IN PLACENTA, SIGNAL = 2.6; EXPRESSED IN HELA, SIGNAL = 5.6; SWISSPROT HIT: P46778, EVALUE 5.00e-16; NT HIT: L38826.1, EVALUE 1.00e-32; EST_HUMAN HIT: AA640445.1, EVALUE 5.00e-39
actgttcaaaaatgccccacacatgttatcatggtattagggactgaaatgggatataagttgaaaagagactaagggatttttgaaattaaatgttaggcaatttttaaaaataaaagagggccaataagcccaggccttacacctgcactgtggtgaggtgctcaagattgcagaggcaaacctgtgcaaagcttctgccaactcaaggcattcactgaatgccccacacatgttaccacggcaaaactggaagagcctatcaacagtgttcttggacacaaacaaattaaaggcaagattcttgctgagagaattaatgtgtttattgagcatattaagcagtctaagggccaagataacttcctgaagcatgtaaaggaaaaggatcagaaaaagaaggaagcaaaagagaaaagtacctgaagtgccagccttctccactttgtgaagctcactttgtgagaaccaatggaaagaagcctaagttgcttggaacctattccctacg

SEQ ID NO: 7868 - DNA, 508 bp, Homo sapiens
  MAP TO CHR19.3; EXPRESSED IN BONE MARROW, SIGNAL =  15; EXPRESSED IN ADULT LIVER, SIGNAL =  24; EXPRESSED IN FETAL LIVER, SIGNAL =  25; SWISSPROT HIT: Q90705, EVALUE 3.00e-44; NT HIT: gi4503482, EVALUE 0.00e+00; EST_HUMAN HIT: BG752681.1, EVALUE 0.00e+00
gggcagtgattctgaagaggatgtttcctgacagccccgacgcagcagtcagggccttgtggaagccaccagtctgccctgggacctggcaggagggccaccaactccgggagggacctgccctggccctccagggtccagcacaaccatccctgcggcctgctgccgccttctgcttcttccagaacaatcttgatgatgggccgctacgtggagcccatcgaggatgtgccttgtgggaacattgtgggcctcgtgggcgtggaccagttcctggtgaagacgggcaccatcaccaccttcgagcacgcgcacaacatgcgggtgatgaagttcagcgtcagccctgttgtcagagtggccgtggaggccaagaacccggctgacctgcccaagctggtggaggggctgaagcggctggccaagtccgaccccatggtgcaggtgggcacggagtgcacctgctgggagcagacaccctgaggggggacggcttgtgtcctgagtt

SEQ ID NO: 7869 - DNA, 502 bp, Homo sapiens
  MAP TO CHR18.3; EXPRESSED IN BRAIN, SIGNAL = 4.4; EXPRESSED IN ADULT LIVER, SIGNAL = 3.4; EXPRESSED IN LUNG, SIGNAL = 4.1; SWISSPROT HIT: P07492, EVALUE 4.00e-42; NT HIT: gi14760770, EVALUE 0.00e+00; EST_HUMAN HIT: BE791738.1, EVALUE 0.00e+00
tgcatttaggaggaagcagcacaaacacaattagctttaaatttcttttaaatttctcattcattccctttggttaaatttgtggcattctgagtgtttttgtttttgtttttacagggcacttaatggggaaaaagagcacaggggagtcttcttctgtttctgagagagggagcctgaagcagcagctgagagagtacatcaggtgggaagaagctgcaaggaatttgctgggtctcatagaagcaaaggagaacagaaaccaccagccacctcaacccaaggccctgggcaatcagcagccttcgtgggattcagaggatagcagcaacttcaaagatgtaggttcaaaaggcaaaggtaaaagaaacatacatgcaagatggggtgggaggtatctggggagaggtggaaagagggcaagttcaaaggaggaagaatagaattgcttatgatataaaccttcacagtcactacattaggctaacacatgctaagcaca

SEQ ID NO: 7870 - DNA, 550 bp, Homo sapiens
  MAP TO CHR14.3; EXPRESSED IN ADULT LIVER, SIGNAL = 5.6; EXPRESSED IN BRAIN, SIGNAL = 2.6; EXPRESSED IN PLACENTA, SIGNAL =   4; EXPRESSED IN HEART, SIGNAL = 2.8; EXPRESSED IN HELA, SIGNAL = 3.2; EXPRESSED IN LUNG, SIGNAL = 6.1; SWISSPROT HIT: O43708, EVALUE 3.00e-15; NT HIT: AF053542.1, EVALUE 0.00e+00; EST_HUMAN HIT: BG697002.1, EVALUE 1.00e-122
agtgatggtgctggaagaggagaaggaggagtttgctggccctgtcccctctggtccaggggtcctgggccctctccctgcctcactgctcccctctggacagctggccatcattgagtatctagaggagatgcgtcccactccgcgacttctgcctcaggacccaaagaagagggccagcgtgcgtatgatttctgacctcatcgctggtggcatccagcccctgcaggtgtggcacttgtacacttgcacccttgcacacctgacacactcttacactcacacattggctgtgagctgcccagtgtgggggcgggggtgtcaagggagggagggggattctcagggcctctgacctggaccatgtgaaagaagggggtgaagatcgcaatctcagaattcagccccccagcgggtcccccgctgcgttccgagaagctctagtttccaaggacgcatgtacaggtgcttggggtggggaaagggccagaatggcaggggagagactgagcaggccccagtccaggcctcctgcctttaaccagagcag

SEQ ID NO: 7871 - DNA, 504 bp, Homo sapiens
  MAP TO CHR14.3; EXPRESSED IN ADULT LIVER, SIGNAL = 1.3; EXPRESSED IN BRAIN, SIGNAL = 1.3; EST_HUMAN HIT: BF185486.1, EVALUE 1.80e-01; NT HIT: AE007641.1, EVALUE 4.80e-01
taaacagaagttggtgggggggcggtatgtgaagagctgagacttgggggtgggcctaagggaaagggactcagttcttcctaagggaaaggccctagatctgtctctaatctggacaaagaaattcgctggccacaaagagacagcatgggcttggaggcagatcactgagtataggatttaaggattcaggagtctgcttcttgaccttgttcaatgcctttccatttgcaacaactcgtgtacctacctgcatggacggagggaaagaaggaggagtggggaggaatcaaaaatagtgaaattaggaacttcagtagcaaaaagggacagaaaaaaaatcttttgctccaaggcatctagaacatgtgagataaatatgttctgtcccttagttgaagacatgttgaccctactttcacccccatcctcttttctcatccctctagcaatactttcccttattctaattccattaaacatccaaagacgtttcagatggca

SEQ ID NO: 7872 - DNA, 586 bp, Homo sapiens
  MAP TO CHR19.3; EXPRESSED IN FETAL LIVER, SIGNAL = 5.2; EXPRESSED IN ADULT LIVER, SIGNAL = 4.3; EXPRESSED IN PLACENTA, SIGNAL = 4.7; EXPRESSED IN HEART, SIGNAL = 4.1; EXPRESSED IN HELA, SIGNAL = 3.3; EXPRESSED IN LUNG, SIGNAL = 3.3; EXPRESSED IN BONE MARROW, SIGNAL = 3.8; EST_HUMAN HIT: BE673426.1, EVALUE 1.00e-106; SWISSPROT HIT: O75346, EVALUE 4.00e-18; NT HIT: M61873.1, EVALUE 1.00e-60
gacttctaactcaacatgtcttttccatatgaaacatattcacatctcattctgtatgatgtaaatatagcactcaaaaatgtacatgttcatgttcatgcccttaattttatactttattatctagaaaaatatcatatatgaactgatgttgtggatctaatgctgccctttttttctcagataatacattagagaatatttctgtgttgaagattattttattggataattttagtcagtcctataagtcagaaccacttctctttactctctcatttcaccttaagtaaaattaaaaattccacccatggccacttggtgaaaatgtgtgtgtgtgtttttcagggaccattgcaatttagagatgtggccatagaattctctctggaggagtggcattgcctggacactgcacagcggaatctatataggaatgtgatgttagagaactacagtaacctggtcttccttggtgaggataactttaatacataattcataatacaccctaaaggttttatttctcttttttgtagaatgttttttagtaatttattctttgcataaaggagtttcagatcca

SEQ ID NO: 7873 - DNA, 511 bp, Homo sapiens
  MAP TO CHR18.3; EXPRESSED IN HEART, SIGNAL = 2.4; EXPRESSED IN HELA, SIGNAL = 1.5; EXPRESSED IN BONE MARROW, SIGNAL = 1.6; EXPRESSED IN FETAL LIVER, SIGNAL = 2.9; EXPRESSED IN ADULT LIVER, SIGNAL = 1.7; EXPRESSED IN PLACENTA, SIGNAL = 1.8; SWISSPROT HIT: Q99811, EVALUE 2.40e-01; EST_HUMAN HIT: H10235.1, EVALUE 1.80e-01
aagctcccatgcatgttttcagtgtgaggcctagcttttctctgacaggaggctataagcacacaggtgaaagccgtcgtaggattcaccttgtctttgcccaggtgaaggttctgggggtgggtctccccaggtgacagagcaccctcatgacactggtgtccctgttggtcagatgttctatcggtcacatcacagactgtgaatcaagaacagcagagatggagagaagcgactaaagatgcctttcccctctgtcacgcagtaagactctgaacttgagtctctagcagctgaacgtggagctaagctgtacatggttctcctcggctcatcattttctcatgggggtgacctggaggacatcctgtgctcagggaggccaccctcccacacaggtgccgctgcacatgcccgggagggcacctgctccgtccccactccagggctattacacccagtgtgggcacagctctcctccaacaaccactggtgaaacccaaagtgtgct

SEQ ID NO: 7874 - DNA, 533 bp, Homo sapiens
  MAP TO CHR18.3; EXPRESSED IN PLACENTA, SIGNAL =   1; EXPRESSED IN FETAL LIVER, SIGNAL = 1.1; EXPRESSED IN ADULT LIVER, SIGNAL = 1.3; SWISSPROT HIT: P56200, EVALUE 8.60e+00; NT HIT: AB032367.1, EVALUE 7.90e+00; EST_HUMAN HIT: BG822439.1, EVALUE 1.90e-01
tgcagaaaattccaaggaccagcagcccgtagggtggggttaggataaccagagtcaacatgcataaaggaagtttcactcaaaaaaattagctatggcctgtgtggattcttttgactttgaatgatggttggaataaactcttgtgacttgtaaatagaagtactgaatgtgagtcaacaacaggcagaaagagaactgtgatgtcggacaaatcaaacaagctaatatttatgtcagataagaagttcatcaaccccaatgtgatgatctggacagagtgggtccctttaatatacaaaatagatggatgtggactggctgggtataaacttgaaatgggggctgggagtctcaccaccaccctcacactcaccatccctgagaaccctctgagtgccagcaggtgtactgagaaccacacaaaggtaagcacggaccacagatttaacacaactctgcaaccttgtatcattttcaagacacatgtggcatcccaagagatgtcaaattcaaccctcagtactgcacga

SEQ ID NO: 7875 - DNA, 510 bp, Homo sapiens
  MAP TO CHR16.3; EXPRESSED IN BRAIN, SIGNAL = 2.2; EXPRESSED IN ADULT LIVER, SIGNAL = 1.7; EXPRESSED IN HEART, SIGNAL = 3.4; EXPRESSED IN LUNG, SIGNAL = 1.4; SWISSPROT HIT: P30519, EVALUE 6.00e-09; NT HIT: gi15319788, EVALUE 2.00e-52; EST_HUMAN HIT: BI834403.1, EVALUE 0.00e+00
ctttctcagcccagatgaggaaacgcacaagtttttaaaaagaaaaaaggataactaccatcaaatcctatcagcactcccaggagcacctgccctgcctccttggatgagacaatggaccagtggggagagttctaagcagccgaagctgtatgcggtccctgcagggccaagcaggcacccaggggtccagagctcatggcccatggccactccccagtgctgccaacagacaaaaccaggtgtgctgagcacgacaggtgctgggcccacctgattcagtgcagccagcccccatcgctcacctcatttggttctccttttctagggccccagagttctttttttctgactcgtctaccccctctgaggtttccacttccgctgacattgctgctgggtgtggttcttgctgctctcgctcctctggtcctgcagagacacaaggagctggtgatgtggcacccacggcagtcacttccccaaatacctgtcggttctgctttcctc

SEQ ID NO: 7876 - DNA, 563 bp, Homo sapiens
  MAP TO CHR16.3; EXPRESSED IN PLACENTA, SIGNAL = 3.1; EXPRESSED IN LUNG, SIGNAL = 3.3; EXPRESSED IN FETAL LIVER, SIGNAL = 3.4; EXPRESSED IN ADULT LIVER, SIGNAL = 3.6; EXPRESSED IN BRAIN, SIGNAL = 4.2; EXPRESSED IN HELA, SIGNAL = 3.5; SWISSPROT HIT: Q28640, EVALUE 9.00e-17
tggttggcatcttacccttcctttctcatatcaggggtgactgggtctctgctgcaccctgtgcacactcaacctgctgagctgctgtgcagaaggtggggtgctgagccgtgtgctgggcttctgtgcggaaagtggggtgctgagctgtgtgctgggcctgtgtgagcaaggtggggtgctgagttgtgtgctgggcctttgtgtggaaggtggggtgctgagccgtgtgctggccttctgtgcggaaggtggggtgcggaaccgtgtgctgcacttttgtgcggaaggtggggtgcttagccatgtgctgggtttctgtgaggaaggtggggtgtggagccatgtgctgggcctatatgcggaaggtggggtgctgagccgtgtgctgggcttcagtgcagaaggtggggtgctgagttgtgtgctgggcctttgtgcggaaggtggggtgtggagccatgtgctgggcctatatgcggaaggtggggtgctgagccgtgtgctgggtttctttgaggcaggtggggtgtggagccgtgtgctccacctttgtacggaag

SEQ ID NO: 7877 - DNA, 506 bp, Homo sapiens
  MAP TO CHR16.3; EXPRESSED IN ADULT LIVER, SIGNAL = 3.4; EXPRESSED IN PLACENTA, SIGNAL = 4.9; EXPRESSED IN HEART, SIGNAL =   3; EXPRESSED IN FETAL LIVER, SIGNAL = 6.8; EXPRESSED IN BONE MARROW, SIGNAL =   6; EXPRESSED IN BRAIN, SIGNAL = 5.1; EST_HUMAN HIT: BI559573.1, EVALUE 1.00e-115; NT HIT: gi11431596, EVALUE 1.00e-115; SWISSPROT HIT: P54578, EVALUE 5.40e-01
acacatggtctgaagcctccctttaccaaggtcttatcctaaagtaggtagacttgagacacactgacccgccagatgagacaaagttgcaaatctcaggtagttgtcacctccactctgcggcacccaactgctgccataaatttccatcatgggccctgtccaaaaaggagcttattctagggagaatataaccagccacggctcaagaggacaaagcctcaaatttctcaagaccaagaagcacaagatggactcactttctgcctgcagagaggctccttcttgttctcttcggcctttgcatcctgctgcgcagcatctttgggtgtgtttactgctaaaacatcattgatggtggagccaaccaccatgatcttggccccactggtcacttttatttctctcaatgttttatcctcggggacgagtcccttatacatgactttctgcatggcaggcgggagaccttgggaaaaggtagaaggtggacagtgaaaggaagg

SEQ ID NO: 7878 - DNA, 595 bp, Homo sapiens
  MAP TO CHR18.3; EXPRESSED IN BRAIN, SIGNAL = 1.8; EXPRESSED IN HELA, SIGNAL = 1.5; EXPRESSED IN PLACENTA, SIGNAL = 2.1; EXPRESSED IN HEART, SIGNAL = 2.1; EXPRESSED IN FETAL LIVER, SIGNAL = 2.1; EXPRESSED IN LUNG, SIGNAL = 2.1; EXPRESSED IN ADULT LIVER, SIGNAL = 2.3; SWISSPROT HIT: O67601, EVALUE 7.60e+00; EST_HUMAN HIT: BG724232.1, EVALUE 3.30e+00; NT HIT: gi15920163, EVALUE 8.90e+00
ctggcttcacttggttctcccaactgccacaggtctttcgttgaacaccctgacaggcacactacttctttagttgcctttttgtaaggatcttgtttataaaaatctatgatattaaagggtttcttttccccttgagttatatggccaagggtaatttatacttaattattttgattcaggttgaaagactatggaattcagaaatcatcaagtttcattatctgttgtcaagaggaacagcagctgtgaattctagagtgaatggctatgtgggccgtgaggggtgaggtttgtcaaaatatcagatgggttttatattcttttattccttttggttgtgtttctaagaataaatactattctcattttcttttggagtaagtgtctcatcatttttctttttaaatttacactatgaccatacaaatcttataattccaaaatattaacagcatcacctctaattcaatattaaatgaaaagtcataattactggaaggaaaactaaaacctcttagatttctaatgagaatagaatgctagaggagtttgcttaaagaagatttttgaaagcaggtagccatgatcagct

SEQ ID NO: 7879 - DNA, 580 bp, Homo sapiens
  MAP TO CHR16.3; EXPRESSED IN FETAL LIVER, SIGNAL = 1.9; EXPRESSED IN LUNG, SIGNAL = 1.1; EXPRESSED IN BRAIN, SIGNAL = 1.2; EXPRESSED IN ADULT LIVER, SIGNAL = 1.7; EXPRESSED IN PLACENTA, SIGNAL = 1.4; SWISSPROT HIT: P14629, EVALUE 1.40e+00
aaatgcacattggccttcagtgagttacattaatgatgtctagacatatttgtatcaataaggtgatgaaatgacattaaaagtctttcaaatatccatagctagggaagttatctcagaatttgaggaagactgatcatatcatctgaggaaagttctttgttgtaaatcttgtagtcagttgtatttatataagtaactataaagcttagaaatggagacaggacttgaatgactttttctaagttgatgaaagtgtgttctgtcatttcttgattactcatgctaatgattggagcaggaagagacaaatggccccagtctcttacacaagtgtagtcagaacacttgtgttgcaggctgccgctgtcatgtgaatggctgcctgaggaggagccacgcaagctgtcctctgcctgtgctgccattcccttgtcccacacagcactctccctcagtccgagcacaggcctgtcatgggaccatgcatggggaaattccaaccctgaaaagccttctttgcctttcatgtcctcagagagggtgaagcaaacctggaggggagggaggtgctgaatgt

SEQ ID NO: 7880 - DNA, 583 bp, Homo sapiens
  MAP TO CHR14.3; EXPRESSED IN PLACENTA, SIGNAL = 3.8; EXPRESSED IN HELA, SIGNAL =   4; EXPRESSED IN HEART, SIGNAL = 4.7; EXPRESSED IN LUNG, SIGNAL = 3.3; EXPRESSED IN BRAIN, SIGNAL = 4.1; EXPRESSED IN ADULT LIVER, SIGNAL = 4.4; NT HIT: AL163302.2, EVALUE 8.70e+00; SWISSPROT HIT: Q07092, EVALUE 7.50e-02
tctctgatgctgtgtcctggacttggtgacaatggcaaattgacaagaaggcgagcctgggcctttcctgcggcgacatccagcttcccccgcccctccctgggtgggtgcccaccacacgcccagcctgccgcgtgcttatccaggccctccaggccaggcctccgggtcttatggaagaaggccccgtgtctgggcagtgccgtggctgtgagtgagcatccggggccagtcagatgtgccgtctccggaggtcacttccatagtggccatcaacagcttggccaaactcggccgcaggatcttttcctatcaattgcaggatggactcttcccgcagccatgcgacctgtggcccgcggtcctgctccctgagctggaggaggctgaacagaatgagcaggttgaggcctgtgggaaggaagagccacatctccttcatgtttattaccccctccgcaggccatagctaggaggccttgaaggtttttttaagggggaaagggggtttccagaaccacagccggctcagcagaaagtctccaccaacagaatctgtgggcgcacattcctcaacagctga

SEQ ID NO: 7881 - DNA, 553 bp, Homo sapiens
  MAP TO CHR19.3; EXPRESSED IN ADULT LIVER, SIGNAL = 2.5; EXPRESSED IN HELA, SIGNAL = 4.3; EXPRESSED IN HEART, SIGNAL = 4.7; EXPRESSED IN LUNG, SIGNAL = 3.4; NT HIT: gi15299355, EVALUE 2.00e-37; SWISSPROT HIT: P70315, EVALUE 7.90e-01; EST_HUMAN HIT: BG399657.1, EVALUE 3.00e-74
cctttcttcactcagcccagcaactgatcacatcttctgtcactcagggcacgagaaggtggggttttaaaagttatccaatcagcgacgctgggttgggaaccgtccaatcaggcctgcagctggagcggacaggacggcttcggggatgtggcggggcctttgtctctcgctgcagctggagctgcaggtctcgccttcactgccctgtgtcctctgctcgcagaggcccagcctctgtggccctgtgacctgcaggtattgagagatccacagctaagacgccaggtaccccggaagcctagaaatggtgagagtgccgggtccgacatcccgagagaggggaaggggcgggttgtaagcggtgggaagtggctgtggtgggacttaggcctccccgcagtcaactctacaatctgcgcccggagttctccttgctcagctcggcctcagtccccttcagccataagatggcggctgcgctgactgcgggatcccgggcgtcctgtcttttccctgcgcagtgactgggccctgacctggagtcctctca

SEQ ID NO: 7882 - DNA, 533 bp, Homo sapiens
  MAP TO CHR16.3; EXPRESSED IN FETAL LIVER, SIGNAL = 7.8; EXPRESSED IN LUNG, SIGNAL = 4.5; EXPRESSED IN BONE MARROW, SIGNAL = 6.4; EXPRESSED IN ADULT LIVER, SIGNAL =  11; EXPRESSED IN BRAIN, SIGNAL = 7.3; EXPRESSED IN PLACENTA, SIGNAL =   8; EXPRESSED IN HELA, SIGNAL = 6.6; NT HIT: AL163208.2, EVALUE 8.00e-03; SWISSPROT HIT: P23949, EVALUE 7.50e-01; EST_HUMAN HIT: BF839181.1, EVALUE 5.00e-79
atgtggtcctgttcctcctgtttgggcaacagtgttgccttcccctgctaccctggaagtcccccaggcaattccatccatgggttctgatgagcatgaaccaactggcatgaccaccaggagccaccatctctccagcccgggaagggcttgtgtgtgttgggggaggggagggcacgtgcggctggtctgaggttttctcccgtgtgaaatgtcagattcccaggacttttagagttccaggcatgtgtcctgggtcccttcgccagagcctacaccaaaggctctggcccatggcacctggcactcaccgtccccagcatgctgacagctcccgctgtgagagtcggggcctctgccaggcagcttgctccctgtccacaggagaggccacggggccagggagggaggccatgggagcagctgcttcagcagcgtgtggggactgcgggacagatgcccactccttggtacgttccatgttccactcctctgggggcgtccccggaggctcagagcccagttacccacag

SEQ ID NO: 7883 - DNA, 524 bp, Homo sapiens
  MAP TO CHR18.3; EXPRESSED IN LUNG, SIGNAL = 1.9; EXPRESSED IN HEART, SIGNAL = 1.8; EXPRESSED IN HELA, SIGNAL = 1.3; EXPRESSED IN BONE MARROW, SIGNAL = 1.4; EXPRESSED IN FETAL LIVER, SIGNAL =   2; EXPRESSED IN ADULT LIVER, SIGNAL = 1.4; EXPRESSED IN PLACENTA, SIGNAL = 1.6; NT HIT: AJ007421.2, EVALUE 0.00e+00; SWISSPROT HIT: P23791, EVALUE 4.30e-01; EST_HUMAN HIT: AI871129.1, EVALUE 0.00e+00
tgctccaacttcaaaacgtgggcctgggcagggcagatgagcgagtcactggctagttgataccaatctccttgttatcctcgataaaccgcgtgaatgggcggctggctgctgtttctgagctcgctttgtccaagctgacgatgggtgggctactgccagtgcgtgctttgtccatcccactggccatgctgcccagaggggggagggcgctgcccccaagactcacggggagctgggggatgccgccgttctggatgacggagatctcgttgttcttcatggcgagcccgttagtgatggctgcagcatactggttccaaaaactggggtcgacgttcattgcccgagctgccaggtccttctggaacatttcagagaacttcagggcatcaccccctaggagagccatggggttctccacagacaggcggcggccgcgtctcgcgggggcgttattccacatgtgtgtccccatgtgcacctgcgcgagacacggagacagcccacgagtaagtgcctag

SEQ ID NO: 7884 - DNA, 550 bp, Homo sapiens
  MAP TO CHR14.3; EXPRESSED IN LUNG, SIGNAL = 1.6; EXPRESSED IN ADULT LIVER, SIGNAL =   1; EXPRESSED IN PLACENTA, SIGNAL = 1.7; SWISSPROT HIT: P03181, EVALUE 9.00e-02; EST_HUMAN HIT: BF315683.1, EVALUE 2.00e-01
aggtttgtgcaggtcctcagccctgtggcgctcacctcccagggctgtggcctgggtccctacccagcggggacctgcagaattgtgtcgggaagttgcatttcctgggctagggccccccagcaatcaggaatgagagaaatgcagaaagtatgacccacacgcagaactggttctgaatagaacatttattgacgaagttttgcaggaggcggcgggcgctttaattcccgaggctgttggtggcagctcgctgctcaccccaagcctgttaactgctaggttgccggtgctggggacaatgcggctgcccggcccctcgccaccctcgtggtgcccggatgggagctctcctgaggaaagcggtaggtacccggctggggccaggccaggggatgggaatggggtgggatggggactctttcaactccgggcctctaagccttgccggacttcccccaggaaacccagccaatcacaggctttagggtaaaaggcaggtttttcccttgtgggttagacactgaggaccataaagggagcaggcata

SEQ ID NO: 7885 - DNA, 555 bp, Homo sapiens
  MAP TO CHR18.3; EXPRESSED IN LUNG, SIGNAL = 2.2; EXPRESSED IN BONE MARROW, SIGNAL = 1.8; EXPRESSED IN ADULT LIVER, SIGNAL = 1.5; EXPRESSED IN PLACENTA, SIGNAL = 1.7; NT HIT: gi14600379, EVALUE 1.30e-01; SWISSPROT HIT: P16112, EVALUE 4.00e+00; EST_HUMAN HIT: BF525920.1, EVALUE 2.00e-01
ggacagaacaaagcctgagcatggccagaccagccccacactccctgggcatgggccagtagagcccagttgctgtttaaactgacttgacgggccttttgtttgttgcctccaaagtatcctaacagaaagaaataatctttttcgccactgaacgtgtgggagcttcatttaaggtgctgccctccacccaccttaaccacggcctcagcctgggatccctgtgtgtcctccatgcacgccacatccacactgcctgctgctcccctttcctgatcccatctcccaccttctgtggaagtgcaggcctggcccttctagaagaagcagtgcaagggaaggatggggtcactcagtgatcccctggctttggagactgagggagagagatgagcagaccacaggcctccatggtttccagctcctccctgaccactgagatgtgcttgcagcctcctgcagcgagtcaggtctggaccctaggccgcttccttcaggcctcctggggctgtctctgcaggaaacccagacagagggaaagcagaaggaagcaga

SEQ ID NO: 7886 - DNA, 538 bp, Homo sapiens
  MAP TO CHR18.3; EXPRESSED IN FETAL LIVER, SIGNAL = 1.4; EXPRESSED IN ADULT LIVER, SIGNAL = 1.5; EXPRESSED IN PLACENTA, SIGNAL = 1.4; SWISSPROT HIT: P48634, EVALUE 1.50e-01
gctccaaagtaggaattgcgtggggagggcctcagaggctggcgtgggggctgccggtgagcctgggagggttgcggcattgtaggtaggacaggaggaattcccagtgggaaccacagtgaccgtaaaaggagcagcattctttaaaacagagcttctcaaactgcgatgttcccggaagcacgcagaggccctgtgcgaatgcggacgcagggcaaggccgctgggctctgtgcctgggcagcgctgtgccttcggctcccaggtgctgctttcggaagcaaggatttggggcatcgctgcgtttcctgcagcgccggcctggccggttctgctgtaacacactccagcctggacccttcggtgggtgggattccattttctttcaagagagaactccatttgaaagcgtggccatcccgggcgctgtcagctgttggcctggcttctttcttcccgggctttgctatcagcgcctctatcccgcagccgttcattgttcatgcatcaggcgcacagtcccagtgttcattctgcc

SEQ ID NO: 7887 - DNA, 536 bp, Homo sapiens
  MAP TO CHR19.3; EXPRESSED IN ADULT LIVER, SIGNAL = 1.5; EXPRESSED IN PLACENTA, SIGNAL = 1.7; EXPRESSED IN LUNG, SIGNAL = 1.6; EXPRESSED IN BRAIN, SIGNAL = 1.8; EST_HUMAN HIT: BI963972.1, EVALUE 0.00e+00; SWISSPROT HIT: P53197, EVALUE 1.00e-21; NT HIT: gi14765143, EVALUE 0.00e+00
gagcgactctgacccatctccccacaggctgctctcaggtggcaggtaaggggccagcaggacgcacatcctgaggcctggtgggaggccgggccgcccgtgctcaccagctcgttggcgtgcttggaccaggccagattgcacacttgggagcccgtgtcgatacactgcagtggttgtcctgtcagcgtgttccagaagcggatacagcggtcagctgtgccgccccccgaggccagcagcccgtgctgatgtggggaccaggcgatggccttcacggccgccaggtgctccgtgtactgctgcacggggctcaggctcgagtgattccagaccagcagctgggggacaggggctgtgaggccggggctgtcccagccctgtggtcccataggccggtcctcacaggtgtgacgacctgccctggcaccccaccccacactcctcctgctgctccctcaaggacccctgggggcacacactcgtcaccctgtgccacagggcaggactggctgagcaggaaggacaagcctggt

SEQ ID NO: 7888 - DNA, 547 bp, Homo sapiens
  MAP TO CHR19.3; EXPRESSED IN ADULT LIVER, SIGNAL = 0.93; EXPRESSED IN HEART, SIGNAL = 6.5; EXPRESSED IN BONE MARROW, SIGNAL = 0.8; EST_HUMAN HIT: AI085619.1, EVALUE 6.00e-97; SWISSPROT HIT: O75437, EVALUE 3.00e-12; NT HIT: gi16163761, EVALUE 6.00e-47
ccactgctctcacacatttaggacatgatgtaaaaacagaacttgaaaaacagtttaacatagagtttctcaaaattatgcagattatctatgtgttttcaaaaacaatgaaaaagcagtcagatttcacagtctcttatgtgccatgaagagggctgtcttggctgtcactgtaaacctgaagaagatcaccaaagggaaagtaaaatctttagagattttaaaaatataagacagaagatgcttctatgtgaaagcaaaatttaaaaaattcaagtttcctagaaactatttcctttggaacacagatttcaaatcattttaaggaatggctttttttttttttctactttggagctctcatctgtgtcgtctgttgtattcactttcactctcacctacctgggggttcagttaccatctcatgtctcttcacattccaaggttcttttccttgctccagacaggtgatcaggtctggcttagaggcagcaatacctgttttattacaaataacatgaatcttgctcatattctccaattacca

SEQ ID NO: 7889 - DNA, 512 bp, Homo sapiens
  MAP TO CHR16.3; EXPRESSED IN FETAL LIVER, SIGNAL = 1.5; EXPRESSED IN ADULT LIVER, SIGNAL = 1.1; EXPRESSED IN BRAIN, SIGNAL = 1.6; EXPRESSED IN PLACENTA, SIGNAL = 1.1; EST_HUMAN HIT: AL556462.1, EVALUE 3.00e-83; SWISSPROT HIT: P51112, EVALUE 9.40e-01; NT HIT: gi14776117, EVALUE 2.00e-83
gcttgtccttgcctctcatcctagtgcaagctcaagctccaccccaggtcatctagagaggaagcagcagaggctgctggccccgctcactccccatctcatgccttcagctagcagacaccccaaatacaccatcaccactattgtcgtctcctaggtactcacatgacctgcttctcttgcaggttaatgggtggcatggtccgaagaccagtcttgtttgctgaggtactatcacctgagcagagcgggtctgggaccagaagtccattgaggtccccattgtaggcactggatggccgtgggctctctgcactggggcctggggacaaagagggtcattctgataaggttgctcgacctgcccacaagcctctcccctttcagagtttccttcaagaactatgaggtgctctaggaacactcaactgagcaaagcatgtccatgaggaggagggccctgtgttcatctctcgttccataaacactgatgtaggcaggaccaaggatga

SEQ ID NO: 7890 - DNA, 565 bp, Homo sapiens
  MAP TO CHR18.3; EXPRESSED IN ADULT LIVER, SIGNAL = 2.1; EXPRESSED IN PLACENTA, SIGNAL = 1.8; EXPRESSED IN HELA, SIGNAL = 2.3; EXPRESSED IN BONE MARROW, SIGNAL = 1.8; EST_HUMAN HIT: AW194644.1, EVALUE 1.30e-02
gtgtccacccagtgtgaatgcaagcaataactatcacgaggcagagactgggctacactgcagatatctccgtaaaagtctcacctcactggcatcacccacctgattaaaaatgtgcactgaggcgatgaagccagggacttcttttcctttaccacatttgcattttttcttggccttacaagaatggctaccaagcaaagtaacacttgcaataaagcgaatgctgttgttgtacagctaagaacaattttttaaatggcctttgtttttatacctgcagaaactttagatttttcccctccaacatcagggacaaaatatttccttcaacctcagaaatatctggaacgctccttgttttaatgtttatacatatatcgatatgaatagatatatacagatgtaagatcaaaagttcgctcaaatcttttctaatttgttttaggagttcgatcaattattctctctcatcaaagatttatttagtacttactaggtgctgaatcctgatcatgtaaagactgagattacaaggcactcatggtgctgtgacaaaggcata

SEQ ID NO: 7891 - DNA, 531 bp, Homo sapiens
  MAP TO CHR19.3; EXPRESSED IN ADULT LIVER, SIGNAL = 1.9; EXPRESSED IN PLACENTA, SIGNAL =   2; EXPRESSED IN HEART, SIGNAL =   3; SWISSPROT HIT: Q02817, EVALUE 7.50e-01; EST_HUMAN HIT: AA092474.1, EVALUE 1.90e-01; NT HIT: AE002080.1, EVALUE 1.30e-01
tcccacaactattggaaggggaagaaggagaccctaatggccacggtgatggtggtgatggttccatcaccatgactgcttgaactaaacgccgtgagttgtctgtcctcagacatattcaagcagtcagagagaccttcgaggggtagattattctcctcccatcgtgacagcttggttttctgagcgcagagcagctgaagtcaggcctggggtaacgccacacccccgcgacccttccccgcctctcccgggagaccttgccctcccagctgggtcatccggcagcccagcagcttccggccccctccaattggctgtaggggccgatggcgtcactggttgctatggcgaacacccagatcacgacgtgggcagcctggagcccaccaaagtaaaaatagtcgtgtgtccccaacgtggccgccctgatgtgtgtggagggagggtgtcctgagacccagtttcctgcctctcactccactaagagacgtgggcagccggctttcctctgcacctaagtttccctgc

SEQ ID NO: 7892 - DNA, 506 bp, Homo sapiens
  MAP TO CHR18.3; EXPRESSED IN HELA, SIGNAL =   1; EXPRESSED IN ADULT LIVER, SIGNAL = 1.4; EXPRESSED IN PLACENTA, SIGNAL = 1.2; NT HIT: U40963.1, EVALUE 2.00e-03; SWISSPROT HIT: P35821, EVALUE 4.70e+00; EST_HUMAN HIT: BE786877.1, EVALUE 1.80e-01
gccctcgatgaaagtaagggaaggcctattttctttagtcttttctttcagtctattttcttttagtctttgccttaatgtcagaaatcaaacatcacgaacatcagcagcttaactccactcgggagcctgctgcacaagtgacaacagtaggcaacatacagatgtcatccttggtgacagaggccagccatggacttaccctcacagcccatctaaacgacaccccagcactatttcacaccctcaaaactactatgcaaagaagtctgcttaatgtgtcctctcagactcctggctctcactatcctggcattgaataattcaaagtccaccttctctcagcaccttttctgcatctgctcacccaagtgattttctcttccatggccacctccaagggtgatcctgcctgttacaagggtgttcaagaggaccttcacttgcagggccaacatgaggctgcccatgaatactgtacagatggaacaatgagcaccaccctt

SEQ ID NO: 7893 - DNA, 580 bp, Homo sapiens
  MAP TO CHR18.3; EXPRESSED IN HEART, SIGNAL = 4.3; EXPRESSED IN LUNG, SIGNAL = 5.1; EXPRESSED IN FETAL LIVER, SIGNAL = 3.7; EXPRESSED IN ADULT LIVER, SIGNAL = 4.4; EXPRESSED IN PLACENTA, SIGNAL =   5; NT HIT: gi9653233, EVALUE 1.40e-01; EST_HUMAN HIT: BF676323.1, EVALUE 3.20e+00
ctccttctagcagctgtggggattaatattccgaacagatctataattttaggtctctagtgcaattttactaactcactccatccttcctcctcgtcccctcccccgtactccatcagggactctatgctctctcgtctccctttctccaagtctctcccacccacataccctgaaattactcctcctgtccaaatggaattcggtgaaggatttctcaatatctgtgaccgagccatgctccggcccctggccagcttaagctgacttgcaagaagtaagatatgcacatggatttttcctgaagcacataacagcttaagatgccttacttttttctttagatggttttatttacttttttttattagttttggggaagtgatgagaatctcacaattgcgggaatttctagctcgcagatgctgagtcttttccgtggttaacgtcatgatagtaataacgagaatgctgatactaataacgacagcccttatatgttggaaaatgcataaaaataaagataaacaaggaatggagaatgaaaacatggtgagtatcagggacaaggctcagagaa

SEQ ID NO: 7894 - DNA, 600 bp, Homo sapiens
  MAP TO CHR16.3; EXPRESSED IN ADULT LIVER, SIGNAL = 1.5; EXPRESSED IN PLACENTA, SIGNAL = 1.4; EXPRESSED IN HEART, SIGNAL = 2.9; EXPRESSED IN HELA, SIGNAL =   2; EXPRESSED IN BRAIN, SIGNAL = 1.8; NT HIT: gi14777210, EVALUE 2.00e-53; SWISSPROT HIT: O70239, EVALUE 1.00e-12; EST_HUMAN HIT: BI554168.1, EVALUE 9.00e-47
ccatcacgtgtgaacctttgtgtgtacatgttcccctgtgcacacatgggtgcctgcatcacctgtgtgcacgtgtctcagtggtggtggctcacaggtgtcctcatcattgcctgctgaccggcggtcggggccaggagctctattggcacggtgctggccctcctgctcctctctgagttaacggctgcctctttctcctggacagggatgggatccccccatacaggatccgtaagcagcaccgcagggagatgcaggagagcgtgcaggtcaatgggcgggtgcccctacctcacattcccgtaagtaccggctttgcggtcctcagcccatcgtcctccccgctcagcgtgggcctggtgaactggtccgcgggaaaggcacttgcctggcctcccacgagccaggcttacctctaggcgtaagcgtgtgatcccagcaacatctgcaagtggccagtccctgagggcagcaggggacatcaagtctcaggcagcatttagggcccagagggagctgttcattcagaagagcccccatgccccaaggccacaccctccctggtggcaggaagtgtcttgccttgtgaaggtggat

SEQ ID NO: 7895 - DNA, 544 bp, Homo sapiens
  MAP TO CHR19.3; EXPRESSED IN ADULT LIVER, SIGNAL = 1.3; EXPRESSED IN HEART, SIGNAL =  25; EXPRESSED IN BRAIN, SIGNAL =   2; SWISSPROT HIT: P00564, EVALUE 5.00e-20; EST_HUMAN HIT: AL598744.1, EVALUE 2.00e-69; NT HIT: M21490.1, EVALUE 1.00e-130
ctggaaatgtgtgctggatgaacggatggcaggacgctgggggcagccaggtgtctgcgtaggtcttctcaggggccgtcgggtctggacagcatccctgaatctccaacacagcaggtaatgctgacagcccgcgccattccccaagcccccacgatttaccaagctcttcccctactttgaaaagcgggggcccaaagagacccgaggacctgcccatggaggaacagagccagggctgggtgaccccagcagtggacggggtaggggcgctcaccttccacagagagcttctccaccgcccggcgctcgccacgggagcagtgtgggggcaacgtgtagcccttgatgctgcggccagtgcggacgcggctgctgagcacgtagttagggtccaggtcgtctccaccctggagagcgggtgggagatcaggaccaggcagatcctccgccctctccagcaagcccaggtctcccccagatgctcccctcagtctccctgttgcttcctttgccttctgcatcctcactgattgggtgtgtg

SEQ ID NO: 7896 - DNA, 546 bp, Homo sapiens
  MAP TO CHR19.3; EXPRESSED IN ADULT LIVER, SIGNAL = 2.9; SWISSPROT HIT: P12387, EVALUE 8.00e-11; NT HIT: AB032187.1, EVALUE 5.20e-01
gcaatcatcagtggatgctggtcagggacaatgaccccagcagtgacatcgagcctcaggacagtcccataattgggaaaacatcttaatggattccctaaaaggatgaccctctagtgaggctgtcactaatgaggtgatctgatgatcctcaatagtgaccataacccctgcatggtgaccccaaatccagaagctctatccagcacaaactcagtgatgttttctcactcacaacagcatctcccattaccccatctctgtgaaggtgccagattccatcaccacgtggcagtttgtggtggtcagcctcaaggctggacaaggtgagccgcagcaagcccagtgccaagggaatgggggtatggtgaccttacccagcccctcccccaacggagcctctgcttaaacccaatgtgctctcctggctgtaggtctctgtgtctcggacccctttgagctgacagttatgaaatcgttctttgtggaccttaagttgccctcctccgtgatcaggaatgagcaggtccagatccaagccatgtt

SEQ ID NO: 7897 - DNA, 501 bp, Homo sapiens
  MAP TO CHR18.3; EXPRESSED IN ADULT LIVER, SIGNAL = 0.94; EXPRESSED IN PLACENTA, SIGNAL = 1.4; EXPRESSED IN HELA, SIGNAL = 1.5; NT HIT: gi14720231, EVALUE 4.80e-01; SWISSPROT HIT: Q02987, EVALUE 1.60e+00; EST_HUMAN HIT: BF312042.1, EVALUE 1.10e-02
agtgacaaaagggaacgtggcacagcatggaggagccgcccttaggtcagatcaggcctgtcatcgtcactggtgaccctccctgccgggggaggtggccctggcagcaagcacctgtcctgctggctgagcggcagcccacgtgtccggggcagggtggccagctggccagctgggccagagcccagagtgctgaggctcgcagcccgatctcggcagtcctgtaccgtcgcatcaggccacaggccacaggccacaggtggctcttcccgcatgccggaggaaacacaaaatccctgccagcagagaaggagcggcccagccacttgcctgtgggtttcatgaaatgtgcgactctgatctcataccccttagaatttctagtaaaagatccagaatgtctgacttcccaagaaggaaccttcatgggaaagaataggcaggaatgttttcagagccagttcctcaatttctccaggttccaaaaagctgcaagaccat

SEQ ID NO: 7898 - DNA, 568 bp, Homo sapiens
  MAP TO CHR16.3; EXPRESSED IN HELA, SIGNAL = 3.8; EXPRESSED IN BONE MARROW, SIGNAL =   2; EXPRESSED IN ADULT LIVER, SIGNAL =   2; NT HIT: gi5803162, EVALUE 7.00e-19; SWISSPROT HIT: P04280, EVALUE 8.20e-01; EST_HUMAN HIT: BI085494.1, EVALUE 0.00e+00
gcagctgtgtggacagtctccacgtaggcggcactggcctggcgtccagccaggagtgtccagctcgagccctcctggcatctgcacaggcggccccgcccatccccgctaggagatcttgcagttactccgcgagcagttctggggggggctctggggtggacggatggacttggacctcttgaggctgttgcccttgctgccgccgcccccggccccgctggccagggagtaggaacggccgtgcatcatgaccgcgttcatgccgttggccatcgagaaggacttgaggtggctcttgatggtgacgggcagtggaagcttgtcgatgaggtgcacgggggtgcaggagacgatggcccggcagcagaggtcctgcaggctgaacactgtggggcagagggggtgtcagaccatggggctgtgggggaggaggccctgtgcagggagacctgaggtgcccaagagaagcctggcggggtctccacactcctagaggtgttcccaggctgggctcctggaggacctggacgcccaaacttctctgcccagcacagatgtgtccact

SEQ ID NO: 7899 - DNA, 594 bp, Homo sapiens
  MAP TO CHR18.3; EXPRESSED IN BRAIN, SIGNAL = 1.1; EXPRESSED IN ADULT LIVER, SIGNAL = 0.95; EXPRESSED IN FETAL LIVER, SIGNAL = 1.3; EXPRESSED IN BONE MARROW, SIGNAL = 1.2; SWISSPROT HIT: P15800, EVALUE 3.00e-01; EST_HUMAN HIT: AA489858.1, EVALUE 2.10e-01
tgccctgtaacctttgaaccccagctgaccaatcaaagacctttgaagctctaggctgtgttcctatggattattctaattcttcatttgcccacaatgtgcccttgccagacagatgtacacctactgatttgatctggtctagatatacccctcactgtccttccagatgcctcacattgttcaagggcagctgcagctcagccactggtttggggctatattttaggcccagccatgtgtctctccagtccttcatctgccatcctatcctagcagccaccaagcacctcagcatgacaggttggtaatcaacaactgtgaccaaagcggccattaagaacttgctgttgttaaaacgcttttttcttttaggtaccaagattaaaagcaggcaccagaacacctacaatgaatataaagtaattacattaatagtacatacatgcatacacattatacatatatagtataaattaaccaaaagcttaaaatgtagttattgaacatgatgttgtatacctgcatttgaaatgcttagccaaatgactattgtgatgttgtcaaatgtttagctgccattcaacaatttga

SEQ ID NO: 7900 - DNA, 595 bp, Homo sapiens
  MAP TO CHR16.3; EXPRESSED IN ADULT LIVER, SIGNAL = 1.2; EXPRESSED IN HELA, SIGNAL = 3.3; EST_HUMAN HIT: AL601756.1, EVALUE 1.00e-129; SWISSPROT HIT: O08908, EVALUE 1.50e+00
gggctatgtgggattttgtggctggaagcagtcactcagcaattcgagcaattcgagtgaagccaggtagaaggaggggtcctccaggccccagcagatttgggcgcattaggaaatttgttctgggaagtgtccagaaatatagagttgagatcgtggctgggctacaccctctctctgacttaggtgggtccctgggctcctcccggctccccatgacgcaggtactggcccggctgctttgcgtctctcacacctgcccttaccatcatcatagccaaaagtactcagcagcagcacctccaggtccagaggcacctccagctgcatgcacacacaatgaatgaaagactgccaggtgtccgaaccctggacatgcagcttgttgagttgcaggatgactctctgttcagggtccaaggtctcgttcctggaatccaggtccgtgttggggaggaagaacttcatcttggcgttcagccattctgggtctttggtgagcagcctcacaagacagctccacaggttcttgttgccgagctggaggccaacggggtccatgaggagccagccctggagggacagggaagatagg

SEQ ID NO: 7901 - DNA, 591 bp, Homo sapiens
  MAP TO CHR16.3; EXPRESSED IN ADULT LIVER, SIGNAL =   1; EXPRESSED IN PLACENTA, SIGNAL = 1.5; EST_HUMAN HIT: BF085197.1, EVALUE 0.00e+00; SWISSPROT HIT: P35728, EVALUE 7.50e+00
acggctttttcaccattcacatgttcagcatttcagactaaactaaagaatgacggtgttactgagatttggagttccacaaaagtagaagtgctagagccaagaacctgctgatgatattggttgtcctttgaaaagaagccctcttagggctttggatgtttgttctgacaatatcagtaatctagttgcaaggaacttgtagttattatatttaaagtcatttcccatgaaatttatatttgaagttttctaattcttggttacgcactcaaatccccaaatggaaattcaattctgtctttttatttacagaatatactgatgataatgctctgattcctaagaattcttctgtaattgttagaagaattcctattggaggtgttaaatctacaagcaagacatatgttatgtaagtatcaaatctcatgtatttctcaaaatagactttttttagtttttttaattttgtgagaaaaaactgtattttagaactgaactcattactttaaccttaatgaatacatcttctcaagactgtgaggatagtaggtttctttgttcgtttgtttttgatttcctccccca

SEQ ID NO: 7902 - DNA, 574 bp, Homo sapiens
  MAP TO CHR18.3; EXPRESSED IN HELA, SIGNAL = 8.9; EXPRESSED IN HEART, SIGNAL = 6.4; EXPRESSED IN FETAL LIVER, SIGNAL = 8.8; EXPRESSED IN BONE MARROW, SIGNAL = 3.6; EXPRESSED IN ADULT LIVER, SIGNAL = 2.8; NT HIT: gi12746589, EVALUE 0.00e+00; EST_HUMAN HIT: BG830132.1, EVALUE 0.00e+00; SWISSPROT HIT: P56545, EVALUE 4.00e-60
cagcgcttctgtaagcagacgacatccaattttctacctcttgtagttttaacactgcaacatcaataatgcatatgtccagaatcagctaaaaagaccgtcagattcgttttctctgagttcatcaatttttcactgtctcttggccgcaagtgtatctgaatgattaccttccggcattctctgctttgttcgttggggtgctctggattgtccccgtgttttgtgggctggttgggagagggagcttgggagggatgtgccactgtggggaggttgtgagtcactgggatgcctccagggatgatcccttctgtggctgcgggaagtcctcctggagccacgcacacgaagcctggcagatatctgtatgtggcaccattaagctcgggatgaattgcttgctggtctattactgaccaaggagctgatgtgacaaagaattccttgttcacacagtttcttaagctttctgggatgcaacctgtgatggttcgtcggatctcggtggcagccgcctccctcatctccagggacacctggatggggggcagcgtgaggagtgcagatgaga

SEQ ID NO: 7903 - DNA, 560 bp, Homo sapiens
  MAP TO CHR18.3; EXPRESSED IN LUNG, SIGNAL = 4.1; EXPRESSED IN FETAL LIVER, SIGNAL = 5.9; EXPRESSED IN ADULT LIVER, SIGNAL = 2.6; EXPRESSED IN PLACENTA, SIGNAL = 3.1; NT HIT: AF111103.1, EVALUE 1.40e-01; SWISSPROT HIT: P36170, EVALUE 4.10e+00; EST_HUMAN HIT: AL570953.1, EVALUE 7.90e-01
atatgtcacctcagggcagcatttaagtcaagatttaaaattctcgatgctgcacaggagaagtcactgggacaaacaatttcctttggaagttacagtttgatgcctttcagcgagttaagcagacactgagcccaccctgaactctaactgtaggcccccccttttttaaaacaaacaaacaaataaaaacctagcattatgggcacatagatcatggctataaagagccacaatggaaaccccccaaaagccagctcaattatcagcatcaaaactgctgagcatttaaaggagcatctcgacgaaggtaattatgggaccagcatcattctgctcattctcagtccttcagcctatacagcgcactctgagatgatgttttcctcttgtttatttagttgatctccaagagcagggaggatttatccccactaatccgtggaccataaatccagctcaggcgggctgcagccccgtcctgcttggccccaagctcagatgcccagtggaaaacatcacagtgattgggtgagggcagcacatcacgctcactgttc

SEQ ID NO: 7904 - DNA, 596 bp, Homo sapiens
  MAP TO CHR16.3; EXPRESSED IN ADULT LIVER, SIGNAL = 3.1; EXPRESSED IN HELA, SIGNAL = 3.3; EXPRESSED IN LUNG, SIGNAL = 2.5; EXPRESSED IN BONE MARROW, SIGNAL = 3.9; NT HIT: AJ277441.1, EVALUE 0.00e+00; SWISSPROT HIT: Q20365, EVALUE 3.40e+00; EST_HUMAN HIT: AA181160.1, EVALUE 4.00e-49
gacatcatctccgtgtgcaggtaggacattagatggtttctctagggaaacacagagaaaagtattgagagcaaggagtgctgttctgtgaggccgctgcttaccctatgtctgagcagtgctgcctaccaacaccaaagaccctcaaggtccccagggaaggagtatttctcccacatagacactgggagtacttaccaggtttgatgggctgcctgttcgagaaggtcagaggcgcaacgaggaatttggtctctgcaactggcacccagtggtggagaattttcactgtccagaccccaggcctcaggggcaagttcaaagggggcttgtagtgtgtgaattcggcagtggactcaatgaggatgtcgtaggtggctgcgatgacattgacgggatccacccaaatgacggtcacggtcacattaggtcccttcccccacttctgcatacccaccggctcatccatgggccccagaagacccccaaagttgcggaatagcctctccttggcatcccagtcagtgccgacctgaaacaggggagtgaattctgaagtcactgggcctgaactagggggctaggtctcagaaagg

SEQ ID NO: 7905 - DNA, 534 bp, Homo sapiens
  MAP TO CHR16.3; EXPRESSED IN LUNG, SIGNAL = 1.1; EXPRESSED IN ADULT LIVER, SIGNAL =   1; SWISSPROT HIT: P23986, EVALUE 2.90e+00
tcagattgatccccctatgctcagagaaaccaattcaaaatgtagttacacgatatttcacgtttaagcatttaatgggctcttcatcactcccctaggagcatgtgggctccagggcagtaatgagaaggtttctccagggtgcttcacaaagccaagttgctgaggcagcagaaccagtccccacttccctgcaacctgtggctgcattctccttggctgacaccagcaaagtcagagaacaggaagtggtggtggtgagagggcggcaggcccacagcttgaagaggtcccagccctgcttccactgtagaagggataaagaatattcacctgccatgtgcaccctccacacggcccagggaagggcacattcttgcatgacactgtcatattccatgacttaatccaggagcaaatggctctgggctgaggttctgcccatctgtgatgctgggctgtggagatcatatgactctggtcttagaagaggcaacacccccctgcccccaaccaagttctcttctgggcctg

SEQ ID NO: 7906 - DNA, 500 bp, Homo sapiens
  MAP TO CHR16.3; EXPRESSED IN ADULT LIVER, SIGNAL =   1; EST_HUMAN HIT: BE772843.1, EVALUE 8.00e-87; SWISSPROT HIT: O43747, EVALUE 2.00e-30; NT HIT: AB015317.1, EVALUE 6.00e-87
ttcttgttggatgggctttcatcacagcctctcttcaatgatattgctgcaggtacgatgactgttgttaccatcattacatggagcactgagtaatgagatgtggttattaagaaaaagaagtaataattctgcaagcattaggctgactacaataagacttatcttcctgtactttctcaggcatcccctccatcacagcatacagtaagaatggcttgaagatagaattcacctttgaacggtcaaataccaaccccagtgtaacagtgataacgatacaggcctccaacagcacagagctagatatgacggactttgttttccaagctgcagtaccaaaggtactacaatgtcttctttagatgtttcctttgattaaagattggctggcttttttttttcatgtgtttggtaaaggatatgttttaatgtttacagattaaatttgtagacttaattcaaactaacaataatgtagcttatggttcatggaagca

SEQ ID NO: 7907 - DNA, 513 bp, Homo sapiens
  MAP TO CHR14.3; EXPRESSED IN ADULT LIVER, SIGNAL = 1.1; EXPRESSED IN BRAIN, SIGNAL = 1.3; EXPRESSED IN PLACENTA, SIGNAL = 1.4; EXPRESSED IN LUNG, SIGNAL =   2; NT HIT: AF018572.1, EVALUE 8.00e-03; EST_HUMAN HIT: BE613614.1, EVALUE 2.80e+00; SWISSPROT HIT: P26459, EVALUE 9.40e-01
gagaagtgacaggtctgggccaggactggagagcagccgtttatcatcctggcaggaaactgcgctctccaggagtgctcacaggacagcgaacacttgtgagtctcacctcctgggcaggtcagttctcaggcggttgtgttcaggcagtgtgacagcagggatggggaggggttcttggatatcgggcatgggaatgggggcatagatagaaggaaaacctgccacagcaccctgcaaccccacagctccactgggctttcagcctaaagacatcagccaccgcatctatccaatggagacaatactctttctccccacccctgccacatctccctggacccatggctacttggagggaagggctgatggcacaggccctgtcctgggtgctccaggggagaaagcagaggccgaggagagagccaatgacttgcttcaggtcactgtccccttccacccagggtgactgggctttgggaatactgatgcccttggacaattggctggagt

SEQ ID NO: 7908 - DNA, 592 bp, Homo sapiens
  MAP TO CHR14.3; EXPRESSED IN HEART, SIGNAL = 4.8; EXPRESSED IN FETAL LIVER, SIGNAL = 7.6; EXPRESSED IN ADULT LIVER, SIGNAL = 7.8; NT HIT: AF020307.1, EVALUE 0.00e+00; EST_HUMAN HIT: BE926681.1, EVALUE 0.00e+00; SWISSPROT HIT: Q09167, EVALUE 9.00e-07
ccctgggacatagagcagactgggtctgctggcatatttttctaagtagatttatgtagcttaagtgtgtaacggagatttttcttccctttttgtagggttactattgaacatgctagggctcggtcacgaggtggaagaggtagaggacgatactctgaccgttttagtagtcgcagacctcgaaatgatagacggtatgtgaagggtggatggctgcattgaacaattattgtaggggtagcatttaagattcaggagtcattagcagtgatgattttgggtcctgccgtataatctgttcttctattcccacgttagccagttgttcttgatgaatctatatgagtcatagaacacaaatctattgacggaagtcattagaatggcttgtgatatctgatggcttgaacttgcccacagttgaacacaagtgctgtcattgcatttcttccattgtgaatacgaattttcttcctcagaaatgctccacctgtaagaacagaaaatcgtcttatagttgagaatttatcctcaagagtcagctggcaggtttgttgaaatacagttttgagttattttgatgtggctt

SEQ ID NO: 7909 - DNA, 560 bp, Homo sapiens
  MAP TO CHR14.3; EXPRESSED IN FETAL LIVER, SIGNAL = 1.6; EXPRESSED IN LUNG, SIGNAL = 1.7; EXPRESSED IN ADULT LIVER, SIGNAL = 1.3; EXPRESSED IN PLACENTA, SIGNAL = 1.5; EXPRESSED IN HELA, SIGNAL = 2.2; NT HIT: X98834.1, EVALUE 0.00e+00; EST_HUMAN HIT: BG291890.1, EVALUE 0.00e+00; SWISSPROT HIT: P10074, EVALUE 9.00e-09
cgaacagccagggactagagaaagagcagcaatattctgagggccatggggggcaaagggctgtacctggtggtgtgccaggagcatatgcttcttgagggtagcccgctcaagaaagccctgcctgcagaaaacacaagtgaagagcggcccctccttggggtgggtcttctgatgctcctccagagctgcctgggagggaaaggcctggccacacacttcgcaggcctttctgctgctgctctctcctggctcctttctcattgcctcctgcaggctcagctcctctaccaaggtcacgctggtggcttccccttctggggtgagtgctgatgccggacttgagcttctctccggtttgcccccctcttccttgcctcctaaaacaccactgcttccctgctccattggctgaggctgatccaggctgtcaggtggtggtggtggtggcaaagaagactgttgagtagttttctcattactgtccatctccttcccagctgtggctgctgccgccactgtccccacctcctcctctgccccagatgcctcttctgaat

SEQ ID NO: 7910 - DNA, 598 bp, Homo sapiens
  MAP TO CHR16.3; EXPRESSED IN HELA, SIGNAL =  17; EXPRESSED IN HEART, SIGNAL =  11; EXPRESSED IN FETAL LIVER, SIGNAL =  23; EXPRESSED IN BRAIN, SIGNAL =  19; EXPRESSED IN PLACENTA, SIGNAL =  16; EXPRESSED IN BONE MARROW, SIGNAL =  33; EXPRESSED IN LUNG, SIGNAL =  15; EXPRESSED IN ADULT LIVER, SIGNAL =  13; SWISSPROT HIT: Q07436, EVALUE 5.10e-01; NT HIT: gi14779150, EVALUE 3.00e-83; EST_HUMAN HIT: BG485267.1, EVALUE 0.00e+00
acaacgttcggctgataacccacatagcccagggaaatcccttccaaatttggacgaagaagagggaaggaagaggggtcaaggcgcagaaggcagtacccaggcctgggaaatcacgaagagacacagtcgggaaagggggcctccagaacagagaacatactcacttttccaggccccacccatgtctattacccagttaggaggaatgagctcatttctgtgaacgtgagatgaccctcgaccccgtgctcctatcacacgccattagctttgccccacatcctttcaatctgctcctctaagagcggtcctgagctttggtcccagacgcacagaaggaagcggcctgaatcttacccagtcctcgacgcgcccagcatcttgactgcagagggcgaagcggccgcatctcccggcaaacgcgtgtgaagcagcggtgccgccattgggccgaactaacgcgaccgctgcgcctcaggccggatgcccagctccttccagccacagcctctgtcccggaagttgcgcgtgccagcgcaaccttcagacaatcaggggccccgtgagccaccgcacccggccaaacttaaatttt

SEQ ID NO: 7911 - DNA, 570 bp, Homo sapiens
  MAP TO CHR16.3; EXPRESSED IN PLACENTA, SIGNAL = 1.4; EXPRESSED IN FETAL LIVER, SIGNAL = 0.85; EXPRESSED IN ADULT LIVER, SIGNAL = 2.1; SWISSPROT HIT: P41248, EVALUE 1.10e+00
taacggaaaggaccaaccacaaggaaaaaatagttctttggaatctcagcttggaaacggtcaaggctggtaatcagaatatttagaatagagaaattcagaatgcgaatcactggtctgcagctcacaccaaggcctgggttgaggggtgaggggcaggttgaggagtgcaggggaaaatacagaaaactccttcctctccttccactctttttcccaaagctcagcagacacgactccttcatcctcctttcttgaattaatgctccttctaattgtaactaaagatctaaggtgcatctctgtagaagagaggaatgtgattttgcaatccacagttctaattatagggaaaactgttatttagtaaaaaggaaggaaaaggaaacgaattgtgttgaacaagagaagaggtgctcaatagaggctacgatttgtgtaaggaactgtgcattccagtcatagtcgtggaaaatgtgttttatgagtttcttaaaactgtacgactctgatgaaaattcatagaaagatcttatttctgtgcgtcgttggtttgctcttcccatctca

SEQ ID NO: 7912 - DNA, 511 bp, Homo sapiens
  MAP TO CHR14.3; EXPRESSED IN BRAIN, SIGNAL = 1.2; EXPRESSED IN ADULT LIVER, SIGNAL = 1.3; EXPRESSED IN PLACENTA, SIGNAL = 4.8; SWISSPROT HIT: P17931, EVALUE 6.00e-09; NT HIT: AF031422.1, EVALUE 0.00e+00; EST_HUMAN HIT: BI084725.1, EVALUE 0.00e+00
atgcatgtaatgcctttgccatattcctctccttcttagatcacatattcctattttcctgaaaattctgcttttgagaatgctttctgtcccgtaattgtgtatgtctttctttccagctccatgatgcgttatctgggtctggaaacccaaaccctcaaggatggcctggcgcatgggggaaccagcctgctggggcagggggctacccaggggcttcctatcctggggcctaccccgggcaggcacccccaggggcttatcctggacaggcacctccaggcgcctaccctggagcacctggagcttatcccggagcacctgcacctggagtctacccagggccacccagcggccctggggcctacccatcttctggacagccaagtgccaccggagcctaccctgccactggcccctatggcgcccctgctgggccactggtgagatggcattccttctttcatgtacttgacatgcagagggcttcagggagaccctgagctttaaa

SEQ ID NO: 7913 - DNA, 551 bp, Homo sapiens
  MAP TO CHR14.3; EXPRESSED IN BONE MARROW, SIGNAL = 1.8; EXPRESSED IN ADULT LIVER, SIGNAL = 1.1; EXPRESSED IN PLACENTA, SIGNAL = 0.88; EXPRESSED IN HELA, SIGNAL = 1.2; NT HIT: M94081.1, EVALUE 0.00e+00; EST_HUMAN HIT: BG393458.1, EVALUE 0.00e+00; SWISSPROT HIT: P01848, EVALUE 1.00e-47
aaccctgatcctcttgtcccacagatatccagaaccctgaccctgccgtgtaccagctgagagactctaaatccagtgacaagtctgtctgcctattcaccgattttgattctcaaacaaatgtgtcacaaagtaaggattctgatgtgtatatcacagacaaaactgtgctagacatgaggtctatggacttcaagagcaacagtgctgtggcctggagcaacaaatctgactttgcatgtgcaaacgccttcaacaacagcattattccagaagacaccttcttccccagcccaggtaagggcagctttggtgccttcgcaggctgtttccttgcttcaggaatggccaggttctgcccagagctctggtcaatgatgtctaaaactcctctgattggtggtctcggccttatccattgccaccaaaaccctctttttactaagaaacagtgagccttgttctggcagtccagagaatgacacgggaaaaaagcagatgaagagaaggtggcaggagagggcacgtggcccagcctcagtctctccaac

SEQ ID NO: 7914 - DNA, 509 bp, Homo sapiens
  MAP TO CHR14.3; EXPRESSED IN LUNG, SIGNAL = 2.3; EXPRESSED IN FETAL LIVER, SIGNAL = 2.4; EXPRESSED IN BRAIN, SIGNAL = 1.9; EXPRESSED IN ADULT LIVER, SIGNAL = 1.7; EXPRESSED IN PLACENTA, SIGNAL =   2; NT HIT: AF289665.1, EVALUE 4.80e-01; EST_HUMAN HIT: AW118655.1, EVALUE 2.00e-97; SWISSPROT HIT: Q04637, EVALUE 8.10e+00
gtaagcctggagccctcttcacaattgaatcatgacctttccaaccaccccaccactatcaccaccaaaggagctctagggcatatccccaaatgccctcttccctgcctgccagcccactgttcatgtacctggagctcatgtacctggagatgtggagttatcagaactttctgccacccttaatcctcttggcccagtgaaagaagggaagctgtttcagcatggccgctgactcaccgtgtgtcacttccccaccccctgattaaagccttctccctcattagatcgctgctaagcctactcacccatctcttgggtctggagaggaaaatcatctctggaaaacccggcagagagagtctaaagggttgataaagagattccagcagggaaaggtttgcccagacacatgccccatgcaagggacagcagtctcctggactcccagggcaaactcactgcttttccatgtctcactggaataatgttggcagccagaggtctac

SEQ ID NO: 7915 - DNA, 573 bp, Homo sapiens
  MAP TO CHR14.3; EXPRESSED IN BRAIN, SIGNAL =  11; EXPRESSED IN ADULT LIVER, SIGNAL = 7.1; EXPRESSED IN PLACENTA, SIGNAL = 5.2; EXPRESSED IN HELA, SIGNAL = 4.3; EXPRESSED IN LUNG, SIGNAL = 5.5; EXPRESSED IN FETAL LIVER, SIGNAL = 6.9; EXPRESSED IN BONE MARROW, SIGNAL = 7.8; SWISSPROT HIT: P44394, EVALUE 2.40e+00
tcataagcgtgtcacccaagttagcagttctgaggagcaaagtccattgcgggacactgggctgtttgcagctggctgggggtttccttcaggcaagagtagctaagagagaagagtgggacaaaaagaatgggcagagctatgacctcagccttccttgcaagcccctgctgtaaaccccaacccctcatacaaatctccagccatccttgactggtaagctgcctgatttagccactatcccttgactggtaagctgtctgatttagccactatcccttgactggtaagctgcctgatttagccactatcccttgactggtaagctgtctgatttagccactgtgcctgcccattccagcccttagtaaggacctctccacagcagaagccctggcctgtgaagcccaggactgtctctcatgaataccttgcccctggtgggagtgcctacttggtcctgggcttcccgcttgggagtgcgcttggtaagcccggtgcagatggtgtcttccttgttgaagatgccacccatgtgcaatccaagttagcaccgccccatctagtttctag

SEQ ID NO: 7916 - DNA, 591 bp, Homo sapiens
  MAP TO CHR16.3; EXPRESSED IN HEART, SIGNAL = 2.2; EXPRESSED IN FETAL LIVER, SIGNAL = 3.4; EXPRESSED IN LUNG, SIGNAL = 1.7; EXPRESSED IN BONE MARROW, SIGNAL = 1.7; EXPRESSED IN ADULT LIVER, SIGNAL =   2; EXPRESSED IN PLACENTA, SIGNAL = 2.2; EXPRESSED IN HELA, SIGNAL = 2.4; NT HIT: gi16174379, EVALUE 2.20e+00; SWISSPROT HIT: Q09222, EVALUE 4.40e+00
tgtggaagagtctggaggatgaaggaaagagagaggaaatgtgatcataggtgctaagttgatttataaaataaaaagctgagaatgagaaagttggacagagagaaagaaaaacattttatattgggactggagaggaagatgtgggattttgtttgagagacattcctggatagtagtcaggtatgagaagtattggaaatggaggaagggaatattgtagattggttttgagttatgaattcagtcacttttactatactcaagtagaagaaataaagattgacatttctttaagcaatctctgcttgacccctgtctgaaggtttaaaaaatgtaaattcttacaaacctggattaaacggaaccacagcttttatataggctataagtatcatgcattagattcaatttcttgacttattaggagtaatttctatgaattcattgtaatatgcttggtgaagtaaagagaagaaaaaagactaatatagttagtgagagtgattctgtcaacaatttcatccagcagtctaaaaggcagcatgaaatgagaggtatgaatctgtgtcctttcagtcagcctcagct

SEQ ID NO: 7917 - DNA, 507 bp, Homo sapiens
  MAP TO CHR19.3; EXPRESSED IN HEART, SIGNAL = 5.8; EXPRESSED IN LUNG, SIGNAL = 2.3; EXPRESSED IN BONE MARROW, SIGNAL = 2.8; EXPRESSED IN ADULT LIVER, SIGNAL = 1.8; EXPRESSED IN HELA, SIGNAL =   3; EST_HUMAN HIT: BG289439.1, EVALUE 4.00e-55; NT HIT: gi16163579, EVALUE 1.00e-108; SWISSPROT HIT: P35789, EVALUE 5.00e-65
gtgtggatgagcatgagctgctcaaaagaggtaataatggtcttcaccacagtctgacaactacccagagaaaaatatttcaatgtgataaatatgggacagtctttcagaaattttcaaattgaaacagacctaagatacgacatactggaaaaaaatctttcaaatgtatagtatgcggcaaagcttttaactcgtcctcaaaccttactacacataagaaaattcatactggagagaaaccctacagatgtgaagaatgtggcaaagccttcaaaaggtcctcacaccttactgtacataagatagttcatactggagagaaatcctacaaatgtgaagaatgcgggaaagcctttaagcacccctcacatgttactgcacataagaaaattcatactggagggaaaccctacaaatgtgaagaatgtggcaaagactttaagtacacttctacccttattgcacataagagaattcatactggagagaagccctacaaatgtg

SEQ ID NO: 7918 - DNA, 512 bp, Homo sapiens
  MAP TO CHR19.3; EXPRESSED IN ADULT LIVER, SIGNAL = 1.6; EXPRESSED IN BRAIN, SIGNAL =   2; EXPRESSED IN PLACENTA, SIGNAL = 1.7; EXPRESSED IN HELA, SIGNAL = 1.5; EXPRESSED IN LUNG, SIGNAL = 1.4; EXPRESSED IN FETAL LIVER, SIGNAL =   3; EXPRESSED IN BONE MARROW, SIGNAL = 2.1; EST_HUMAN HIT: AI672482.1, EVALUE 8.00e-87; NT HIT: gi16171561, EVALUE 1.00e-117; SWISSPROT HIT: P04622, EVALUE 1.10e-01
accctgtttggttctgcaacggggattaggggagccccacgatttgttttcaaggatgtccgggctccaggacaggatgccctggcgcacctgatgacaggtgtggtggttggaaaggacctggtttcagctccgggtacacatcctccttccttctgctgcgtggctgtggcctcttccacgtcctcagaatccagctgttactccgtccgcggcctctcagctctagggccctctgcacactggcccccccaggtaaggcctcttgtcccactttcacccccaacccggatagcatggatccaaggaaaagcctcctgattccaaacatcctcccctcagcctcagtcctgtctgctgtaattcagagtgcgggtgggctggcacaagatccctgggggagggtctgcaggctgtgcagtggcctggcatttggccagcagcccctagtcgcaggcaggggtctttctggatgcaccgaggtgggctgaggatatgggaggtctggctga

SEQ ID NO: 7919 - DNA, 592 bp, Homo sapiens
  MAP TO CHR18.3; EXPRESSED IN ADULT LIVER, SIGNAL =  22; EXPRESSED IN HEART, SIGNAL =  10; EXPRESSED IN FETAL LIVER, SIGNAL =  17; SWISSPROT HIT: P24049, EVALUE 4.00e-32; EST_HUMAN HIT: AW376971.1, EVALUE 0.00e+00; NT HIT: gi16164054, EVALUE 1.00e-105
cagctctccacccgtctaaggatctttgggaaggccactcatagacaaaatgtatagcacactgagtttggtggcaatttagacatgtaaaggtgaaggcagacaactggttaaaaaaatgctatttgcagaataaaaggattgcctttcaaaaatgatttcattgaggcaggactctggagcaagcctgggaattcatatttagcaatgatagtttgtggtgttttactaattaaggatgttcctggtttcattctccttcctttcttccccagggtttagatgtagattctctggtcattgagcatatccaagtgaacaaagcacctaagatgcgccgccggacctacagagctcatggtcggattaacccatacatgagctctccctgccacattgagatgatccttacggaaaaggaacagattgttcctaaaccagaagaggaggttgcccagaagaaaaaggtaaataagtagttgctcggttttgtttgtgatagtagaaagatttgtggttgctgtgatgactatcttaggacacctttggaataactatgaaagaaaactattctgagcaacccttttcacct

SEQ ID NO: 7920 - DNA, 502 bp, Homo sapiens
  MAP TO CHR16.3; EXPRESSED IN FETAL LIVER, SIGNAL = 3.7; EXPRESSED IN LUNG, SIGNAL = 4.6; EXPRESSED IN ADULT LIVER, SIGNAL = 4.6; EXPRESSED IN HELA, SIGNAL = 5.3; EXPRESSED IN PLACENTA, SIGNAL = 4.3; SWISSPROT HIT: O15228, EVALUE 1.00e-51; EST_HUMAN HIT: BI254071.1, EVALUE 1.00e-91; NT HIT: gi7657133, EVALUE 9.00e-92
gctaattgggataaggcaggtctcaaaaacttttttaaaaaatgacttcataacaacattcagaacactacatctaggagtcagtatcttggcagagcagcttcttttctcttctaggaaagatttagcagacacataaccatttcctaaaatagtttttacatattcagagaatagagcccagtggagtttattgccaccataacagcaccacatgaaaaaggcacctgacattcacacagctcaccaactggtttcattttcaggaagtccattcctgctgctataactggcacagacaaatcatgcttgtatgggagaaaagacaacaccagaaagtcaacgtaactttgatgactgagcagaagaacaagatgctcctggttggcttgctacagtttctgaatacctcctacatttacacacacctttgagaaaatttgtttaaatattttgcttaagggaaagacaaaaaactgaatggctcccagacgcagtctgt

SEQ ID NO: 7921 - DNA, 524 bp, Homo sapiens
  MAP TO CHR16.3; EXPRESSED IN PLACENTA, SIGNAL = 2.2; EXPRESSED IN LUNG, SIGNAL = 1.4; EXPRESSED IN ADULT LIVER, SIGNAL = 2.2; EXPRESSED IN BRAIN, SIGNAL = 3.8; SWISSPROT HIT: P40180, EVALUE 3.70e+00; EST_HUMAN HIT: BG434363.1, EVALUE 1.90e-01
cgacttccctaccccctggccagtaagtagccacgaacaactgtactacaatgcccttttgaatggcgggggtgctgacagctgtctatttgctctaaagatgtggctgcttcagggagcaagtgagcagggggagaaagaggaaaagcatttttagaaattatttccgacaggtgaccacatactaaaataacaacatttggtttgccttgctagctggaggcaaaaatcggctcaggtgggagggtgaggctgcaggctaaatgcagacaaggctggcttgccctgagttggcccagttctaggaagggcaccggcatttctgccattaattgatgcactgggaacccccagcttggttttctttaaggagagaaggagctgggtctttcatggtgtaactgtgaaaatgagaacctcccaggggctgcaagacctggttgtatatggagtccagtgagctattttagggacgaagtgtaaaattgtggaaaacagttgtaacacaggatggggtgtgtgta

SEQ ID NO: 7922 - DNA, 595 bp, Homo sapiens
  MAP TO CHR16.3; EXPRESSED IN HELA, SIGNAL = 6.9; EXPRESSED IN BONE MARROW, SIGNAL = 1.3; EXPRESSED IN FETAL LIVER, SIGNAL = 0.82; EXPRESSED IN ADULT LIVER, SIGNAL = 1.1; NT HIT: gi14778168, EVALUE 1.00e-105; EST_HUMAN HIT: BI011310.1, EVALUE 0.00e+00; SWISSPROT HIT: P37716, EVALUE 1.10e+00
gactactgccgctccttctgaatgcctggttgcccgaccagctctgttccagatctgcctagaggcctcagtttgcatcgtgtgccagccacgtgagctgggcactgcagctcccacctccctgcagacatacgatgctgggcggatggaaggacaagcgtgcgggcttcccatgaaccggaagccgagaggggctgcagctacatgctggtggacacacttggccattctccctgtcaccatgactggatcagggctaagtccccctgccctgcccagggccagtacctgagggcggggagcctggagagccaggtgtggggctgtcatccaccaggcccagctccctgtgcagagcacggggccggaccacacccagcgtcctctcccgcttctctcttgccgcccggagcttggtgatactcagcttcaggtcgagcggctcgtccagggagtgcatggtgagggggccggagttggaggtggcagcaggcagtgggctcccagctggtcttcacgcaggaacctggggaaggacaggagctgtgctgtggcactgagaccccaggcttctcctcgggctgtactcatgaca

SEQ ID NO: 7923 - DNA, 559 bp, Homo sapiens
  MAP TO CHR16.3; EXPRESSED IN ADULT LIVER, SIGNAL = 1.3; EXPRESSED IN PLACENTA, SIGNAL = 1.9; NT HIT: L35234.1, EVALUE 0.00e+00; EST_HUMAN HIT: BE927311.1, EVALUE 1.00e-101; SWISSPROT HIT: Q60793, EVALUE 5.30e+00
ggattatgccaggtggtctggagaagcgactcacttgcgagcttgctggaggagttcgtccttacgctgcaccagcatgcgctgtctctcatcagcagacttggagaagcggctcccacgagcctcgaagtcttccacctcactgggctccacttccacctcgccgaagtccagcgtctcctccaggcgaggactgaggtccagtggcacacgctcggtctggacacggggcaggaagcaaggaggcagctgtgagcacaggcctccctcctaagcaggttcctcacctacagggcaccccagacacggctgttctggacgcaaagagaaggctgctgccaagcagggaggcagaaactaggaaccacaagctacggataatggagcagcagcttccctgagggcaggcctgctgcctatggcttgagtagtactaagaacaggacctgactcacacagaatgttcggcatcagagggtaagtaaatgattaccagcatgaaaaacgtaagcaccttcaagctgcactcttagaatacgctaccaacacgacaaccgtg

SEQ ID NO: 7924 - DNA, 541 bp, Homo sapiens
  MAP TO CHR18.3; EXPRESSED IN PLACENTA, SIGNAL = 2.2; EXPRESSED IN FETAL LIVER, SIGNAL =   2; EXPRESSED IN ADULT LIVER, SIGNAL = 1.9; NT HIT: gi14760267, EVALUE 0.00e+00; SWISSPROT HIT: P31809, EVALUE 4.50e-01; EST_HUMAN HIT: AA907897.1, EVALUE 1.90e-01
aaaaacagagaccagcccacggggctggctttttccatgtttgataccagaagatgtctggtgctcactcaccctcggctacagtcaatctcatcacgaaggtttcgttttctcctgcgctggcctgcaagtagcagcggtaaagccccgagtctgagactgtgacatcggggatgacgatgacgctccaccttccgtggctgcagttgctcactatttgtcttgggaacttggaggtgaaatttctgccatggaccaagttgcagtaagttaagaggtcgatctgacggggctggatcttttcccacctcactgcctgcacaggccacgtcatctgaggctgacaagtgagtgtgacattctttccaggttccgaaacaatgtggctatttgatggcacagctgcctcaaaactatctgaaaagaagaagcaaatgattagatccaggttgtcaaattttgggacacccaactggaagatacctaatcataaaaataattggtgatgttacctaacacagttcttccgttgtgaatgacc

SEQ ID NO: 7925 - DNA, 535 bp, Homo sapiens
  MAP TO CHR16.3; EXPRESSED IN LUNG, SIGNAL = 3.2; EXPRESSED IN BONE MARROW, SIGNAL = 3.7; EXPRESSED IN ADULT LIVER, SIGNAL = 2.9; EXPRESSED IN PLACENTA, SIGNAL = 2.8; EXPRESSED IN HEART, SIGNAL = 2.3; NT HIT: AB036741.1, EVALUE 7.90e+00; SWISSPROT HIT: P51112, EVALUE 2.20e+00
gaggaccctgcctctttctccagccgcaccaacccagctggaggggagctgaaaaggaggctgtcgattcaaggcccgccccaatccctgaaaaggggccgtcacttcgtgtgccccttccaagcagacaagcagagcaaggagcagatgggaagttgcccacccagggaccagctccaaaccttccagaaacctgcaaacatgaaacaatcatagatgagacgaggcttgaaagccaccatttttaaaataaaaggaaatcgcataaaagctctggcaaagatgacaaaaaagaaaaggaaacttgttaagatcaaaaatgcaggcaaacctcaaaaaagaggcttgggataaaggaagtgggggttttacctgggggcttccaagggggcttctaaagtgggtgagggtggggctgtccccagccggggcttgggcgagctggcgcctctgtcctccacgggcacctttcatgttacccccctgccaggatcgtgaggctggaggacagtgtagagaggctggacacccatta

SEQ ID NO: 7926 - DNA, 547 bp, Homo sapiens
  MAP TO CHR19.3; EXPRESSED IN LUNG, SIGNAL =  35; EXPRESSED IN BONE MARROW, SIGNAL = 0.98; EXPRESSED IN ADULT LIVER, SIGNAL =  17; EXPRESSED IN HELA, SIGNAL =  79; EXPRESSED IN HEART, SIGNAL = 2.6; EST_HUMAN HIT: BG335159.1, EVALUE 0.00e+00; NT HIT: gi4557887, EVALUE 0.00e+00; SWISSPROT HIT: P05783, EVALUE 5.00e-64
tccatcttgctgctgatgactttagacccaagtgtgagacagagctggccatgtgccagtctgtggagagcaacatccatggctttgcaaagtcattgatgacaccaatgtcactcggctgcggttggagacagagatcaaggttctcagggaggagctgctctttatgaagaagaaccacaaagaggaagtaaaaggactacaagccaaggtcgacagctctgggttgaccagggaggtagttgcccccaaagctcaggaccttgccaagatcatggcagacatccaggcccaatacgacgaggtagctcagaagaaccgagaggagctggacaagtaccagtctcagcagattgaggagagtatatagtggtcaccacgcagtccaccaaggttgtagctgctgagatgatgctcacagagcttagatgtacagtccagtccttgaagatcgacctggactcaatgagaaatctgaaggccagcttggagaacagcctgagggaggtggaggcatgttaagccctgcagatggagcagatcaaca

SEQ ID NO: 7927 - DNA, 509 bp, Homo sapiens
  MAP TO CHR18.3; EXPRESSED IN ADULT LIVER, SIGNAL =  11; EXPRESSED IN BRAIN, SIGNAL =  13; EXPRESSED IN HELA, SIGNAL = 9.2; EXPRESSED IN HEART, SIGNAL =  15; EXPRESSED IN FETAL LIVER, SIGNAL =  21; SWISSPROT HIT: P57184, EVALUE 8.10e+00; EST_HUMAN HIT: BG722014.1, EVALUE 4.00e-21; NT HIT: AL163203.2, EVALUE 3.00e-98
gcaatggccttaacaacaaaccaaaactgagttttaagaataaactacttgttactgtgttgtattttaaaaatagtctgtccattaccatgttttagagatgaggaaaaaaattatttgcgtaattatttagttacttgagtagctgtgctttcatgatcctgttaatgtgttggaagtagttattcaggaacttaataaacaaagcacaaataaaatactggtagcaaacagccatttcatctctctcacatagtagtctgaagacatgcaagaggcagaggggtaataagttccaatttatgagatcattaagtgaaccatactcccttcatattatttctctgccaccattttcaggagtattgtcatctgcatgagcaaacctggttcatcactacatatttgcaacaggaaaaggaaggggaggatcatgtataacatttttaggccaagattcacaaccaaaaacaagactttattaatgttgagccctcttttattcctag

SEQ ID NO: 7928 - DNA, 530 bp, Homo sapiens
  MAP TO CHR16.3; EXPRESSED IN BONE MARROW, SIGNAL = 1.6; EXPRESSED IN ADULT LIVER, SIGNAL = 1.7; EXPRESSED IN PLACENTA, SIGNAL = 1.4; SWISSPROT HIT: P01132, EVALUE 8.50e+00; EST_HUMAN HIT: H20409.1, EVALUE 1.90e-01; NT HIT: AF078779.1, EVALUE 7.90e+00
ctgaagaatttggctcccagacttaaattctgttacaaataatccccatgcatccatgcatgctgacagatatggcataacactttaatcgccattggctatgggcctaataaaatcaaattctgctgggctccatttttacaggcagtatcaagccctgtgaactttaatgccccatgtctatttagatagtcatggctcagagctggtattaaaagtagctagaaatacttgttctgaagtgttgaaatatattgcaaattacactggagtatgggcttagtccaaactaatcctatattgcactgacctttgcaaaatcagttctgtttttcttggcagcttcatttccactctttctctttgtcttattcccctgaagttccatctttattttgttttgatgtcaggaatcagtatgaaagagctgctaggttttaggtatgtttgtatagatgtgtgtgataggttttgcttctgggtgaccaaaaacaaacctatttctcatcccatttcctttgcagcctcat

SEQ ID NO: 7929 - DNA, 588 bp, Homo sapiens
  MAP TO CHR18.3; EXPRESSED IN ADULT LIVER, SIGNAL = 1.3; SWISSPROT HIT: P07947, EVALUE 2.00e-29; EST_HUMAN HIT: BF881419.1, EVALUE 2.00e-60; NT HIT: gi15305503, EVALUE 1.00e-97
taggacaaggatgtttcggcgaagtgtggatgggtaagaagcctgaatttttgttttctgtcattgtttagctgtggattaaagtgcaacaatttatgataaaatatgtttcaatatttaagagaagtgctgttcactgaagtttggtctaaaatcctttaaaatataaattcctaaaatgtgttatttctttaggaacatggaatggaaccacgaaagtagcaatcaaaacactaaaaccaggtacaatgatgccagaagctttccttcaagaagctcagataatgaaaaaattaagacatgataaacttgttccactatatgctgttgtttctgaagaaccaatttacattgtcactgaatttatgtcaaaaggtatgtattagtatctccttaggtatttgtgttgataatgtttttaagagtcttgatttgtatgcatatagacttatactgttttctaatttaagatttttatgtagacatatttggatagaagaaacctgacactttgtttaatggaatagtgattatccagttattccagaggatagtatgacgtttaaaaggaaaagtaggcaggctgaa

SEQ ID NO: 7930 - DNA, 554 bp, Homo sapiens
  MAP TO CHR19.3; EXPRESSED IN PLACENTA, SIGNAL = 2.5; EXPRESSED IN HEART, SIGNAL = 2.5; EXPRESSED IN HELA, SIGNAL = 3.5; EXPRESSED IN LUNG, SIGNAL = 2.5; EXPRESSED IN BRAIN, SIGNAL = 3.2; EXPRESSED IN ADULT LIVER, SIGNAL = 2.8; SWISSPROT HIT: Q01081, EVALUE 1.00e-24; EST_HUMAN HIT: BE910002.1, EVALUE 0.00e+00; NT HIT: gi14780616, EVALUE 4.00e-05
tatgtcaaggtgcttgctgccccccacttagggcccagaagtggaggcgtttcaatgcctgatggtggccactgtaggctctcagcttgaatttcatcactaaatccagtccagccccagagcgggtagtgagtcccctgaagatctctgagttctcctgctgaccctgactgacatttcctgcagttccggagggaggaggatggagagcgggccgtggctgaactcagtaaccgctggttcaacgggcaggctgtgcacggtgagctgtctcctgtcactgacttccgggagtcatgctgtcgccagtatgagatggggtatggtagttcaagggtgggatgggcacttggaatcccagactttgaatgcgtggtaggggctgtcagtgacaatggcttcctccatctctctaccctctatgcagggaatgtacccgaggtggcttctgcaacttcatgcatctgcggcccatttcccagaacctccagaggcagctctatgggcggggacccaggcgcaggtacctcaggaccagcctgctatgtctcctc

SEQ ID NO: 7931 - DNA, 521 bp, Homo sapiens
  MAP TO CHR16.3; EXPRESSED IN PLACENTA, SIGNAL = 2.6; EXPRESSED IN HEART, SIGNAL = 2.3; EXPRESSED IN BONE MARROW, SIGNAL = 4.2; EXPRESSED IN FETAL LIVER, SIGNAL = 2.5; EXPRESSED IN LUNG, SIGNAL = 3.1; EXPRESSED IN ADULT LIVER, SIGNAL =   3; SWISSPROT HIT: Q37976, EVALUE 8.30e+00; EST_HUMAN HIT: BI755862.1, EVALUE 1.00e-54; NT HIT: AF411253.1, EVALUE 6.00e-19
gggattagctgggagggtagggattatctgagctgcagttgttctgtcagtcaggccattgactggatttgggggccgtgcatgcactagccccaccagccttatctctgcagacaccagctcctttctctgcttccttccttgcagatgatgggaagctgtccttggaggaattccagctcttctttgcagatggcgtccttaatgagaaagaactggaggatctctttcacacgattgactctgacaacaccaagtgagcttcagtcctggctggcagagtgggggtgtgtgtgggctgtggtggaggcatcttttcatctagtgtccgttcctagtcccctgtaaggggcaggagaactgaaaatccccaaatttgctaatccagaagtcagctcttcactgcctggggtgaatggggcgtgtgcagattcatattgcattggctactatcgcaagtgtgtcttctgagtgcacatggccaactaaggagagactcctggttttgcacagtggacatg

SEQ ID NO: 7932 - DNA, 582 bp, Homo sapiens
  MAP TO CHR16.3; EXPRESSED IN HELA, SIGNAL = 0.9; EXPRESSED IN LUNG, SIGNAL = 1.4; EXPRESSED IN ADULT LIVER, SIGNAL = 1.1; EXPRESSED IN PLACENTA, SIGNAL = 1.2; NT HIT: AF053069.1, EVALUE 9.00e-03; SWISSPROT HIT: P98089, EVALUE 4.40e-02; EST_HUMAN HIT: AA341555.1, EVALUE 1.30e-02
gagagaacaggagctgccacctgggaaatgcctcctccagcctccctgggccgcaccccagagccctaaataaatgcctttgcaggtctgctcccaagaggcacgaggactcctgccatgttccctgagacatgacttagcgggctggccaccatggcctgtcttgccacgatcccagggcccagccctctgtcccccagcaccaaagcctgtcccatctagaagaaggcactggactcgctgtccgccacccctcccgccttgctcccctccatcctgctccgggaaggctccaggccctcacatcccacggccatggagccttggggaacccgctgccccggtctggaacgtggagcaagctcaggcgacggtttccgcggacaggacagacggggtggccggatcccctgcacagctccaagtttgggtgacggtttccgtggacagggcggacagggtggccgggtcccctgcacagctccaagtttgggtgacggtttccgtggacaggacagacggggtggccgggtcccctgcgcagctccaagcttgagtgatggtttctgtggacaggaggga

SEQ ID NO: 7933 - DNA, 543 bp, Homo sapiens
  MAP TO CHR16.3; EXPRESSED IN HEART, SIGNAL = 2.4; EXPRESSED IN HELA, SIGNAL = 2.8; EXPRESSED IN LUNG, SIGNAL = 1.1; EXPRESSED IN ADULT LIVER, SIGNAL = 1.5; NT HIT: gi16196551, EVALUE 6.00e-50; SWISSPROT HIT: P26516, EVALUE 1.00e-14; EST_HUMAN HIT: AA314705.1, EVALUE 9.00e-50
tcaaattcttcccaggatgctcttacttgagctggctggcaaaaaaaatcattcaagagttttaaaaatagacaccacttacggaattaggacagtatcttttcatgagttcgttgatggcaatgtcattcttgtgtagtttagggcctgtgtggtaccagccaactattctttccctggctaggaaggaaaaaaattagcaggctttaactatttcatgaagatctatacaactccctcaaaaaggataagaacatcagtagttatgtcctttacctctttgaaaattccagacatatttaccctggtggtactaaaactctaatggaagactgactttactggatagttcttcacttttctgccgcaatgagaggttatttccccttgtacccaaacccaggtcgcctatttggccttaaattgctactctagtttttcatgtattctaccttattcctctactaccactagtcttactgaagtgtagctaagtgaaagggcccttgatgttaaagaaaagcgaacagaagacccccatac

SEQ ID NO: 7934 - DNA, 546 bp, Homo sapiens
  MAP TO CHR16.3; EXPRESSED IN ADULT LIVER, SIGNAL =   1; EXPRESSED IN PLACENTA, SIGNAL = 1.1; EXPRESSED IN HELA, SIGNAL = 1.3; EST_HUMAN HIT: BE968659.1, EVALUE 1.90e-01; NT HIT: gi14783047, EVALUE 2.10e+00; SWISSPROT HIT: Q02100, EVALUE 3.90e+00
acttttcggcatgacctttgaatagagaatcgtaagagaaataagaggctcctatgaattatctgaaagtttctggactcaccatggatcttgactgtgtcattgcatctgacagtcccagggaagtgactctctgctggtttcatgaatctgtgcttgggctctccctgcagtttactgggtatagtgatgacaaatcactgtttcaagagacaatttcaaaagcatgagatgctgctgaaagaggattgtgaaccaggggacagctctttcattctgggagagcaacattgggagaatatgctctgtgagcccaaacagcatcctccccagcagggtgagggcagagctgcagggcaggcccagaacccactcaacacagacgtcagccctggagctggtgcaaaggagtctgaggagaaaatttaccagcatctgaattacacttatttcaaacaaaaatgcatgtcctgtgagtgtttgtttcactattagaggagttctgtactgatgaagttctggacatgccagcggacaaatatcagt

SEQ ID NO: 7935 - DNA, 554 bp, Homo sapiens
  MAP TO CHR18.3; EXPRESSED IN PLACENTA, SIGNAL = 1.4; EXPRESSED IN HEART, SIGNAL = 2.4; EXPRESSED IN LUNG, SIGNAL = 1.8; EXPRESSED IN FETAL LIVER, SIGNAL =   2; EXPRESSED IN ADULT LIVER, SIGNAL =   1; SWISSPROT HIT: P49910, EVALUE 4.00e-38; EST_HUMAN HIT: AW014356.1, EVALUE 2.00e-78; NT HIT: gi14749049, EVALUE 3.00e-24
ctgagagctgagtcaatgccccagtcataattatggcttccccattaacttacaatagatcaaacaaacaaaaatgtttacttcttacctgttgccttggctcctccagttctttttccagctcctccagcatagtcacagcttcctctccattctctggccgatgctctcgcagccaagcttgcagctcctcaggaaggatggccaggaactgctccaacatcagcagctccaggatctgctccttggagtgcacctccggcctcaaccactgacagcaaagctctcgcagccggctcagagcctcccgagggccagtggagtcagagtaactaaactgcctgaacttctgccggaatacctcttggctccaggggttttcctgaaggccaaagtcctggtccaaaacataattttcttcttcaaccttgacaactagaagtccttcctgttcttctggagcatggtaggccaagactgtggcctctcctgacattctgggcagagacagtctgaaaaggctgcccaggtgaggcagggaggagatggagatt

SEQ ID NO: 7936 - DNA, 518 bp, Homo sapiens
  MAP TO CHR16.3; EXPRESSED IN BONE MARROW, SIGNAL = 1.1; EXPRESSED IN BRAIN, SIGNAL = 4.1; EXPRESSED IN ADULT LIVER, SIGNAL = 1.4; EXPRESSED IN PLACENTA, SIGNAL = 1.9; SWISSPROT HIT: O15255, EVALUE 5.50e-01; EST_HUMAN HIT: BF772650.1, EVALUE 1.00e-94; NT HIT: gi14763849, EVALUE 5.00e-41
tggctgggtctgaatttttctgcttctcctgctccccgaggagtgcagccccagtgggcccaatgattcctgtggagtggggagctgggtgctgtggtatctccagcacccaccccagactccagttccgggccagcttggaccaaaaggagaggctggactttggagggtgggtgtgagtgcctttgctgaaactggcccctgccacccagtggccagcatgacaagttgaggctctaacccttccgcccctcacatcttcctctaggcttttctggctttgcccgcccagctgctccatgccaggaggaggaggagacacctagagcctgcgacaccatggctcgcctcgctgcaggtgggtggcagcaacggagactgcagtgcgccggagcggtaggagagcggccgcgctaggagggcaggcggctgcagccagggttgggggtcaggcttgcagtgatggacgggctgcagcagtggccaggtggtaggagccttgtagggaggactggtgc

SEQ ID NO: 7937 - DNA, 584 bp, Homo sapiens
  MAP TO CHR14.3; EXPRESSED IN LUNG, SIGNAL = 2.7; EXPRESSED IN ADULT LIVER, SIGNAL = 1.2; EXPRESSED IN PLACENTA, SIGNAL = 2.1; EXPRESSED IN HELA, SIGNAL = 2.3; SWISSPROT HIT: P28522, EVALUE 2.50e+00; EST_HUMAN HIT: AA386310.1, EVALUE 1.00e-105
tttttctgtgcttgggcagagctgtgaccagccacctggaacatcatattggattctgactccctttctttctgccccaaattaaagtaccttttctttggtatttcactgaatctttaaagtagtcaatagtaaacaccattttgtaaataaagttgtctcatctggtaactacaaaatacaaatatatctttcagacacgatttcagatgaattcttcaatgcaaatggaaatgacttttttcaatgtattattaagagatggtagataactagcctaatgcaaagacttgatctagtgtaaggtcagtagacaaaagaccacctgtgaaaaccaagggttgtacccttttagtacggggaactttgtctcctgttggcctaaaaccagtttatgaggtctttgcaggagccgatgccacaccaatgaatgtcaatagatgagtagaagaagtcttcagcttgctgattgccccactcaagaccaaggcctctcttcctgcatcttccttcgttcagcaaattctctacatttggggaaaaataaatcacctcaacatcaatctttgattccctcttttgcc

SEQ ID NO: 7938 - DNA, 593 bp, Homo sapiens
  MAP TO CHR16.3; EXPRESSED IN HELA, SIGNAL = 1.6; EXPRESSED IN LUNG, SIGNAL = 2.8; EXPRESSED IN BRAIN, SIGNAL = 1.4; EXPRESSED IN ADULT LIVER, SIGNAL = 1.3; SWISSPROT HIT: P48467, EVALUE 2.60e-02; NT HIT: AF312033.1, EVALUE 3.60e-02
cctacgcagagagggttcagcctcctcatccccacgcagagagggttcagcctcctcatccccacgcagagagggctcagcctcctcatccccacgcagagggggttcagcctgggctgcaggaagcaaacccctgacccgctgcaggctgaccccagacactgaaggttgtgcgggccttaaggccgtgctgggagattcagggggtgacacccgggggctcatttcctgagctaggagatgcaggggcggggagtggggcacagcgctgccagcagaggctgagacgcacctgagaggggaggaagcttccgctcttctggcctcccggatccgccagggctcctgctgctcccacttccgccacccaggagggccaggccgccgtcttgagtttccctccagcctggcctagggacgactcttcttcagtgccgccttctccaccgagtcctcgcatattaagattccagaaggttctgatctcctggtgcttcagtgtaaacgagtgtgtttggggatagctgtgggaagtcagggctgagaaaggagaaacactcagctccccacacacgtttgtcccaggaaacaat

SEQ ID NO: 7939 - DNA, 590 bp, Homo sapiens
  MAP TO CHR14.3; EXPRESSED IN PLACENTA, SIGNAL = 1.1; EXPRESSED IN HELA, SIGNAL = 2.6; EXPRESSED IN FETAL LIVER, SIGNAL = 7.6; EXPRESSED IN LUNG, SIGNAL = 1.1; EXPRESSED IN ADULT LIVER, SIGNAL = 1.2; EXPRESSED IN BRAIN, SIGNAL = 1.9; NT HIT: gi16166203, EVALUE 2.00e-46; SWISSPROT HIT: P39027, EVALUE 6.00e-37; EST_HUMAN HIT: N73448.1, EVALUE 0.00e+00
cacagcataggctcttgcacataagaaacactaaagaagtacacgtttattttacttttatttttgtttattgtctattgagcattttatttgtaagcattacatccctagaaaaataatccccaggattttccctactgtgcactttcatcttgctcctttgtggtccatgatgccagctgaggttgtcaatacaactaaactgactggagaagagcagactgttttgccatttttctaggtctttgagttgtacatcgaagttgaggctaatcatgccacacatgtttaacctgcctgagggattcgcagctcttttcccagctgtgtaatcatcaatgatttcaaatttgccagtgtaaccacgcttcatcatcacagtgagaaaccagatgatggctctggagcacggccccataagaacctgatgtttgcctctctttttagcattgttattgctcttgagagcatcagccaggacaatcatgagcaccattatggtggcatggaaagatggtggaaaaaggacagaagtacatgtttaaatgagagatcatcttgcttctaaatgaacggtgatttgattgcct

SEQ ID NO: 7940 - DNA, 578 bp, Homo sapiens
  MAP TO CHR16.3; EXPRESSED IN HEART, SIGNAL = 2.2; EXPRESSED IN LUNG, SIGNAL = 4.7; EXPRESSED IN ADULT LIVER, SIGNAL = 2.8; EXPRESSED IN BRAIN, SIGNAL = 3.1; EXPRESSED IN PLACENTA, SIGNAL = 3.2; EXPRESSED IN HELA, SIGNAL = 2.7; NT HIT: gi14776961, EVALUE 1.40e-01; SWISSPROT HIT: P20908, EVALUE 5.70e-02
ttcctgtcatgggtctttcctggcccagcacagccccacggtggctctcagccaaaaaatgacctggatccgggctttccaggacgtcccctggctcctgcctcattcgtcttccctctgctggggctgctctgcttgtcacctctggttagatttttaaaatcctgcccactccccaccacgaggcccccagggtggaacaggcctcaccaagcggccagctgtcctgtggttcacaaagcagcttaaaactccagtaatagatggcctcgtccaggcccgagaatgtgactcagaagaaaaatgaagctgggtgtgaatggcattcaagtgagggaaaggcggcccgtcacccagcactgttcccagcagccttgcctctgtcactgggcaggagtcaccctcatgtaatgacggtgctcacctttcccaccctgcctccccagcctccaggtgaagccatcccaggagcttgagcaccttgtgctatattgtcaccaccctcccgagggcgccatagaggccacaccagactatgctggcaggacacggccaccacagccggcatttaataaacg

SEQ ID NO: 7941 - DNA, 583 bp, Homo sapiens
  MAP TO CHR14.3; EXPRESSED IN ADULT LIVER, SIGNAL = 1.1; EXPRESSED IN PLACENTA, SIGNAL = 0.89; EXPRESSED IN FETAL LIVER, SIGNAL = 0.94; EXPRESSED IN BONE MARROW, SIGNAL = 0.69; SWISSPROT HIT: P25054, EVALUE 1.90e+00; NT HIT: gi14748350, EVALUE 6.00e-78; EST_HUMAN HIT: BI113892.1, EVALUE 9.00e-78
tcttctctttggttaccctctttgttagtatatttggtatgtctgactttatatgtattgctttcagatgattcattccggactcgtaatgccagtagcgttccatcttccttttctcctaatactcccttaccgagtacttcccgtgggacaggtaactcagttgaccccaagagcagtggaagtaaagatacacaaccacggaaggctaccttgtaagtaatcaagtgatgtcagactgagtgtattatcctcctcttttgcttaacacactttccttcccacttaagtactttccaaagaatagaaaatgtctgtgatgagaaaatgttataaattaaagggtattattgtcacatgtgactctgttatgttagtttatatagaataacttatatatggcaaaggcattataaccttagggaatcaacaggaaacatttaaatggctcccactaatgtctgaaatctattttttttctatgaaatgtttacatttagggaatttatctctaagaaggcatccctttaaacacctagcttaaggatatggtatttaatcacccagtgtgcagaaagattgg

SEQ ID NO: 7942 - DNA, 525 bp, Homo sapiens
  MAP TO CHR16.3; EXPRESSED IN LUNG, SIGNAL =  10; EXPRESSED IN BONE MARROW, SIGNAL =  14; EXPRESSED IN ADULT LIVER, SIGNAL =  12; EXPRESSED IN PLACENTA, SIGNAL =  13; EXPRESSED IN HELA, SIGNAL =  15; EXPRESSED IN HEART, SIGNAL = 8.4; EXPRESSED IN FETAL LIVER, SIGNAL =  14; EXPRESSED IN BRAIN, SIGNAL =  21; EST_HUMAN HIT: BF346444.1, EVALUE 4.00e-15; SWISSPROT HIT: P40603, EVALUE 2.90e-02; NT HIT: gi16165877, EVALUE 1.00e-78
gagtgactctcccaaggtgccccaggagaagcggaaaccagaggaagaggccaggcatcaagcagcagacccaacagagacccctgggactgggcagcgagggaaagggtggggctgggggtgtggggagcgctcactgcagtcccgcgagtaatgccgtccgagggtgaaggtgaaggtcggggaagatgggctggtgcccaggacagcggctgagttcatggcactggagaccacagcaaaagcagggacatgcctggcttggaggtcagtgctggggctggtgggctcatctatgcatgtggaaggagaaaggtgtgaaggcggcagacagcggaacctgcttgcctccaccctagccttgccagcccccgtgccactcacctccaggctcagacacatcccaaagggtcctgctggcaacatgcccactgtcaagtgtgactggcccactgtccagactgtggccatggaatccttaccctcaggagtggggctgagacaccctccttagactgggctcct

SEQ ID NO: 7943 - DNA, 591 bp, Homo sapiens
  MAP TO CHR16.3; EXPRESSED IN LUNG, SIGNAL = 5.9; EXPRESSED IN FETAL LIVER, SIGNAL = 4.6; EXPRESSED IN ADULT LIVER, SIGNAL =   3; SWISSPROT HIT: P13662, EVALUE 2.00e-20; EST_HUMAN HIT: BI059783.1, EVALUE 2.00e-48; NT HIT: gi14776121, EVALUE 1.00e-48
caagactctcctctgcctgcccacccctccctaccactgtggcagtaccattaccttaagctggcccacaaccatgctgatgatgcagctatctggagtgggctgatggtcctgcgcggtgatgctgtgctgaattttctggaacggaaggctctacaagagagagagtgggaggtgggagaaccaaggccagaaggggtgggaaaggagccacctgcaccctggctttcttccctacttacagacaacttctccacaatggcagctttcccctggaactgttgtccttcccacgtaaggcatgacgcgtcaatctgaaaaaggcacaggaaaccccagggttggggcctcagagtacaagtatctctaaggccctggaaagactctgaaaagggccttgcttggagaagtgtggccacacttcagtttccctgtctaaagaaggagactgagtatagcccccaaacattacactatcaacatcttctaccccattgaccctgggcccaggctttgaaagactatttaataaaatatacttcccatttgtatttaagaagtcatatggtctctgatatgcataggcccagg

SEQ ID NO: 7944 - DNA, 501 bp, Homo sapiens
  MAP TO CHR16.3; EXPRESSED IN LUNG, SIGNAL = 6.7; EXPRESSED IN BONE MARROW, SIGNAL = 6.1; EXPRESSED IN ADULT LIVER, SIGNAL = 4.9; EXPRESSED IN PLACENTA, SIGNAL = 5.6; SWISSPROT HIT: Q63191, EVALUE 4.60e+00; EST_HUMAN HIT: BI597351.1, EVALUE 3.00e-46; NT HIT: gi14776249, EVALUE 2.00e-80
gtctcatgggagaggctcagctccctaacttcattgaaatctctagactgagggaggaaatgggccagccaagaaggccctggactaaccttgtcctccacctccctccatcatggcagccctgagctagaggccccctacagcagagaggaggagcggcagcggctgtcggacctgtaccaccgcctgcatgctcgtctccacagcacctcccgacccctgcgcctcatttaccacgtggctgagaaggagacactactggcctgggtaagttgggcagggctctgagtgaattaattccccacttcaagcctcctttccctatattgtatcccctccagccacagtgcctccaccaaacacagcaggcctctggctgggctgtgccttgcctgcaacactgtccctgcctttacacacacatctttgaagcccctgacaactaatgaccgtgtctctaatccgacattagcctcaccctcctgtgtgcttctcccagat

SEQ ID NO: 7945 - DNA, 515 bp, Homo sapiens
  MAP TO CHR19.3; EXPRESSED IN PLACENTA, SIGNAL = 2.2; EXPRESSED IN HELA, SIGNAL = 2.2; EXPRESSED IN HEART, SIGNAL = 1.7; EXPRESSED IN LUNG, SIGNAL = 3.6; EXPRESSED IN FETAL LIVER, SIGNAL = 1.1; EXPRESSED IN ADULT LIVER, SIGNAL = 2.3; NT HIT: gi14670376, EVALUE 7.00e-62; SWISSPROT HIT: P81489, EVALUE 1.40e-01; EST_HUMAN HIT: BE893345.1, EVALUE 1.00e-61
gattaagggtgtgtcccgtggtcactagggcctgtgctatttccacaggaggctcagcctcctctccagatgccgggtgactctgcaggtccttccgcagggaggttggggccgttctccctgaatctggggcttagcatctgagcagctcaggtcacgggatccaggccgcccgtgggaagtgtcaggtgggggtggccaggcccctctgctctcggaggctgccctggcgggtggggacagctggccagcctggagctggcccaaataccttctctcttccagcgtccttcgacctgaagcagcagctgctgctcaacaagctcatggggaaagatgagagcacctcacggaaccgccgctcgctgagccctatcctgccccggcagacacagtcctgcgcccccaccaggtgagcccccaccccctgacatgagcccagtcccagggcagcggggctgcggcaccacccggcgactgctcagtctgaaccctctctctgttccagaccctgg

SEQ ID NO: 7946 - DNA, 549 bp, Homo sapiens
  MAP TO CHR14.3; EXPRESSED IN HELA, SIGNAL =  72; EXPRESSED IN PLACENTA, SIGNAL = 6.1; EXPRESSED IN HEART, SIGNAL =  25; EXPRESSED IN LUNG, SIGNAL =  41; EXPRESSED IN FETAL LIVER, SIGNAL =  55; EXPRESSED IN BRAIN, SIGNAL = 7.8; EXPRESSED IN ADULT LIVER, SIGNAL = 9.4; NT HIT: gi14729580, EVALUE 0.00e+00; SWISSPROT HIT: P36578, EVALUE 1.00e-73; EST_HUMAN HIT: BG400439.1, EVALUE 0.00e+00
caaggaggctgttttgcttcttaagaaacttaaagcctggaatgatatcgagaaggtctatgtctctcagcaaatgagatccagcaagagcaaaacgagaaaccatcaccgtatccggcgcaggggcgccgcatcatctgtaatgaggataatggtatcgtcaaggccttcagaaacatccctggaattactatgcttaatataagcaaactgaacattttgaaacttgctcctggtgggcatgtgggacatttctgcatttggactcaaagtgctttctggaagttagatgaattttctggcacttggcataaagctgcttccctcaagagtaactacaatcttcccatgcacaagatgatcaatacagaccttagcagcgtcttaaaaagcccagagatccagtgagcccttcgagcaccttgcaagaagattcatcgcagagtcctaaagaacccactgaaaaatctgagaatgatgttgaagctaaacccatacacacagatcatgcgccggaacaccattcttcgctaggccaggaatcacaaa

SEQ ID NO: 7947 - DNA, 510 bp, Homo sapiens
  MAP TO CHR14.3; EXPRESSED IN BRAIN, SIGNAL = 1.3; EXPRESSED IN ADULT LIVER, SIGNAL = 1.2; EXPRESSED IN PLACENTA, SIGNAL = 1.3; EXPRESSED IN HELA, SIGNAL = 1.3; EXPRESSED IN LUNG, SIGNAL = 1.1; NT HIT: AJ249236.1, EVALUE 1.90e+00; SWISSPROT HIT: Q01538, EVALUE 2.80e+00; EST_HUMAN HIT: BG985228.1, EVALUE 4.60e-02
ctttcacctggtttcttgcccaaacagcttgttgggtttaagaaggagaaatctataaaagaattgaagtctcttcagggaagggcctagcagagcaattctggctgtggcaactcccctggggtggctcctccctagccatctcctgagcacacaagcaaggaccctttcctctcagctgtcactctggacatgtgtaatgatcccaatacaggagactctgagccgcagcccctaggcccaccttacgtgtgagaactctcctgtgtgaggccgaggcaaagctgcacgggatcctgagagagcagcagccagagcagaagctgcaggagagactggcacatggaagccagcctgtctccacagcccatgttcttgttttgttctaactctacgtgctttggtcggtttcccctacaacacagcagcagcaggtgggcgcacaatgcagggaccggcccaccctgacatggctgtgtttggcagccctgcacacccccttttcttttt

SEQ ID NO: 7948 - DNA, 501 bp, Homo sapiens
  MAP TO CHR19.3; EXPRESSED IN HELA, SIGNAL = 1.3; EXPRESSED IN BRAIN, SIGNAL = 1.8; EXPRESSED IN ADULT LIVER, SIGNAL = 0.95; EXPRESSED IN PLACENTA, SIGNAL = 1.2; NT HIT: gi15302875, EVALUE 1.00e-57; SWISSPROT HIT: P97433, EVALUE 7.00e-03; EST_HUMAN HIT: BG149858.1, EVALUE 1.00e-57
gaggcttctgtgaaaatgtggagagttctcagagagtatcgaatcggatggagtcaccgatgtgcctttgttgcatgaggtcgtgtgtgtttaattcacttttctaaaacaattgtttttattgtttgcactcagaccaatcacaggagagatggatgaagccgattctgcgtttttaaaatttaagcagacagctgatgactctctgtcccttacatctccaaacaccgagtccatttttgtagaaggtatggtcatctccgctctctcgcggctgccacacagttcctgtctctcctgggaagagctggggctcgtgtcagcatgtctacgggagggaattggggtggcatggctctgggcccccagcagccacacctcgctcttccctcagatccctacaccgcctcgctgaggagtgagattgagtcagacggccacgagtttgaagctgagtcctggagcctcgccgtggatgcagcctacgccaagaagcaaaag

SEQ ID NO: 7949 - DNA, 549 bp, Homo sapiens
  MAP TO CHR16.3; EXPRESSED IN PLACENTA, SIGNAL = 1.4; EXPRESSED IN HELA, SIGNAL = 1.3; EXPRESSED IN BONE MARROW, SIGNAL = 1.4; EXPRESSED IN ADULT LIVER, SIGNAL = 0.94; SWISSPROT HIT: P98094, EVALUE 8.90e+00; EST_HUMAN HIT: BF362707.1, EVALUE 4.90e-02
tgcgtgatggtgctagagtccaccattcattgaacatgtggtttctgagtagctataagacattgcagggatttaagagatggcaacgtcgtcccatccaacatgtccatcaagactggcttcatcaaggctctttgcttacaaggaacagaaatctgctcagaacagctcaagcataccagagatatttttgaaaggatgcaaggatatctcccagaaggagatatgaatgggaatcaggactgggcaagtcaggaacagaagtacttcagtgtttctcctagggtgttgtggtgtctcaattttgtttctctctatgaaatctctatgaatctccttttgtggattcagtcagttttctcaattgcaaataagaaattctagctgtacaggaggggacaacggtgttcccattgtttttaatccagtccaaactgactatatgtgggtcaccttccacgtaaagcagtgaatggtgtttcttgtagcttctttcacattttgacatttcacaggattttattctatgctgccttctaccctttgcag

SEQ ID NO: 7950 - DNA, 523 bp, Homo sapiens
  MAP TO CHR16.3; EXPRESSED IN HEART, SIGNAL = 4.1; EXPRESSED IN FETAL LIVER, SIGNAL =   5; EXPRESSED IN LUNG, SIGNAL = 8.5; EXPRESSED IN BONE MARROW, SIGNAL = 7.6; EXPRESSED IN ADULT LIVER, SIGNAL = 4.2; EXPRESSED IN BRAIN, SIGNAL = 5.4; EXPRESSED IN PLACENTA, SIGNAL = 5.1; SWISSPROT HIT: Q9M291, EVALUE 3.00e-04; EST_HUMAN HIT: BG760746.1, EVALUE 7.30e-01; NT HIT: M62601.1, EVALUE 7.80e+00
gacgtgtatggtggagggacacgggccctggaaccagaaagaacatgggtgtcctgcccgggagcagttaagagaaggaggtggcatgttcattcaaccagcgtgtgtatgagggacgtgctcaggccagcatagcccaggccctccgggatctgctccttggtgagggagacaccccaaatcatgacgaggtaggaaccccacatgtccgaggggcaggcagagccggcctcgctgagccgacgtttgagttccaaatgaacgaggggcgtctggaaacggtgtcccaggccgagggcgcagtcccggagccgggggcacccctctaatctggagtgatcgcaggggtgaggcagcagtcagctcagagcctgaggccccatcacattgggcctgcggctgcagagggtggttatcttggaaactgagttcagaggtcgcaggctctggctggcctgaccctgggtcgttggcgtggacaccttggctgcccctggccctgagccttcccatgacacccttc

SEQ ID NO: 7951 - DNA, 586 bp, Homo sapiens
  MAP TO CHR18.3; EXPRESSED IN HELA, SIGNAL = 2.6; EXPRESSED IN LUNG, SIGNAL = 1.4; EXPRESSED IN FETAL LIVER, SIGNAL = 2.1; EXPRESSED IN BONE MARROW, SIGNAL = 1.1; EXPRESSED IN ADULT LIVER, SIGNAL =   1; EXPRESSED IN PLACENTA, SIGNAL = 0.97; SWISSPROT HIT: P40826, EVALUE 2.00e-10; EST_HUMAN HIT: BG217175.1, EVALUE 0.00e+00; NT HIT: gi14762347, EVALUE 1.00e-32
tcatcaaattgtgtctcagtggtataaacccattgatgtactgtatattgcctcttaggtagtgctagtttttaaaaggcttactggtgtgattctatattgcagaaataaaatttttaaaactaatgtttggtcttctgttatgttctttcttagcgacttcaggaagaaatcaccaaacagtctccaacgttgcaaagaaatgccttgtatatcaaatctgtaagttatgcagtcctttcgaagccaaattccgcttcactgaaatatttccagttaattaattttatccagtcttaatttttaccaccaaataattaaaacttgtatggtattttgatgtaatgggatttctttacattttgtctcctcagtccaagatcagccggctgcctgcttacttgaccattcagatggttcgatttttttataaagagaaggaatctgtgaatgccaaagttcttaaggttagtaatgaactttactttgtataagaaatgtaattctttgaaggtaattgctaactcacaattgctttcattattcctttaggaatagttaagctttctttgaaatatttagggga

SEQ ID NO: 7952 - DNA, 591 bp, Homo sapiens
  MAP TO CHR14.3; EXPRESSED IN ADULT LIVER, SIGNAL = 1.7; EXPRESSED IN PLACENTA, SIGNAL = 0.92; EXPRESSED IN BRAIN, SIGNAL = 1.2; SWISSPROT HIT: Q9PLC6, EVALUE 4.40e+00; EST_HUMAN HIT: BI520401.1, EVALUE 2.00e-48; NT HIT: AB001523.1, EVALUE 2.20e+00
tcccaaaagtcacacactgcaacattcttctgagggggtggaaaggactctccctggctgttggagacctaagttttaagcattaaagagcacagaattcattctagagcacatagataggcaaatgtcaattagaaatggaaacatcttagttacagagatcttctatgaccagaagggcttccataactcctgatatttcagtcgccatctaactttcatggtagagtactttctgactagttgcagaacatcagtattacccttaaggaggtatgtatgttttatgatgcctctctttcttctagtcttcagatcatgagacagatcatggcagggaaggggtgtgaggaatcctcggtcatggagctccttaaggaagcagaggagatgaaacagaacttggtaagaagtaggagggactccaggaacagcctcctgaatagggctcaattccattgcagtgtcagatgtggagagaaagacagagtactcatctctagcatctgatgctccaacactcatatctccttgatctagaaagtccagggtgacccaaaaggagtcagatggaatgttgggaagaacacg

SEQ ID NO: 7953 - DNA, 554 bp, Homo sapiens
  MAP TO CHR19.3; EXPRESSED IN ADULT LIVER, SIGNAL = 3.5; EXPRESSED IN HEART, SIGNAL = 3.9; EXPRESSED IN FETAL LIVER, SIGNAL = 5.1; SWISSPROT HIT: P01233, EVALUE 6.00e-44; EST_HUMAN HIT: AI276216.1, EVALUE 0.00e+00; NT HIT: X00265.1, EVALUE 0.00e+00
acccatcctgtgtgtgtgtggttgccctgagcccacagaaagacacctccagagtgcggattgagaagcctttattgtgggaggatcggggtgtccgagggccccgggagtcgggatgggcttggaaggctggggggaggggcctttgaggaagaggagtcctggaagcgggggtcatcacaggtcaaggggtggtccttgggacccccgcagtcagtggtgctgcggcggcagagtgcacattgacagctgagagccacggcgtaggagaccacggggttcacgccgcgcgggcagccagggagccggatggactcgaagcgcacatcgcggtagttgcacaccacctgaggcagggccggcaggaccccctgcagcacgcgggtctggaagccgtgtgagtgggggaatgagcatgtgcctggggccagcgcctcagctgagctccccagctgcccccacaggtctcagactcaggggtccaggaagccctctgttcctgccctcccacaccccattccgcagcccctgaccagagaggcagaccacccttc

SEQ ID NO: 7954 - DNA, 581 bp, Homo sapiens
  MAP TO CHR16.3; EXPRESSED IN BRAIN, SIGNAL = 1.3; EXPRESSED IN ADULT LIVER, SIGNAL = 1.4; EXPRESSED IN PLACENTA, SIGNAL = 1.3; EXPRESSED IN LUNG, SIGNAL =   1; NT HIT: AL161580.2, EVALUE 3.60e-02; SWISSPROT HIT: Q9X1P7, EVALUE 5.60e+00; EST_HUMAN HIT: BG424626.1, EVALUE 8.20e-01
aatcactccatgccttcacctaggtcaagaaacgacattgttttcctgagcggcagtgacagcgaggtgacagagattaatagcttggtattgactgagcaacttcgagttccttatctctgtcaagtcaaggctgtgtccaagggctgaaagtgttattagacttataattgcaaagacatttaaagggtttccccttaagggactatgaaatccaataaacgtttcacaaaacctcaagcgctcgagtgcaaagcccccatctgggagagctgcgtgctcccagccaagcgccagggaaacctttaagccgccaacattgaataatgtttgatttatgaagttggttttgaatttgtatcagttgttttattaaaaatatatgaaaggaagttttaaatatgagcaagccctgtaggctgtcgcctgcactgtgccacctgtctggctaagccgcctccttcttcctcactctgccgctcagacccaggaggatggaggagctacacaaacagtgtggctaatttgcggggttaatttggtctgccagggattaagtctgaatttttcacctgggctca

SEQ ID NO: 7955 - DNA, 561 bp, Homo sapiens
  MAP TO CHR19.3; EXPRESSED IN LUNG, SIGNAL = 1.1; EXPRESSED IN ADULT LIVER, SIGNAL = 1.2; EXPRESSED IN BRAIN, SIGNAL = 1.4; NT HIT: gi4508026, EVALUE 3.00e-67; SWISSPROT HIT: O43345, EVALUE 5.00e-17; EST_HUMAN HIT: BI562653.1, EVALUE 2.00e-66
ttagtgcgccaataaatcccaatttttttgaaaacaggaatctgaaactcatgaatgcaaagtataaattaccaaaaaaacagtctacagaaaacaaaaatgaaatctttagggtatattaggaattgagtattgaagttatgctcacccaggaagaccaggtttctgtagttctctaacatcacattcctatataaattctgctgtgcaatgtccaggcattgccactcctccagacagaattctatggccacatccataaatgtcaatggtccctaaaaaaaacaacacatacacacacaaacacacacatttaccaagtggccacaggcagaatttataatttgactcaaggtaaaatgagagagtaaagagaacaggtactgacttatagaagagactgaaattatccaataaaataattcttttcatggaattattctccaatgtattttctacccctgagaaaagaaagtgatgtaagatccacaacatcagtgtatatataatacttttctggatgataaactgtaaaattaagggcatgaacacaaaagtaaa

SEQ ID NO: 7956 - DNA, 552 bp, Homo sapiens
  MAP TO CHR16.3; EXPRESSED IN HEART, SIGNAL = 3.2; EXPRESSED IN LUNG, SIGNAL = 7.1; EXPRESSED IN FETAL LIVER, SIGNAL = 5.6; EXPRESSED IN ADULT LIVER, SIGNAL = 3.1; EXPRESSED IN PLACENTA, SIGNAL = 4.6; SWISSPROT HIT: Q9Y5V3, EVALUE 3.50e-01; EST_HUMAN HIT: AW163044.1, EVALUE 0.00e+00; NT HIT: gi14777994, EVALUE 4.00e-54
gcactttccaaagagccaagatgggaaacaacccagaggtcagctagagctaaaaatggcacgatgaggcagggcctgaggtcagctgtgaggaccgcctgtgattctgcagaaggcctggccagtggaggaacctacctgagtgggggcagggctggggagaaggtcatgggggggctgcagtaggggtggtcattgtgcaggctgagttgagagaagtgggtggccatgttctcctcagacagaaactgcttgcgcagaggctccctggggagagatggcagagaggcaggctgggatactgacacaggaggcagcctgttggggaccagaggtgacagagatcttgttgggagtccctccctgcccccaaactcactgctcctcctccaggcgccgcttggtgctcatgggcacagctcctcggagaggggagctgggaaaaaaagagagcctggtgcaccccaccctcttggccccttcccaaggatctgcccgcctaagcctgcagcatcagccaggagccccaagcccattcctgtctcagctggt

SEQ ID NO: 7957 - DNA, 521 bp, Homo sapiens
  MAP TO CHR16.3; EXPRESSED IN LUNG, SIGNAL = 3.6; EXPRESSED IN BONE MARROW, SIGNAL = 4.3; EXPRESSED IN ADULT LIVER, SIGNAL = 4.3; EXPRESSED IN PLACENTA, SIGNAL = 4.5; EXPRESSED IN FETAL LIVER, SIGNAL = 3.7; EXPRESSED IN BRAIN, SIGNAL = 3.1; SWISSPROT HIT: Q39055, EVALUE 2.00e-13; EST_HUMAN HIT: BG818059.1, EVALUE 0.00e+00; NT HIT: AF034374.1, EVALUE 0.00e+00
atttctgtgggacctgcaaccacctgcaaatcacagctgacgggaacctcaaggtctgcctctttggaaactctgaggtatctctacgggatcactgtgatctggggcctccaagcaggagctgctgagaatcattggcgctgccgtgggcaggaagaagcagcagcatgcaggcatgttcagtatttcccagatgaagaactggcccatgatcctcatcggtgggtgacccccatcaagacatttttgatgttccacgattccccaccagccaatccaagcatttcctcctgggaccccctccatgttcaaggtctgagatccagaatgaatttctccagtcagatggccactttatggaaaggatacagggtaccccagacccctcttctagcccagcagcagctaggttctggctcctttcagagacactacacttcccatgcagactcagatgccaactcaaagtgccttagcccaggttcctgggctcctgctgccccctcaggacaccagctaaa

SEQ ID NO: 7958 - DNA, 522 bp, Homo sapiens
  MAP TO CHR16.3; EXPRESSED IN ADULT LIVER, SIGNAL = 1.5; EXPRESSED IN PLACENTA, SIGNAL = 1.7; EXPRESSED IN HELA, SIGNAL = 4.9; SWISSPROT HIT: P02467, EVALUE 3.20e-01; EST_HUMAN HIT: BG744520.1, EVALUE 1.00e-103; NT HIT: AF321125.1, EVALUE 1.00e-103
cgtaagcacaggcctacctcacatgcagtctgcccttgtctcagatgtgcccagggtcacccatctactccttctccccaggccttcctggcctccctgagccccgccatggtggtgccggaggaccagctgacccgctggcacccgcgcttcaacgtggatgaagtacccgacatcgagccggccgcgctgccccagccacccgccacggagaagctcaccactgctcaggaggtgctggcccgggcccgcaacctgatttcacccagggtgagactgcgaggcttgggcagcccatttctcccgggtgggtgggccagcctgaccccaggcttaagaggtggaagccttggtgatgagcttgacgcctcatctggcttcctccttggctggcggatccagagagttggtggcatttgccctctgtccccagctgcagcctctaagcctggctctgccactagccccatgtggggagttggcctgggcaggcgatgctgcacactgggacactgcattgac

SEQ ID NO: 7959 - DNA, 538 bp, Homo sapiens
  MAP TO CHR14.3; EXPRESSED IN FETAL LIVER, SIGNAL = 1.7; EXPRESSED IN LUNG, SIGNAL = 1.2; EXPRESSED IN BONE MARROW, SIGNAL = 1.4; EXPRESSED IN ADULT LIVER, SIGNAL = 1.5; EXPRESSED IN BRAIN, SIGNAL = 1.5; NT HIT: gi13449278, EVALUE 2.00e-99; SWISSPROT HIT: Q99297, EVALUE 1.00e-05; EST_HUMAN HIT: R29313.1, EVALUE 1.00e-76
gcattctaaggcaaacaggcagcatattgtcacttgatggtgtaagcacatgtttacaacatcttactattgtgttgtcttggaaagtttgtcatatatattcgcagtttcttagacacaagctccacttaggagggcttactggttctcatctaaatggaaggacaatacggttctaacaatacgtgagcctcatacatttattaaaataagaatgtgttatgttacccttcttcctgatagactgttgccattgttttaaaacaggttctgtacttgatctctccaggaactggttgaggcccttgaatcctacttttggcaacatcaaaagggatgttaatgactgaggctattgtccccgagagaagaccaatcccaaattttctccaaaactccaagattggatcctaaaagaaaagaagaataatataacagaaaggggagcggaagcccctaaatcagttaaacactataaagcaatatgtatttaagcagagcattgcactcccggcaccctcctgttattccagcggaa

SEQ ID NO: 7960 - DNA, 513 bp, Homo sapiens
  MAP TO CHR16.3; EXPRESSED IN PLACENTA, SIGNAL = 1.4; EXPRESSED IN HELA, SIGNAL = 2.6; EXPRESSED IN FETAL LIVER, SIGNAL = 1.2; EXPRESSED IN ADULT LIVER, SIGNAL = 1.8; NT HIT: gi14776386, EVALUE 0.00e+00; SWISSPROT HIT: Q22915, EVALUE 2.10e+00; EST_HUMAN HIT: AW157368.1, EVALUE 0.00e+00
caaacagcatggggtaatcccatattctctggcaggttacacactaaggcagttctaacttactctgttggcttcatcagcatcctcttcattgatggagctggaaggggagggagtggctgatttgcttgctggaggtgaaggagatgtgtgaggcatactggcacctcccaaattcaaccccaactgggcgctgagctgagactggttgatggtggtgagctgggcaggaggcatgaccccagaacgcgcagcatcggtcatgtggacgatggaccgcatgatcagggagggatcctgccggtactgggacacttgtgtgtggctctgatcctagaaaggcagcaacaaagggggaaaatatttcagcttttccagatatcagtgaacttatcaggttagcatctccttagataggtttgaactgttgcaatgttgataggtctgacctattgcaggatgatggtctccgttcatttattaaatataaggacccatgccaagaagttgaaa

SEQ ID NO: 7961 - DNA, 507 bp, Homo sapiens
  MAP TO CHR19.3; EXPRESSED IN ADULT LIVER, SIGNAL = 1.4; EXPRESSED IN BRAIN, SIGNAL =   2; EXPRESSED IN HELA, SIGNAL = 1.5; EXPRESSED IN PLACENTA, SIGNAL = 1.7; SWISSPROT HIT: P32027, EVALUE 1.20e+00; EST_HUMAN HIT: BF887748.1, EVALUE 4.50e-02; NT HIT: AE001943.1, EVALUE 4.80e-01
gtggacaccttgtccctttgtgccagaggggcaagggctccagcaccaaagccagggagcctctgaccttacgagatgagctccgcaccatcctgggcggtgcagggctgctggctgctggggcactcaaggccttcagccttgagaagttgttttttctcatcacgttcactcaaccagggtaaccttcccaggtgcttccagcctctggagacctttcagactgatgttgggttccgagtggtcaatcgaggggcctcagtcagtgctgccgtggggcagttcagggagatggagttgcttgtggagccgtttaccctgttttctgcgtccccctgggtgctgtgttgtggaagtgggtgttccagaccagcttctttgcatcttagatgccttcacgtcattgcagaagggatttccttatacctgtcccctgctgagtgcggtagttcctgataacacttaaactttcaatgttaatagccctgtgatgcgctgttatctcca

SEQ ID NO: 7962 - DNA, 591 bp, Homo sapiens
  MAP TO CHR18.3; EXPRESSED IN HELA, SIGNAL = 4.8; EXPRESSED IN HEART, SIGNAL = 5.1; EXPRESSED IN LUNG, SIGNAL = 5.8; EXPRESSED IN FETAL LIVER, SIGNAL =  20; EXPRESSED IN BONE MARROW, SIGNAL = 7.9; EXPRESSED IN ADULT LIVER, SIGNAL = 6.7; EXPRESSED IN BRAIN, SIGNAL =   8; SWISSPROT HIT: P07149, EVALUE 5.70e+00; EST_HUMAN HIT: BI115392.1, EVALUE 8.30e-01; NT HIT: AF230497.1, EVALUE 2.20e+00
gacgctcactacacacacgctaattgacttattgagttagtcatttggtctttgacaaacatttatttactgcctacagagaaggctcaagtcgatttttacttatcttcccaaatggcaccaaaattcaacaagagccacccaacacctaggaaaggactttgaccaatgaaagcaacttgagaacaggttttgctgccttcagctcaccttgagcaggggccaagctcagtgcgttgggaagaggcacaaagagctcacttgctgcatgctgtttgttcagaaatagccttcctgaagcatgagtctattggtgagaactcagccttacaaagtcaacacaaggcttctggctgatgctccaggacactgggctgctgatgccttccacgcagatccagaacttcttgtcctctgggttcacaatttcacagcacagggagtcagtcctggcttggcctctccctctcacagacctgtggtcagggtttgtggccaactgtagggcttccttaagggaaggggtttgtaaacccatttctctaagtgacctccctgagctgcagccttcgggctggttctctcctctct

SEQ ID NO: 7963 - DNA, 531 bp, Homo sapiens
  MAP TO CHR19.3; EXPRESSED IN ADULT LIVER, SIGNAL =   5; EXPRESSED IN HELA, SIGNAL =  21; EXPRESSED IN HEART, SIGNAL = 4.7; EXPRESSED IN LUNG, SIGNAL =  12; EXPRESSED IN FETAL LIVER, SIGNAL = 4.8; EXPRESSED IN BONE MARROW, SIGNAL = 5.9; SWISSPROT HIT: Q9SHI1, EVALUE 4.40e-01; EST_HUMAN HIT: AW340703.1, EVALUE 0.00e+00; NT HIT: gi7706110, EVALUE 0.00e+00
caagggagacagagacccagaggcaggcggaggatgtgaagcaactttaatcgccaccctcagacggggcagcaggagtgtcttaagcacagggccgttctaccccctgggagctgcctggggccagcccctcagttctggctgtggcaggttccccatcctagctccccggatctccatagggagtgtccagggaccctcaatctccagggccacttctgcaggagctcgggttcgaggttccacgtggccagaagagctcaggtctctgagggctggtgtgcccgggtacccatccgcatcactgctctcctcctgtccggctacgcccaggggctgagtgacggtggtggcaagtgcttgtcctcagggcagcgaggtcttctgttctgacagcagcagggactccttcatggccaccagtaaccccagtgggcggaggcgctcctgggctcggagccaggacaaaaggaggagggtggcggtgaccaggcttgcactgagcaccgctgtggggaacagaaggacaga

SEQ ID NO: 7964 - DNA, 508 bp, Homo sapiens
  MAP TO CHR18.3; EXPRESSED IN ADULT LIVER, SIGNAL = 2.6; EXPRESSED IN HELA, SIGNAL = 2.7; EXPRESSED IN PLACENTA, SIGNAL = 2.6; EXPRESSED IN BONE MARROW, SIGNAL = 3.1; EXPRESSED IN BRAIN, SIGNAL = 2.8; SWISSPROT HIT: P25304, EVALUE 1.40e-01; NT HIT: AF370148.1, EVALUE 1.20e-01
acagaaagctgtcaggcaggacaggcaggaatgccagcccagtgatggacaacacccctggaaggaggaagctgccagcagaagccactgatggaagctcagtgacaacaaggagtggtaaagaagaggggttaagggatatattcacagaggccactactgcaaatttcctgaaggcagcagcaaagcacaggggtgcaaacctgtttcttcattttggaatcttaggtgcaaatgagaaataatcactgtgggacacagtgaataagaagatgcaattatattttgtatatcaatttggggctttgggatttttcatgtattaaaatacaccatgctcgtacactgataagcacacactagagtcattgtgggcacacgctgtaggaggaactctcctagctggccaggaagcagagagattaacttggttctccaggtgccttaagccaagtgaagtaggccacactcaaaaaacaatctgaatccttcatgctaccggcagttt

SEQ ID NO: 7965 - DNA, 509 bp, Homo sapiens
  MAP TO CHR19.3; EXPRESSED IN ADULT LIVER, SIGNAL = 3e+02; EXPRESSED IN PLACENTA, SIGNAL = 6.5; EXPRESSED IN HELA, SIGNAL = 5.3; EXPRESSED IN HEART, SIGNAL = 5.9; EXPRESSED IN LUNG, SIGNAL = 6.2; EXPRESSED IN FETAL LIVER, SIGNAL =  51; EXPRESSED IN BONE MARROW, SIGNAL =  11; SWISSPROT HIT: P02654, EVALUE 5.00e-04; EST_HUMAN HIT: T89467.1, EVALUE 0.00e+00; NT HIT: M20902.1, EVALUE 0.00e+00
acttcaacgtgctttggtccatctgggaaactgaggcacagaagttggcccacccagcccagcggtcctcctaatcccacagacagtggggatggagattctgcaaggggaagaggtgggagtcaggtagcaggcagaatttggacagcctgggaggtagctgcacacagtgacccccttccttattcctccccacagggagtggttttcagagacatttcagaaagtgaaggagaaactcaagattgactcatgaggacctgaagggtgacatcccaggaggggcctctgaaatttcccacaccccagcgcctgtgctgaggactccctccatgtggccccaggtgccaccaataaaaatcctacagaaaattctctcctgagtgcttctttactctggggaaggggctgcgggagagggtaggggcttccagagagggcagggtctgcaggagagggcaggggctaaaccttaggtactcctcacaagccctccaatgccctatcta

SEQ ID NO: 7966 - DNA, 579 bp, Homo sapiens
  MAP TO CHR16.3; EXPRESSED IN BRAIN, SIGNAL = 5.5; EXPRESSED IN ADULT LIVER, SIGNAL =   6; EXPRESSED IN PLACENTA, SIGNAL = 4.6; EXPRESSED IN HEART, SIGNAL = 4.1; EXPRESSED IN LUNG, SIGNAL = 6.8; EXPRESSED IN BONE MARROW, SIGNAL = 4.7; EXPRESSED IN FETAL LIVER, SIGNAL =   4; SWISSPROT HIT: P53622, EVALUE 3.70e-01; EST_HUMAN HIT: H48653.1, EVALUE 8.10e-01; NT HIT: gi15299869, EVALUE 5.50e-01
gaagacaggaggggaggaagatggaggactagggaggactattaccccagaatcaagggtttgctcttccctacatgtgaccccacactaggcactgggcgctgggcaggactctccttaggagaagaaggggacctccttctcctttctcaggaaagcgagctgcccctaccccaccctggatgggctgggcaccacttggtctgccattttgatgctcgcggcgggaccaggatgctgtaaacacccatacgcgactctcctgcagggtctccgggttgccagcaatcacggccatctgctcatatggcactgcgcccaagcccctcacccagggagccgtgccaggcagcgattggttctgaggcatgcccctcaaactggtggggagcgtcctcttctgagaggcccctaggggagtaggggaacaaaagacagatttccctttcctaggaaaaaaaaaagatcaatttcacttaagactcagcacaaaatgaggagtggaggaagaaccagagaagagtgtctatggggtcctgaatattcaggagctgcctttgcatagctcagagtctgggg

SEQ ID NO: 7967 - DNA, 524 bp, Homo sapiens
  MAP TO CHR18.3; EXPRESSED IN ADULT LIVER, SIGNAL =   1; EXPRESSED IN PLACENTA, SIGNAL = 1.3; EXPRESSED IN LUNG, SIGNAL = 1.5; EXPRESSED IN BONE MARROW, SIGNAL = 2.3; EXPRESSED IN FETAL LIVER, SIGNAL = 2.3; NT HIT: gi15828471, EVALUE 2.00e+00
catattgccaacataggcacctttatataattactatcaggaagaactctttacaattgaaaaactgcagaaagataaagttttgaattgcacttacaatgccttcagagaagaatacaacaaatttatgttgaccatgtactgctactactaatatcatgatgctgaggaaaaattattttataatcctaattctgaatgtcaagtaatttaatattgatttatttgttacttcataattatacattattcatttttaaataagtatagagtattgataatatattgactttgaaaattatatttaggaaggatatgagctataaaagaaaaaatatggaatattttattttctttagctttattattttgaaatgtgaaattttgttttcgagtatcattctgtgctcaagtctacacacttttaagtgaattcaagttttactctctgttcacatagcaggcatcctagaaataactgtttaagggcatttaattcttctcagtgctctccttaacaggaa

SEQ ID NO: 7968 - DNA, 511 bp, Homo sapiens
  MAP TO CHR18.3; EXPRESSED IN BRAIN, SIGNAL = 1.1; EXPRESSED IN ADULT LIVER, SIGNAL = 1.1; NT HIT: AJ276209.1, EVALUE 7.60e+00; SWISSPROT HIT: P01135, EVALUE 1.90e-01; EST_HUMAN HIT: AW895486.1, EVALUE 1.80e-01
tgctcctggaacattcagctttgatattaaatttagtaccaatgtagacattgccacaagcacaagcgtacaccaactgagtgggttaatcatgacaaggcttgccaacttcaatcccaattgttggttttatttttcaatctctaaagaaatgttcttggaccacttaaataatgaggaactaagcaacacactcatttcttatgctgtgaaccagaaaccgaaaggtcaaatgtgctttgggaatgcaatcattaaaacacataagcgtggcggcatggataggaggagccattttgtatggaatagttgaaatttcttcattatttttgaagaccaccaataaagccttctaatgaaaccttttcaaaatgctccatgactgtaactcagtcttgatgaaacaaacagtgaaagcagaaggtgaagtgctccatctagagtacaaaggaactaagtttaaaaacactgggagagttcctctaggaactggctctctcaaaattacccc

SEQ ID NO: 7969 - DNA, 551 bp, Homo sapiens
  MAP TO CHR16.3; EXPRESSED IN HEART, SIGNAL = 2.1; EXPRESSED IN LUNG, SIGNAL = 1.7; EXPRESSED IN BONE MARROW, SIGNAL = 1.4; EXPRESSED IN ADULT LIVER, SIGNAL = 1.5; SWISSPROT HIT: P54851, EVALUE 4.00e-07; EST_HUMAN HIT: BG546038.1, EVALUE 3.00e-43; NT HIT: gi14776463, EVALUE 2.00e-43
gctggacagggaaaagtgactggagagtaaattatggtctctgagcccatttagaggcaaggcttggataaaaaaagaagggaagagaaaattctagatgagagctgaagctggagaaaggatgagaacgggaaactcggctgtgccaagaggcagagaagagaaggcatgaggtccaacttagctggagttggtctccctccagcctccggcttctccacacccctggcatctccagcttgtgctgtcctccgctccagcacacactgagcaaacgcggccaggcccaccggagtatgcagtgagtggaggagagggtacggagtcggggaacccgaagcctcactcctgaccgttccttcctccctcagtgcttctcagtcagcttccttcattcacacttaccttgaaagctgtcattgatgactgtgcaattcgtgttgttggtacatattctccagacatctgcaaaaaactcatctcctacccaccaggcctgtaacacaaaatggaaatagagagaaaggccgtccgttcatgatgcaaacact

SEQ ID NO: 7970 - DNA, 581 bp, Homo sapiens
  MAP TO CHR14.3; EXPRESSED IN PLACENTA, SIGNAL = 1.2; EXPRESSED IN BONE MARROW, SIGNAL = 1.3; EXPRESSED IN BRAIN, SIGNAL = 1.3; EXPRESSED IN ADULT LIVER, SIGNAL = 1.5; SWISSPROT HIT: P08548, EVALUE 5.00e-03; EST_HUMAN HIT: AV653618.1, EVALUE 5.00e-05; NT HIT: AL163206.2, EVALUE 5.50e-01
tgggggagggattcttagtcacagtgaattgggaaagcattgataggttttctgaggaagaatgacatgatcaggtttgctttaagatatcacagtccttgtcttctcagttgtgtttgacacagttgatcacttacttttccagaagtcacctttatccctggccttagggaccactcctttcttggctatcttcctgcttccctggggatggcttctcagtccctcctcctggtgtctcctcatctcttgacttctcaacattggagtgcccaggcttaccaaggtgatcttatccaggaccatggctttaaatgccatttatatgctgatgactatcaattggtaagagaaatgcacaaggatgttcatcatatcactttttataataactaaaaactggaaacaacctaagtgtctatcatggaagaattttaattatgcattcaataatgagatgcattgcaaccataataaagaatgaggtagaattttgtattctgaaagggttagaactaaattcagaaacaacatgtgtattatataaaacaattttttctgcgtgtgtgggagaaaattca

SEQ ID NO: 7971 - DNA, 587 bp, Homo sapiens
  MAP TO CHR18.3; EXPRESSED IN FETAL LIVER, SIGNAL =   2; EXPRESSED IN BONE MARROW, SIGNAL = 2.7; EXPRESSED IN BRAIN, SIGNAL = 1.8; EXPRESSED IN ADULT LIVER, SIGNAL = 1.3; EXPRESSED IN LUNG, SIGNAL = 1.4; SWISSPROT HIT: Q06890, EVALUE 6.00e-04; EST_HUMAN HIT: AA639918.1, EVALUE 1.00e-110; NT HIT: gi13646818, EVALUE 1.00e-120
acttaagcccatgttgcccacctccaagtttcatggactttttccttctccacattactttcttctctgctagactgtcctgatgtacctgctctgcacacagaattagacgaggcgatcaggttggtcaatgtatccaatcagcagtatggccagattctccagatgacccggaagcacttggaggacaccgcctatctggtggagaagatgagagggcaatttggctgggtgtctgaactggcaaaccaggccccagaaacagagatcatctttaattcaatacaggtaaaggagagacccaagagcagatacggaaatgacacgtgcataccttgatttcactgttaatttacttatgaattgtgtctgaatttgaaaacaagctgtaggaggtattcatatttccattgtgattgccttcaggctgacttgatttaacgtagttcatggtctttagaaaacaagaaagtccataaagaaaatcaatttaaaacacaaaatactttctaatctagaaatggctatttctgcttagagttatagggctataactgatagaggtaaccttgaagaaatatggccaa

SEQ ID NO: 7972 - DNA, 532 bp, Homo sapiens
  MAP TO CHR19.3; EXPRESSED IN HEART, SIGNAL = 2.6; EXPRESSED IN BONE MARROW, SIGNAL = 1.5; EXPRESSED IN ADULT LIVER, SIGNAL = 2.1; NT HIT: AF325191.1, EVALUE 1.00e-66; SWISSPROT HIT: O43345, EVALUE 3.00e-18; EST_HUMAN HIT: BE673426.1, EVALUE 2.00e-53
tgtatgtttctgttcatgcccttaattttatactttatcacttagaaaaatgtcatgtgtacactgatgttgtggatcttatgccactattttctcaaagttagagaatatattagagaacatttctgtttataaattagtttattgaataatttcagtcacttgtataagtcagaagcagttctctttactctctcatttcaccttgaattaaataaaaaattctacccatgggcacttggtcaatatatttctctctctctttctctctccttctgttggtgtgtgtgtgtttcagggaccattgacatttacagatgtggccatagaattctctctggaggagtggcagtgcctggacacagcacaacagaacttatatagaaatgtgatgttagagaactacagaaacttggtcttcctgggtgagaataacttcaatacaacattcctaatataccctaaatgtttcatttctcctctttgtagaatgttctttggtaatttatgctttgcataaatgagtttcaga

SEQ ID NO: 7973 - DNA, 517 bp, Homo sapiens
  MAP TO CHR18.3; EXPRESSED IN FETAL LIVER, SIGNAL = 4.9; EXPRESSED IN LUNG, SIGNAL = 3.6; EXPRESSED IN BONE MARROW, SIGNAL = 6.1; EXPRESSED IN ADULT LIVER, SIGNAL = 4.3; EXPRESSED IN BRAIN, SIGNAL = 4.5; EXPRESSED IN PLACENTA, SIGNAL = 4.4; NT HIT: AB046847.1, EVALUE 3.10e-02; SWISSPROT HIT: P17221, EVALUE 6.30e-02; EST_HUMAN HIT: AI146454.1, EVALUE 5.00e-48
tcgaaaattccaacctcagcaatttgtcactttgctttttcccatctaggctgcatgatgagattattcatgaccacttttatcactgcagggaattttgcccttggatgtgttctgagtggagctgacatctctgcagcatcttctctaggacccttctctctgacatagcagtggcctaactcttcatctgtctctcctccatccagcatggcaccacactcctgatggttgctgcctacgctggccacatagactgtgtgagggaactggttctgcaaggagcagacatcaatctccagagagaggtaggtcaggctttgcacttgaagaaaaatgaccaggctcagagatctgaagttttcatgatagtgaactggtatgggggacaagagccatcattgcttttctcccacattaaagcccattgcagagtttattgtgcctacaatgaggtccagcaacgtactagcagttataatgcatttgagcgtagcctgtcgggcatatctgaggt

SEQ ID NO: 7974 - DNA, 550 bp, Homo sapiens
  MAP TO CHR19.3; EXPRESSED IN ADULT LIVER, SIGNAL = 2.2; EXPRESSED IN HELA, SIGNAL = 2.5; EXPRESSED IN HEART, SIGNAL = 1.9; EXPRESSED IN FETAL LIVER, SIGNAL = 4.1; EST_HUMAN HIT: AW579185.1, EVALUE 0.00e+00; NT HIT: X16454.1, EVALUE 0.00e+00; SWISSPROT HIT: P40199, EVALUE 4.00e-45
aggaatcaaaggtgccacacagggcaatcttctctctgttttctgcacagcggagctgcccaagccctccatctccagcaacaactccaaccccgtggaggacaaggatgctgtggccttcacctgtgaacctgaggttcagaacacaacctacctgtggtgggtaaatggtcagagcctcccggtcagtcccaggctgcagctgtccaatggcaacatgaccctcactctactcagcgtcaaaaggaacgatgcaggatcctatgaatgtgaaatacagaacccagcgagtgccaaccgcagtgacccagtcaccctgaatgtcctctgtgagtatcttctgttcctctgtggcccaggctgccagcccaaatccacacagccagagtccaggtctctcagtccctctcaggtctaaggactcagaccctcacccaggctggccatgacttcctgccctgagcaaacctgggcagaccaggccttgaccaagaatgggaggggaggggctgtctcctgtgctacttctgctcaaacacccattcccatc

SEQ ID NO: 7975 - DNA, 500 bp, Homo sapiens
  MAP TO CHR19.3; EXPRESSED IN HELA, SIGNAL = 2.6; EXPRESSED IN FETAL LIVER, SIGNAL = 9.4; EXPRESSED IN ADULT LIVER, SIGNAL =  23; SWISSPROT HIT: P55899, EVALUE 2.00e-72; EST_HUMAN HIT: BF338211.1, EVALUE 0.00e+00; NT HIT: AF220542.1, EVALUE 0.00e+00
cgggagagaggacagaacagcctgcggctgcagatccggctcacccttccactccaggtttccacggcccctctccaggtgctcccgcaggcggtgcgggcaggagaatagcaggaaggtgagctccttgttggccgccttgtcctgctgctgccaccgctgactgatagccagggcctcgggccagtccccaccccaggtgccctgcttgaggtcgaaattcatgaactcctcgccgttcagggcgaacttggcggtgggcaccgaggtgttgtcagggcccagttcacagcccagcaggccctgcagagtgtagggacctggggcgcccaaacacaggtaagcggggccccggagcatggacccggccccttgcccctccagaccggaatctcaccttttccccccaaagctttgaaagcttccagaaagagcttctccttgatcctcagatctgtggtctctttctcccaataccaggacacctggttttcccagac

SEQ ID NO: 7976 - DNA, 566 bp, Homo sapiens
  MAP TO CHR16.3; EXPRESSED IN ADULT LIVER, SIGNAL = 2.7; EXPRESSED IN HEART, SIGNAL = 2.6; EXPRESSED IN HELA, SIGNAL =   2; EXPRESSED IN LUNG, SIGNAL = 2.9; EXPRESSED IN BONE MARROW, SIGNAL = 2.1; EXPRESSED IN FETAL LIVER, SIGNAL = 2.1; EXPRESSED IN BRAIN, SIGNAL = 2.1; SWISSPROT HIT: P23304, EVALUE 1.80e+00
cgagcccaattactcagagccctgttacttggcgctgacaggagccccgaggcaccttgctgctaacaaacataacacgcttcacaaaatgttcaccctgtcccccatgagactggtcactgataaagaactggtagaaaggttctttcctacaaatccaattccagtcggcttggctgatgcttggcctgctcctcagagaggcaaacatgcccatttgctggggaaatgcaacccaggggcgttttctcctcctctctctactgtgatcttgcctttcagagccagtaggggttcagacttggagttgctgacattgtcagccccggaagaaaagttgtgaggctcagccagatctatttatgccagattttacaacatcattgaattatttgcactcagaactgctgatgttctgttgttattgttgtttaagtctacacataggcattttggaaggcaccaatgaatgggcatctctttatagtttctgaggcagaaaaaggaaaaacttttttctcccctttatttaggagaaaagtgagtggagtggggaatacagcctt

SEQ ID NO: 7977 - DNA, 555 bp, Homo sapiens
  MAP TO CHR18.3; EXPRESSED IN ADULT LIVER, SIGNAL = 2.5; EXPRESSED IN PLACENTA, SIGNAL = 2.2; EXPRESSED IN HELA, SIGNAL = 5.6; EST_HUMAN HIT: AU140779.1, EVALUE 1.00e-106; SWISSPROT HIT: Q16787, EVALUE 8.00e-22; NT HIT: X84900.1, EVALUE 1.00e-106
catcccctccaaagttcaaggaaaaccatgaaatgagtagaaactcgattctccctttgtagtttttataacccagcttcagtatgctcatctgtcaaatagaaaacatgaggtgatgtattacagtgctgaaccggataaggacctggcagaaaacccaccagggggagaacaatgggcttgctaacagtatccgggattctttaaatgaatacgaagccaaactcagtgaccttcgtgctcggctgcaggaggcagctgcccaagccaagcaggcaaatggcttgaaccaagaaaacgagagagctttgggagccattcaggtgagttcacagtttgaagttgcacactttcgttaataaggatgagagaagcagggatctttattattaataaagtggcatagccaggcacctgtctgtacatctcattataccacctcagacccagatcagacaggaacaaagcgttaagtgcaaaaccatagttgtttctagtcttcagctaccagaaaagattctgaacttaaaccacagacaaagcagtgcaaactgc

SEQ ID NO: 7978 - DNA, 559 bp, Homo sapiens
  MAP TO CHR18.3; EXPRESSED IN FETAL LIVER, SIGNAL = 1.3; EXPRESSED IN BONE MARROW, SIGNAL = 1.5; EXPRESSED IN BRAIN, SIGNAL = 1.8; EXPRESSED IN ADULT LIVER, SIGNAL = 1.9; EXPRESSED IN PLACENTA, SIGNAL =   2
tggtcttagcaaaggatgccatgtgcagatcattccctttcagcttgggaacttccagttaaagccatccagaaaatatggtaaagattggtctctttggtcttccttcttgatggcagccatgtggaggagaagtatgtgcagaggagaagcagagaaatcagagaagccagcaagcagatgccttaattgtcaagtccatcctatctgtcaccaagatatgtactattttggcagcccaggaaatgatatttccaggagaagcaggagctgctgctaaagccagcagatacattttttttggtggtagcctcatgggccagtaactttgaatgtcacaggtagagataaccaaagtttaatatcacaggtagtagtattaagtgtttgacatcaaaggtgcagcagtatgaaaaaatgtatacctcttatagtgatactagtgcctttgcttcttacttcatcctaaagagatagaggaacaccaaggtaatccctaactgcctttataaccgtgctaaaaaatgtaagaacaacttgtggggttgtgaaaacgcta

SEQ ID NO: 7979 - DNA, 521 bp, Homo sapiens
  MAP TO CHR19.3; EXPRESSED IN ADULT LIVER, SIGNAL = 1.1; EXPRESSED IN HELA, SIGNAL = 1.4; EXPRESSED IN LUNG, SIGNAL = 1.3; EST_HUMAN HIT: BI257113.1, EVALUE 7.30e-01; SWISSPROT HIT: P13709, EVALUE 3.00e-03; NT HIT: D49558.1, EVALUE 5.00e-01
gacacacccacaaatcatcgcccccactcttcagcctcacagcggccccctggtccctccagaatctctgtcatcagtcacccccatacacagagcatcgtccatcgtgggtgggggccccgccacagatgccactccccagacccagaagatgaccgcaagctgctgcaacgcggggcaggggttcaggatgtccgtaatctcccgcctcgccctgtctgagtccccttttctgtcgcctggaaaaaccacagcagccgccctcgcagaagtagggaagttcgcccgtgctacagcggcgtccgcaatcccagggggccccacgggacgaggcttaagaggcgaggcgcgctgcatgccgggaggagctcgatgggcggggctttgagcgactgtgcagcctccgtttgaggtcgccgtttcccacaagcccccggggcagggacctcgccggcgcagttgtcgggctgggactgcgcgggtgctgcggtgagcttcggggtctggtatggctggtgctt

SEQ ID NO: 7980 - DNA, 551 bp, Homo sapiens
  MAP TO CHR16.3; EXPRESSED IN ADULT LIVER, SIGNAL = 2.4; EXPRESSED IN HELA, SIGNAL = 2.1; EXPRESSED IN PLACENTA, SIGNAL = 6.1; EXPRESSED IN HEART, SIGNAL = 4.9; EXPRESSED IN LUNG, SIGNAL = 2.9; EXPRESSED IN BONE MARROW, SIGNAL =   3; EST_HUMAN HIT: AU138341.1, EVALUE 0.00e+00; SWISSPROT HIT: P33151, EVALUE 3.00e-51; NT HIT: U84722.1, EVALUE 0.00e+00
ccagctcacgtcacctcttcttttctagatcaagtcaagcgtgagtcgcaagaatgccaagtacctgctcaaaggagaatatgtgggcaaggtcttccgggtcgatgcagagacaggagacgtgttcgccattgagaggctggaccgggagaatatctcagagtaccacctcactgctgtcattgtggacaaggacactggtgaaaacctggagactccttccagcttcaccatcaaagttcatgacgtgaacgacaactggcctgtgttcacgcatcggttgttcaatgcgtccgtgcctgagtcgtcggctgtgggtacgttgcatgcccactctgtcctcctccctccctcatccccagcctgggggcacctctcacatcagccacttcactgcctggggtaggaatccagtgagttcagggtagtgattgtaatgcctgtgttgccactttacatgatttgaaagaaactctagttcctaacaagctctgatctggccacaggctgagctctgaccctagtcatagaccaagccctgatcctaatca

SEQ ID NO: 7981 - DNA, 505 bp, Homo sapiens
  MAP TO CHR16.3; EXPRESSED IN HELA, SIGNAL = 1.4; EXPRESSED IN LUNG, SIGNAL = 1.6; EXPRESSED IN BONE MARROW, SIGNAL = 0.79; EXPRESSED IN ADULT LIVER, SIGNAL =   1; EST_HUMAN HIT: BG311144.1, EVALUE 7.10e-01; SWISSPROT HIT: Q9PM75, EVALUE 8.00e+00
cttactcagcagcccacctcaccccaccagtttcccatggatctgaagctccatgtcttcaagacagcggttcctgccttcgtcatacttttgagtaccagttccctccaccccacagttcccaaattttaattcagtaccaaattctcaggagacactcagagacttgcaaagtcaaaggggaagactgagaaagggaagctgtgggaaccagaactcgcctgtgactaatgctgatctttcactgaaatcaactctttaggaagctctttgaaaaaaatcaactaattttaagtcaagtaattttttttaactctacgaatttcctcatctgccatgggaggtaatatattcaaagcacctaggcacacatggatattgcataaatggaagtcattattattattattcaagatccattaatttcattggtcagttgaataaggatgtattccccctgtttaatctaaattcatcaagtgtaagatggtggccaaaaagtcat

SEQ ID NO: 7982 - DNA, 516 bp, Homo sapiens
  MAP TO CHR16.3; EXPRESSED IN ADULT LIVER, SIGNAL = 1.6; EXPRESSED IN LUNG, SIGNAL = 2.7; SWISSPROT HIT: P09042, EVALUE 6.00e-03; EST_HUMAN HIT: BI760121.1, EVALUE 0.00e+00
acgacaggatttggagatggaggctcagtcgtgagaggagctgggctcctcctggagggacatcagacaacaccagtgcttcctccagcaggactcctcatccagtgctctctttgccacctgacctggcacccggtggatgctcagagatggcaggggagttgaatctttgaggcctggcccagcagtcaaaggcctcccacagatgtctgtttgtgctgcccccaggactggagtgacagcctggcccagctggctcaagccagggcagccctctgtggaaccccaaccccgagcctggcgtccggcctgtggcgcaccctgcaagtgggctggaacatgcagctgctacccgcgggcttggtgtcctttgtcgaagtggtcagcctatggtttgcagaggggcagcggtacagccacgcggcaggagagtgtgctcgcaacgccacctgcacccactacacgcaggtgagtgtgctgcaggtgaggccagtgtgccagctcccagatacagac

SEQ ID NO: 7983 - DNA, 519 bp, Homo sapiens
  MAP TO CHR19.3; EXPRESSED IN LUNG, SIGNAL = 2.1; EXPRESSED IN FETAL LIVER, SIGNAL = 2.6; EXPRESSED IN ADULT LIVER, SIGNAL = 1.4; EXPRESSED IN HELA, SIGNAL = 1.9; NT HIT: gi14787051, EVALUE 0.00e+00; EST_HUMAN HIT: BF970086.1, EVALUE 7.00e-32; SWISSPROT HIT: Q62261, EVALUE 2.00e-31
ttgctcactttgctgtacccccccccccacttcctgatggcaggtgctgcaggagaaattctcagagtttgccagcgagacaggtatggcagggcgggaacggctggcagctgtgaaccagatggtggatgagctgatcgagtgtggccatacagcagcggccaccatggccgagtggaaggacggactgaacgaggcctgggctgagctgctggagctcatgggcacacgggcccagctgctggccgcctctcgggagcttcataagttcttcagtgacgcccgagagcttcagggacagattgaggagaagcggaggcggctgccccgcctgaccaccccgcctgagccgagacccagtgccagttccatgcagcggaccctgagagcctttgagcatgacctgcagctcctcgtgtcccaggtggggcgccggtggccatcagggcaggtgggagggcctggacagctgtgggcagcagagtgggcaaaaatcaggctgtggagcaggtcgaaatt

SEQ ID NO: 7984 - DNA, 509 bp, Homo sapiens
  MAP TO CHR16.3; EXPRESSED IN LUNG, SIGNAL = 1.1; EXPRESSED IN BRAIN, SIGNAL = 1.2; EXPRESSED IN ADULT LIVER, SIGNAL = 1.1; EXPRESSED IN PLACENTA, SIGNAL = 1.5; NT HIT: AF127030.1, EVALUE 2.00e-03; EST_HUMAN HIT: AI688118.1, EVALUE 1.80e-01; SWISSPROT HIT: Q9Z6P2, EVALUE 6.20e+00
ttcccttcttgttatagctccacatactaggcacttaataaatgtttaaatatggaggggaggaagggagagggggagaaaggatgcaggcaggcaaacctcctctcaaataatattctcaagtaagtgcatgatgctttgggggtggtggtggtgggggggtggttgtggcttgaccatgctttaatctccaaattgcaaaaacattaacattattgattgatcagacatcaatccaacagaaatttaattaaattagaatgtgtcactgagcagacctgggtgcatcatgcataaatctcaggtaataagttgacaaagagacagcagccattggtgcctgggttggctgaatttattctccgccattttctcttcccgggctgcagagggccctgcacatactcacgagaaggtacaggtgaaatggggtgagctcctgatttatgacacccacggagtccccagcagcccaggagtccaagaagtgccttcccctgtgtgattta

SEQ ID NO: 7985 - DNA, 567 bp, Homo sapiens
  MAP TO CHR19.3; EXPRESSED IN LUNG, SIGNAL = 1.4; EXPRESSED IN BRAIN, SIGNAL = 1.9; EXPRESSED IN ADULT LIVER, SIGNAL = 1.3; EXPRESSED IN PLACENTA, SIGNAL = 1.6; EXPRESSED IN HEART, SIGNAL = 1.7; NT HIT: gi14767583, EVALUE 0.00e+00; EST_HUMAN HIT: BI520890.1, EVALUE 1.00e-111; SWISSPROT HIT: O08550, EVALUE 9.40e-02
cctgtctcttcagagcccacacagtcccagatgctaacaagggaccagcctccaaatgtcatggccactcacctagctctccaccatagatggaaaagtccttctccaagatgacccacttttcaatcctctgtgcattgttcatggcttcctggttcacagcattgatgccttgctggatggccttgtagaccagggggtcttgctgcttcacaatctcagtcacggtggatgcctggctgcccagaccccgacagaagttgatggcctcgaagttcagcttgtccagaggttctccgctcatctgattcatctcacactgcccccagacacctctgtcaccacccatgctccttgaccagcacccctccccaggcccacagaccaagaagtgggtcttgaacccacagatgcatcctcttgaccctggggtggggccagggaacccaagaccggctgcagagacttcccccaatgacagcaaacccatgttaccttcagcgtcagcaacatgctcagaaacttcagtttatctcctactaacatggcgttactgatgatggggat

SEQ ID NO: 7986 - DNA, 504 bp, Homo sapiens
  MAP TO CHR14.3; EXPRESSED IN ADULT LIVER, SIGNAL =   1; EXPRESSED IN PLACENTA, SIGNAL = 0.93; EXPRESSED IN BONE MARROW, SIGNAL = 1.3; EST_HUMAN HIT: BG331230.1, EVALUE 1.10e-02; SWISSPROT HIT: O03548, EVALUE 2.10e+00
gcttacaaaatttgcctgacgtaggtgtcagaaacaagtgctaaaatggaaaatgtggaatcactagccttcaatgataacattccgaataattcatactaacatgcaaggaagctccattccctagctctcccaccacttggtatgtgttgaaaaggtgctgtgatgaacaatagacaggcttttgtcagatttagtttgccgtattgcatgtacatgaagccaaagagtgactgggaagaatcccagcagagcacgagagagcaacaaactataaaagaaaaaatgagaacggaaagaggggaaaaggtgagaactcaagagaacatgctaaaatgaagccagagggaaatgttgaaaagggagagaaacactatagaggagggaaaaaagaagaagtaaagtgaacagtctgcaggcagaatcgttgtagaactgaacatatctgaagtgtcaggcaatatatctgtaaaactgtatttgggagtgcagccgtttcttttt

SEQ ID NO: 7987 - DNA, 576 bp, Homo sapiens
  MAP TO CHR19.3; EXPRESSED IN ADULT LIVER, SIGNAL =  10; EXPRESSED IN HEART, SIGNAL = 7.6; EXPRESSED IN HELA, SIGNAL = 9.1; EXPRESSED IN BONE MARROW, SIGNAL = 9.2; EXPRESSED IN FETAL LIVER, SIGNAL = 3.4; NT HIT: AF112202.1, EVALUE 2.00e-53; EST_HUMAN HIT: AA121400.1, EVALUE 0.00e+00; SWISSPROT HIT: O00268, EVALUE 4.00e-03
caggtcccagaagacacctcacacgggttccatctgcagctcctccccgtccacagcctcaatctggtggaaggcagcgtgggagccgatgaccaccagggtggctcctgcaggaaagccggcagctcagggccacactcctgcacctggctcccaccatccaccccagctgctcagaccctgtactcacccagcacccagaagacggccgagcccgcaccagccagccagaagaaggggaaggagatgcctccagccagagcatactgatgcgctgggctcacctctcggcctgggggcagatggcattggggtgctgttccgactctccatgccctctcccagagtaacccctgctgccccccaacaatccgtacaagctccaggttctcgggatcgaatccaaactcctcatgccaaggccctccaggtcctggggtcaccctgttcccctgctgtccccactgccctccagaacacagcacaccgtcctcgcctgcctcagccccaccctctgccctctgccccacatcctccaggaagttcctgggatcccggcttcctgctccctagact

SEQ ID NO: 7988 - DNA, 584 bp, Homo sapiens
  MAP TO CHR19.3; EXPRESSED IN BONE MARROW, SIGNAL = 4.1; EXPRESSED IN ADULT LIVER, SIGNAL = 2.9; EXPRESSED IN HELA, SIGNAL =   3; SWISSPROT HIT: Q9UF02, EVALUE 1.00e-24; NT HIT: gi14769417, EVALUE 1.00e-116; EST_HUMAN HIT: BF364668.1, EVALUE 1.00e-113
atctaattctggggttggggatctggatctggagctagaccacaggcagcaggtttggggagcccagccctgaggctgaggctcaacagttggtgtctctggtcagactctagggttggggtcatgggtcaggccacggaggtcagatctgagatttcgatttgggagtcagtgtctctggctagggcccagcatcccgggttgctgcatggggtcaagcactctggtcggtcccatggagctctgcactgtagcttcccttccacaggccccgcagggcgccccctgcctctgaggatgagtcactgcagcagccgcgccctgaccctgctgagcagcgtgtttggtgcgtgtggcctgctcctggtaggcatcgcggtcagcactgactactggctgtacatggaagaaggcacagtgctaccgcagaaccagaccaccgaggtcaagatggccctgcacgccggcctctggcgagtctgcttctttgcaggtacagccctcacccgtcttccactcaacagtttctgccttgcctggggtctgagagtcttagccatagtcccatcccttgagttccagaa

SEQ ID NO: 7989 - DNA, 544 bp, Homo sapiens
  MAP TO CHR19.3; EXPRESSED IN HELA, SIGNAL = 3.8; EXPRESSED IN HEART, SIGNAL = 1.7; EXPRESSED IN LUNG, SIGNAL = 2.4; EXPRESSED IN ADULT LIVER, SIGNAL = 2.2; EST_HUMAN HIT: BE005916.1, EVALUE 2.00e-66; SWISSPROT HIT: P16818, EVALUE 1.20e-01; NT HIT: gi15303440, EVALUE 1.00e-66
ggaggtaccaggtgtcatgcctggcagggcagggcctcctgaggactcacgttttcttgcgtatgtgggccttgtgctcctcagctgtgccttcccagctgaggtaccctaggaggaacttccaggcctcgcgccgcaggctggggctcagaccctgggggtgcaggagggcaggcagctcagtggggccttgttctggccctgccccattcttccacctgtcctggcactcacccccgagaagatccggttcttcagctcagggacctgctgcaggcgaccttcagggcccacgtggcgtgcccactcctcctctgtaactggagggccccgctccacggttggccgaggccccagctccacctgcaggcaaagagcaaatgagcctggggctcggcggggtggtggggggacccaacccagcctcagtccacaagctcagagagcttattagcttgacggatgactaacattcaggggcagcagcagcctcttccggggctcagcagccaagtcatcccccagttaggagggtcccccaata

SEQ ID NO: 7990 - DNA, 598 bp, Homo sapiens
  MAP TO CHR16.3; EXPRESSED IN HELA, SIGNAL = 3.1; EXPRESSED IN PLACENTA, SIGNAL = 3.7; EXPRESSED IN LUNG, SIGNAL =   4; EXPRESSED IN BONE MARROW, SIGNAL =   5; EXPRESSED IN FETAL LIVER, SIGNAL =   3; EXPRESSED IN ADULT LIVER, SIGNAL = 2.6; EXPRESSED IN BRAIN, SIGNAL = 2.8; SWISSPROT HIT: Q23977, EVALUE 7.70e-02; NT HIT: gi14916432, EVALUE 9.00e-71; EST_HUMAN HIT: BF920913.1, EVALUE 3.00e-68
gtactgctcacccctcttgcccccttctggctcctcgctcctagggcttcgctgaacccccctttacttacccgcgtccctctcttggctcctgccccagcccgcgaaccccctcctggcccccgtgccgtggtccttcgcctcccaccgcgcctccttcttccctccgcgggggtaacttttggcacctggagccagactcaggggcttcatgtcgtccccgtcccaggtgacagcttcgccgtgagcgctgcctgggctcggaagggcatcgaggagtggatcgggagacagcgctgcccgggcggtgtctcgggaccccgacagctgcggttggcgggcaccataggccgaagcacccgggtatgattccccacccctgccccacctcctggcctcctttcagcctcagagatgggtccccaaacccatgcaccccaactttgagcactttcctgcacagcttctgggtctgaaaatctcttctcagctgccccctgccccaccaacgcgaccctctgcccgcatgccttggagaacctcgaagtgcccagctggaggcagagggctgcctgggggaaaggtcctaggtggggag

SEQ ID NO: 7991 - DNA, 511 bp, Homo sapiens
  MAP TO CHR14.3; EXPRESSED IN ADULT LIVER, SIGNAL = 1.1; EXPRESSED IN PLACENTA, SIGNAL = 1.3; EXPRESSED IN HELA, SIGNAL = 1.8; EXPRESSED IN LUNG, SIGNAL = 1.3; EXPRESSED IN FETAL LIVER, SIGNAL =   1; SWISSPROT HIT: Q92524, EVALUE 1.00e-05; NT HIT: AF006305.1, EVALUE 8.00e-37; EST_HUMAN HIT: BG256050.1, EVALUE 1.00e-36
atccacgtgggtaggtgaagaggtgaggaagggtctaagtgattatcattcggatttgtagtcgcaaatcctaagtgtcagggtgtcaatatcttctaagactataacttaagatgtgcttaaacaagtattgccgatcaacaaagtaaaagtatggtgctttctctgtaacattttgttgttatacatgccacctactcattacaaacagcattatttcttttatggtttgaaacagtggatgtgaaacttaggtaaagtgaagtagacttacgtaaacagtaaagtgagacgtagcgacttaaacacactaagattactgttcaattaaaaatgttcaaattgtattatttcagtaagggaacaattaaaagaacttaccaagcagtatgaaaagtctgaaaatgatctgaaggccctacagagtgttgggcaggtaggtgatggagtttggggaatagggggtgatggtaatttgcttttttatttagctgttgccaaaaagtaatgc

SEQ ID NO: 7992 - DNA, 598 bp, Homo sapiens
  MAP TO CHR19.3; EXPRESSED IN ADULT LIVER, SIGNAL = 1.2; EXPRESSED IN HELA, SIGNAL = 1.8; EXPRESSED IN PLACENTA, SIGNAL = 1.6; EXPRESSED IN BONE MARROW, SIGNAL =  41; SWISSPROT HIT: Q23949, EVALUE 1.00e-01; NT HIT: AF242517.1, EVALUE 0.00e+00; EST_HUMAN HIT: BG187105.1, EVALUE 0.00e+00
caccagtgaggagagtgctgggaggggaaggggtgggagggctttggtcttgtgggagggagagaaggaggggaggtgtgtggtgggacctgctgaggaacacattttgagctacatctttattggagaaggagacagtggggtttttggccatgggaggggaggaatggggtgcggatcagcagggcctcagggggagcggtagtgtggccaattctggatgaggtggtagagctggttgcctggagagagtgtacgctgcacatcccggtgtcctttgagcacatagttggacctcagggctccctgagccacaccgcaggccagtagaccctgggctgcccggatggcctggggtgtgggcacccgatctggaggaggcagaggtaggagtcaggcaggggcttccccgaaggggaagtgatagcgtagggccccgtgtcagcccccatcccaactggctggacagtcactcacccatgtagttgcccatgaagctgatgccaatggacatggggttccataagtgacctgagtgggcacccgtgaagttccagccacggccctcgtatacgagcccgtcttctccaatcaggaa

SEQ ID NO: 7993 - DNA, 517 bp, Homo sapiens
  MAP TO CHR19.3; EXPRESSED IN BONE MARROW, SIGNAL = 4.1; EXPRESSED IN ADULT LIVER, SIGNAL = 3.2; EXPRESSED IN PLACENTA, SIGNAL = 3.8; EXPRESSED IN HELA, SIGNAL = 3.6; EXPRESSED IN LUNG, SIGNAL = 4.7; NT HIT: gi14760398, EVALUE 2.00e-90; EST_HUMAN HIT: BF852003.1, EVALUE 5.00e-05; SWISSPROT HIT: P17277, EVALUE 3.70e-02
tatcaaccctcaggcgtttcttggggatacccaaactcagtgactcaagattccttgggaatgcccaccccccacctccccagtgctgtgggcatcagatcccaggggaccatccctgctagcatccatctcaatgacccggagctccatggaagggtctgcccccactgcccccatgccaggggaatggggactcacaggaccccctggcccggcccctacctccgtgttccaggggttcacccccagctgctgggccagttccaggaaggcaggcagctgctggcggtccaggagcaggtagacaggtacccagcggcgcgtggcagcatccaccaagtccaaaagcaggtctgggtcagtgaagacgtccatgaccacggccaccagctgggcatggggagaggggcggtgggcttgtgaacggaagctggctcaggggacactcagagggtgtgggaaacctgacatctggaatctgggagtaaagtgctctgggggctgggagtttaaagtt

SEQ ID NO: 7994 - DNA, 535 bp, Homo sapiens
  MAP TO CHR18.3; EXPRESSED IN BRAIN, SIGNAL = 1.5; EXPRESSED IN ADULT LIVER, SIGNAL = 1.2; EXPRESSED IN PLACENTA, SIGNAL = 1.7; EXPRESSED IN LUNG, SIGNAL = 1.4; EXPRESSED IN FETAL LIVER, SIGNAL = 1.8; NT HIT: AF181897.1, EVALUE 2.00e+00; EST_HUMAN HIT: BG681050.1, EVALUE 0.00e+00; SWISSPROT HIT: P19549, EVALUE 8.60e+00
tcatgcataagcagaggcacaagttagctgcatgtgctctagactgtagagcgagccaccgttgagaagcaaaggacagcagcaggaagagcaatggaacctcctcaggacttaccaggctgctgcacaggatctagcttctcccacctaagatgggcacattgaaagccttgttgcagcagcacccccatctgtggaagcacaggctgcctgcacttctccagctgctctagcacctgacttcctggtagtcagggtaccagggagagggaggagcaccagggtgggggatatttaggggacctctttccttcaggaccacacccttctaggtgaaagcacaaacacttgattactttgcattccatctgcaaaaacaaatttaggttttgaatatggtgaaaaacgaagaaaggaaaatataaaactctgtattttatatacagtaaggaataatggaggctgataatgatcttgtgatcagctaagacaatgtcagtaagcaggtgaggtagggtgctttctatgggcaaaa

SEQ ID NO: 7995 - DNA, 550 bp, Homo sapiens
  MAP TO CHR16.3; EXPRESSED IN ADULT LIVER, SIGNAL = 1.4; EXPRESSED IN PLACENTA, SIGNAL = 1.2; EXPRESSED IN LUNG, SIGNAL = 1.8; NT HIT: AF151058.1, EVALUE 9.00e-80; EST_HUMAN HIT: AI220255.1, EVALUE 0.00e+00; SWISSPROT HIT: P23045, EVALUE 4.00e+00
atggatttcagagcccacactgctttattatttttctgctcacttaaattatcttttctctttctataggcaagtatttagaaaacttagcaatgaggagaataagatgatctctgaagtctctccatgttagtattagatgaagcacagggagcaatccgagtaccctagcaagagaggaatctggtgggcagaccacttaaaacttgtgtgaatgacaggagtggggaccatggttagggcagtgacacttgtctttctttccaggtgtttgcacttgtgacagcagtatgctgtcttgccgacggggcccttatttaccggaagcttctgttcaatcccagcggtccttaccagaaaaagcctgtgcatgaaaaaaaagaagtttgtaattttatattactttttagtttgatactaagtattaaacatatttctgtattcttccacatattttctgcagttattttaactcagtataggagctagaggaagagatttccgaagtctgcaccccgcgcagagcactactgtaacttccaagggagcg

SEQ ID NO: 7996 - DNA, 584 bp, Homo sapiens
  MAP TO CHR14.3; EXPRESSED IN LUNG, SIGNAL = 2.9; EXPRESSED IN BONE MARROW, SIGNAL =   4; EXPRESSED IN ADULT LIVER, SIGNAL = 3.3; EXPRESSED IN PLACENTA, SIGNAL = 2.4; EXPRESSED IN HELA, SIGNAL = 1.7; SWISSPROT HIT: P12176, EVALUE 1.10e+00; EST_HUMAN HIT: BG655877.1, EVALUE 5.00e-70
tttttgtcctccccatcagaggccttgtagagaaaaaagaaatggaattggttttaagtgaattagaagcagcacagaggtacttggcgcagaagtactgtatccttgtgctgggcttggccgtgccggataagcatcacatgtgctgtggaaagtaagcagatacttacacttcattagatcatcactccatcatagactcacatccttaagatgcttccgtttgacttttgttaccttgagaaaatgttcctttttctgttgtccagagtaattgggctcaggtgagaatctgtcccaaacccttgtaatgtctcctttgagagaccaaagtgcatgtggaagaaatctcagaatctcagcggatatttttaaaactttccactgcttgagattgaatgacatggtctctcagtgaaatcttgctctcaaccaggaagggctcttgctgccagacttggctcccttgggcaggaggtctggtggggccggtagtgcagggggattaggtgtctccctatccttttactgcttattttgcagcagcaacaattgtgagtaggagctgctgaggtgtggattct

SEQ ID NO: 7997 - DNA, 587 bp, Homo sapiens
  MAP TO CHR19.3; EXPRESSED IN ADULT LIVER, SIGNAL =  17; EXPRESSED IN PLACENTA, SIGNAL =  13; EXPRESSED IN HEART, SIGNAL =  17; EXPRESSED IN LUNG, SIGNAL =  12; EXPRESSED IN FETAL LIVER, SIGNAL =  17; NT HIT: AY028079.1, EVALUE 8.70e+00; EST_HUMAN HIT: BI462381.1, EVALUE 4.00e-09; SWISSPROT HIT: Q59005, EVALUE 5.70e+00
gtttctggctttccttgcagctctctacttcctcaaaggagaaataaaatcagggtcttggaatccatttctattcaggaaaccggaaatagtttcaaaatgcgcttcagatgcacctgtgcttaagacctctggccattgcttaaaactttctgagagctgggaaacaatgaagaagtttagtgccagagactcaaagaccaaccatttaattccaaatcctgcccatgcccctgatctgtgtgacaaggggtgagatgtctgtgtctctgaggctcaacactatcatctgagttgatttctggtagatcccactgcagtgagcaatgattaaacagaccgtgtgtgctcctgtgtgatccctatgtgatggatgcataaagtgaagtgtattctacatgttttctattaatattccaaggttaatctccataccattgaactgaaatatccaggaacctagctatggttcccaatgtctctgacaggacatttaatttttgcccttatataagtaagtactgaggattgtgagaggaatatttgagtttctttcaactctgatttcccagagcctgtatcttgct

SEQ ID NO: 7998 - DNA, 592 bp, Homo sapiens
  MAP TO CHR14.3; EXPRESSED IN HELA, SIGNAL =   2; EXPRESSED IN PLACENTA, SIGNAL = 1.6; EXPRESSED IN LUNG, SIGNAL = 2.3; EXPRESSED IN FETAL LIVER, SIGNAL = 1.4; EXPRESSED IN ADULT LIVER, SIGNAL = 1.7; NT HIT: AF157898.1, EVALUE 3.60e-02; EST_HUMAN HIT: BE348980.1, EVALUE 0.00e+00; SWISSPROT HIT: Q02100, EVALUE 2.60e+00
aggagaaacaaggctgatggtttctgatgaatctccttacccccatatgacttagtataagctttttaaagatcaatgcattgtcatttatctctcccttcccaattttcgaaccaaatttctgcttcttctagttcggtctatgcctaataattcaaaaaccttgccaccaagtatcattacttctcagtcccatcattctcacctatactgacccaattcatctcatatttttatgctagtttcctacttcttttctagttcctatctttaaactgtccttgactcttacaagattaaaccttctcccaacatacatctaactttttttaaccctccttctactactacttgtgggtcaccctggctatatccacatacggcctatttattctaccaagctcatctatctcatgaatcctctcaaccatctcatgaattctctttccttgattcaaaccctaatagcaaaaatgaacagatgttaagttggtttcaatgcaaagtaactgcctagataaagaagtcacaccaacttttatcatattaagaatgaaaagccagtgttggcccaccagtccccaaaagagaa

SEQ ID NO: 7999 - DNA, 557 bp, Homo sapiens
  MAP TO CHR16.3; EXPRESSED IN HEART, SIGNAL = 1.8; EXPRESSED IN PLACENTA, SIGNAL = 1.5; EXPRESSED IN LUNG, SIGNAL = 2.2; EXPRESSED IN FETAL LIVER, SIGNAL = 1.1; EXPRESSED IN ADULT LIVER, SIGNAL = 1.9; NT HIT: gi4502168, EVALUE 0.00e+00; EST_HUMAN HIT: AV718869.1, EVALUE 0.00e+00; SWISSPROT HIT: P42744, EVALUE 6.00e-03
gactgtctcctttcccctccccacaaagaacaagactacattattacaaatgagaaaaatgtttattaagaaaacaatttagcagctctcctttagaattttacagactaaagcacaacccgaaggcaattacagtttcaatcattaacacactacttaaggtgcttgcttactctacaactggaaagttgctgaagtttgtgacatgccactgtaaatgtaagtattattaaaaattacaaattgtttggtgattattttgatgacctcttgagcagcagctcctgaaaggaaaaaggagaaaagcaaatctttgaaagagtaaacttcaagagttacatactcaattctgtaaagaaacttttccttttcaaaagcaaaggtgttttaaagtgacccaaaacagatgcagttagcttactgagtcatatcaacataaaagcctataattctttttgttattaaaggaaatctaaacagtagtgtggttgaccaaactttaaaggatacacacaggcataaaagattctcaaaggacaccctactgctgcatttga

SEQ ID NO: 8000 - DNA, 524 bp, Homo sapiens
  MAP TO CHR16.3; EXPRESSED IN ADULT LIVER, SIGNAL =   4; EXPRESSED IN PLACENTA, SIGNAL = 3.5; EXPRESSED IN HELA, SIGNAL = 3.4; EXPRESSED IN FETAL LIVER, SIGNAL = 2.7; EXPRESSED IN LUNG, SIGNAL =   3; EXPRESSED IN BRAIN, SIGNAL = 3.1; EST_HUMAN HIT: BF103684.1, EVALUE 7.30e-01; SWISSPROT HIT: P16157, EVALUE 3.00e-03
ctccttccgtctcctcacaccctctgagggtcagagcttgtcccctggccttctatgacaatactagtcaccgctggccactggccccagccgcgtgaggcagtgtccacgctcagccagtgatgggtgctttccgacttgctccgcagccatgtggactggggtcacattaggtctagcagccatgtggactggggtctcctcaggtctcacagccatgtggattggggtctccttaggtctctcagccatgtggactggggtctccttaggtctcacagccatgtggactggggtctccttaggtctctcagccatgtggattggggtctccttaggtctcgcagccatgtggattggggtctccttaggtctcgccatctctgtctgggctttgggttttccattagtaaattccctttcagtgctgtttaagttttctcgttgttgttattttgcttttgtttgttactgtggttatttttagcccggtggctgaaaccgggacactgaagcgtgacaga

SEQ ID NO: 8001 - DNA, 537 bp, Homo sapiens
  MAP TO CHR16.3; EXPRESSED IN FETAL LIVER, SIGNAL = 6.3; EXPRESSED IN BRAIN, SIGNAL = 1.9; EXPRESSED IN ADULT LIVER, SIGNAL = 1.4; EXPRESSED IN HELA, SIGNAL =  18; EXPRESSED IN LUNG, SIGNAL =  14; NT HIT: U01038.1, EVALUE 0.00e+00; EST_HUMAN HIT: AI765140.1, EVALUE 0.00e+00; SWISSPROT HIT: P53350, EVALUE 3.00e-32
tgcataaagccaaggaaaggacagttccgaattcaatagaaatattctgtacaattcatatggtggggttgagggggagggggacaaggctgtagaacccacacccgaacatgtacaaaaataacttacacagcaacccccacctgcaaggatgatgcagctctgcccagccaccggggctggggggcacactgcagacatggcaccgcgggagccaaccagtatgggccccagatgcaggtgggagtgaggagggcaccagtccggaggggagggcagctattaggaggccttgagacggttgctggccgagcgtgagctcagcagcttgtccaccatagtgcgggcgtagcggagccggctggccagctccttgcagcagccgtactcctccaggagactcaggcggtatgtgcggaagtcccgcttctcgtcgatgtaggtcacggctgccatcagtgggcacaagatgagcttggtgtgatcctgcaagagaagagcagcaggggttggcgatcccagaggccagtgtatgtt

SEQ ID NO: 8002 - DNA, 551 bp, Homo sapiens
  MAP TO CHR14.3; EXPRESSED IN FETAL LIVER, SIGNAL = 0.86; EXPRESSED IN BONE MARROW, SIGNAL = 1.1; EXPRESSED IN BRAIN, SIGNAL =   1; EXPRESSED IN ADULT LIVER, SIGNAL = 1.1; EXPRESSED IN PLACENTA, SIGNAL = 0.88; NT HIT: AF070714.1, EVALUE 9.00e-03; EST_HUMAN HIT: BE973616.1, EVALUE 7.70e-01
ttttgttttgtcaatgagggctttcattaagagccactaaaggtaagcttctctcaattgatgtagtggtaacaatttactctctcctgtcatagtgaagatagaatgaaaagaacctgtccttcaatctgtttgtggtagagatttctttttttttaaagtataaacattgaattcctctgcttacttggagatggaaggtcattaacagggcacttgagcagataggaattacagtcaattgagacgttgaaacatcctaaatggcctaatgcaccaactaagtgcttcttaaattccaaaacttttacttgagcacagcaatcatgattttccattgcctttagtaaatgttgttttatatcattttatgcgaggcagcaacacaaatttaaaccagtgtgtttatgttttcagcttagtaacattactttgtcaagacgtaaatgtaaaatttgattatcagttaattacgtatggttacttattaaaattaacagaaaaattaatggaaggtaagttagatggtactgctaatgccaatgcaattt

SEQ ID NO: 8003 - DNA, 584 bp, Homo sapiens
  MAP TO CHR14.3; EXPRESSED IN FETAL LIVER, SIGNAL = 0.86; EXPRESSED IN LUNG, SIGNAL = 1.3; EXPRESSED IN ADULT LIVER, SIGNAL = 1.1; EXPRESSED IN PLACENTA, SIGNAL = 1.1; NT HIT: AF314199.1, EVALUE 1.40e-01; EST_HUMAN HIT: BF331727.1, EVALUE 4.00e-89; SWISSPROT HIT: P24939, EVALUE 3.30e+00
cagacttggcttccagagaaacttcaaagaatcaaacatactgtatgtgaagaaataaactagaaaagttctactgaagaatatgttctttttttttttttttttttcagattaatgcatggaaaataaagctaaattatgccttgcccccacccctccatcaaactgaagcttggctccaggaggtagaagagcttatggatgaagatttgtcagcctcccaggatcactctcaagccgtgactctgatacaagagaaaatgactttattcaaggttggaaaagaaaaaaaagagatgtaggaaaatacatattttgttagggattgttcttgaggaagactttgtcctaaaaagaagagaaggataatagtggatatttgaggatggtttagaatgattcctctggggatttttgggacctagaatgtaactttaccttcatgaccattgtgttagtttaagattgaaacaattaggatagaatctaaataaggatagagttctaaagcaactataaataaagtcttaccaaaaaaaaaaggtcaaggggtgggagggtggagaagggggagcctgatttaa

SEQ ID NO: 8004 - DNA, 504 bp, Homo sapiens
  MAP TO CHR14.3; EXPRESSED IN ADULT LIVER, SIGNAL = 1.7; EXPRESSED IN LUNG, SIGNAL = 1.5; EXPRESSED IN BRAIN, SIGNAL = 1.2; NT HIT: L01418.1, EVALUE 1.20e-01; SWISSPROT HIT: Q64733, EVALUE 6.10e+00
tatctccctttcctttgcccctgccatctagctgcttctaccaccactcaccggtgctgcaggaaatcgtccctcctcctcctcgcatggtacacgttctctttgacttacctgcagacacgggccttgatgctcatctccctctgtgaactgccctcttctcctctgtcttgctccagtggttcctctggccactctaccttggtgtgccacacaccatgatcccaatctagactttctcctaagtgcaatcttcagccctactctctctatattttggtactgttgcaaggccttcgctgagacagaaataacaaaggcgaagaccaagggtaaggtagttgctcagaacacttggacaagtgatcaaagcctggtccatgagcccaaagagaagtcaggagcatggccagaggaacacggtagaaaacacacagacagtgttcacaaacagcacttctccccaactcttcctacgtggtctgcaaaaaccacctgaaggag

SEQ ID NO: 8005 - DNA, 534 bp, Homo sapiens
  MAP TO CHR18.3; EXPRESSED IN BRAIN, SIGNAL = 1.3; EXPRESSED IN ADULT LIVER, SIGNAL = 0.94; SWISSPROT HIT: P53094, EVALUE 3.80e+00; NT HIT: AF285576.1, EVALUE 5.10e-01
taacacaccagagacgcagcccagcccccatgctcacatgggggggttggagatatacactttctacaaccagttttgcagctaagatttaattgacacagcagttaagtgctacggaagggtggcatgcagaagctgtcattggtaggggcatttggcactggtgtggccttccttctacctgaggaactgtaagtgcagcgtggcagctggacaaggagggctgtggaggcagcagttcaatcctatcagtcctctgctctcagcacttcagtagctgagtcccactctccttcagcctccctgcctatcaccaagcccaccacactgtccctgctgtgtctcctaccacaccatctgacgggacactgtcgggattaaacgtagtaaacctagagaagagttcagtgcagtgcttggcacttgaggcttcagagatggaacctgttgtttctaagctcttaaagctggtccctcctgtctgtgccccagaagcctgtgtggactctttcctgaaaacgatggcatgacaga

SEQ ID NO: 8006 - DNA, 583 bp, Homo sapiens
  MAP TO CHR19.3; EXPRESSED IN BONE MARROW, SIGNAL = 0.9; EXPRESSED IN ADULT LIVER, SIGNAL = 1.4; EXPRESSED IN PLACENTA, SIGNAL = 1.2; NT HIT: gi14757770, EVALUE 6.00e-50; SWISSPROT HIT: P50176, EVALUE 8.50e-01; EST_HUMAN HIT: H25607.1, EVALUE 1.00e-112
aggaacacctggcactcaagtgcactgaggcacatgcttgagtcctgtctgccaggtacagactatgccccatgcacacgtgcccacacgcgtccctccatctcttcatggcgtatccataaactcgagccataccgccctctaggttcacccagatgcccacacacctcccaggctctgggaagccacccggcatacgaaccccgcctgtgcgggctaaactcaccgagacgtgggcctcttcaccccgaggttattgtgggcctcgttggccacagtggacagtgacagggtggactgggaatagattttgctcagccgagagcctggggacagagattgcaggtcagtgcccaccagaagcccctgccctccacaacacctggtccagcaggctgtggggggaacacaggaggagtcagtcctgcccaagacccctcggacctctgcacgtgacctagtgggggacccctctatgagggaggatgctttgccagcaggcaagtggggagcagcactgggtcagcccctactggcaacctcaccccaaacatactcccaaaggttcctatccatgaagcca

SEQ ID NO: 8007 - DNA, 505 bp, Homo sapiens
  MAP TO CHR19.3; EXPRESSED IN LUNG, SIGNAL = 2.3; EXPRESSED IN FETAL LIVER, SIGNAL = 0.89; EXPRESSED IN BONE MARROW, SIGNAL = 1.6; EXPRESSED IN ADULT LIVER, SIGNAL = 1.1; EXPRESSED IN PLACENTA, SIGNAL = 1.3; EXPRESSED IN HELA, SIGNAL = 2.2; NT HIT: gi7305200, EVALUE 2.00e-03; EST_HUMAN HIT: BF365806.1, EVALUE 7.00e-32
ggaagcaaggtagggaaaggctgtccacaggcagaaagggagagcagctcacctcccccaaccctgctccctcctatctcttcccccacaccccatgtgccagactcacatccaaagtaacaagagaggaagaagatgaggatgaagatgaggaggaaggtcacatctgtctccaggatccctgccgatttggtaggaggagtaaggttcattcaggtggatgtcccctcagtgggcacccagctctggtgtcccacagagagcctggtttctaggtccccacgtgctcaccaaactcatcagcggagaagtgtcgtgtccagaaggacttgccattggtgaggaccatctcatactccagctgcaatccatcaccctgtggggggtagggaggcctaaggggggccctgggcaagttgggggttggcaggaaggcaaagagaaggtggtccaggtggccaccccagccccttaccccacacttgctgagcgcaatataccacca

SEQ ID NO: 8008 - DNA, 570 bp, Homo sapiens
  MAP TO CHR16.3; EXPRESSED IN PLACENTA, SIGNAL = 2.4; EXPRESSED IN HELA, SIGNAL = 2.1; EXPRESSED IN LUNG, SIGNAL = 2.8; EXPRESSED IN BONE MARROW, SIGNAL = 2.2; EXPRESSED IN BRAIN, SIGNAL = 1.9; EXPRESSED IN ADULT LIVER, SIGNAL = 2.3; EST_HUMAN HIT: H60718.1, EVALUE 2.00e-01; SWISSPROT HIT: P35177, EVALUE 6.30e-01; NT HIT: M95814.1, EVALUE 1.40e-01
cagatgaggcaggagtttgcttgtgtttcaagacagaaatggtgtgaaagccacacttagatacaagagctaacctgcctgattgactctccagaaaaggtccaggcagatgaaatcaagcaatatcaggaccaaatgcagaaaaataccaggtctagcttttcctggaacaggtgctttgcacactgattttccagttaaacaacctctgtggtaaccacaatcataacatgtaaagtacagctaacttttttctaagtggcttcttccaaggtgcctattaatgaccctcagaggacacatgataaaaagaaaacaggggtttttatatggtgatcaattcatgacttaagctcccttccctcaattacaggtaacacagcctccactcagctaaccaatcccaaacaaggccttctaagcatggctttcccttctgactttcataacgataaacactcatgtcgaggggcaaaggcttttgaaaaatctgataaagatatagacctggatgaagacactgtatccatcaaatgggtgactttccaaaggcacttggatgctttttgt

SEQ ID NO: 8009 - DNA, 515 bp, Homo sapiens
  MAP TO CHR18.3; EXPRESSED IN ADULT LIVER, SIGNAL =   1; EXPRESSED IN FETAL LIVER, SIGNAL = 1.1; SWISSPROT HIT: Q02779, EVALUE 6.20e+00
tgggtatgccatgatttaagtgtttcttgatttgttcttatcttgatttgtaaatgttgaacacctaatttccagtctttagaaatttcttgcccatcttctttttcttcctttttcagatagttcacattcttaataacttgtttgataccccttatttccttgcatttttcttacttcttgttttttcttctttttctcattaccctataatttattttctctttttacggtaggcattccataatacctttctgctttacttctagtgttgcaaatagttctaatcctatttgcattaatattatttgtgaagagataaacctctctgctatttacagtaaaatgaacacactcattgtatcatctgtactacaacagatagcctttctctggttaagtgatcctcctacccatatcaaaatagtgtttttttgttttaatttaaagaaatcatcattagtaatgcctgtattgtgaattatcttggaaatcaatggaaaggacatggaaaa

SEQ ID NO: 8010 - DNA, 559 bp, Homo sapiens
  MAP TO CHR16.3; EXPRESSED IN FETAL LIVER, SIGNAL = 1.4; EXPRESSED IN BRAIN, SIGNAL = 1.3; EXPRESSED IN ADULT LIVER, SIGNAL = 1.8; EXPRESSED IN PLACENTA, SIGNAL = 1.6; EST_HUMAN HIT: AI916556.1, EVALUE 2.00e-01; SWISSPROT HIT: P37370, EVALUE 1.40e+00
cccttccttcttttgggaactgtcatcggtccccattgatggctcccaaagaagctgccatgttcttacatgacagtggctatgtttgatccactcaataggaggcacctgactaagaacaagtggctgagtctcctccctgagaactttgtagacttgagagtcagagaatatgccagactgtctcatgacacaagctctcaggagcaaagctcaagagtcatgggtggtcatgtttgctactttgtggaaatgatggagggtgaggttaacaaacagaaagcagcaaaacaagagcagcatatttcaagttcctggtgaatcccccccacccattccaacagttagcttatctaatccttccttggatacagaaagacatggaatcaagtagctagaacctgctgaatacagagcctaggcctcatgggaggagtgcaaaggacaaatctataggactattggaaattattgtaagcctacatggtgttgcaattccaaatcataagacacaaaaacattagcctatcatcatcacacctttgccctgctgataaaa

SEQ ID NO: 8011 - DNA, 500 bp, Homo sapiens
  MAP TO CHR14.3; EXPRESSED IN ADULT LIVER, SIGNAL = 1.4; EXPRESSED IN PLACENTA, SIGNAL = 1.3; EXPRESSED IN HEART, SIGNAL = 2.2; EXPRESSED IN LUNG, SIGNAL = 1.1; EXPRESSED IN BONE MARROW, SIGNAL = 1.5; EST_HUMAN HIT: BF824914.1, EVALUE 1.00e-48; NT HIT: AF314199.1, EVALUE 3.00e-45; SWISSPROT HIT: P41235, EVALUE 7.90e+00
ggttttataaagggctcccgctttcacttggctctcattctctctcttacctgctgccatgtaagacgtgcctttcgccttctgctgtgattgtgaggcttccccagccatatggaactgtgagtccattaaacccccttttctttataatttccccagtctcaggtatgtctttatcaccagtgtgaaaacagactaacacacctgttaccatacatacattgttaccaccatggctgattccccaaacagtacccactctctccatcctcatgttctagttgaaggtacaggaacatataaacagggattacagcaaaacagtaacagtaacacaagcctatatgatgaagcatgaatgtccaaagagtattgcagatagaaagtgcttaagaaaaaaggagggagggaggaaaggaggggggcaagggctggaaaactttctgtcaggtactatgttcactatccgggtgacaggatccatagaagcccaaacctca

SEQ ID NO: 8012 - DNA, 510 bp, Homo sapiens
  MAP TO CHR19.3; EXPRESSED IN PLACENTA, SIGNAL = 3.5; EXPRESSED IN LUNG, SIGNAL = 2.4; EXPRESSED IN BONE MARROW, SIGNAL = 1.9; EXPRESSED IN ADULT LIVER, SIGNAL = 1.7; SWISSPROT HIT: Q16478, EVALUE 4.00e-26; EST_HUMAN HIT: BF305115.1, EVALUE 1.00e-17; NT HIT: gi14756303, EVALUE 2.00e-96
catgtccttgcacaccctccagtcctctgcccagctgccccatgttgaggaggagagagtgtctacgccatgcctgggtacccagaagggctccaacccaaggccccacccctccctcaggcctgctgcgattggaggaactggtgcgtggcttcctcatctccaaggagacgctgtcagtgaggatgttggacgacagccgggaccccacaccactgctcaaggagatccgtgatgacaaggtgtccaccatcatcatcgacgccaacgcctccatctcccacctcatcctccgtaaggtgaggcccctacctctgatttcccaaaggactggggccagaaacttggggtgaccgagcaagtcacccaatgcccatgggcctcaggagtcaaaagggggcttcaagaccttcttcttccgtgaagatgataattgtaaagtttgtctctcagcctgcctgcttcctggttgtgtggtcctgagcagtcaccgcatctccctgtgaatag

SEQ ID NO: 8013 - DNA, 600 bp, Homo sapiens
  MAP TO CHR19.3; EXPRESSED IN BRAIN, SIGNAL = 1.1; EXPRESSED IN ADULT LIVER, SIGNAL = 1.2; NT HIT: AF204907.1, EVALUE 0.00e+00; SWISSPROT HIT: P43626, EVALUE 1.00e-54; EST_HUMAN HIT: BI911888.1, EVALUE 0.00e+00
acctgcaccaggagttatgggcacagaaaagaacatgaagacacagagaggaaggagagagataagacaccaggaaggggaagcctgactcaatccaggtgccatggatgggatgataaagagagacaccttctaaactcacaacctctcttcctaggagtccacagaaaaccttccctcctggcccacccaggtcgcctggtgaaatcagaagagacagtcatcctgcagtgttggtcagatgtcatgtttgaacacttccttctgcacagagaggggatgtttaacgacactttgcgcctcattggagaacaccatgatggggtctccaaggccaacttctccatcagtcgcatgacgcaagacctggcagggacctacagatgctacggttctgttactcactccccctatcaggtgtcagctcccagtgaccctctggacatcgtgatcataggtgagagtgtccagactttcttctcattgtcattgggatgcagagtgaatgatccaggaattggagacccaggtggctgtaaggaagatgagcttggtattcttatggagagagactgacttggtgaggtctgtgccaacaga

SEQ ID NO: 8014 - DNA, 539 bp, Homo sapiens
  MAP TO CHR16.3; EXPRESSED IN BONE MARROW, SIGNAL = 1.5; EXPRESSED IN FETAL LIVER, SIGNAL = 1.1; EXPRESSED IN BRAIN, SIGNAL = 0.99; EXPRESSED IN ADULT LIVER, SIGNAL = 0.93; NT HIT: gi14776305, EVALUE 9.00e-86; SWISSPROT HIT: P31568, EVALUE 7.70e-01; EST_HUMAN HIT: T75239.1, EVALUE 2.00e-75
aagtggtcatttttggctggatttcaatttttaaaaagtcaagacctctacgctaatgcaaataataatactgaactcaaagagaacacaaaactgtttaaaacataaattgggaacatggtcagcaataacacttgtattctattgtggagctccaagttgaaataagaagagatacaacaattccacctaactacaactaagaagatggaactatattctatcatttctgtcaagaaacaggtatcgtgaagtagacgctaccattaaatgaagatgttctatgatgcatactctaacagataaaacaaagcacagggttaactaaacaatgttagtttaaataagaaagtcaccttctggttccaagtcctctgttatttctgtttcatcttcagaagatgccaagctttgttctgcaagctgaccttcagatagtaaagacacatcatcttttccttgctgcattttctcagtattctcttttacctcatctacactgccttcttgtgaaacctgaagaaatcaaagcacactgg

SEQ ID NO: 8015 - DNA, 587 bp, Homo sapiens
  MAP TO CHR14.3; EXPRESSED IN HELA, SIGNAL = 3.3; EXPRESSED IN HEART, SIGNAL = 4.2; EXPRESSED IN LUNG, SIGNAL = 1.5; EXPRESSED IN ADULT LIVER, SIGNAL = 1.3; EST_HUMAN HIT: BI752719.1, EVALUE 1.00e-112; NT HIT: gi7706321, EVALUE 1.00e-41
cattttaccttgagttgcagttgtacaaattatatttttgcctgtttttatagctgaaaaatacaaggatttagtacctgataattcaaaaactgctgacaatgcaactaaaaatgcagaaccattgatcaatttggatggtgagtatataaatgcataacattgaacatcaacatttttggttttttaaatgtttttttctttgaagaatgaagtccaggtttacttggttttagtaaatttagaaggatccatgcagacagcatttatgttaacattttattctctataatgtttttataatgtgctttctccttccccttgcatttgaatatctgaatgttgatttgatttgcttctagtaatttggagttttgatttgtatttaatcatgggggtcattgtttgcctttttgaatgtgtaaatttcttttaatccaatgactctatcagacaagtggtaaaattttccattattttaagtcctggatatcttttagtaatttccctttttaaaaatatgaagaatctaattacctaaattatgatgtgtaaaatatttgttcactggctaattcattgtgacc

SEQ ID NO: 8016 - DNA, 596 bp, Homo sapiens
  MAP TO CHR19.3; EXPRESSED IN ADULT LIVER, SIGNAL =   2; EXPRESSED IN HELA, SIGNAL = 2.3; EXPRESSED IN LUNG, SIGNAL = 2.7; EXPRESSED IN FETAL LIVER, SIGNAL = 0.97; EST_HUMAN HIT: BI770340.1, EVALUE 0.00e+00; SWISSPROT HIT: P20138, EVALUE 1.00e-72; NT HIT: gi14741769, EVALUE 0.00e+00
tacccatgaacttcccttgcggccacttctgaagcctgtgcctcacctgtcacatgcacagagagctggggagatttgtaactgtatttggtacttcctctctccatccgaaagaagtatgaaccattatccctcctcctggcgtctacgatgctcagggagcagttgttcctactgggatccccaaggaggcggaatctgccctgagtctcctcctgtacttcttgatctagcttgtttgtggccactggagagtccccggatataatggctccttcccggaaccagtaaccatgaactggggagttcttgtcgtagtagggtatgggatggaagaaagtgcagggcacgaggacgcacaaaccctcctgtaccgtcactgactcctgcacttgcagccagaaatttggatccatagccagggcccctgtggggaaacgagggtcagctcggcccagcccgacaacccctctccccacagccactcacctgcccacagcaggggcagcagtagcagcagcggcatgtctgaggaagcagcttccagggcttcctgtgtgagcagaaaagaggaagggagtggaggggaaggacta

SEQ ID NO: 8017 - DNA, 504 bp, Homo sapiens
  MAP TO CHR18.3; EXPRESSED IN ADULT LIVER, SIGNAL = 1.1; EXPRESSED IN PLACENTA, SIGNAL =   1; EXPRESSED IN FETAL LIVER, SIGNAL = 0.93; EXPRESSED IN BRAIN, SIGNAL = 1.2; EST_HUMAN HIT: BG705313.1, EVALUE 1.80e-01; NT HIT: gi9631294, EVALUE 4.80e-01
tgagccaacaattgacttggtgacagcatatgcaagcttaatcttttctaagtaaacccaattgattgaggatttcactcagccaataaaaatttcatattcttacttgttctcttccccttcctcttccctctccctgtgatttctctccctgattctaagctctggggtatagagagtgccattatgttggagaagaggtgacatcttgatcttccctgtctggaacttgctgaaaaaaaattctctagaggactctttatctcataggtgttcactcttttttgagaatttgtatactattttattatattgatactttgtcaactgaaaatattattttcataagttataacaagttatcaaatatctgcaattattttgtgtgtaaaacttaaactgcagtacaaatgttgtctgcaaatcatatcctttttaaccttaggttatatcaaataatcaggaatatctgcagctgaatcactttacggtagtgccacctga

SEQ ID NO: 8018 - DNA, 536 bp, Homo sapiens
  MAP TO CHR14.3; EXPRESSED IN LUNG, SIGNAL = 2.9; EXPRESSED IN ADULT LIVER, SIGNAL = 3.8; EXPRESSED IN HELA, SIGNAL = 3.5; EXPRESSED IN FETAL LIVER, SIGNAL = 2.2; EST_HUMAN HIT: AW079129.1, EVALUE 4.80e-02; SWISSPROT HIT: P06719, EVALUE 3.40e-01; NT HIT: AF319771.1, EVALUE 1.30e-01
agaaaagagctctcctccccccaatcctagcaaccgcacttacattccaagggcttcatcgagtgcttctctgtaggcagctggaatttcagctgccttcttcagtttaggccaaaacaaataggtctttctctttcccggagggatgcgctggaccagaagacctgagttagctttttcaccctttggggctgcctctgtggtgtgtggtcctgacagatgggcagcttaaacggaacaactgtaaccaaagcccgggagttcctgtggtttctttagtctctttcttctcagctagaagcctgcagagataactctatcgattctatccccaggtggggatgggtgacaaagctggaagctgaggataactggatttgctgggggcagagagcaggtctggggagtgccaggtgttacctgtagggctgccacaccttggtggtggtggtggtggggggggagacagggtgtcctgtggcattctaaatgaatgggtggcattctaaaccccagggaagagcagtttccagcct

SEQ ID NO: 8019 - DNA, 530 bp, Homo sapiens
  MAP TO CHR14.3; EXPRESSED IN PLACENTA, SIGNAL =   2; EXPRESSED IN FETAL LIVER, SIGNAL = 1.9; EXPRESSED IN ADULT LIVER, SIGNAL = 1.4; EXPRESSED IN BRAIN, SIGNAL = 2.2; EST_HUMAN HIT: BF854275.1, EVALUE 0.00e+00; SWISSPROT HIT: O13712, EVALUE 1.30e+00; NT HIT: gi14750893, EVALUE 2.00e-93
actgcctcttccctagcctggcagctgtggcttctgaccccctcccctccaacccctcaccctccagatgcaggccctgacttcctgtgagtgcaccatctgtcctgactgcttccgccagcacttcaccatcgccttgaaggagaagcacatcacagacatggtgtgccctgcctgtggccgccccgacctcaccgatgacacacagttgctcagctacttctctacccttgacatccaggtactgcagcccctctaggactcaggtaccctgagctttgaacagggaccctcccacccaccacctctgcatcctgtccccagcttcgcgagagcctagagccagatgcctatgcgttgttccataagaagctgaccgagggtgtgctgatgcgggaccccaagttcttgtggtgtgcccaggtaagtggcctgcccagggcagctactgtggaggggcaggggatggttccaggtcaggcctttgataactttatgctcttgcacttccagtgctcctttggcttcat

SEQ ID NO: 8020 - DNA, 560 bp, Homo sapiens
  MAP TO CHR14.3; EXPRESSED IN PLACENTA, SIGNAL = 1.1; EXPRESSED IN ADULT LIVER, SIGNAL = 0.95; SWISSPROT HIT: P41515, EVALUE 2.40e+00
gaggctctaggcatgaggtgttttcggtcatagccacacattacctcagattccaggagcagctgctgcagcagacccagctagcccagcctgcagattgtcaccatgaagacagagatgatccttcctccagtgaagagcaaaacttctttgtggcctatatgactgcttggtgctgggcaagcttcctgaagagtcatcagcagctggagaccatggctgagtaaatccagggtgggggcagggcataagctgggtccagtgcattatccatcctttctagatcttggcttctttttgaataatgagcagtagcaattgctatttcctcttcttcgccattccaagcttccctctacaacatcctctctttccagctgtgtagcaggcgcagctctaagcccatgtgcttggggtctcttacccttggaattgcctcctttgccgggctttctaagttgtcttactgctagttttcaaggatcttaaaaatccatcctcttgtatgaaggcttctctggctgaatgggcattattctggcgtattcctcaccttccaa

SEQ ID NO: 8021 - DNA, 575 bp, Homo sapiens
  MAP TO CHR14.3; EXPRESSED IN ADULT LIVER, SIGNAL =   1; EXPRESSED IN PLACENTA, SIGNAL = 1.1; EST_HUMAN HIT: BG428208.1, EVALUE 3.00e-96; SWISSPROT HIT: P20747, EVALUE 7.30e+00; NT HIT: gi14764417, EVALUE 6.00e-04
tttccaccaccagacctctccaattaccaacatctgtagaggatgctctgtgttcccactttctactgtaggtgaactacccatgctcctatttaaaagatgtctcctcttgtgcagcagatccaatctttgaaggacataactccagaactcttcactctctctctcctatatcaccagtttttttccagtgtgtctttgtcagcagcagacaaacatacatttatatctcctatctttcatcacaaacaagaaaacatatctttcttcacaaatttgttacgtagcaatagatagctaatacagtgataatatgttctacataaatgatcttttcaaatgtattacagaaaatattaaccttcattattttaataatttttacagattacttgggaaaagagaaagagtgaaaggaaatttcagacatgaagcacatgcttgcaaaagacttaaaagtgggaataagatgaacacaaaagagaacttcaaactcgctgctcctggaatagtcagatcagccagcagcgtgggtaggaatcaaggcagttaactggtccatcttttgagaggca

SEQ ID NO: 8022 - DNA, 597 bp, Homo sapiens
  MAP TO CHR14.3; EXPRESSED IN BONE MARROW, SIGNAL = 0.71; EXPRESSED IN ADULT LIVER, SIGNAL = 1.1; EXPRESSED IN BRAIN, SIGNAL = 1.5; EST_HUMAN HIT: H11159.1, EVALUE 1.00e-79; SWISSPROT HIT: P35739, EVALUE 2.60e+00; NT HIT: gi14149937, EVALUE 1.00e-79
gtctacctcttcaccctgcgccctctacagcacaccacagttcaaacacatagaccccttgagaccaacattttataaactcaccttgatatctcttgttgctctcaaaccaaagccctcttctttgaagttaaccatttcaaaaccctcgacagaagccccattttcagaggcccatttcattagatcaggaaagtaatcttctctttttccatcaaaagtaacggacagacctatattaatccacgttttagaaaacaagagctacttttaggacacatatcattcacacgtctctcagaaaataaaaacaggccataactaacactggaaatagtcttaacacgccaatcttgaaatcaaaactaatcaccagatggtcacagtacataccttaactggtgacagggaagaagaattaaaatcctaaactccctgtcagttacagtgaaatatatactgacactaggtaatataaatattgactattaggtactattaggtaatacgatggcaaagggcagagagcttctattaccactactatgatttacagagcagttttctccttaaaagtcaaacatgccacctctcatg

SEQ ID NO: 8023 - DNA, 591 bp, Homo sapiens
  MAP TO CHR18.3; EXPRESSED IN HEART, SIGNAL = 2.1; EXPRESSED IN ADULT LIVER, SIGNAL = 0.97; SWISSPROT HIT: P25846, EVALUE 9.80e+00; NT HIT: AF375823.1, EVALUE 2.20e+00
ccaggctgcaaattcttttcaggcactttgcctttgggtttatctaatgtgtaggtacacttaatatgtatgcgttacttaggttaaacatacaagctgacatttatttgatgcttcccatgacccaaaggattaaaggggagagaaggaaatgtcctacctacagagcttgctctattgtgtccccttgtttgcagtagctacttaagcctttggctggaaaggggaggagaggttctccttggcagcctccatttccataagatgcgagatcgtcttcttttggtcatctacagagtccaagtggttgcagcagtgacatccctttggagcttcttcctcctacataaagattccctaagtggaagtggaggtcttccctttttatgagactggttactgctataactggtattagtttcagttagatgtgtctgttgttcaccctcttgtctctccttcactgtcacagtcatcaagccaacactttcatgattatatacaaaattttcaattttagacctggggcatgcaatcatttagacaatagcctacgcactatcgatagaaaccttcattgcttggtatggc

SEQ ID NO: 8024 - DNA, 559 bp, Homo sapiens
  MAP TO CHR16.3; EXPRESSED IN FETAL LIVER, SIGNAL = 1.1; EXPRESSED IN ADULT LIVER, SIGNAL = 1.5; EXPRESSED IN PLACENTA, SIGNAL = 1.9; NT HIT: gi14761210, EVALUE 5.30e-01; EST_HUMAN HIT: BG326176.1, EVALUE 7.80e-01; SWISSPROT HIT: P27987, EVALUE 1.00e+00
gtgacatttggtcccctgtccccagtcctgctccagaatctgctagcctcaaagacgcagaactgagtagagatcctgacccaatagacaagcacagggagccaggacctgctgacttggtgatcggcattgaacattctgcgtgtcacagcctggaatacacctgccagggttacctgcacagtctcttgctttgaaatgtctgtgcagaagccaggtcataaacacgcagtttcttggcgagctcggggttagacagcaggagctgcatgaagcagacaccccatagcctctgctgagatgcctgggcctccctcctacgacggccggtcgctcacagccagcaggcctgggacaccgcgccgcagtgccgacacctgctgcccaggcacgacctggtgggacagctgagctcctccccctgcatggagccgcccttgcctccgctatgcccatgtcctctggggtcctgccagagcatgcgtgcctggaagccacttccaacttttgctgacttttgtctctgcactggtccagtcgcctgacacatgttcgagtg

SEQ ID NO: 8025 - DNA, 570 bp, Homo sapiens
  MAP TO CHR19.3; EXPRESSED IN PLACENTA, SIGNAL = 1.6; EXPRESSED IN HELA, SIGNAL = 2.3; EXPRESSED IN BONE MARROW, SIGNAL = 1.7; EXPRESSED IN BRAIN, SIGNAL = 2.1; EXPRESSED IN ADULT LIVER, SIGNAL = 1.5; SWISSPROT HIT: P53127, EVALUE 1.40e+00; NT HIT: gi14768236, EVALUE 5.00e-72; EST_HUMAN HIT: BE278533.1, EVALUE 8.00e-72
agtgtggagcagtttcctggtttacaagtgttgtattatgagacagggcaggctctgattctcatgaaccctgttttctcctccagccacgtccacccaggattccacctgtctccaggactcagaatttcctgtttcttcaaaagaccattcctgtccccagaatttggacctgttcgtgtgcagtggtctggagcctcacacacccagtgttggttcccaggtgcactaagatctctgggtccctagagcaggagaggcacttcctggaagaccccaccagtgcatgctggaattcttgcagagcttcatctcagccagtggatgccagaacagggcccaagagagagccaaggaatattggggctgtcctggtgttggggaagttaggggaagtgatttatgtagcatctgtttccctcatgcttgcaaaatctcaggcccttgctcagccccagagacggggggaaataaagggcaaagctctcggagtgggctagaactggagggagattagtcccttgtcagggttgcatctgaagtgacggcacaggacaagatggcctcaat

SEQ ID NO: 8026 - DNA, 502 bp, Homo sapiens
  MAP TO CHR18.3; EXPRESSED IN PLACENTA, SIGNAL =   3; EXPRESSED IN HEART, SIGNAL =  18; EXPRESSED IN BRAIN, SIGNAL = 5.3; EXPRESSED IN ADULT LIVER, SIGNAL =   2; SWISSPROT HIT: P16632, EVALUE 3.00e-37; NT HIT: gi15299342, EVALUE 1.00e-119; EST_HUMAN HIT: AA908489.1, EVALUE 1.00e-121
cttttcccctacttcctggctgcctaaggatcgactgccatcacaaacaaaacagtaactatttcaacgaggaagttcatgacctaccaactacttcagaggaaacaaatgggcatcagtgtccttcaccctgggaaggcaacagtacctaagacagaaatttgggggaaactagccaaaatgtacaataccacactggatgtcatctttgaatttggattcagaacctattttagtggtggcaagacaactggctttggcatgattttataattctttggattatgcaaagaaaaatgaacgcaaatatagacttacaagacatggcctgtatgagaagaaaaagaccttaagaaaacagcaaaagaaatgcaagaacagaatgaagaaagtcaggtggactgcaaaggccaatggtgccagcaaaaagtgagctagagattgggtaacagtaggagtatggattctgcaatgactaatgacttcatctgtgctgactgca

SEQ ID NO: 8027 - DNA, 504 bp, Homo sapiens
  MAP TO CHR18.3; EXPRESSED IN BONE MARROW, SIGNAL = 7.2; EXPRESSED IN BRAIN, SIGNAL = 8.1; EXPRESSED IN ADULT LIVER, SIGNAL = 6.6; EXPRESSED IN PLACENTA, SIGNAL = 5.5; EXPRESSED IN HEART, SIGNAL = 3.4; EXPRESSED IN HELA, SIGNAL = 5.6; EXPRESSED IN LUNG, SIGNAL = 4.4; SWISSPROT HIT: Q9WVS8, EVALUE 4.70e-02; EST_HUMAN HIT: AW956767.1, EVALUE 4.50e-02
atgggtaaccttcccacctcagtcctgctccctcatccagggagaagtggtccctctgcactcaggccagcctcagccccactgcctgctccacacagtggcatctctgaggactgagaggcccctcctcccaggcgggcatgtgccctgtggtgcccagctcctccctgcaagctgcggctgttcctccaggcaggcctccgtctcctcatggtttcctcagtggctacccaaactaggccccagagtcttccactcacctctgcacatctctgtctccttccttggttccatccaggaactgagtcagctccctccctccccaaggggctgccatggcctcccctgtcctctgcgcttctcccacccaggctgactggcctggagcatcaggctccctgtgccttgctgccccaatgcaggctcttgcaaggggctgattggcaaacacagtagcatcctgagggaataagtcacttaatatgcagggaagtggcagataag

SEQ ID NO: 8028 - DNA, 586 bp, Homo sapiens
  MAP TO CHR19.3; EXPRESSED IN BRAIN, SIGNAL = 1.2; EXPRESSED IN ADULT LIVER, SIGNAL = 1.4; EXPRESSED IN HELA, SIGNAL = 1.3; EST_HUMAN HIT: BI912561.1, EVALUE 0.00e+00; NT HIT: AF204919.1, EVALUE 0.00e+00; SWISSPROT HIT: P43626, EVALUE 8.00e-50
ccacagaaaaccttccctcctggcccacccaggtcccctggtgaaatcagaagagacagtcatcctgcaatgttggtcagatgtcatgtttgagcacttccttctgcacagagaggggaagtttaatgacactttgcgcctcactggagagctccatgatggggtctccaaggccaacttctccatcggtcgcatgacgcaagaccttgcagggacctacagatgctacggttctgttcctcattccccctatcagttgtcagctcccagtgaccctctggacatcgtgattacaggtgagagtgtctggacattattctcattgtcactgggacacagagtgaatgatccacgacttggaggcccaggtggttataaggaagatgagcttggtattcttatggagagagactaacttggtgaggtctgtaccaacagagacagagaaacaggagacacaagtacagaccaggtgtcataacagaggacagacacaggggccatacagggagttagaaaagacagaaagagttaaaggagacacagacagacatgtgccagagagaggtgtccttccatgctgact

SEQ ID NO: 8029 - DNA, 542 bp, Homo sapiens
  MAP TO CHR14.3; EXPRESSED IN FETAL LIVER, SIGNAL = 2.9; EXPRESSED IN BONE MARROW, SIGNAL = 4.6; EXPRESSED IN ADULT LIVER, SIGNAL = 3.9; EXPRESSED IN PLACENTA, SIGNAL = 2.9; EXPRESSED IN HEART, SIGNAL = 3.5; EXPRESSED IN HELA, SIGNAL = 2.6; EXPRESSED IN LUNG, SIGNAL =   3; EST_HUMAN HIT: AI126321.1, EVALUE 0.00e+00; SWISSPROT HIT: P08582, EVALUE 6.70e+00; NT HIT: Z50855.1, EVALUE 8.10e+00
cacacatggaactctgcaccttccatctgtaaagatgaccggtagaaatggcagagctaagggacaaaagtctgaggctggtggagacttaatcaccttaatcagtgattacgacggtggggaatgcaactcacttccagacattctagaatctttggaatccacagtgctctgcaggaggaagcaggagcctcttgaaaaacttaccaccaaacttcatggaatcaccctggccttcttcaacaaaaacctctttaacagcactaaaacacagctaaaaggtaaccttttcatgtaggatggtttatttggtagtgtttggttgtgcaccagagaggatggaaggagttgtttcatagcctttcaaacaagaccagcattgtcaaacatttgctgtttcttctgctattcccctattcccttctgccctcaaaagatgtttaaaattttcagggccatgatgttgccccattttgctaccacgcttcttttttcttgatcttttgtttcaatgtctgctttctttcccctgtgtgctcact

SEQ ID NO: 8030 - DNA, 565 bp, Homo sapiens
  MAP TO CHR16.3; EXPRESSED IN HELA, SIGNAL = 1.6; EXPRESSED IN LUNG, SIGNAL = 1.6; EXPRESSED IN FETAL LIVER, SIGNAL = 1.3; EXPRESSED IN BONE MARROW, SIGNAL = 1.6; EXPRESSED IN ADULT LIVER, SIGNAL = 1.5; EXPRESSED IN PLACENTA, SIGNAL = 1.7; EST_HUMAN HIT: BG057074.1, EVALUE 3.10e+00; SWISSPROT HIT: Q88434, EVALUE 1.80e+00; NT HIT: AE008657.1, EVALUE 5.40e-01
ccacccctgaagcagtagtctctggtttccctgaccataacctttggtccaaatagctttctcacttctccatgctaaagcagataataaagaattatctgctttatcagctggttgaagacttctaggcccctccctcccctctgtcttccagcctttctaccttctgacctggcttccgactgcattcggtctaggttccaaggtcaattactcagccaccctcttaccagcatcttcagattcccaggctccttgtctcttttgtagacctacaaatacatcggagaatgcagaatagtgttctgccaccccctaaaattcagagggtaaaatctcacccaggcacccacggcatctcagtaattgtgttatttaaacttggccatctcttttcttcatttatcttggcaaatcctccaaaatttatccactcttcctcaaatccctctataatgaacttccagctcacatccttctcaaggaatggccttgcctttttcaagaaaagagagacctggagggataaactacctcaacttcctgctggctctgcctatggtag

SEQ ID NO: 8031 - DNA, 583 bp, Homo sapiens
  MAP TO CHR16.3; EXPRESSED IN BRAIN, SIGNAL = 1.1; EXPRESSED IN ADULT LIVER, SIGNAL = 1.1; EXPRESSED IN HELA, SIGNAL = 1.1; EST_HUMAN HIT: BG757594.1, EVALUE 8.20e-01; SWISSPROT HIT: O69635, EVALUE 1.90e+00; NT HIT: AL163281.2, EVALUE 8.70e+00
taggaatggaagagccatgcatctatcacatgtcttagtgtaataataatattactaatgccttgcaattatatttcactttccaaagttcctcctgcctattatcttggttgatcctcacaacatcactgtggcagagatcctctcctttgtacatggagaaccacagaggttcactgacttgtccaagcccccaaacctggagctgttactctgagctcgggatacccagaaacagccatgtgaccacctcagagatctctgaagataatggaaccccatgagatggggtataatgcattccagctgtgaagaaaggcatgctgtgcaattgcaactcccagaggttaggtcagctctgcccatgatggagagaacatctacggtctgcctcttgctttgtctaaatagaatgctacggggagtctctaacccagaacacgtttccagggagagctgctgccaggagcccttagtttccaccttcaagcacgaagcagcatgttctggcctcccttaccactctctgtccctccctttctgctgcagtacaaaacccagttccttatcgcttgtcatcggt

SEQ ID NO: 8032 - DNA, 509 bp, Homo sapiens
  MAP TO CHR16.3; EXPRESSED IN LUNG, SIGNAL = 0.99; EXPRESSED IN BRAIN, SIGNAL = 1.5; EXPRESSED IN ADULT LIVER, SIGNAL = 0.97; SWISSPROT HIT: O52733, EVALUE 1.60e+00; NT HIT: gi9627742, EVALUE 4.80e-01
tggtatcgccaaggaatagcattcaggcctggcagtgcttctaggcgagtagcatatgtcctcataaaacgtcctctttatgaccagagtttctgtgcatatgctacaaacagtgacaacctggatctcgcctttggtaagggaataggaaattaaacatctcaccaccgctttgcagaatgggagtcggcattcaataagaaaggcttccccccaccctccatccctctccacagcctcctccctgagttctgcctgtgccttattgatgagcacgtgcctgtgtctggcattgtccagctgtccatgtccacagagcagggcaggcacagttccaagctcgtcctagaaatctccttggtagattcaggcttgaggaggacgcgagaagggatggtaaggagtggggcttttggaaagcatttgaggatgttctaagtgtctatagacagttagaatcctaaattcaacttgttaaaattgagttgccgagtgccaatccctacact

SEQ ID NO: 8033 - DNA, 546 bp, Homo sapiens
  MAP TO CHR16.3; EXPRESSED IN FETAL LIVER, SIGNAL = 2.6; EXPRESSED IN LUNG, SIGNAL = 1.4; EXPRESSED IN ADULT LIVER, SIGNAL = 1.3; EXPRESSED IN BRAIN, SIGNAL = 1.4; EXPRESSED IN PLACENTA, SIGNAL = 1.4; NT HIT: gi16164709, EVALUE 2.10e+00; SWISSPROT HIT: O15015, EVALUE 3.90e+00; EST_HUMAN HIT: BG171403.1, EVALUE 1.90e-01
gagatgtctgctcagtgcccaagcaccgccggcacacctgccgtctttctccgtgtgggagacgtgctcctaatgagggcctctgtgcccagccaaatgtcctggtctttggagaggtttcctgcacctctgacaccttctctgtggcagcttcttttgcttcttgtcctctgtgtagccagcggctgcactcggttgcctgtagaaagaacgcagattagggaggctttggtttttgttttcggggtttgttttgcttttagcagctcagcaagaaaagtgggtctttggagggcagttgtgtcagttcagggacattggtcacaggttattagggttgaaaaagaagtctggtattctcacctgttaaattcaaaaagcaaattccattcatgggtaaaattcacctgaaggagttccctgcagacgggctgtcggaggacctttgattctgcttttcttggcgttgccactcccctgtcactcactgccccttgccctactaaacccaagtgggtttctttctgcgtctacccctctggtttt

SEQ ID NO: 8034 - DNA, 546 bp, Homo sapiens
  MAP TO CHR16.3; EXPRESSED IN HEART, SIGNAL = 4.9; EXPRESSED IN FETAL LIVER, SIGNAL = 8.4; EXPRESSED IN LUNG, SIGNAL =   6; EXPRESSED IN BONE MARROW, SIGNAL = 8.4; EXPRESSED IN ADULT LIVER, SIGNAL = 7.1; EXPRESSED IN BRAIN, SIGNAL =  11; EXPRESSED IN HELA, SIGNAL = 7.2; NT HIT: gi9631294, EVALUE 2.10e+00; SWISSPROT HIT: P31630, EVALUE 2.30e+00; EST_HUMAN HIT: BG171480.1, EVALUE 7.70e-01
cattcttccagaggagtgccttcccaatgattgtcttttcaacctcgtaatgatttaatatctaatttatttatgtattataacataaatactaaatttacttttcaatcaaccttacgtgggcatgatataacagtgaaatgtaagcctccctcctgtcctgacctctagttaccctctccagaggtaaggactttgccagttttttcaacaatggtttttatggtgattatgcatttgagagtttttgagatgctgatgaaaagtccctagaggaagcaataggaaagcaagatcatgaaatgcccagaaaacatagtcaaacaatcttttctctgggccatcttcctttgcaaacagtgatgaaagctccccttcctgtatcccagctaagcacctcttcttggtgtgagaaactgactgtgattctgctctgtgggtctccaaatctgatgagacaggttatcactccattccagattgatcctactgattgagttcccaaaccagcccattacattgaccactgggaggtctgggtgacta

SEQ ID NO: 8035 - DNA, 590 bp, Homo sapiens
  MAP TO CHR19.3; EXPRESSED IN LUNG, SIGNAL = 1.3; EXPRESSED IN FETAL LIVER, SIGNAL = 1.1; EXPRESSED IN BONE MARROW, SIGNAL = 1.1; EXPRESSED IN BRAIN, SIGNAL = 2.1; EXPRESSED IN ADULT LIVER, SIGNAL = 1.2; EXPRESSED IN PLACENTA, SIGNAL = 1.3; EST_HUMAN HIT: BI825332.1, EVALUE 0.00e+00; NT HIT: X73637.1, EVALUE 0.00e+00; SWISSPROT HIT: P51460, EVALUE 1.00e-18
gactgactgaggcttgtccctttttctagagaaaatgcaggaagctgctttgggtcgtttatttactaagagacagcaagaaggggtgttacacatgcagggagcggagcgtctggggctcccctggagtgaggacatttggctgtcagtgtccagcatctgtgaaagcggggatcctccaagccagggctagggtgtgatttattctgcagttgactccacaggctgcaggtggcattggtctggggtagatagtgagcacccatcccaggaggtaatcaaaggcctgtagatgcgagactttatggtgctgtgtggcctcaggagctcaccagaccagaccctctgggcctcaggccactctgaggctgcacccaaggaggaatcagtagggacagagggtcagcaggtcttgttgggtacagccactgaggcagcagtagcgtgcagggttggtggcagctgcacggtggtggcggtgatggtgagaggtctggggcaggggctgcaggccaggtcccagcgtgagattactgtcggccaccagcccatggagcagatgtcgtctctccagccactgtagcaactca

SEQ ID NO: 8036 - DNA, 573 bp, Homo sapiens
  MAP TO CHR19.3; EXPRESSED IN PLACENTA, SIGNAL = 3.8; EXPRESSED IN LUNG, SIGNAL = 4.9; EXPRESSED IN ADULT LIVER, SIGNAL = 3.3; EXPRESSED IN BRAIN, SIGNAL = 3.5; EST_HUMAN HIT: AA010692.1, EVALUE 0.00e+00; SWISSPROT HIT: O43615, EVALUE 8.00e-16; NT HIT: AF026030.1, EVALUE 1.00e-110
agcgacagtcttgttcccagaggtctggagttgccgcagtgagtgttgcggtgcctctgtgcctgatgacccaggccggggctacctggctccggcaccacactcagagaatctgctcggtgctggaggccgagatgtccaggagccgccagcccgcgtaggggttgagctcgtcctggtctcggcagagcgcccacacgtacagcatccgcagcaccttgtcctgcagggtggggtgggaagggcactgttgagagggttgaggtgacccaggcagctctgggggggggccaggctctgtggggcaggagccaccggcaacttccccaggggctgggagcagaggccagcacaattgcctagactcaggaaccactcagccttggtaaaaacagacaggtctgctggtctccgacctccctcaaccccaaactctggcccagaggtttctccacatccccacccagtcccagagcttcagggctctgagctggggtctctgccaggtggccacacacagatcttggggacaggcggtgtcatgtgcctgccccatcccactccctcactcac

SEQ ID NO: 8037 - DNA, 586 bp, Homo sapiens
  MAP TO CHR19.3; EXPRESSED IN ADULT LIVER, SIGNAL =   2; EXPRESSED IN PLACENTA, SIGNAL = 1.9; EXPRESSED IN FETAL LIVER, SIGNAL =   1; EST_HUMAN HIT: AW246057.1, EVALUE 1.00e-108; SWISSPROT HIT: P23813, EVALUE 5.70e-02; NT HIT: gi16175212, EVALUE 1.00e-108
cttgcagaccagggattctcaccgatttttctcatgcaccttgtacatctccctttggagcaagtaatccctcagagcctccacatcgtagaaatagttggtcaggaactggagtattgtccttttcttcttctgattgccctctggggccactgccgcacccaggcgatggatgcccctgatacgcccattccacatgggggcgaccaggcgcagggactggggagggggagaggaaaggagctgagcctggagcctcctgggagacacagagctggatcccccagttcttgctccatgaacctcaatccctctgcttcccaactcaccctaagttcttccttcaaaacttcaaaactgtctttgagattccaaaaatttccccatgttttttccaagttcctcctccccttagtgaaccctaaattttctcgactagccatatattgttgattttcctaaattcttcctctaactttcccccaaacccttatcactcaaaacctgcattatttgacctcttaattttccacagatttgccccttaattacccaattcttctgctggggtcttcccaaatgactt

SEQ ID NO: 8038 - DNA, 596 bp, Homo sapiens
  MAP TO CHR16.3; EXPRESSED IN ADULT LIVER, SIGNAL =   1; EXPRESSED IN FETAL LIVER, SIGNAL =   3; SWISSPROT HIT: Q93009, EVALUE 1.00e-13; EST_HUMAN HIT: AW503389.1, EVALUE 9.00e-44; NT HIT: gi14776427, EVALUE 6.00e-44
catgccattagatacacacaacacttactatttttctttcctttgatacttagctggatatcataataatcttctcttctatcagaccgatagtctacttctttacactggatataggactgcaaataaggaaagtaaaagtggtttaactagtaatagtcaaaaaattcacattctaaaacctttaaaaatcatcttttagaactggtagccacataccaccattttgccgcggaataatttgggtatggtgccctctacacaggtgcctttcatcttattttccacattatcgagcaactgaaaaagaatgttttggctttaaaaaaacttttttgtacttagtaatatatacagtaatttaataattgactagaaatatcaatgttcaaagaagttgtagactataaaaatatgacctctggcatgcaattctcaaaaacatacaaaatcttcttttttggttgaatttttacaacatctctacatgcaacagttgaggttaaccttttatacagcctttggaataaattagtaatctgtagtgcctttagaagcatttttatattttttacctctgtggaaaagcatgtaaa

SEQ ID NO: 8039 - DNA, 554 bp, Homo sapiens
  MAP TO CHR14.3; EXPRESSED IN HELA, SIGNAL = 1.2; EXPRESSED IN ADULT LIVER, SIGNAL = 1.7; EXPRESSED IN PLACENTA, SIGNAL = 1.6; NT HIT: AF068686.2, EVALUE 1.30e-01; SWISSPROT HIT: P29037, EVALUE 7.00e-04; EST_HUMAN HIT: BI027838.1, EVALUE 7.80e-01
ttagttgtcatcgcattcaggaatataaaatgtgtacccaatgtgctcaattaaaacaaaaataaaaacttactgtagttgaggtacaattccacaacattctgaaataggggtcattggtgtcatgggagttatggatgccagagacaaggagtcggagtttggtttctcaggagagggctggactgagtcagtatcaccagggtgcagctgtgaatgggaatttgacaaactgctgctgtttaagcccagcccaacgtcctgttcgctgggtgatggcaacctactttgtggactttggctttcagaattttcttcagtttcgtgtttgctaatgacaggctggtctttattttcctgggtaacttcatctggtaggaagctaagatccacagatgagaaatcaccagatgtttctttgacttcagggttcgaattaaatgcagtatccggattggatgcattcagtatgtacatatcataaggtacaactgggctgaacaggggagacctgggtggggcaaggccatcctaggcagttcccaaaacagaca

SEQ ID NO: 8040 - DNA, 555 bp, Homo sapiens
  MAP TO CHR18.3; EXPRESSED IN BONE MARROW, SIGNAL = 0.88; EXPRESSED IN BRAIN, SIGNAL = 1.1; EXPRESSED IN ADULT LIVER, SIGNAL = 1.2; NT HIT: AF188125.1, EVALUE 6.00e-41; SWISSPROT HIT: Q9Y4E6, EVALUE 1.00e-10; EST_HUMAN HIT: AL042212.1, EVALUE 8.00e-41
tttgtgccatttctggaagacttatttaaatttcctcaaaaatcaaaacgattttcaagttcattcaccattcacatggaattggtctgtaatatgtaaaggtctgtaatatgtaaaggttatgttccctttgacatctttcattataaataaaatatataatgtgttgaataatgtattatgtacataaatatgaattgactttaaactaaacaagtctgttgtctttattttattgcactgttctttaaatttcttttcacagataagagaaaggatagactgtagtatacacatggcttaaattgcttttgtttttattttaaatactaaaataaagctatatagactttctatgggcaaatgaggcctaaattaatcatttacattttggaaaattaagtatttgaaattaattttaaatctgttcttttctgtcaaaggttatggacatcattatgtactgccttgaaggatctttagttaaaaagaaaggtcttcaagaatgtttcccagccatctgcaggtaaagaagccttcaagagcatgcagaat

SEQ ID NO: 8041 - DNA, 568 bp, Homo sapiens
  MAP TO CHR19.3; EXPRESSED IN HEART, SIGNAL = 1.8; EXPRESSED IN LUNG, SIGNAL = 4.1; EXPRESSED IN FETAL LIVER, SIGNAL = 6.3; EXPRESSED IN ADULT LIVER, SIGNAL = 2.7; EST_HUMAN HIT: AA587583.1, EVALUE 2.00e-32; NT HIT: AB055390.1, EVALUE 9.00e-80; SWISSPROT HIT: P41233, EVALUE 4.00e-10
ctagtcttcctgccaccagccccttccttctgcacccacctgaagaaggacacctgagcaccgtacatggtgggactgagccgcagagccgggtagtgcccgaaaggaggcacgatgaggctgaacacgagggccaggcccacaaagagggcaggcagcacgatctgggggaccagcccatcagctgctgcttccatccaccctccaggcttgcttgcacctgtccctgctcctgctctacaaccacccatggctccccagtgccctcaataaatgtgctttgggttgggaatacacacgggggtaagggtttggattaggccactgagtggacggccagggtagggaactcagggactcccatgcgactccctggtgctagccctcctcacctgggcgaacaggccgcggcggctgcggcgggcaagcagaaagcgcttgagaagcagggcctggagctgctggcgggtcagtgcccagccctgtacccggcccacggcgtctggcccagagccctggtcagtctctggggctgacccagctgtgagggatgagagggtcagtgctc

SEQ ID NO: 8042 - DNA, 581 bp, Homo sapiens
  MAP TO CHR19.3; EXPRESSED IN ADULT LIVER, SIGNAL = 1.1; EXPRESSED IN LUNG, SIGNAL = 1.4; EXPRESSED IN BONE MARROW, SIGNAL = 1.1; SWISSPROT HIT: Q60560, EVALUE 2.20e-01
ctcctctgataccacctggggacaaacgagaaggctgaagcctgtccttgatgccccgaaggcttcatccttcagcacctgcccactcccccaggctgagcctgcacctgacagccggaccaggcatactgggtggtgaggttgatgacctggttgttctccggccggatcactgactccttggccaggcagtcctggggaaggcagggacagggtcactcccccggccagcaacgaccttctcccctctccccctatgccctcttcacagccctcaccttgtcccctgccttgtacacggctggccactgggatgggtcatcaaaatagaggaggatgttctgacagcacttggcctgcagaccagagatgttggggaccgggagctggggcagcctgtgcctttggaggccaagggaagtacccagcctcagcatggcgagtgttgggggagactcacctcagggtagcggaaacggaagtccagtcggccgtaatccgagaggaaacaaaatcttgtcaggaacacccagtcctgaaaaaggggcccagtctgaccctccgctgagtccttcaagaac

SEQ ID NO: 8043 - DNA, 514 bp, Homo sapiens
  MAP TO CHR16.3; EXPRESSED IN PLACENTA, SIGNAL = 1.3; EXPRESSED IN HELA, SIGNAL = 1.4; EXPRESSED IN ADULT LIVER, SIGNAL = 1.3; EXPRESSED IN BRAIN, SIGNAL = 1.1; EST_HUMAN HIT: BI763876.1, EVALUE 3.00e-03; NT HIT: gi7710027, EVALUE 3.10e-02; SWISSPROT HIT: Q06428, EVALUE 3.20e-01
atcaggaggctctcaggtccagctccccaaccacactctgttaaaatattgagagaaactgcaacccagcctcatctctttccatccttgtgccaaggactggaccaggcacagagaaggccctggagaaacatggccaggctgggctgcccagagccccacagcttcaaggccctcagctgctggcccctcctaccttctcttccccaccagcctacactcagtgcctacatggctgaggcctgtggcggctgcgacctccagctgaacgtgtgtctcttctacgtgggcgagccaaagatggacaccacaccccctgcccgctatgccagtcacactgacacagccgccgcctacaaggaggtcacccgggctgcaggtggccgcttccactggtttggagacacaggtacatgactgtttcctcatcccttcagctcattccaaacagttgtctcagcaccagcatagctcccttagaccacagatgtattccagaaaagcagcttgtgaa

SEQ ID NO: 8044 - DNA, 528 bp, Homo sapiens
  MAP TO CHR19.3; EXPRESSED IN ADULT LIVER, SIGNAL = 1.3; EXPRESSED IN PLACENTA, SIGNAL = 1.2; EXPRESSED IN HELA, SIGNAL = 1.5; EXPRESSED IN FETAL LIVER, SIGNAL = 3.1; EST_HUMAN HIT: BG109145.1, EVALUE 6.00e-97; NT HIT: gi15304226, EVALUE 3.00e-42; SWISSPROT HIT: P17024, EVALUE 1.00e-14
cagaaagcgagaaagggatgtgatgaccaaagcagggaataaatgtttggagtccacggcaacttcttgggaatagagtctaggcccccactgctgtcactctcacccagcctcctctacacatgtgagatgtttcaggaccctgtggcctgtgaggatgttgctgtgaacttcacccaggaggagtgggctttgctggatatttcgcagaggaaactctacagggaagtgatgctggaaactttcaggaacctgacctctataggtaaggatgacaatattccttccctcagtccattagtgaaccagtgtttctagctcatgaatgctgttgagtcatttggaacatagacaggaaatactttgatgaataaatgaggcatggctgcagtaaatcatagacatagaatctaataattttttcacagttttatattgcttcaggactacttttctgtgtctgtattttagggaaaaagtggaaagaccagaacattgaatatgagtaccaaaaccccaggagaaact

SEQ ID NO: 8045 - DNA, 500 bp, Homo sapiens
  MAP TO CHR16.3; EXPRESSED IN PLACENTA, SIGNAL =   1; EXPRESSED IN HEART, SIGNAL = 1.6; EXPRESSED IN LUNG, SIGNAL = 1.4; EXPRESSED IN FETAL LIVER, SIGNAL = 1.4; EXPRESSED IN BRAIN, SIGNAL = 1.2; EXPRESSED IN ADULT LIVER, SIGNAL = 1.1; SWISSPROT HIT: Q03164, EVALUE 2.10e+00; EST_HUMAN HIT: BI460156.1, EVALUE 3.00e-92; NT HIT: AB011128.2, EVALUE 6.00e-93
aagaacgtccccctgtcttctgccctcaggacctggaagccggcgagagagacccctgtctgcaacccgcaaaactctttgcgaggctgagtacccagaggaagatgcctctgctgtgctccaagccatccaggtggagaacgcagccctgcagagggcgctcctcagcagaaaggccgagcagccagccagcccactgcaggtgcgctccgggctgggagaggaaccgggggatgctccctggactgggcagtgtctgagctgcagttgagaagagcaagtgtgcagaagagagaggtgtagtgggcatcgctgaccccagactcatccgtgtttccactgttcagacagtcacccactgacctgctaaggctcccttttcttccgccttcttttagctctttatttcacaaagcctaagctgggtgctaatctgcctccagtcctcatcctcactgatttccctgcaaaccctggataccttagaccagggttgcaaa

SEQ ID NO: 8046 - DNA, 566 bp, Homo sapiens
  MAP TO CHR16.3; EXPRESSED IN PLACENTA, SIGNAL = 1.4; EXPRESSED IN HELA, SIGNAL = 3.1; EXPRESSED IN BONE MARROW, SIGNAL = 1.5; EXPRESSED IN ADULT LIVER, SIGNAL = 1.8; EST_HUMAN HIT: AA582708.1, EVALUE 2.00e-01; SWISSPROT HIT: Q08338, EVALUE 7.10e+00
gctgaggagtagcaaggcactgatttacagacttctttttttttttcttggagtctatttcccacttcagttgtcagcccatctccaacatgatttaaattgggaatctgaatatgtagattttcaacaaggttctgacactggctgtgggacaggaggaagtcacctaatcaccagtgtcctcacctgatgcctgggatttgactcccactgatgaaggctcactgtgggagcctggtggcctctgccactaatgactggatgaaaacaaagcttgaaagtcatagtgcttcactaaggtcttcgtggaatgtttaagggcatggctgggttctgggagatgctctgcaggttgaggaagagggaagcacagggcttggtgagctttgagtaggtaagcaccaaaaggtacactcagagggatccatacttgcacctacctgtacagtgactgttctcttccctcttgttgatcttactaaggaggacaaccttgaagtcccctccccaaatcatcatcccctgattccatgtttagatgactatgtcaggggtagacgtgtgct

SEQ ID NO: 8047 - DNA, 599 bp, Homo sapiens
  MAP TO CHR18.3; EXPRESSED IN ADULT LIVER, SIGNAL = 1.1; EXPRESSED IN PLACENTA, SIGNAL = 1.1; EST_HUMAN HIT: BG680824.1, EVALUE 3.30e+00; NT HIT: AB013185.1, EVALUE 5.70e-01
cagcattctttgtccttccccctccagacaagggcaactgccagctccccttccttgtataccaggctccctcccacccccatacatcatttgctgctaatcacctaacttaagagatgccttttgttcccactcccttcctaagtcgctttaggctgcatcagcaacttgggggctggctgggtcttacttccccccgagagacgtgctcaaaccccacggcataggcagcaggggaaggaaaaccttcttccctcaaagttactgggctgatgtcctcgcatccgatggcctctttcatccctgattctaatttaaagactaatctggaactggcaaaaggagggccactttaagttgtcctgacatacagtgggagctggcagcaggaagggaactccaccactcaggggcaagctcgggaaaatgcaaaaatagcgcactccgtgaaaggagaaaagtaagttataaaacttttcatcttgtctgttatttctttgccatatctttacgaaatgttcaagattggtcaatgaaatagaaagattgtcttgggaaatgaatgtgtcaatgtaattcctgtgggagccaaacaaagt

SEQ ID NO: 8048 - DNA, 579 bp, Homo sapiens
  MAP TO CHR16.3; EXPRESSED IN FETAL LIVER, SIGNAL = 0.85; EXPRESSED IN ADULT LIVER, SIGNAL = 1.4; EXPRESSED IN PLACENTA, SIGNAL = 1.3; EXPRESSED IN LUNG, SIGNAL = 2.1; EXPRESSED IN BONE MARROW, SIGNAL = 1.9; EST_HUMAN HIT: BI015035.1, EVALUE 2.10e-01; NT HIT: M75866.1, EVALUE 5.50e-01; SWISSPROT HIT: P24793, EVALUE 5.00e-03
agaaccccctcctcttgttctggggaatttctccactccaaagggaactctctggattacaagacactaaagacaaagggccgtctgaggccccttctccaactggctggagtgggctttgggcacacatggccttggaacagcccattgggcggcctctgtgaaattccctagaaatgatgagacttccctgcgcccagtccccaccccgcacggggagttcacaccaattgttcttccccggggactcctgccaaccagggaacgtgacagttcacagtgaggggcccgaggctgtgggcagcaggtcccgctggggactctgggcaggatgccaccttcagatgctgccgtggccacagcattcgtgccagaccagcaagggtgtcctggacactgcccagatgctgaccccgtcatcaaagcagacactggacactgcccaggtgccgaccccaccatcgaagcagacactaccttgtcccctcccgccccccagcaagaagacgccaagccctgagagatttgcctgtgctcagcactgtgtggaggagcggcatgttttcgtgggcacagaga

SEQ ID NO: 8049 - DNA, 569 bp, Homo sapiens
  MAP TO CHR14.3; EXPRESSED IN LUNG, SIGNAL = 3.8; EXPRESSED IN BONE MARROW, SIGNAL = 3.2; EXPRESSED IN FETAL LIVER, SIGNAL = 1.6; EXPRESSED IN BRAIN, SIGNAL = 2.7; EXPRESSED IN ADULT LIVER, SIGNAL = 3.1; EXPRESSED IN PLACENTA, SIGNAL = 3.2; EXPRESSED IN HEART, SIGNAL = 2.9; NT HIT: gi8923365, EVALUE 7.00e-16; EST_HUMAN HIT: AW166235.1, EVALUE 3.00e-99
tgtgttggagtagtgctgggtgactatcataatttctgctggtacagtttaccaaaaggaaaataaagttagttctttttgttggaaaagaagatttcatgttatctgtgtttgcaggctttctggctcatctgctggaggaatccttgctgcgggggtgttttcattttctcgtctaacatggcagtggtccattgcagcagaggtttttagcttaaacaatctctttgtggggctgcttatggctcttactgtacattttgaggaagcagcaactgctaaggagagatcaaaggtaacctattttgatcaaagtgaaatcagtttttgttttaatttttagacagatgtatttctttttaactttggcttaaataccttttatctattctgattacagtcgggataatctagcatgctgagagagaaaatgatctcagtcttttttattatggatggaaccaggatagcccttataaaacatggcgcttttcttccctcagagttcaaaagttttttggagaattagaggattataaaatcccctgtgtgtccggtgggaaagatag

SEQ ID NO: 8050 - DNA, 506 bp, Homo sapiens
  MAP TO CHR18.3; EXPRESSED IN LUNG, SIGNAL = 1.8; EXPRESSED IN BONE MARROW, SIGNAL =   1; EXPRESSED IN FETAL LIVER, SIGNAL = 2.4; EXPRESSED IN ADULT LIVER, SIGNAL = 1.6; SWISSPROT HIT: P44514, EVALUE 3.60e+00; EST_HUMAN HIT: BI908959.1, EVALUE 0.00e+00; NT HIT: AY042882.1, EVALUE 4.80e-01
cagggaaagacattcaactaagcaaaaacttacttcaaggctgcataataaaatgttccaaaccaaacaccagaagttattagatgcactggaatcagaacttttccatactgtctaaatgtcttcttgaatcgttgataaagactaatagatttgtcttgcaaaggatcaggctcttcctttttttccggagttccctgagctgtggcactggatgaaaaaaccctcctgaatgaaacatgttgcttcccttgcttatggcgaaggactcctggttggggtggatgagcatccaatggcctcctttcctttgcaacacactgggcagcagataaatgcaaccattgtttttgagggccttgtaccaaaaccactttggattcagcattgtataaaagtaaaggtccctttacattttgacagtgtccaaagagaccagcattatgtggttccaagcatgtcctgcgtgccagtcgagatacagtccgtggtacattccattgcat

SEQ ID NO: 8051 - DNA, 587 bp, Homo sapiens
  MAP TO CHR18.3; EXPRESSED IN FETAL LIVER, SIGNAL = 2.2; EXPRESSED IN ADULT LIVER, SIGNAL = 1.3; EXPRESSED IN HELA, SIGNAL = 2.1; EXPRESSED IN HEART, SIGNAL =   2; SWISSPROT HIT: O70309, EVALUE 1.90e+00; EST_HUMAN HIT: AV721494.1, EVALUE 0.00e+00; NT HIT: gi16163926, EVALUE 0.00e+00
accgcttcatggtctaatgctgctgcctgccgccgtgactgcgttttagttctctaaattatccaagccgatgttgctctgtccttcctcacaccagattgttcccaggggcctgcccaccccagtgccatccagtggcacggccgggtcttgtcacttgtgcatgcttctcaggggcagaacccgctcgtgccatctgtcgattcagaggcacgcacacatgctctgcaggatgtggccatcctgtcaccaggtagtttttccctgccagagatggcaggggaaagccagcggttcctgggaacgctcttgttgcttggtgcaacagaagcacaaaaatcaataaacactgtgattgcactcccagcccagatcagcatttttagccatctcaaccgcacctctgaagtgctgcttgaatctggccgttctgacactgggtgttgaggtcatgtggcagtcctcacgattgaaattattgccctttgaattacctaaaatattgtttaccaaaaagattctgtgtttacatgttcttttcttctggtgattgctaggaaattactcaatccaatttcctagggttt

SEQ ID NO: 8052 - DNA, 580 bp, Homo sapiens
  MAP TO CHR16.3; EXPRESSED IN HELA, SIGNAL = 0.9; EXPRESSED IN BONE MARROW, SIGNAL = 0.68; EXPRESSED IN BRAIN, SIGNAL = 1.5; EXPRESSED IN ADULT LIVER, SIGNAL =   1; EST_HUMAN HIT: BE148231.1, EVALUE 0.00e+00; NT HIT: gi14778034, EVALUE 3.00e-36
acccctgttcccatccttacctgtcccaccatttagcatcttttgagctggaatctgaaggcagggcaggaaagataaatgataaaatctatactttcttcctttgaaagcaggaggcctgtctctgccctaaaattagatgtgtctgttctgtgtccccaggtcatacaggcatgcgtgatgggcatttagttctcctcagaggcagggaaatgcaatcggagaagcatggggtggggcagctgcttcactctgggcgcccctgtccaccaggccacgaggcaaccgcagagagaaagggcagtaagtttcaggaccctggagttgctcaggcagtgttaattctcttccccttccttgagtttagctctttttttgttctgtagcacaaacttagcagtccttacacagtggtgaagaagaatagaacagtccagaaaagggccatctctcctgagtctgtatttcctcttccacaggaagctaaaaacactctctgcctgatacagaacaagctcaaggaggaagagaagcgcctgctcaagagtggaagtaaggctgggcttcgtagacgagcagt

SEQ ID NO: 8053 - DNA, 571 bp, Homo sapiens
  MAP TO CHR16.3; EXPRESSED IN BONE MARROW, SIGNAL =   1; EXPRESSED IN BRAIN, SIGNAL = 1.5; EXPRESSED IN ADULT LIVER, SIGNAL = 1.5; EXPRESSED IN PLACENTA, SIGNAL = 1.2; EXPRESSED IN HELA, SIGNAL = 1.5; EST_HUMAN HIT: BI859653.1, EVALUE 5.10e-02; NT HIT: AF275345.2, EVALUE 1.40e-01; SWISSPROT HIT: P40318, EVALUE 9.40e+00
cttgctgtctgaaagctgaactagtggaaaacaaatacctcctttcagagagttaacagatcactcaatgtgtctttcaacttgtatttgattaatctttactacatgccagacactatagataatgtctaggcacagataacattgcgaattaaaatgtccatgggtgacttgcacaacgtttgcagtcaagatagagaagcaaacattaccaacacaaatgaagtacgacaagacagggtatgtgtttcaaagccaaggaacatgcatacgtgaaactttatggcaataggacttaagtgcagcagtcaggaaagatcgcttattaaaagaaaaaataaattacacttaacacttagtatgtaaaggtaggtaagggccaaaggaggattctgcagagctttctaaatatagaagcctctgggaaacatgcagggctgccttcggtggatggaggcatgttgagtttgagcaggatagaaagattagatcaatgagatttgaagcagggcaagtagtggtagaaatggtggggacaggagagaaaattggccccaatcaacacagaagt

SEQ ID NO: 8054 - DNA, 508 bp, Homo sapiens
  MAP TO CHR16.3; EXPRESSED IN BONE MARROW, SIGNAL = 1.2; EXPRESSED IN ADULT LIVER, SIGNAL = 1.3; EXPRESSED IN BRAIN, SIGNAL = 1.3; EXPRESSED IN HELA, SIGNAL = 1.5; EST_HUMAN HIT: BI027080.1, EVALUE 1.80e-01; NT HIT: L13458.1, EVALUE 4.80e-01; SWISSPROT HIT: P13615, EVALUE 1.60e+00
tgcaagggagaaagtgtgtgtcatgaacaaggggcagttgtggagcaacaggatttataatgtaaactaaagataaagtgtagatgatgtggacactggtgggaagcatcagaagatgtgaagagccaagagaggcacatattggagggttgagttgagagcaaacctgaatgggcacttggcaagtatttttggaatgtatggtggatgacagcaggggaagagaaatacttcgaacttccttgaattctgttcacctgccatttcccagcctcatccacttggctggagtgattcctgctgttggatttctgagagatttgcaacccttaatgccccatgggcattctaagcaatcctcctctccctgccttttctgcaggctaaactctaatctgtaccgtgagatgcactgctgcaaagggaggggcaggtggcgaggggtgaaggttcagatgaggaggaaggaatggtgcaaagacaggtgggaggacatccaggggtactg

SEQ ID NO: 8055 - DNA, 539 bp, Homo sapiens
  MAP TO CHR16.3; EXPRESSED IN PLACENTA, SIGNAL = 1.3; EXPRESSED IN FETAL LIVER, SIGNAL = 1.4; EXPRESSED IN LUNG, SIGNAL = 1.5; EXPRESSED IN ADULT LIVER, SIGNAL = 0.92; NT HIT: AF224669.1, EVALUE 3.30e-02; EST_HUMAN HIT: BG977671.1, EVALUE 4.80e-02; SWISSPROT HIT: Q99055, EVALUE 3.90e+00
gaacaactgctttgcctgcagaactgcctggccctcccaaagcacctggcattgacaaacgccaattgaattagctgaacgtgaatgtctaacgcatgtgtggccatgtcagtggtggctcccaggagcctgaggacaggtgagggacttggcagagcgtgaggattctcattcgtctgaacagggaaccggtctctccgtgcggctgggtgggcacatgaccaactccggctgccacctgggtaattggtttcctgtgttcccttcaataatgaacaatattaaaggaggctggagatgcaatggagatagaagcattgtggaagaaacaaagagattttaatgtgttgagtcttgggtccagggaagatgagggacatgataatcgagtattaaaacagaaaagattatgcagcgggcctggcaccattcatcatcactcccatcctcggctggcgggagaactgggcgtctgacgagactccggcattatctccgcagtttatttacatctcaaatcaggttgcactcacaggaga

SEQ ID NO: 8056 - DNA, 573 bp, Homo sapiens
  MAP TO CHR14.3; EXPRESSED IN PLACENTA, SIGNAL =  19; EXPRESSED IN HELA, SIGNAL =  18; EXPRESSED IN BONE MARROW, SIGNAL =  26; EXPRESSED IN LUNG, SIGNAL =  22; EXPRESSED IN ADULT LIVER, SIGNAL =  23; EXPRESSED IN BRAIN, SIGNAL =  24; NT HIT: AF129756.1, EVALUE 4.00e-82; EST_HUMAN HIT: AI866487.1, EVALUE 2.00e-90; SWISSPROT HIT: P39189, EVALUE 8.00e-31
ctcagcctcctgagttcctgagtagctgggactgcaggcaagcactaccataccccgctaattttttaaaaaagttttttgccaggcgcagtggctcacgcctgtaatcccagcactttgggagtccaaggtgggcggatcacgaggtcaggagttcgagaccagcctgaccaacatgatgaaaccccatctctactaaaaatacaaaaattagccaggtgtggtggtgcgcacctgtaatctcagctactcaggaggcagaggcaggagaatcacttgaacctgggaggcggaggttgcagagagctgagattgctccactgcactccagcctgggcaaaggagtgagactccgtctcaaaaaaaaaaaaaaaaaagtgctgggattataggtatgagtcactgtgcccagcctcttctcattcttgtacccatggtagaactggctttctctcatcttaccaccagttgcttggttcctcaatattttgtagagatggggtttttctatgttgctcaggattgtgttgaactcctggagattaaggctgcagcaagatgtgattgtgccac

SEQ ID NO: 8057 - DNA, 584 bp, Homo sapiens
  MAP TO CHR18.3; EXPRESSED IN LUNG, SIGNAL = 1.5; EXPRESSED IN BONE MARROW, SIGNAL = 1.4; EXPRESSED IN FETAL LIVER, SIGNAL = 1.3; EXPRESSED IN BRAIN, SIGNAL = 1.5; EXPRESSED IN ADULT LIVER, SIGNAL = 1.6; SWISSPROT HIT: Q9UHD4, EVALUE 3.30e+00
cattccttcatcaagcctgctttagaattgttttatatacaatagcctcctactctgcagaggtgactaaactttaatgttacctaaggttccctgcatcaatttattcaaaggcacagaaatatgggaatgaaataggccataaagataaaatacattattaaatagaattattgtcattgttattattctctcaacgaacagggagatgaagagctgaattgtgcaccatatggtaattgcttggaagataacagcaacttacggtcacaccttcagcatccagccacattgtttgctgcatttcaggtgccagtgtggcagagggccagcccaggaaagatgaactggcagagagagaatgacagacattaggcataagtacttttcatgtcaagcctttggcgtgttcattgttgaaaaaatctgttctcagaaatgctttccaaaatgcacaagttatgctatgaaggcatatgataacttctgctatccagggatatgttaatatggaccatcctgggagatgccaaatcacagccaggataatgggtgattccagatgtctgtctggtcccaatcgt

SEQ ID NO: 8058 - DNA, 551 bp, Homo sapiens
  MAP TO CHR14.3; EXPRESSED IN ADULT LIVER, SIGNAL = 1.5; EXPRESSED IN BRAIN, SIGNAL = 2.1; EXPRESSED IN PLACENTA, SIGNAL = 2.4; EXPRESSED IN FETAL LIVER, SIGNAL = 2.7; EXPRESSED IN LUNG, SIGNAL = 2.1; SWISSPROT HIT: P05128, EVALUE 4.60e-01; NT HIT: L11910.1, EVALUE 8.20e+00
actgtgtccagcagaaagggccaaaaaggggttgggggagggcatttgtttgcaagattgaatttttaaaattaagtgactgtctgtagtgacctctaagagagtactcatgacataattttgtaattattttttacctgtgaacatgcctcacctccaccctccacagccagcttcttcatgaacagaaactgtattttaggactctgcttccccagtccctggcacagtctaggcacccacagtgttgacagaagagggggctctgaagggggccaagagtgaaaggtggggagggaccacaggtgagggaggggaggggtcctttgctagaaccagggaactcaaagggaaagtgggcatcagggtgctcatagcataggaaaggggaagtggtaagtctgagaaaaggtgggagagggttgcggcaaaccttggcacagtctggagagaaccgcagagaggaaaggaagggtgtagagcctgaggtttatgccaacacagcttcttcctttaggcttcataatatttcttccatctcactgggcatt

SEQ ID NO: 8059 - DNA, 556 bp, Homo sapiens
  MAP TO CHR18.3; EXPRESSED IN ADULT LIVER, SIGNAL = 1.9; EXPRESSED IN PLACENTA, SIGNAL = 1.5; NT HIT: gi13375929, EVALUE 3.40e-02; SWISSPROT HIT: P53009, EVALUE 6.10e-01; EST_HUMAN HIT: BG180747.1, EVALUE 7.00e-69
ttgccactgttagaaggctgaggttaccctgagagaatcacagtacttggagcactgctttagtagtcaatagtacctcgtttacctgcttcctgatgcaaagaccacatcttgccatcagttcatacacagtcacttctggcttttccatgatcctgaacaccagcaagcccagaggatgcactggaagtaaataccaactaagatgagtgatccagagtgtagaggaaaggggaggaaaaccaccactaagcaaactccccctagggaaactagtagaagtaatcaaatcacagaggtagttagactgtattaatgtttaccatatgcataattatgaccacctcaatgaacataaacattcatataggtcaattttaaatgtctaatttcatagttagtgacgttgtttcatttttctcagatcggtgacctgggctccttatgtgcctgaaagagtttgagtttcctgttaactccaaatcaacagtattttcaacaagaaatgtgcaattgaaatcaagtgctgtttaagtgcagctaggatttccacagg

SEQ ID NO: 8060 - DNA, 570 bp, Homo sapiens
  MAP TO CHR14.3; EXPRESSED IN BRAIN, SIGNAL = 1.4; EXPRESSED IN ADULT LIVER, SIGNAL = 1.2; EXPRESSED IN PLACENTA, SIGNAL = 0.84; EXPRESSED IN HELA, SIGNAL = 1.7; EXPRESSED IN BONE MARROW, SIGNAL = 1.4; EST_HUMAN HIT: AA215617.1, EVALUE 4.00e-89; NT HIT: gi14751890, EVALUE 1.00e-35; SWISSPROT HIT: O84971, EVALUE 7.10e+00
gatgcccagaggaacttcagtgtttggatgagatggggccgaggtaatgatttttattgagattttatgagttggcattcagaaagtcagaagcagcttagtgggtggccaaaggattctctgggtttaaattgggtcagtagaggctctgaagtctgggagagccttaggaatcaagttgagcatcttgaaattggggaatggcaggcatcctccttagagttcccactggaaaaactaagagcagcccattgagtctgaaaactcttctatagttgaactgctagtagtgctcatagactatggcagttagcaagtaacttgtatcaacatgattagttccctaaatcctttcacctttcccttctccctttcctgcctgtttgtcagatgttaagcagagagatcttggagagctggcctgttactcttagggaactatcttatgtgtggcatttcctttgcagttgggaaaatgggacagcacagcctggtggcttgttcaggcaatctcaacaaggccaaggaaatctttcagaagaagtgagtgctgaaaagtgactacaaaaa

SEQ ID NO: 8061 - DNA, 538 bp, Homo sapiens
  MAP TO CHR16.3; EXPRESSED IN ADULT LIVER, SIGNAL = 1.1; EXPRESSED IN PLACENTA, SIGNAL = 0.97; EXPRESSED IN LUNG, SIGNAL = 1.4; EXPRESSED IN BONE MARROW, SIGNAL = 0.89; EXPRESSED IN BRAIN, SIGNAL = 1.1; EST_HUMAN HIT: AA993813.1, EVALUE 7.50e-01; SWISSPROT HIT: P32166, EVALUE 2.90e+00
gtttgcagtgggcttacctcatgcttagccatgaggggatgacactgtataaacctgaccccatactcaaggacagtatggtttaagtgggtaggatgggataccccacagacaaaacacatacagtgataagtaagtatatgtgaatgctgaagaggaggaatgtgaatgagagctttgtagaaaaggtgacaaagagctggatctcgcagagagggtttggcagcatggagggaacaggaaggcgagcccaggagagggtgacaccaccagccaagggggtcaagaagtaatgagtttggaacagtcaagcctccatgaggatcatttcccaaggtgttcctgtaaagggcacacgttgacaagaggtagcaaacaaagttggaaaggaagaatgcattgcaattgcagtgttccaagtcaactaaggaacttagatgttatgtggcaggtcattcactgaagatttgggcagagacaagagagaggcagagctgggctccagactgttcaattctgagtttctgcatcccttcca

SEQ ID NO: 8062 - DNA, 553 bp, Homo sapiens
  MAP TO CHR14.3; EXPRESSED IN PLACENTA, SIGNAL = 1.4; EXPRESSED IN FETAL LIVER, SIGNAL = 1.4; EXPRESSED IN BONE MARROW, SIGNAL = 1.5; EXPRESSED IN ADULT LIVER, SIGNAL = 1.7; NT HIT: AJ293569.1, EVALUE 5.30e-01; EST_HUMAN HIT: BF820848.1, EVALUE 2.00e-01
ccctctttggaaacaccatctatatcaattccaatccagtcttcagagaggaacactctttttgaggggccttttccaatcttgggcaaaatgtttcatttgccattaatctgctccaagaattagaatgccaactcttcatccttctttctctaggttttttgttagcagagccacaaaagcagatgcgacaatattgaggtgataatttttcagtttgtttttaattttttttcccgcttttccaactttcactagattggttttctctgctcagtgatgctctctctccttccccactttagctttcctctgctgtggctgtggcatcatctctacatgaccatgcagtttagttctgcagatgaactaatttggcttctgtgtccaaattccagacaaatgggagagatattagatcccccaatattggggtcaattgcacttctactagcacagctgtggccagacgaagtgatggcaagagatatgtgggctatccttctggagatgtgtactgtgcagattgtctaagaaggaggtctgagcagga

SEQ ID NO: 8063 - DNA, 502 bp, Homo sapiens
  MAP TO CHR16.3; EXPRESSED IN LUNG, SIGNAL = 1.9; EXPRESSED IN BONE MARROW, SIGNAL = 1.2; EXPRESSED IN BRAIN, SIGNAL = 1.8; EXPRESSED IN ADULT LIVER, SIGNAL = 2.5; EST_HUMAN HIT: BI223641.1, EVALUE 6.00e-63; NT HIT: gi16161253, EVALUE 1.00e-75; SWISSPROT HIT: O10270, EVALUE 1.20e+00
tgaggtgagctgactgaacgccccaccccaccatgtgcttcaatccctaggctctgcagcagccgcccccacctgtgaaatgttaagagctcatggccatgatgacctctactttaaatgggaaccttgtgcctcctcccaagctatcactgtgctcccgaaacacagcggaactggtggaagccgccagggccctgccgtggcccaccccgcagccccctttcccaaggtgcgaggtggagagggtacgtactacttgcacctgtccgtcttctccgatctggtggatctgcacctgctgcacgttggccagcgcgtagtgcagggcctgcggctgcggctgtggctgcaggagctctctggcaggaggtggggtgctcatcatcggctctgtgggggcaacaggtgtgaacggggtgaacgagaagtttcttaggcattgccttgtgcagcatgtgtgcacccccgtccctcactctcgactcccacagcagagaagagg

SEQ ID NO: 8064 - DNA, 546 bp, Homo sapiens
  MAP TO CHR16.3; EXPRESSED IN ADULT LIVER, SIGNAL = 0.93; EXPRESSED IN PLACENTA, SIGNAL = 0.91; EXPRESSED IN HELA, SIGNAL = 1.1; SWISSPROT HIT: Q9Y6J0, EVALUE 8.80e+00; NT HIT: AE007782.1, EVALUE 5.20e-01; EST_HUMAN HIT: BI040802.1, EVALUE 1.00e-110
ttgggagtctttcatttggccaatataactccattagattttggaagtgaacccaggtagcagggagggttctggaagtaacattctccaaccagcttgtaattaaaatggaaccctttgaagaactggtcctctctcaattgctccagcctctctctgtcagattgaatgccaggaagccgctgccttaagctttggctagttttctgccaaggcgtttaactctcagttttgtgttgcttgtattagtgctaagggcataactgggtgcagaatctggtacatcattgcatctgtcattgtgtctgtctttagctcttcctaataaccacagctctgaaacatgaaggagctgttttgcaagctgtatctttcacacccgcccccactcactccgcaacttgcccccttccttctgtgatttttttttttttaacccatgtttcacttcccacattctggttcttgttcttcctggagaacgggaccaggcaagaaacaccagggcacattaggttaaaggaaaccttatttccccctctctgc

SEQ ID NO: 8065 - DNA, 566 bp, Homo sapiens
  MAP TO CHR16.3; EXPRESSED IN ADULT LIVER, SIGNAL = 1.4; EXPRESSED IN HELA, SIGNAL = 0.94; EXPRESSED IN BONE MARROW, SIGNAL = 1.8; SWISSPROT HIT: Q05084, EVALUE 3.20e+00; NT HIT: AJ229042.1, EVALUE 2.10e+00
aggacttcaaaagaaggggcaagaataaataattgcacagaaatccattttaagtggtaggagggaccctggacgatgaaaagggtgatctagcccagggtccaggaaaactgtcaggcttcctgcccatctgccccctctgcacctgcacgcatacctgacttctttctccctagaagagctcctgtcccccacagtgattttcaactctcttgctatgcatgaggtcagccatttcatggctccacccaaatcttctgatgcaaaagtggaatggactcatgccataatgctgggctgcctgatcatcgcatgtggtcagctgtgtagcagaatataaattttaaaaacccaaacgattaaactgtcacttcctattagacaaagcacattccaagatgcaactaatgagggaagagaaataaggaaagaaagtatgtttgacagaggcagtgtggctatagctttctccacttctgattgacgacaagatggtttctcctgcaagtaggcacagatttgctctttcaacccacgtatactgggcactgaggggaggaagatga

SEQ ID NO: 8066 - DNA, 586 bp, Homo sapiens
  MAP TO CHR14.3; EXPRESSED IN ADULT LIVER, SIGNAL = 0.95; EXPRESSED IN PLACENTA, SIGNAL = 1.1; EXPRESSED IN LUNG, SIGNAL = 1.3; NT HIT: M20783.1, EVALUE 9.00e-03; SWISSPROT HIT: P13983, EVALUE 2.90e-01; EST_HUMAN HIT: BF348146.1, EVALUE 2.10e-01
tgttccactttttcttttgtcactattgtttatcctcacagagcattgcaggcaccagccttcatgtgggccaggctgcggcaagagtagggacagcaccatgggctggagaaagagtgtaaatgacaacccaagtgtgcacagtccatccggtgctgttggctgtgtgggtttgggtgggtttgccttggatgcagggaagggggtggaggagggtgagagcaagccccagaatcagtacagcatgaatgtcattggagcaataaaatggggaaaggatggaaagagctaagttaaagaaaataaaggacaaaatacatgagagacaatcatgaagtataaaggggaggaaggcataggcactaaagtggagggagtgggatggtaagtcagaaatactacagttggtaccactcatctgtggttgcttccatttcatcatcagaggaggctggggtaaggtgtggtggcgcagagaaacaggcttaggctgtaaaagggatgagagagatacaggggaagagaggaagtgaggggagtagaaagtactgtaaatgagggcaaaaggtaggatctgaagggaggg

SEQ ID NO: 8067 - DNA, 546 bp, Homo sapiens
  MAP TO CHR18.3; EXPRESSED IN ADULT LIVER, SIGNAL = 1.3; EXPRESSED IN PLACENTA, SIGNAL = 1.2; SWISSPROT HIT: Q24738, EVALUE 8.80e+00
tgtgtgctgacttggtattggaactctattggtaagataatttactacctttttttgctgtttatttttaaaggcctgattgctgagacactcagtcaggaaagtatgaatgattctaggcagcagtctctgttcttcatcacacttccagatttaaacaaactctgtgctgtcagaataatactgagtaataaggtggcagatactgagattaggactatacaaatgaagatgtgcaggtaaaaaaatacatcttataactaagacttttaaaactttgagacctataaaagctgttttagaggaattttctataaagcaaaatactcattcactcaacttgtgtttataattttaaaataaaggaagtcagattttgttttgaccaggtatattggattatatttaaggagggatttaaaatacttgcaatagaattatctcactgttgagtttttatatctgtgacctcttatgtgctttttaaaagtttaaaatctccacagacattcatgaattaaattcaggctcccagaaacttagagg

SEQ ID NO: 8068 - DNA, 504 bp, Homo sapiens
  MAP TO CHR19.3; EXPRESSED IN LUNG, SIGNAL = 2.2; EXPRESSED IN BONE MARROW, SIGNAL = 2.8; EXPRESSED IN ADULT LIVER, SIGNAL = 2.3; EXPRESSED IN PLACENTA, SIGNAL = 1.7; EST_HUMAN HIT: BF088553.1, EVALUE 1.00e-51; NT HIT: U48508.1, EVALUE 0.00e+00; SWISSPROT HIT: P11716, EVALUE 9.00e-24
ttaccttctgattggctggcagggaatctgcccacatggacactacaccccctttcctaactggccaaagctaagtaccccactgctggctattggcagccatgccccccaccctcctgactggccagtgtgtctgctcacatgtaattggccaggttgtgctcctccagcgtgtgagtctcgaagccatgcggtgtcgtatcaaagtagtcactgccgattccacagatgaagcacttggtctgtgagtggcaagagacatcagagtggaggcccacttgaccccctgaatcccgtaatccctctgggtcacccccagacatgacctacctccatatcctccttcacttgctcttgttggtctcggagctcaccaaaagcgtcgatgatcagacctggggtggcaggacacaagtcagtgcccgacctctgacctggttcagactcccccctctccagctacctacctccagggcttgccctccatcccccatttccctaatc

SEQ ID NO: 8069 - DNA, 571 bp, Homo sapiens
  MAP TO CHR19.3; EXPRESSED IN ADULT LIVER, SIGNAL = 1.8; EXPRESSED IN PLACENTA, SIGNAL = 1.4; EXPRESSED IN LUNG, SIGNAL = 1.6; EXPRESSED IN BONE MARROW, SIGNAL = 2.3; EST_HUMAN HIT: AL544035.1, EVALUE 1.00e-55; NT HIT: gi15303444, EVALUE 7.00e-56; SWISSPROT HIT: O09046, EVALUE 1.00e-13
ctgttggtggagagggaaactctaccaaggggatgtgtgccctgaggtctaaccactgacctactcactgcaatccgagaatgagaatgggccagcccaggggcttctacgcatatgggtcatctccgaactccccgagctgggaagtccctttgcagtctagctggcagccttcctcctgcagtctggaactgctcactcagttctgttcccccacctcccatacagaaggggaccctctcctagtctgggtctgggccactgtggggatggaagaaggcagggggctggcacggggtggtagagggcaggggatggtcagtgggtggagctgaagggccctcctcgccccacggactccctcaggtcaccatcctggaggcagataacaggatcgggggccgcatcttcacctaccgggaccagaacacgggctggattagggagctgggagccatgcgcatgcccagctctcacaggtgagctagcaatccaccacctgtgtgcctagactcaactagctcctcagctccatgtccacaccagagtgggcccgaactttcactctgac

SEQ ID NO: 8070 - DNA, 579 bp, Homo sapiens
  MAP TO CHR14.3; EXPRESSED IN PLACENTA, SIGNAL = 1.2; EXPRESSED IN HELA, SIGNAL =   1; EXPRESSED IN LUNG, SIGNAL = 1.1; EXPRESSED IN FETAL LIVER, SIGNAL =   1; EXPRESSED IN ADULT LIVER, SIGNAL = 1.5; EST_HUMAN HIT: AI453367.1, EVALUE 2.10e-01; NT HIT: Z81292.1, EVALUE 1.40e-01; SWISSPROT HIT: P14172, EVALUE 6.40e-01
acggtgcctgttatttccacccctggaggggctcctttggataggatcatttttttccgctgtttccccctaaggagaataacatctgagcagccattaatgccccagggtggactgcatttcagattagccacacagagcagaattaaagcagagggcagaggcatatttccatgagggactgggagttgcagttcctagaaaacaaaggctgtgagcagggagtgagtccctggcgcagaggtgaccttgagcatacaccacatgacctctgtctctgctcctgcccacagcgccccgttcttcaatatggtcaactgtcatttttccgagagcactgtgtaaatacagcttcaaacctgagcccatttcctggagcgtgtaagcccctcctatatggaaattcaggagctggcactggtcagcagcacccaccggtgaaaggtgggtatgaaaaggaagagtaaacagaaagccagagcacctgtgggtaaatttgtctccctgcatgatctacctaccacaggctctgatggtatataaactatgaagcaaagaacgtggtgcttctgtggttta

SEQ ID NO: 8071 - DNA, 505 bp, Homo sapiens
  MAP TO CHR19.3; EXPRESSED IN ADULT LIVER, SIGNAL = 4.6; EXPRESSED IN PLACENTA, SIGNAL =   5; EXPRESSED IN FETAL LIVER, SIGNAL = 4.1; EXPRESSED IN LUNG, SIGNAL = 7.6; EXPRESSED IN BONE MARROW, SIGNAL = 6.8; SWISSPROT HIT: P38898, EVALUE 8.10e-02; EST_HUMAN HIT: AW246135.1, EVALUE 3.00e-31; NT HIT: gi14755564, EVALUE 5.00e-47
tcagctgcagtgtgaaggaggagcccaatgtcgatggacaggaagtgggtgaggttggggtcccaccagagatgagggactcctggaggaagtgtggacattcctggctagggtgggagtcccaggagaggtgtgtcaaggctgggactcctgaagtgaatgtggatgtccctgtctgggatggggacctgggaggcaggagccaagggctggctacgtgccatgtcacacagcagaggagctcctcatctgccatggctcatgtgggcagcccctgacaccacccttccatctgccccacttttcagcaccctccagccctccacttgcagcacagtcccctgaggggaaccatggacaccaagaaccagcctccacatccttccacccacccaggattcaggtgagcagccccaagtgggaagtataggccccaggtgtgagaagggactgtccccatggctgccctctgcctggtggttttccaggctccttgactagtggc

SEQ ID NO: 8072 - DNA, 581 bp, Homo sapiens
  MAP TO CHR14.3; EXPRESSED IN BONE MARROW, SIGNAL = 3.1; EXPRESSED IN ADULT LIVER, SIGNAL = 2.8; EXPRESSED IN PLACENTA, SIGNAL = 2.1; EXPRESSED IN HELA, SIGNAL = 2.3; EXPRESSED IN HEART, SIGNAL = 2.7; EXPRESSED IN LUNG, SIGNAL = 2.2; SWISSPROT HIT: P35716, EVALUE 1.10e+00; EST_HUMAN HIT: AW900093.1, EVALUE 0.00e+00; NT HIT: gi14749944, EVALUE 1.00e-14
gaagatcttgcctggctgtcagaaaataatgttctttccagcggctgcttgaacccgcttccttcagtgcctaaatttaacggctgcagctgcagctgcaacctgtttcccccgtaataggaatgaaagtggaggataaaagaggttaggaagaaggcaagccagcagtctgaccagacacaggatgcatgtaagagacttgttaattacacgttctatttaggtcacactgataggcaaatcgctattctgggcccccaggaagccttttcgtccttgctatagtcaattcattctccagatgaaagcctgaaagcgccacgacccaagtttcacgtctatccactcaagaggcctgcttggcgcaggcgcataccttcaaaggcctcccgccctcactccaccacccccttagggggcggggcctcagagctcagtgctcgaactggctccagagccgtgagttcggcatgcaagagcggaagaaacgcggctggtaccccggaagcagtcgctgcaacttccgggaggtgcttgtgtgcctggtgcgggagctacggggcccagggattgtgtttaaa

SEQ ID NO: 8073 - DNA, 523 bp, Homo sapiens
  MAP TO CHR18.3; EXPRESSED IN HEART, SIGNAL = 1.8; EXPRESSED IN BONE MARROW, SIGNAL = 1.8; EXPRESSED IN FETAL LIVER, SIGNAL = 2.4; EXPRESSED IN ADULT LIVER, SIGNAL = 1.7; EXPRESSED IN BRAIN, SIGNAL = 2.4; EST_HUMAN HIT: AA582063.1, EVALUE 7.30e-01; NT HIT: AF155824.1, EVALUE 1.30e-01
caagtgcagaggaaagggtcatactattagttggcttggtggatggtgcattgctcaaaaccaggcaacatctattgctggggttcagatgtgtctttggggaagtcttctgtactagcaggctggctacaactgaagccctatgtctgctagaggctgagaaacctctttggcatggagctaacagagtgtagcctccaacaggaaagaggctctccccacttgctgagggaatgcaacatgtcatccgcatgctgaggattccagagattgtagagcaacttagacttcttcagggctccagagcagcagcatggtggacagtgtgcttctcagcagcgtgggctgccaggcctggaaaatgggatagtacctggcagaagaagcactggttgcaggcataatcatgatacctagtggcagcagcaggggctggaggatgcagatctccctggaagaaatggtacaggtgcttgtcatgaagcagctcccagtgggcatggcagcactttatggcaccaga

SEQ ID NO: 8074 - DNA, 532 bp, Homo sapiens
  MAP TO CHR18.3; EXPRESSED IN BONE MARROW, SIGNAL = 2.8; EXPRESSED IN ADULT LIVER, SIGNAL = 1.6; EXPRESSED IN BRAIN, SIGNAL = 1.2; EXPRESSED IN PLACENTA, SIGNAL = 1.4; EXPRESSED IN HELA, SIGNAL = 1.8; SWISSPROT HIT: P23682, EVALUE 9.80e-01; NT HIT: AF338230.1, EVALUE 2.00e+00
ctgctccaagggagacaaagaccagagtcgacatgatggcctcctccaaacgcttcactgcccttgttgcagggacaccccccagctagaggacactgatggccctgctggccccaggggtcccctgagggtgtcacctgcctcagcccttgcaggcgactggaaaagctggtaaaggtgcggctgggcacctgctgggaggggccttgatggggaggggtttgcgggtctgggtcggaccccagcagctcttcctgtttttcctattccaggggcagcatccagggagttttcaatgtcactgcactttgatttttttctcccggaaaactaagatgctctcttccccttgctcaacccctttagatctggggggatgtgaagaggggtaatttggagcttgtgcttgtcagtggagcatttcagtacctctactaagagagactcacagtgtaaacactattattaataataattcaaggaaatgtttgactgcatcttttttggtccttgtttgtcactgccccatttt

SEQ ID NO: 8075 - DNA, 525 bp, Homo sapiens
  MAP TO CHR16.3; EXPRESSED IN ADULT LIVER, SIGNAL = 1.1; EXPRESSED IN HELA, SIGNAL = 0.99; EST_HUMAN HIT: AW665036.1, EVALUE 0.00e+00; SWISSPROT HIT: P01426, EVALUE 1.30e+00; NT HIT: gi13376122, EVALUE 6.00e-90
tgggaaaagaataggaatgagaagaccttaagatggtgaagttggagatagtaagttttcctttattgcagaatgtctgtgaaagcagtttataatgaaacaaacatttttgatgaaatggttaagaaaaaaaccaccttgatctcatgaggagcaaatagtaatagtagcagtaataataacaaacgttgtctattgttgttactggtactcttgacagctaagctctcctacccctgacacaggttcctggtggaatacctcaaatgtcgacttcctgaggtggttgctattttgttctgttttgattttaaacagaaagcaagggcggaccatggtttgattccagatgtgaagttagaaaaaacagtcccccggctgcaccgtccgtccctccagcatttcagggagcagtttttggttccagggaggcccgtgatcctgaaaggcgtggctgaccactggccgtgcatgcagaagtggaggtgggtggtcgctgagggaggtgaggtcccttttcccatt

SEQ ID NO: 8076 - DNA, 596 bp, Homo sapiens
  MAP TO CHR18.3; EXPRESSED IN ADULT LIVER, SIGNAL = 3.8; EXPRESSED IN PLACENTA, SIGNAL = 2.3; EXPRESSED IN HELA, SIGNAL = 2.8; EXPRESSED IN HEART, SIGNAL = 2.8; EXPRESSED IN BONE MARROW, SIGNAL = 3.7; EST_HUMAN HIT: BG220971.1, EVALUE 8.00e-75; SWISSPROT HIT: Q59942, EVALUE 3.40e+00; NT HIT: gi16163660, EVALUE 6.00e-75
atgcctgtttagcagatgggtgtctcttggccttgcactcatggtaaaagtctgttttgattatccagggcacaggccacagtagagctgatgaagttaggtgttacatggcaggcatgatgaattattatagtggtacaattatctgccatcctccccctacttactctttttggttgctttaatcagtgatgagaatggaaaggaggaattattctcactgaaggatctcagcttgcgttttcgtgccaatattattatcaatggaaaaagggcttttgaagaagagaaatgggatgagatttcaattggctctttgcgtttccaggtaagtttggggaagttctattatccttcctccagggttgtcaatgaagattgacctcaatcccagacctggatagctgcaggtgggactccctcccagtccttgtctcttaactacaaaatcttggtgggaggttatgtaagcttagccttctaagacaccccatggaataatccatcctttatttcccaagaggatggtagcagtcagtttcgcacacaccacagaaggtgtgcgagggctcgacactgcctctgtgctgtcgtta

SEQ ID NO: 8077 - DNA, 544 bp, Homo sapiens
  MAP TO CHR18.3; EXPRESSED IN FETAL LIVER, SIGNAL = 1.5; EXPRESSED IN BRAIN, SIGNAL =   1; EXPRESSED IN ADULT LIVER, SIGNAL = 1.1; SWISSPROT HIT: P29452, EVALUE 3.00e+00
ttgcatgagcacttaatccctgataaggcatcacaaatgagtaggtaatagacaactagacagctactggggactagagaaaatcaaattatcacattattttctgacatatgtcagataataaattaagctcagggtgaaagaaataagtatataaatgaatacatcttaccactacacggaatatgacattattattattttcacttttaaagttaaacaggggaatataaatcttattcagcttgctgattgcacatacggtgtttttgtctccccccgatactccactgaaattacaaaataattatacatgtaaaactctaacaatcaggcaggtatccatgcctggtggcaattttagggaatttagagaaaatacggaaccaagaaaaacaggtgacatatcaacaacagagctaagggaatcacaaattgacatccaaaacaaatgagtatgaaaacagagacccaggaataatcccaagataagacggcatatgctacttttgtttgtaaccattgcagaaaccaagcattgaga

SEQ ID NO: 8078 - DNA, 575 bp, Homo sapiens
  MAP TO CHR19.3; EXPRESSED IN FETAL LIVER, SIGNAL = 2.1; EXPRESSED IN ADULT LIVER, SIGNAL = 1.9; EXPRESSED IN PLACENTA, SIGNAL = 2.5; EXPRESSED IN HELA, SIGNAL = 5.3; SWISSPROT HIT: P06798, EVALUE 7.40e-02; EST_HUMAN HIT: BG107810.1, EVALUE 3.00e-68; NT HIT: Y18417.1, EVALUE 8.00e-68
tgacaaatgctgacactgaggtccagcggagtggcatggtggctgggcctacaggagagagggctgagcgggcacccagacggtggcctccgatccgggagcaggagccacggtgggaaagggaggcgaggtacccgtgactggtgttggggccagcgccctgggggtggtcaggaggcctcggttttaggtccagcccagcccctgtctccgtggctcttctagcctcagcattctatggttctaagatgcaggcgccacatattcccagtggggaagggccagagggttgctgtggccacttctgctgcagtcagaggctgggccccggctgagccacccctgtcccccactgcttgcaggtgcgaggaagaagatgtggagatgagtgaggacgcctacacggtgctgacccgcatcgggctggagacgtcactgcgctacgccatccagctcatcacagctgccagcttggtgtgccggaaacgcaaggtcagccggccgaattagccagcagggccagatggcggcagtgagtgacacagtacttcaggggcttccagggttccgatttc

SEQ ID NO: 8079 - DNA, 513 bp, Homo sapiens
  MAP TO CHR14.3; EXPRESSED IN LUNG, SIGNAL = 1.7; EXPRESSED IN ADULT LIVER, SIGNAL = 1.1; NT HIT: gi14748791, EVALUE 7.00e-68; SWISSPROT HIT: P25302, EVALUE 4.80e+00; EST_HUMAN HIT: AL044714.1, EVALUE 7.00e-69
gtcctcccagcctctacctcccactaactgcctcctaaaaagactgacttaacaccaactttgaattcagcattcaagaacagagaacttaactaccaacctgaattatcttacctttactaggtttgtcttctgttgtatttgctagtaaaggagcagtgagaacatgcatacagtgcttgtagaagaaacccagaaattcagtcttttctgttttctaaggaaacaagaacaattccatgaactttaaccacactggttcctaccagcaatacacaatatactagctatgaaaaagaggggaaatgctcatggcttacattggcagtggctagcatgttctctgggtcaactaaagttcgaagcaggcccataagctggactgctcctccaagttcaggatctgtatcacaaatcatatgttctataatgaggttgatgagcaaaatatcctggagagaaaaatagacatactcaggatcacttattatgagagaacggaaaaagcaaaaa

SEQ ID NO: 8080 - DNA, 519 bp, Homo sapiens
  MAP TO CHR18.3; EXPRESSED IN LUNG, SIGNAL = 3.3; EXPRESSED IN BONE MARROW, SIGNAL = 1.9; EXPRESSED IN ADULT LIVER, SIGNAL =   2; EXPRESSED IN BRAIN, SIGNAL = 1.3; EXPRESSED IN PLACENTA, SIGNAL =   2; SWISSPROT HIT: O83980, EVALUE 6.30e+00; NT HIT: gi15296833, EVALUE 1.90e+00
acccaaacagaccacactcctctgaagcaggagggcagtcatcattcaccagttactcctaatgtcgaaaatgtatgcaatttggaccatggcgcctgatcgaggtaaactaaatagcaccatgaactcacagcatagtgaactatccacacggcagtcggagacaagcacatttgcaatttttctgagatttgccagaatcggaatgactcaatccacggaagataatggatgtgagtatgggaaatggagctgtaagaacggaaggccgccttgtttcctctgttcccatgcctgtggggttcacgctttaattcaggaagatgtgccaaggaaaggcgttgctctcaccggtcagggtccaaggccccgggccaccattaatgtctcgttgcacaccaatggcgttcccggggagcttatctggcactgcaagagcaaagcagctctgctgcaaatccacctgactcagaaagctcttgacgacccagagcagttggttctgctgtcctccacctc

SEQ ID NO: 8081 - DNA, 501 bp, Homo sapiens
  MAP TO CHR18.3; EXPRESSED IN ADULT LIVER, SIGNAL = 1.1; EXPRESSED IN HELA, SIGNAL =   1; EXPRESSED IN FETAL LIVER, SIGNAL = 1.8; SWISSPROT HIT: P54259, EVALUE 1.40e-01
gagcaagccctctcactcaccactggaaagaacatagagagtgacatcccctggaaggctctgagacatggcggagtggaagactgcttctggagccaggatgcctgggtggaaactgacagtctcctggaaggctctgagatatgggggctatgaggaatgcttctggagccacgatgcctgggtggagggtgacatcccctggaaggcctgagacatggtggaggggaggactgcctctggagccaggatgcctgggtggaaactgacagtcccctggaaggctctgagatatggtggccatgaggaatgcttctggaaccacaatgcctgggtggagggtggcagtcccttggaaggctctgagatatggtggaggggaggactgcttctggagccaggatgcctgggtggaaactgacagtcccctggaaggctctgagatatggcggaggggaggactgcttctggagccaggatgcctgggtggaaactgacagt

SEQ ID NO: 8082 - DNA, 594 bp, Homo sapiens
  MAP TO CHR19.3; EXPRESSED IN HEART, SIGNAL = 2.6; EXPRESSED IN BONE MARROW, SIGNAL = 1.9; EXPRESSED IN BRAIN, SIGNAL = 1.3; EXPRESSED IN ADULT LIVER, SIGNAL = 1.7; EXPRESSED IN PLACENTA, SIGNAL = 1.9; EST_HUMAN HIT: AV762934.1, EVALUE 0.00e+00; SWISSPROT HIT: O14813, EVALUE 6.70e-01; NT HIT: gi13376694, EVALUE 6.00e-10
tattcactctccctggcgaccgggcggcgtagaatcggcggccagcagtgctttagacacaggttaagtgtctgcccctccctccagggttacgcaccaccccgatgcatactgggattgtagttctgaagctacctacccatgggctgagagcagtaaagagactacaactcccagcataccaggcgcggcgcgcaccgccctgccccttcctctggggttgcgaaccgcccccgagcctggtacaggctgggattgtagtcctgcagccttgtggccgaagggctgggactggccatgagattacatgtcctagcatgctcagccaggcgcgcgcagctctgccccttcctccagtgatgcgcacagtccctgatccctgtgcacgctgggattgtagtcctgcagccctgcgatcacttgcaggtaacaagaaatttcagcttccggcatgatgggcgaaggcccccaccttcagcctcgctcctccatgccttcagagctgttccgccatgcagacggggagcctgcctgttctttaacctctcctacctgatgggagaggacaagctaccaggacagcttgtctcacca

SEQ ID NO: 8083 - DNA, 573 bp, Homo sapiens
  MAP TO CHR14.3; EXPRESSED IN PLACENTA, SIGNAL = 1.4; EXPRESSED IN LUNG, SIGNAL = 2.1; EXPRESSED IN BONE MARROW, SIGNAL = 2.1; EXPRESSED IN BRAIN, SIGNAL = 1.2; EXPRESSED IN ADULT LIVER, SIGNAL = 1.6; SWISSPROT HIT: P42768, EVALUE 1.40e+00; EST_HUMAN HIT: AU152678.1, EVALUE 8.10e-01
agaatcttgcaaccacagggccaggctcagagattgtgcaaactcagtttcaaggagtcagagaaatcaagacaggtgttgagagcctgggctgcaagtaaagtatgaggtgaagggttgaaggagggagtcctgctcttgaggagcagcccagatggacactccgctcacctcctccaggcagaagaagaacaaggtgtgcacgcggggaagttcggagtccctccttgtctttctagactgcagctgcgacaacatgctggggacacgaggctcaccagccccagtacctccccacccctcctcgagccagctaagcaggacaactttccagctccttatccgcattccctccctgatcaggggcagactgtacttccccgatgtccgctaactaacgtaaagaaacgtccgcgtgctccgctgataccccagggccaccggaggagagcagtggggtgtgagaactaggctgtgtccagtggctggtggtggggggagcggctactgcgccttccccttgggcactcctctcgggtccctgaggcgacgccctagtaagcctccacgcac

SEQ ID NO: 8084 - DNA, 550 bp, Homo sapiens
  MAP TO CHR16.3; EXPRESSED IN PLACENTA, SIGNAL = 1.2; EXPRESSED IN FETAL LIVER, SIGNAL = 1.5; EXPRESSED IN BRAIN, SIGNAL = 1.4; EXPRESSED IN ADULT LIVER, SIGNAL = 2.5; SWISSPROT HIT: O88671, EVALUE 2.30e+00; EST_HUMAN HIT: BI837877.1, EVALUE 0.00e+00; NT HIT: gi14776216, EVALUE 6.00e-87
cacaaaggcttctttcctgggctgagttgggtgtcagaggagagtgggtatttgggattcagggagcagggccctttcttcaaccctgtaagaacaaccttgctcctcccacagcctggcctaattcttggtcagagttgagggagacccatggtttggaggtaacttctgaccccaacctgatcctgtgattgcttgcaggccatttactgccttgtgacgttggtcttcttttactcatctgcctcattttgggcctgggtaagtatctccatcctgggaggtggatgagtgcgtagggtcagtggctggcctttgataccctcattcttgctctgcagttggccctgggctttagtctggcagtgtatggggccagctaccactctatgagctcgatggcacgagcagcgttctctgaggatggggccctgatggatggtggcatggacctcaacatggagcagggcatggcagagtgagtgtcccccaccgccagcccaggtgagcggccccagggctggggcccagatagcccaagaagcacagc

SEQ ID NO: 8085 - DNA, 572 bp, Homo sapiens
  MAP TO CHR14.3; EXPRESSED IN ADULT LIVER, SIGNAL = 4.1; EXPRESSED IN HELA, SIGNAL = 6.3; EXPRESSED IN HEART, SIGNAL = 9.2; EXPRESSED IN FETAL LIVER, SIGNAL =   6; EXPRESSED IN BONE MARROW, SIGNAL = 2.5; NT HIT: gi14784215, EVALUE 1.00e-104; SWISSPROT HIT: Q9UEU0, EVALUE 2.00e-31; EST_HUMAN HIT: BG330450.1, EVALUE 1.00e-104
ttagatcaatgagtcagaatccagataataagaataggtaacatttacattctactacatacaaagcactgttttttttttattataagactgtattatattaaggataaaaagaaatctaaatatgcatatagttcgaaaggcctgccttaaatagagcagataccaaggggtaacaggaactggatgcagaaaagaggataagggtgaaaaaaatgaaacaagagtctagtatacactgataacatgaaataccccaacaatatagttaatttttgtaccacaggcccttaaaggaaaaaaaaaacaaacaaaacagctaaaacttaccatatgctcattctctacagcatatatgccatatttcatgtctcctcggcctccaggtgtggctgtcaaaggtgtgcttctcacctcccgatggagtttagcaaggtccttccggtagtttcgaagcttagacatcatggggtttcggaaagacaggggtgcataacgtagctcctcctccatctctgccagctgggaaggcagaaagtagtgagcagatagcctggttcttccctcactca

SEQ ID NO: 8086 - DNA, 502 bp, Homo sapiens
  MAP TO CHR18.3; EXPRESSED IN BONE MARROW, SIGNAL = 1.3; EXPRESSED IN BRAIN, SIGNAL = 1.1; EXPRESSED IN ADULT LIVER, SIGNAL = 1.4; EXPRESSED IN PLACENTA, SIGNAL = 1.3; NT HIT: AF260968.1, EVALUE 4.80e-01; SWISSPROT HIT: P50617, EVALUE 4.10e-01; EST_HUMAN HIT: BG116078.1, EVALUE 7.00e-01
aagtgggcgagtatgacgagatcgtatttgcaagaaagtatgcaatacattttaaatacttacataaaactattgaagcaaaaaccaacttctggaataatcccctcgggtaccttgggtcttgcagcagatgtcggttgatttgcatgcgatgcttgagttcccttctcacctgcctcaccatccatcacacctggaatatagcggtgtctgagcttgctgaccttagccagaaggtgggagaggcggggcactgacccaggtgtagggcacccaacgtctaggtggagctgcgttccctttgtctctcccctttgacggcagtcgcatgatgaagggctctggtgatgaagggtgctgtatggaggtagcaccacactggagccacccccagtgaaagtagaaattaagaaccggcagagaaagccgctctgcagagagaagagaagcgcagatgagagagattcaggtgtcttggcgagggaaggaactgatgcctgac

SEQ ID NO: 8087 - DNA, 575 bp, Homo sapiens
  MAP TO CHR14.3; EXPRESSED IN BRAIN, SIGNAL = 2.5; EXPRESSED IN ADULT LIVER, SIGNAL = 1.5; EXPRESSED IN PLACENTA, SIGNAL = 1.8; EXPRESSED IN HELA, SIGNAL = 1.8; EXPRESSED IN LUNG, SIGNAL = 2.2; NT HIT: AF387644.1, EVALUE 1.40e-01; EST_HUMAN HIT: AW889804.1, EVALUE 8.10e-01
taaagagaggctgcaggagggagaagaatatgtacaacccaatgaattagtagaaaagtagaaagataaaaagcatggccaaaatagggaaacttatattttatatcttggaagtagagatcttaagatatggccagtgaagtgtaatgaacttatggttgctggagttcagaaagttaaggatctataaggttggcacttcaatgatcattgatatgaagttgccatcactgatcatagagaaactggtggactggaagcttatgcatacatgggtaaattaccagagtttagaagatgataatgagaccaaggagagggtggtttaaaagccggtgaaaactggtcacatattgtcttggtatgattccaaatcttaaagctgcctatgggctaatgatcagattttgggtagtggtgctttagctggattttggctcctacagatgagcatctttgtacgtggcacaaattgcacaatcaaacccagtgagcctatattaattggtggtatgaattttaaatgagaaaacacattgagaaatgataaaacatcaatggtcagccaagacttg

SEQ ID NO: 8088 - DNA, 510 bp, Homo sapiens
  MAP TO CHR18.3; EXPRESSED IN LUNG, SIGNAL = 4.7; EXPRESSED IN BONE MARROW, SIGNAL = 3.6; EXPRESSED IN ADULT LIVER, SIGNAL = 3.6; EXPRESSED IN PLACENTA, SIGNAL = 4.2; EXPRESSED IN HELA, SIGNAL = 4.3; NT HIT: AF097159.1, EVALUE 2.00e-71; EST_HUMAN HIT: BI260728.1, EVALUE 0.00e+00
tttcttctctacagacaggcccattagtcattacttctttctgtagttgaaaagcaccatgtaattttcccagttagtgccatagggacctcctattagccctaggtccacatatacgggtttcttgactttgagactaggaaatacaacagataagttatcagaagatgtcttcataatttcagaaagatctcaatttgcttgacttcatttgtttagaaatgaagtaataatactccttccatagacatacctagcattgcactggatatggaataggcaatcaatacatgctcattaataaatcctccaaacatcctataatttgcatttgcaatgtatttgttaatctttatgtaataattaatacaatgaagataaacgggcacagctctgtcactctcacagaaacatattaagttcactgtttataggcaaaaataattttaggtctacactaaaaaagcaaaacaaacaaacaaaaagcaaacgaggtggttttcacaggat

SEQ ID NO: 8089 - DNA, 582 bp, Homo sapiens
  MAP TO CHR18.3; EXPRESSED IN ADULT LIVER, SIGNAL = 0.97; EXPRESSED IN PLACENTA, SIGNAL = 1.3; EXPRESSED IN LUNG, SIGNAL =   1; EST_HUMAN HIT: BG434086.1, EVALUE 3.20e+00; SWISSPROT HIT: Q61001, EVALUE 1.00e-18; NT HIT: AF005258.1, EVALUE 4.00e-82
cgcacacagaattgcacagaggatgacttaatgagtgaagtggatttgttgaagtgaaaacctcttttcatcccaaatacaacaggctcttcttgaagtgttgtatgaaacaaaaacatagctgtaaagatggaagataaatagaccccatatcctaaaaacaccataatcagaggcataaatcggtgataaggtttaagataaatgaaaaagagaaagccttactactgtttcagaatacattccagtgaattttaacagctgacttctctaagctgtataagatagtctttgtttggttccctgtatttgctatatggataagaaaaaattacttgaaagtaaaaaaataaaaaacaaaaaacaaaaaaaacccactttttttttttcagggccagttctgtgactattgcaattctgaagaccccaggaaagcacatcctgtcaccaatgccatcgatggatctgaacgttggtggcaaagccctcccctgtcctcaggcacacagtacaacagagtcaacctcaccttggatctggggcaggtgagctacacttttaactggaatgggaacatgagct

SEQ ID NO: 8090 - DNA, 576 bp, Homo sapiens
  MAP TO CHR18.3; EXPRESSED IN FETAL LIVER, SIGNAL = 1.5; EXPRESSED IN BRAIN, SIGNAL = 1.8; EXPRESSED IN ADULT LIVER, SIGNAL = 1.2; EXPRESSED IN PLACENTA, SIGNAL = 1.2; EST_HUMAN HIT: R94475.1, EVALUE 2.00e-01; SWISSPROT HIT: P51818, EVALUE 4.20e+00; NT HIT: AF135024.2, EVALUE 1.40e-01
gtctggaccaggttttcgtgtccacatatgcagtagatacttcccacctgctctatctttcccacctaattcatccttcaaggccagctcaaatgtctcctcttcctggagccatacctgattgcccatctggattaattgctcctccctctgcacttccacagcactggggttcttatgcaggttttgcacgtcttccatcctgtctggtatgctggttatttgcatgactgctttctccagtggactgccatctcgtgaaggtcgccatgtcccgttagcccctgattcccaccccagagcccagctctatgctgtgcatataacaggcacccactaaatactagttaaaggataaaacaaaagctaagcaaaaaagtactccggtgatatctgtccatcaatctgccctccccttgggcattggctgatgttgagccaggccactgtgtgatgcccacatagttataatacatccctgagctcctctggtgaaacaaatgtgaacactgtcatcggtctccccacttctaaacatgctgtcccaaaacctggtggcagagcaatgtgactgaa

SEQ ID NO: 8091 - DNA, 590 bp, Homo sapiens
  MAP TO CHR19.3; EXPRESSED IN HEART, SIGNAL = 1.8; EXPRESSED IN FETAL LIVER, SIGNAL = 2.3; EXPRESSED IN BRAIN, SIGNAL = 1.4; EXPRESSED IN ADULT LIVER, SIGNAL = 1.2; EXPRESSED IN HELA, SIGNAL = 1.6; EXPRESSED IN PLACENTA, SIGNAL = 1.3; SWISSPROT HIT: P35227, EVALUE 6.00e-13; NT HIT: gi14768904, EVALUE 0.00e+00; EST_HUMAN HIT: BG122936.1, EVALUE 0.00e+00
gcaacagatgtccaaaatgcaatatagcagtacatcagacacaacctctttataaggttggaccgacagttacaagacatagtgtacaaattagtgatcaatctagaggaaagagaaaaaaagcaaatgcatgatttctatcaagaaagaggtctagaagtacctaaacctgctgttccacagccagtcccttcaagcaaaggaagatctaaaaaaatccgagaatcagtgtttcctattccacctgaacttgatatgtctttattactggagttcattggtgctaatgaaggcacgggacattttaagccattggaaaagaagtttgttcgagtttcaggagaagcaactattggacatgtagaaaaattcttcagaagaaaaatgggtcttgatccagcttgtcaggtagatatcatctgtggtgatcacctgttggagcagtatcaaactctaagggaaatccgacgtgcaataggtgatgcagcaatgcaggatggtctgcttgtccttcattatggtcttgtagtttctcctctgaagataacttgaagattctaggcacattatgaggagggaaacaaaggagg

SEQ ID NO: 8092 - DNA, 550 bp, Homo sapiens
  MAP TO CHR18.3; EXPRESSED IN LUNG, SIGNAL = 2.4; EXPRESSED IN ADULT LIVER, SIGNAL = 1.5; EXPRESSED IN HELA, SIGNAL = 2.4; EXPRESSED IN PLACENTA, SIGNAL = 1.8; SWISSPROT HIT: P38898, EVALUE 4.00e-03; NT HIT: gi14766196, EVALUE 1.30e-01; EST_HUMAN HIT: BF090355.1, EVALUE 2.00e-01
taccattttcccagagccacacaagacccacatccccacctttatttctcaccattttcccagagccacacaaggcccacttccccacctttatctcttaccattttcccagagccacacaagagccacctccccacctttatttctcaccattttcacaagacttctttgagatttgcaaatatctctacttacaccctctctgctatgtcctacttgttctactttttgttctatttattggttaaattttttgttctatttattgttaagggaattatttccccttcctcctccatagctagatttctttaagtggaaaaggatatattcctgtggccaaaatgaaagtatcaataaggttttcttcctttgcatttactactttcctcaaatcaagtgcaagaattctgacatcaatagagcctctgcctccttcaactcttttgttgtctgttactgaaaagtcagagcaagagataaagttaatgaaaagagataaagttaatttgtgctaagcaattcaaattccctgtgaactgtcgaatca

SEQ ID NO: 8093 - DNA, 595 bp, Homo sapiens
  MAP TO CHR18.3; EXPRESSED IN ADULT LIVER, SIGNAL = 1.9; EXPRESSED IN BRAIN, SIGNAL = 2.3
gcactctctgtggtgctgagcaccattgtaaacattcagtaattacattcaagtgagaagatggacctgatctcataggtaaaaagggggtcatctgtccttgagaagcagaagggtgggtaccgggaatgcggagcaggtcaaaagcaccaaacctgaaatctcatgaatttaggaaaggttttcaaaagaagcttaatgcacaggagttgacgtttaattaataattcctttcttgagagacttaagcagcttgggctgttttcagctctttcaagtactctcttctgctgatgtagcgagaagcagcaaattcaaagtaaagctaaaagaagcctggaagctcagcctctgggcagtcattttcagtatttatgactgcctgtaaatggctagtgagctggtggtagcaccattgattctatttttaacagttgactcttacaatcaatgggattgaccaaaccaacagtgaagtcagcagcaacaagagcatggcccaactgcggtccattaatgtggcctgtggctccaggtgggtgtacaccaccaacaaagccttgagccagggaacacaccccctcacaccaaatat

SEQ ID NO: 8094 - DNA, 505 bp, Homo sapiens
  MAP TO CHR18.3; EXPRESSED IN HEART, SIGNAL = 1.5; EXPRESSED IN FETAL LIVER, SIGNAL = 1.3; EXPRESSED IN BONE MARROW, SIGNAL =   1; EXPRESSED IN BRAIN, SIGNAL = 1.3; EXPRESSED IN ADULT LIVER, SIGNAL = 1.1; EXPRESSED IN PLACENTA, SIGNAL = 0.85; SWISSPROT HIT: P97887, EVALUE 4.60e+00; NT HIT: AE006149.1, EVALUE 4.80e-01
aaggcaaccactttgcactccagaaatttctcagagtcatatcatgtattattttgcattctgcagaagagaaaaagactggctgacaaggattatagaaacatcctagaggaagagatcctttaattacaacttaatgaatggaaagaaggaaccattcaagtggcgatgaggagagacattctaaatgcagggaatcaactgagataaagcaagagagggagaattatgactcatttgagtacagctttaatcccaagaagcatagtaggggagatatggctagcaatgtaagcagggacagaattcaggctcctgatgaggatattttaccttggaataatggcaattggaaagaccagagggtcagggaattctgcatagccaactcaatcagtgactcagtagggaaccaaggcttatgaatagcaagccattccaatgactagctgagagtttcacgtggcaagtcattttatactaagaattggatgttcaagggaga

SEQ ID NO: 8095 - DNA, 521 bp, Homo sapiens
  MAP TO CHR16.3; EXPRESSED IN HEART, SIGNAL = 4.3; EXPRESSED IN ADULT LIVER, SIGNAL = 3.9; EXPRESSED IN PLACENTA, SIGNAL = 3.3; EXPRESSED IN HELA, SIGNAL = 3.1; SWISSPROT HIT: P92485, EVALUE 2.80e+00; NT HIT: AJ132961.1, EVALUE 5.00e-01; EST_HUMAN HIT: BE251063.1, EVALUE 1.80e-01
cattctcgccttctagcctgggcttgtcagcttggggtgtatgccgcacctcctctttgaagaggatcttcatttggaggggtgatctgactcccaaccctccccaggtgaaagcaccgggattcatacctagggggctttgggatttggggctgactttgacccgtcattatttctgactgcaaaattcctgacaaatgtctgctgctgggtgctctgtgaatctgttcccatttgcagtgagagtgctggcatcaagcacattgtctaaattcactcggcaagaagccgttggagtgggtgccacgtgaggccgagaacatccaaatgaacactggtctgtttgttcaagatgggagctgtcagttgtgagagctcctatgggaagagtgttttgatgtatagacatccctggtccacagagccaccaagcaaggcagactatttcgtgagaaagaaggaagatagactccatgcaacacagtgggtgtggcaccaagcgggaggtggagggttgctac

SEQ ID NO: 8096 - DNA, 546 bp, Homo sapiens
  MAP TO CHR16.3; EXPRESSED IN FETAL LIVER, SIGNAL = 1.9; EXPRESSED IN BRAIN, SIGNAL = 1.4; EXPRESSED IN ADULT LIVER, SIGNAL = 1.5; EXPRESSED IN PLACENTA, SIGNAL = 2.9; SWISSPROT HIT: P03186, EVALUE 1.80e-02; NT HIT: AJ271885.2, EVALUE 1.30e-01; EST_HUMAN HIT: BE390197.1, EVALUE 4.90e-02
aggaaaaaggggctatgtggcaagccgttacctagcccagatgccggcaggcgggagcagagcctgtgccaagggcatctggtagcagtagaggcagatgagatggccggcgccgaagcaccccaccgcggcgcagagtctgctgaagccccgagtgctgatgggaaagtggcaggcccaccaggtgcagagggccaggaagagcagcaggtagacactggagagggccgaggggtgggcgatgcctgcggggcaggggcacacagggtggtacctggccagtgccatgtgtcccgctgtctccacagtcatcagggaactccaagacccctcccagtgtgactgccagtgccccctgcctcggtgcgtacctgccagtgcaagcagtgttacggccaggacccgcccagccgccaccagcagccagtgggccgtgactcggaaacgagcggccagccgtgacctccgtgtaggggccagcgttgctgcttcctgcagccctgccgtcgggctggcatccacatccctctcatcatcatcctgcca

SEQ ID NO: 8097 - DNA, 530 bp, Homo sapiens
  MAP TO CHR19.3; EXPRESSED IN HELA, SIGNAL = 2.4; EXPRESSED IN LUNG, SIGNAL = 2.7; EXPRESSED IN FETAL LIVER, SIGNAL =   3; EXPRESSED IN BONE MARROW, SIGNAL = 2.2; EXPRESSED IN ADULT LIVER, SIGNAL = 1.7; EXPRESSED IN PLACENTA, SIGNAL =   2; SWISSPROT HIT: P20823, EVALUE 1.10e-01; NT HIT: gi4502092, EVALUE 5.00e-01; EST_HUMAN HIT: AA766283.1, EVALUE 0.00e+00
acaggacggacttcaccaaggagaacgcgtgcttccaactcgaacttcagtcctggaagtttttcagatagaggatgactcaggctgatggcaacagagagggtgtcttgggggtcctctgtggggctcccctacgtgtctgtcatctcacagtcaccttgacactccttccaccccgctccgggaaaatgtcccgctctcagacgatctgggtgatcacatgcctctctgctctgcctccttaggcagactgcctcaaattctaacatcccgtggagagcagaactctccggatatccagcccagaccgctcccgcccgggtccgtctttgacccctgtggaatttcacagttgtggcgtcagtaaacatcttcggcctcgatcctcgggtgacccccctccaggcctttacaagcctgaaggtccacccctcaagatctcctccaggcccagcctgttcaattccggaagcccttgccctcgcaggaaaggtctgtgattcccccaaggtgctggttacttcctccca

SEQ ID NO: 8098 - DNA, 546 bp, Homo sapiens
  MAP TO CHR18.3; EXPRESSED IN HELA, SIGNAL = 3.4; EXPRESSED IN LUNG, SIGNAL = 3.9; EXPRESSED IN FETAL LIVER, SIGNAL = 1.5; EXPRESSED IN ADULT LIVER, SIGNAL = 2.8; EXPRESSED IN PLACENTA, SIGNAL = 2.9; SWISSPROT HIT: Q05000, EVALUE 4.50e-01; NT HIT: AJ229043.1, EVALUE 8.10e+00; EST_HUMAN HIT: BF740773.1, EVALUE 4.90e-02
ttctggtttagggagccttgatttagttacttttcagggtaattccttttaagcagcttggttattagaacttccttgggagagttactgtgattattttgcattcatgtgcttagttcaagacagagtccatagttcaaatcattgaaaatgactcattaaaattttcctcttttttttcctaataaacatggaagaagagccatttatccattagatgctatggatcgagcaactaaatggcaaaagtaaaaatccctacacaaggtttagaacaaaactagttgacaaggtatccccacaaaccccaaatgtaagaggcgtgaggaggaaccacagacagctgcaagacctgagtgaagtcagcaaatgcacagataaaaacaagggcatgacaaagcatgtggtggacatgaagagaggagaatccaaaaatagcatcaggttccgccaggaaagtgtggcaagaacagcagctgaaaacaggaaggatttcgccccatgcagtagtgagtgagtgcaaggggcccatggtgagaactgaaa

SEQ ID NO: 8099 - DNA, 561 bp, Homo sapiens
  MAP TO CHR16.3; EXPRESSED IN PLACENTA, SIGNAL = 3.1; EXPRESSED IN HELA, SIGNAL = 4.9; EXPRESSED IN FETAL LIVER, SIGNAL = 2.9; EXPRESSED IN BONE MARROW, SIGNAL =   5; EXPRESSED IN ADULT LIVER, SIGNAL = 3.2; SWISSPROT HIT: P02633, EVALUE 3.60e-01; NT HIT: gi14775225, EVALUE 1.00e-118; EST_HUMAN HIT: AA134676.1, EVALUE 1.00e-118
ataaagacaacgtgggtgggtacttacattgcaacagctgcttgatgttttccacagacacgcggccctcattgccggttaacgcttgaagcttatccaccagacctttcagagcctccactggggatgacttatcccagaccactgccacaaactggccagcagagatcccaaaatctgccattcttgcagtgcagtactgacagacctaaaaactgctggccaaaagggaatcaagactgggcagagacaaagtgcaatttaatctgtgagatatcataaaatatgattagaatcccaacctaacttgtaaccgcccactagggaatgctgacaacattagaaactctactgtatatgctaaagagtctgaatacatgaaccccattatctcaagtcttcataagcccaacattcccaaagaaggcagatagcttccttggtgagaatcctgacttggaagagtcaagaaaggggattagaggcaagtaagaaggttggaggcagaaagatgatttcctctttgacctaagataattcagcatgaacggaatggaaaac

SEQ ID NO: 8100 - DNA, 548 bp, Homo sapiens
  MAP TO CHR18.3; EXPRESSED IN FETAL LIVER, SIGNAL = 2.2; EXPRESSED IN BRAIN, SIGNAL = 2.8; EXPRESSED IN ADULT LIVER, SIGNAL = 1.2; EXPRESSED IN HELA, SIGNAL = 1.9; EXPRESSED IN PLACENTA, SIGNAL = 1.4; SWISSPROT HIT: P46934, EVALUE 7.00e-10; NT HIT: gi14719403, EVALUE 2.00e-90; EST_HUMAN HIT: BG216805.1, EVALUE 0.00e+00
ggccttcatttgggaatttactcaaatgtggccccgaagccatggctagagccagagagccccagagcaaggagaagggcatgcagggcatgctgtgatgacctcttactcacagccgaagaaccaacctcataatcgtccctttaactttattccgcagcatggatgggaagttgttgactcaaatgactcggcttctcagcaccaagaggaacttcctcctcctcctctgcctcccgggtgggaagaaaaagtggacaatttaggccgaacttactatgtcaaccacaacaaccggaccactcagtggcacagaccaagcctgatgtgagtaccgtgtgatggtcaggaacacgtgcacgtgcactgcacagctagggacaaatatggcggccctttgggacaaggctgggaaataaatcatatgtctataagagcagatggtggtgtggtacgagattcctctccatttacgtaaagcatgcaagagcagtcagaacttgtatattgtaagcgattgcctttgagtcacatgctgctgttttcaa

SEQ ID NO: 8101 - DNA, 520 bp, Homo sapiens
  MAP TO CHR18.3; EXPRESSED IN ADULT LIVER, SIGNAL = 1.2; EXPRESSED IN PLACENTA, SIGNAL = 0.91; SWISSPROT HIT: P71391, EVALUE 7.20e-01; NT HIT: M74000.1, EVALUE 4.90e-01
catttggaggatgcaaaacctcacaccgttttgcttgtccaacatgaggatgaccattttgggtaaagatttgggcttatggacagcagcatgacatattttaaatgtaacttcgtactgtttgtttttagaagatggtgctctgagggcaggaaacgtactgtgggtaatgggagaactaaagacttcatgaaactcaattttttattgttgatcttggacttacagattgaaattcttgtttcttgctaacctactagtcaaatcataattgctaacaaaatgtagataatccaaaaggtaattttagaaggtgtcaatttctacacttgtggaaacaattgcatggaaatagttgagattgtctacctccacaatgtttaggtccaccatgtttaggtggaggtagagggaggctaagttattaacatcgtttttccttttgagatacgtgtctaggcaaagaaaaggaggcctgaatgaatgccccagtatagtttcagaagcagcatgactgcat

SEQ ID NO: 8102 - DNA, 502 bp, Homo sapiens
  MAP TO CHR18.3; EXPRESSED IN HELA, SIGNAL = 1.6; EXPRESSED IN LUNG, SIGNAL =   2; EXPRESSED IN BONE MARROW, SIGNAL = 1.5; EXPRESSED IN BRAIN, SIGNAL = 1.3; EXPRESSED IN ADULT LIVER, SIGNAL = 1.5; EXPRESSED IN PLACENTA, SIGNAL = 1.4; NT HIT: gi9790008, EVALUE 4.80e-01; SWISSPROT HIT: P20893, EVALUE 1.60e+00
gctaacaatagcctaatcctcacccggggccagtgcccacagatctggcagtgcagctgtgtcgtggtggataatctgtgattgtgccggggacgtggctgtcatgagggtgtttttcagtggagggtcactactgcttgtgctgccgctgttggtggccagggctgcagcctaggtgaagctgggtgctgctggatgcagctggtatgctggagctgtcccatgttccctgaaacgatgctaagttttgtgacaaacggaagagaactcgtttcttcaaagcagtattaccagtgttgcatggaaagcttatataagagtaatttctttgcttttccctttacatttcactgtttccctaagacttagatatgagtccatgaaacctgcctagaggaaaactatcagactcactaatgatgtgcagaactcaaaatttcacctcgcatccaaggaacgtggcactgctcttttaacaaattgtgaggtctgatcattggcc

SEQ ID NO: 8103 - DNA, 514 bp, Homo sapiens
  MAP TO CHR19.3; EXPRESSED IN BONE MARROW, SIGNAL = 7.2; EXPRESSED IN ADULT LIVER, SIGNAL = 5.2; EXPRESSED IN PLACENTA, SIGNAL = 5.5; EXPRESSED IN HEART, SIGNAL = 2.3; EXPRESSED IN HELA, SIGNAL = 8.9; NT HIT: gi15304129, EVALUE 1.00e-108; EST_HUMAN HIT: AL532880.1, EVALUE 1.00e-107; SWISSPROT HIT: O00115, EVALUE 2.00e-54
ttcttttggtccaggtgtcctgctccttgaccacgatgggggcttctggctggtccacagtgtacctaacttccctccaccggcctcctctgctgcatacagctggcctcatagcgcctgtacctacgggcagaccctgctctgtgtgtcttttcccttcgctcagttctcgaagatgggtaagtcgagtcagggacacaggatgagtcctgggtttactgaccagaacctggaacgatcttgcatttcctcctccccttgtcctccaggcaagcagctgacctacacctacccctgggtctataactaccagctggaagggatctttgcccaggaattccccgacttggagaatgtggtcaagggccaccacgttagccaagaaccctggaacagcagcatcacactcacatcccaggccggggctgttttccagagctttgccaagttcagcaaatttggagatggtgagtctcaaggttgagggttggagagctccttctctgcagacagg

SEQ ID NO: 8104 - DNA, 550 bp, Homo sapiens
  MAP TO CHR14.3; EXPRESSED IN ADULT LIVER, SIGNAL = 1.3; EXPRESSED IN BRAIN, SIGNAL = 1.3; EXPRESSED IN FETAL LIVER, SIGNAL = 1.6; SWISSPROT HIT: P03313, EVALUE 1.80e+00; NT HIT: AB018302.1, EVALUE 4.00e-57; EST_HUMAN HIT: BF739278.1, EVALUE 6.00e-57
atcacactgcacatccatgcaatggccactgaactcaactaaccttccttctaaatatacgtattaccagaagctaatctctaagaattatacttagaaaagagcaggaaaccacataactgaccaatatcaggaatgaggaagaaagaagaccaagaaactgggattagttcccattacctggcttagtatctgtcactccttccataaggaccagtcctactggtcgctgacaagcgatgctgcagaagcggaaacgtagcaggaagtctcggccatacttgcgtctctctgtaaaccaggaaaagacatatagtgaaagaaagacgatgaagccacatgctgagacctccttagtaccaagcaacttccagcataggtacacagaggaagcattcagaagacaaggagattttccaaaggctatgatttaaagttgtccatttcattggacagccattgggaggatagtgagaaaacagaggaatctgctaagagaaatgagggattacactttttcttgtcgttgagacaccagctttctcccaaa

SEQ ID NO: 8105 - DNA, 600 bp, Homo sapiens
  MAP TO CHR16.3; EXPRESSED IN HELA, SIGNAL = 1.9; EXPRESSED IN ADULT LIVER, SIGNAL = 1.7; SWISSPROT HIT: P25573, EVALUE 1.20e+00; NT HIT: AF325425.1, EVALUE 0.00e+00; EST_HUMAN HIT: AI669330.1, EVALUE 1.00e-24
gtatgaatgacgttgggtgcctgccctgcatatacatatgttctttgagctcattcaagggagaattcccatggattggcacaaccagtatggtttatagagcgatcaggaataaaataggttttcttcaaaacaagaggcaaaaatgtggagcccagggtgggatcaggggccttctgcagctgtcgcagttggaacatgtgacgaaagccagttgatgtgacaactgctgggtgggagggacaggcttgggggcggggctgggagggctccttcccttcctgacccagggatggtctttacttctccctggcacctgtagacctgtctttcttgtgtttcagatttgccatacggatgggaacaagaaactgatgagaacggacaagtgttttttgttgagtaagtgtctgcaaagaaaccactctcagctgttttgctttttaataggaatttttaattataaaagtaatacatagtaactgtagaaaaatacaaagtataacagtgtgtatctgtaatcttagcagaagtgactacttttaacatcgctggaacttttaacatcgctagatttattcttctattttccccgcacac

SEQ ID NO: 8106 - DNA, 567 bp, Homo sapiens
  MAP TO CHR14.3; EXPRESSED IN HELA, SIGNAL = 1.3; EXPRESSED IN ADULT LIVER, SIGNAL =   1; EST_HUMAN HIT: BI489611.1, EVALUE 0.00e+00; SWISSPROT HIT: P46935, EVALUE 1.00e-09; NT HIT: gi16162510, EVALUE 0.00e+00
caatcccgaaacaaaaagttgaaaataaagttgatactgtacctaggagcacagggatgcctgtattgggccttcttatttgtgtgatctacataataggttccaaattcggatgactcaactcgttcccatccaggaggaagtccttctcgctcaagaggatggctccagtgagttgtatttgtgttatgatctatataatattttctccctctcattgtccagtccacagaccagccaggaggaaggggtaaatcttcagaaccatggttagtcaaatttcctaaagatgtagcagcaactctcccaatacctacggggaaagagaaaatgatagagaagaaacagaacaattattcaatgcaaaaaatgtgccagctagcaaagtcacaacattaactatcctgattgtactcttctatttaaattcatgattatgcccattatgatggttttcataaaactagtcagtattactattaaggaattataaaaagggggaggaactagactttgaaattagtagagggttttttggctgatgcttccatcaacaggccatacaaa

SEQ ID NO: 8107 - DNA, 600 bp, Homo sapiens
  MAP TO CHR18.3; EXPRESSED IN ADULT LIVER, SIGNAL = 1.3; EXPRESSED IN PLACENTA, SIGNAL = 1.3; EXPRESSED IN HELA, SIGNAL = 1.3; EXPRESSED IN LUNG, SIGNAL = 1.2; EXPRESSED IN FETAL LIVER, SIGNAL = 1.6; EXPRESSED IN BRAIN, SIGNAL = 1.1; NT HIT: AB051531.1, EVALUE 3.00e-70; EST_HUMAN HIT: AI380017.1, EVALUE 5.00e-70; SWISSPROT HIT: O14321, EVALUE 8.80e-01
cattttcaggtctcagaagagcttagatcatatataagtataaagtctaaaacttaaacattccttcatttcttaccagatatactgtctgactgaaagcttacagaacttaatttttttcttatagaggagcaatgctttaactatatagctccaaaacaaactccccacacacctggtcagccgaggtcacacagtgctctgggtgttgaatggtggtacagctttgcttcctccaatccacaattccattctgttcagaatattgcatggtaagcccatccaatggagaacaacttgtaccaatattgctaccaaagaaaagtttatgaaagtgtgaaaatctgccctcaataataacctatttcatttcaacaaagaagttacagtaaccctttcttcaatatattagtttcttcaaggaatgcctaatgataggtctaagaaaaaaaagtatactatgagaaataaaccactacacatctatttatcattaatacttgtctctaaaaagagtagtaacagctgcacactctgcttttagacactatgcgatggtgatcatcatacactgcttacagctgggacagagaggcttat

SEQ ID NO: 8108 - DNA, 536 bp, Homo sapiens
  MAP TO CHR19.3; EXPRESSED IN ADULT LIVER, SIGNAL =   1; EXPRESSED IN BRAIN, SIGNAL = 1.5; EXPRESSED IN PLACENTA, SIGNAL = 1.2; SWISSPROT HIT: P56163, EVALUE 2.00e-26; NT HIT: gi14762858, EVALUE 4.00e-63; EST_HUMAN HIT: BF527391.1, EVALUE 7.00e-63
attcccacaatcctcagcagttgcatcagcctcgctagctctggttatccacagtatcccctacatgctccgggtcccctcggtcctcaccgccttgcctccctccctccaggtctgcactcctgaatgtcctctgcacccggcccccagaaacctcaggtggggagcatcacctgatcgcccacagtccgcacaggagatgaggtcctcgggacaccccgtcttcttggagccccccaggcagaagtcacagtagccgttggggatgacagtgccgtcgggcgccttcttggctgcaagacagcagacaggcattggcacggggcaggcaagggcaccccgcaaaggtggctgcagactttaggagcagaaggaggcatccgtacctgtgtgtttcctttgtgcctcagggacccaggccaattctttgtaaaactctggggtaggggggacagagagagggactctcaccacaggcaaggctccaccctgcccccagcctcagccccaaggatggacctcttagtccaggcgtg

SEQ ID NO: 8109 - DNA, 540 bp, Homo sapiens
  MAP TO CHR16.3; EXPRESSED IN HELA, SIGNAL = 4.1; EXPRESSED IN PLACENTA, SIGNAL = 3.3; EXPRESSED IN LUNG, SIGNAL = 4.6; EXPRESSED IN BONE MARROW, SIGNAL = 4.7; EXPRESSED IN FETAL LIVER, SIGNAL = 1.8; EXPRESSED IN ADULT LIVER, SIGNAL = 3.3; SWISSPROT HIT: P51914, EVALUE 1.70e+00; NT HIT: AF289666.1, EVALUE 2.00e+00
agagtctggaccactccacggctttgatttgttttgttgtttcaaactctctaatgcaaatatctgtttcattttattttattgtttgcattgtgggcctattccccatcatattttgtgctcatcgtggctcacagcaacactttttcattcttaacctttttgtgcagtgccaatgtctagccctcctgtttcacctttctcacctctagttcagtcatctctctggctaggtcatgaagaactagaatgatttgtccgtgaagtttcaccttcagctccattttcccaaccattctgaggggtcagattgggttaccacggggcctctcccatggcctgactatatccctggattttgtcctgatcagagattatttatttatttttgtaggccttttatatctgtgacatttatttgcaaggaaattggtttcctgcttgatgtcctacaaggtatttgttgggattcagcctcacccaaaataatgattatgatgacaatagcagctactcagtaccaggagcactgcttacctc

SEQ ID NO: 8110 - DNA, 519 bp, Homo sapiens
  MAP TO CHR18.3; EXPRESSED IN LUNG, SIGNAL = 1.1; EXPRESSED IN BONE MARROW, SIGNAL = 1.4; EXPRESSED IN FETAL LIVER, SIGNAL = 1.6; EXPRESSED IN BRAIN, SIGNAL = 1.1; EXPRESSED IN ADULT LIVER, SIGNAL = 1.2; EST_HUMAN HIT: BF027364.1, EVALUE 1.00e-14; NT HIT: gi15304425, EVALUE 2.00e-25
gcacctacctatggaagaggtctctgtaatctcttgcaacttcctgaataattgacttcaatctgtagaagaacaaacatatgaatagttcatctctgcacttgaaaaacataatttttcaatgatagtatctgctgtcttacatctaattgctgcaggaaaagtaagataccatatcaagtctatctaaagccatatagtctgaaatgaacatttgaagcttaaaactatatcaaggcattatacctggtatgttcaactgatgtatttttctcatcaataactgcaagagccacaagctttcctgaaataaagaatgacacatctgaattcaatcacccttattacacaaactgttcaattatcactttagttctgagtaggaaattagtaaagtatttctagaatttaattccaatcaccctacatgttatatcaaattaaatcaacacattacggtatatgtttgtagagtcaatcagtgaattagtcaactccagtgacaaattcccttccacg

SEQ ID NO: 8111 - DNA, 513 bp, Homo sapiens
  MAP TO CHR19.3; EXPRESSED IN ADULT LIVER, SIGNAL = 1.5; EXPRESSED IN LUNG, SIGNAL = 1.3; SWISSPROT HIT: P05143, EVALUE 1.00e-03; NT HIT: AB017602.1, EVALUE 4.90e-01
ccacaatatctcatgtgggccatggggccaggtcttgggtctcaaaccagcgcatctgagacattttaacctggaaagagaagagagacgtcatcggggccggccccctgcctccacaccacgacggtttcactcattccaacatccacctcccaaaagactccaaggtcagaagcagtggccacgacccaagcacaggctctgcccaaggcgtccccaaggacaggcccccaccggcaatctgtgctccccaagcactggggctgagccaccaagcacccccattcagcctccttcctgcctgccgaggacaccggccaattcatctccttctcctcagtaaacaactgtcagggaaaataaatagtttttaataggctcattaattgaattcaggaagaaatcaccttctccccaggccatggggaagcaacgctcagttcaagaaattcaggccgaaggcagaaggggctcagcctcccagaaagtccaggagatgccccaaacagttgt

SEQ ID NO: 8112 - DNA, 578 bp, Homo sapiens
  MAP TO CHR18.3; EXPRESSED IN FETAL LIVER, SIGNAL =   5; EXPRESSED IN BRAIN, SIGNAL = 5.4; EXPRESSED IN ADULT LIVER, SIGNAL = 5.7; EXPRESSED IN PLACENTA, SIGNAL = 4.6; EXPRESSED IN HEART, SIGNAL = 4.9; EXPRESSED IN LUNG, SIGNAL = 4.2; EST_HUMAN HIT: AW866420.1, EVALUE 5.20e-02; SWISSPROT HIT: Q39525, EVALUE 9.60e+00; NT HIT: AJ002281.1, EVALUE 8.60e+00
gtggcttcttcttgcattcctttgggtagaaggtaaaaaaccaacaacctggaatagtcttgggcaggcctctataggggtcaattttccaaaagaagacattaatttcagaaggggtgaagattgagattcctcaacacaaaacaaggcaattcgaggcccaaagagcaaccaggtcagacaaatgtaaaacagagacatcttttgattgaaaagacaactcataaagttgaagccaatcctaaatcaaaattttggaaagccactgtcaaaaagtaattttggagctgaagaaaatgaatgcaaaagcactagtataaaacaatagcaaatttcaaattctgattaagccatggtgatctactatggttgttctgaatacagaagactggaaaacccttcagtaattgtgaaaatcacactcatgaatgttgccttacaggttattaattctaaactagggaagcagattttggaggatttgaaggtagggcaaagaaaggtcagttaaacagacttgaatctcagggtctttcatttttgcagagatctttctttgggaccagcctgtcatttta

SEQ ID NO: 8113 - DNA, 538 bp, Homo sapiens
  MAP TO CHR18.3; EXPRESSED IN FETAL LIVER, SIGNAL = 1.4; EXPRESSED IN BRAIN, SIGNAL = 1.4; EXPRESSED IN ADULT LIVER, SIGNAL = 1.1; EXPRESSED IN HELA, SIGNAL =   1; NT HIT: gi15828471, EVALUE 2.00e+00; SWISSPROT HIT: O08874, EVALUE 5.80e-01
tgagcagaataatttggggcactcataaaaggcagtaggtggccatccatgtctgttcattccctgcttcaaagcctgaataaacagcagagtcatagtctacaggtctttcctgttcttcatgtgacatatttctcctttgctataaaggttaaaagggctgtatcaaggcaagattctctgaaacattttaaaaggcatttggtgtctactgagaacttgtcaaaaaattgaaaaagaaatcatatctaagtatcagagctctggaaaacccatgcactaccatatctacactgaaactacctctagaaactgccattgtaactccacacttgatggcagtattctgcagcaaatctgggggaaatgctcagacaaccgctcagcctggattcagatttattgggaagcctggatccatttgtgcacattattcttattgagagtcgtcaatgctttatcaaactctaggcatgtcttttaaatgaccatgaaagtaaaaagacagtgaaaagtgggagccaagccttaatgcagt

SEQ ID NO: 8114 - DNA, 564 bp, Homo sapiens
  MAP TO CHR16.3; EXPRESSED IN HELA, SIGNAL = 5.2; EXPRESSED IN HEART, SIGNAL = 3.7; EXPRESSED IN LUNG, SIGNAL = 7.4; EXPRESSED IN BONE MARROW, SIGNAL = 5.9; EXPRESSED IN BRAIN, SIGNAL = 4.1; EXPRESSED IN ADULT LIVER, SIGNAL = 4.5; EXPRESSED IN PLACENTA, SIGNAL =   5; SWISSPROT HIT: O95201, EVALUE 4.00e-17; NT HIT: gi14777842, EVALUE 0.00e+00; EST_HUMAN HIT: BE293593.1, EVALUE 0.00e+00
gtgaggctggagctgagaaggggtagctgcccttgggcaccacgcccaccggcactgtggaggcggcttggtgaatattcctcctcttgccgcccgtccttgctggggtgagctggatgaatgcagcaaggacagtccttcaagctgcgtcttgcatgttggtttccgacgctgccggagcgcactgccatgtggccctgggtgtctctcccactcatctgggtgctgatggggctgtcctttctaggttccagatcgtggacatcctcatcaggaaatgccttctaagctgggggaggcggtaccttcaggggacactcaggagtcactgcacattaagatggagcccgaagagccacactccgagggggcatcgcaggaggatggggctcaaggtgcctggggctgggcacccctaagtcacggctctaaggagaaagctctcttcctgcctggcggaggtaggagagggacggggaagaggcgctttcccagggaggcagctgtggggaggtggaggtttggcccaggtccaggtggggctgagggtctctatgccagcag

SEQ ID NO: 8115 - DNA, 526 bp, Homo sapiens
  MAP TO CHR16.3; EXPRESSED IN ADULT LIVER, SIGNAL = 1.2; EXPRESSED IN HELA, SIGNAL =   1; EXPRESSED IN PLACENTA, SIGNAL = 0.99
caaagagaaagcccaaccagatattgagaagtgagtatcccactgcttctgtctccagctagtgactttttccctttctctgtttccggaattgctcacccatcccctcctcggacttgcagcctcctctcctacattttccaaatccaaactttgcaccttctttgacagccctgaggaccccagcccccaggagagcagctccaaggaacattcagaagcaagttggtgagtttattttgatgaaatacaataattcatgtgcttagcagctgttgctatttaaaataagaaaaaacctgggcctgaatttaaactgtttggtaaaagcatgtgccccaccaatctggttcaacaaaatcagacattatgaaatccacaaaagaagtggagctcgttacaggaagttaagatgcaaatcctattttgtttcaaatgagcccaatgaatgcataattttccacaagaaatacttttgtgtcaggatcctcttaccaagaaccgaagttcttgggatgcagctgtt

SEQ ID NO: 8116 - DNA, 531 bp, Homo sapiens
  MAP TO CHR14.3; EXPRESSED IN PLACENTA, SIGNAL = 1.2; EXPRESSED IN FETAL LIVER, SIGNAL = 0.98; EXPRESSED IN BONE MARROW, SIGNAL = 1.5; EXPRESSED IN ADULT LIVER, SIGNAL = 1.2; EXPRESSED IN BRAIN, SIGNAL = 1.4; EST_HUMAN HIT: T02852.1, EVALUE 3.00e-40; SWISSPROT HIT: P54728, EVALUE 1.50e-01; NT HIT: U18973.1, EVALUE 1.30e-01
acaactccttcctccttcccggggccctattgatgttactgacccatgtctttccacattatcggaaactctttgtagactataggtgtctggggtaaggcaggacttctggatttaaaggttagtgtggagaaatctagtatgtcctgagctgaaaagcatattgggtggttatcttctcatttatcattttagaatcattgaaagaaaagacgatagcaaaaaatgtgttttcttttctcctgggtccccggattttgtcagtcttacttggtttcagcctggtgggagcctcggggtttttatctggtgtcctctctacctgtcacttgcctcgtggaggtccaggccctgattgctctgttgtattctggggctgttctcctcgaggtatgtatcggggtgacagcttctcatctctgcatcgtggcggctagaatcagccttgtttctgatgagggcggtagcggccagtcgattgctatgcatgtttattttaagaaatgctctgccaagggggtcttggagtgt

SEQ ID NO: 8117 - DNA, 590 bp, Homo sapiens
  MAP TO CHR18.3; EXPRESSED IN ADULT LIVER, SIGNAL = 0.93; EXPRESSED IN PLACENTA, SIGNAL = 1.2; EXPRESSED IN LUNG, SIGNAL = 1.1; EST_HUMAN HIT: BF347129.1, EVALUE 2.10e-01; SWISSPROT HIT: P38414, EVALUE 8.70e-01
aatgtgctggattttctcgggatgttcagtaccattgtgagctgtgaaactggagagattgctgatgggttctcgaaatgcatgttagaaaattgttagcaactgtggaactcgggggagacatcagaaaaccaaattatgccacacccataaatgttcaagacgggaagagaagtggactctgtcctgatgttgttactcacttaccctcaggggatcactgggagggcgcttggccttggtatccagtggagaattggtcaacacccaccgagatgtgttgaccgtgagccagaccctgtcaccagcaaattgaacaccccgaggctcttccccatctctcctgtgtcttctctctgtgacactggaaggaagctgcctacccctagactccaagccctgggtcccggcccctttcatctttttaatgacctcattcctgccacacaattcataatgtccactctgtgagaccttctccaggagcagatgacacactttactatttcccttctttgaaagtcaacacatgcttagcctttccctgcagtccctcaagccgatggcttcccctttttcagatttgacgc

SEQ ID NO: 8118 - DNA, 513 bp, Homo sapiens
  MAP TO CHR18.3; EXPRESSED IN BRAIN, SIGNAL = 1.5; EXPRESSED IN ADULT LIVER, SIGNAL = 1.1; EXPRESSED IN PLACENTA, SIGNAL = 1.3; SWISSPROT HIT: P19711, EVALUE 1.60e+00
ttgatgctaaaaacctttgccttttaacaaaaatgttttaatgtcttttaatttggtaaattttgataaaaaatgaaattcttattttctattctttgtcttttacggtatcagctttttcaaaaaactactgcctagcattaagcttttcatctcccaggtagctgttgtacatatctttatctatagttatgcctacgtgtacatcgataactatatttgcattttccctatatccgtgagtgttgtttgctcctgtcattattttaagaagttgataggagtgtactgagtctttcaataactgaaaatatctttctattggatcctttctgttgcatcctaacttgatgaaacacagacgttgtaagtcacagcacatctcacaaaagctttccatcttttgcatctttgtgtttgcatattagttttgttcattcccaattggagaaacacagatacctctttctctgcaaccagtctgtgtttatttgtgcccatgtctgtgttttc

SEQ ID NO: 8119 - DNA, 528 bp, Homo sapiens
  MAP TO CHR16.3; EXPRESSED IN HELA, SIGNAL =  10; EXPRESSED IN PLACENTA, SIGNAL = 9.9; EXPRESSED IN HEART, SIGNAL = 6.6; EXPRESSED IN LUNG, SIGNAL =  13; EXPRESSED IN BONE MARROW, SIGNAL =  16; EXPRESSED IN FETAL LIVER, SIGNAL =  14; EXPRESSED IN ADULT LIVER, SIGNAL = 8.7; EST_HUMAN HIT: R85568.1, EVALUE 4.70e-02; SWISSPROT HIT: Q00174, EVALUE 3.70e+00
aaagacacttgcatctggggctttttctgaagccgttttttccctcatttttttctgtccacaaaacagcaggaaataatttgctttaaatccacataaaatacccacgaaaaattcacactccatctctgaatgaggaggctaggtttttccaacggtggagccacaaaagtctgttttgacaagttatctccccgtaaacatactggtttatctcatgctgaacaattagatgtgctatttaggcaaaataaaaaatatattgcacattttctagacagcctgttagcatccatgccaatgacacgaacatcaggacatggggctgatattaaagtaaccagaaacacaaatgtgtattgcaacactcggaacattgccatctgtgtgttgcatgcccggagggacacccagggaggactgcgtgaagacagggtgagaaagagtccaggagaaaaacagcagctgagaggagtggggtgggcagggattggagtagaagcagatgggaggctgagattacccaca

SEQ ID NO: 8120 - DNA, 568 bp, Homo sapiens
  MAP TO CHR18.3; EXPRESSED IN ADULT LIVER, SIGNAL = 1.1; EXPRESSED IN PLACENTA, SIGNAL = 1.1; EXPRESSED IN LUNG, SIGNAL = 1.1; EST_HUMAN HIT: AW269019.1, EVALUE 1.00e-123; NT HIT: gi15317062, EVALUE 5.00e-32; SWISSPROT HIT: O60309, EVALUE 7.00e-04
caatcaaacctgtggacgtggagcttacggtaactccagagccaggtaagaaacttacaacaagccaggaacaggccccagctcagcctccagaacactccaaagaggtgggctcttcctcaacccaattatagcccccagctcagactccagacccccctaaggaggtagaaccttctccagtccagcagagttcccagatgagccaccagagccccctaaggaggttgaaccatctgcaacccagcaggaagcctcaggtcatcctccgaagtccactgaagaggtcagtcctccactgcagcaggagataccagctcagccatcagagccacctgagaaggtcaaaccatctccagtcataaagcagcccccaactcagcttttagagccacattcaaagtaattaactggtattatctgtccaagagattggatggataggaagttaaacttctgggagatgcctcattatttgtaccagtggctccacattatttcttgattaattgtgcagactgagaagctgacagctagtttttccaattcaagagtcatcatggggatg

SEQ ID NO: 8121 - DNA, 562 bp, Homo sapiens
  MAP TO CHR16.3; EXPRESSED IN FETAL LIVER, SIGNAL = 1.6; EXPRESSED IN ADULT LIVER, SIGNAL = 1.7; EXPRESSED IN HELA, SIGNAL =   2; SWISSPROT HIT: Q15131, EVALUE 1.00e-09; EST_HUMAN HIT: BG570079.1, EVALUE 0.00e+00; NT HIT: AJ010343.1, EVALUE 0.00e+00
tggcatgcatcttctgtttcttccagcatcttcctggtgatgggttactgtgagcaggacctggccagcctcctggagaatatgccaacacccttctcggaggctcaggtgcgtggcagaggggcctggggtgggggaatgggcttcatgggcccttgtggtgcacatttataacgaaacagggcacttggggacttgaagagctgctgctgcctctgcctccacctcccagtgtttcagcgagcttcagtgaggtggaattcctgtggtgggggcatctgctgggagcgggcagccccagggccgagagccttatgagggcactggtttcctgggctgttgggagcaggcagccccggggctgagagccttctgagggcactggtttcctgggctgctgggagcggggagccctgggcggagagccttctgagggcactggttttctgggctgctgggagagtgcagccccggggccaagagccttgtgagggcactggtttcctgggctgctgggagcgtgcagccccggggccgagagccttctgagggcactggtttc

SEQ ID NO: 8122 - DNA, 584 bp, Homo sapiens
  MAP TO CHR14.3; EXPRESSED IN HEART, SIGNAL =   2; EXPRESSED IN BONE MARROW, SIGNAL = 1.6; EXPRESSED IN FETAL LIVER, SIGNAL = 2.8; EXPRESSED IN ADULT LIVER, SIGNAL = 2.9; EXPRESSED IN BRAIN, SIGNAL = 1.8; EXPRESSED IN HELA, SIGNAL = 3.5; NT HIT: gi14751981, EVALUE 0.00e+00; SWISSPROT HIT: P25386, EVALUE 1.70e-01; EST_HUMAN HIT: AW377158.1, EVALUE 0.00e+00
actgaatgcttggaagtgggcagagcagtataaaaaatcattgatttaaagaacagacacttgatacatgtcctttcttacctaatgggaagccaagaacaccagactgtgcaatcatggatggttcaagggtgccttcatggttagcaatagtgatgtttcgtagcctaaggctatcatagaggccttggagcttttgatactgacgattgcgctccataagtttctcagagatgtcactgaactttttcttgtattcttctagtactttcttcatggaggtaacctcccctttcatagaggtcaattctacatccttgctttgtatttgctgagtatatatcttctccatctgtttcagatggccctcagccttgctgaaattgtattcttgatagagacgttcctgatgtacctggttccaaaagaaaaaagatttttaaggtattgggtacaaagttatatattgtaaaatgttatacaaacacaaaaggaaaagaaagatgcttatatagggatgttattttatcatttagaacccagtttaagaagcaatcaggatacacaatgaggcacagaaaaca

SEQ ID NO: 8123 - DNA, 547 bp, Homo sapiens
  MAP TO CHR18.3; EXPRESSED IN PLACENTA, SIGNAL = 1.9; EXPRESSED IN HELA, SIGNAL =   2; EXPRESSED IN LUNG, SIGNAL = 2.3; EXPRESSED IN BONE MARROW, SIGNAL = 1.8; EXPRESSED IN ADULT LIVER, SIGNAL = 1.7; EXPRESSED IN BRAIN, SIGNAL =   2; NT HIT: AF148512.1, EVALUE 5.20e-01; SWISSPROT HIT: P98161, EVALUE 5.00e-05
atgaaagagattgcccatgcactctgtaactagttcagagaagtagcattcaggttaaagtttgtacttgcaagttaaagaggagaggggttgaatcagggaaggctgtctctgggggcatcccttaccttctcacagaaccagcctctgttgacacccacattgccatgcccgacggagacccgactcagggggctaaggaggacagccagctcgatgtggaagatgtccgtgcggcctcggtcaaacacgccgccctccaggaagattttcccactgttcttattccctctggccccatacatgaccaagtagattttggatttggtaccagccccccggacatccccagtgaagacggtgacaatatacgtaatagctggtgtggaaacaacaggaaagagagtgttcaatgtgagctgcatcataatatcccaccccctcctccccttcctggttacaacaccccaaaaaaccctcctcctccacacatcctctttccccatcatgtcctactcctccagatgccacctaatgtccctctcga

SEQ ID NO: 8124 - DNA, 599 bp, Homo sapiens
  MAP TO CHR16.3; EXPRESSED IN PLACENTA, SIGNAL = 3.9; EXPRESSED IN HELA, SIGNAL = 4.1; EXPRESSED IN ADULT LIVER, SIGNAL = 2.9; EST_HUMAN HIT: BF917505.1, EVALUE 3.00e-40; NT HIT: U88844.1, EVALUE 2.00e-40; SWISSPROT HIT: P51798, EVALUE 4.00e-09
agagctcctccaagcctctctttcccaggcggtacctggcgaggtccttcctggtcaccaacccgacaacctgcaggacaagtccaggccacagtgacacacgggtcggctcccgcctgcctgtggagctccctgccttgtgtgtggctggggcagcacaggcagggggccctgggggcttcagcacagcccccgagctgagcacggggctggggaggggtgcagccatggggcatgggccgactcggtgctgggtcctgtgcttccgtgtcccctgccgggagctgagagtaagcacgggcaggaggcagaggggagccctgcacggcatgcctgcacccccaccgcccccgctcacctgattgcggttgtccaccaccaccaggtgccgcaggcccagggcccggaacagcttgaacacccgtgggagcgacgcctcctgcagcaggggcacagctgtcagtgcccgcccacacagcagaggcaggcgggaccctcacccaagctggctccctgcaccccccaccacggcgtccaggcacgtcctgagcccccacgcccgtctggccagccccctcagccccttgacttcagctcta

SEQ ID NO: 8125 - DNA, 557 bp, Homo sapiens
  MAP TO CHR16.3; EXPRESSED IN FETAL LIVER, SIGNAL = 6.7; EXPRESSED IN BRAIN, SIGNAL =   5; EXPRESSED IN LUNG, SIGNAL =   7; EXPRESSED IN BONE MARROW, SIGNAL =  11; EXPRESSED IN ADULT LIVER, SIGNAL = 4.3; EXPRESSED IN PLACENTA, SIGNAL = 5.5; EXPRESSED IN HELA, SIGNAL = 6.1; EXPRESSED IN HEART, SIGNAL = 2.8; EST_HUMAN HIT: BG775641.1, EVALUE 1.00e-98; NT HIT: gi10834856, EVALUE 5.30e-01; SWISSPROT HIT: P34687, EVALUE 3.10e-02
cagcactcctgaagaccctcaccccaggtgaagttcaagaatgtaaaagcctgtttgtagcaggggtgacccagccgagttcatcctcaaatggaccccggggtatccgggcagcactcgccacagggcacagacttaacccaggcaccaagcactgcatgtgtgcctgaggtgggggagtggcaggaaaggagtctgggggtgtttgggggtgtgtgtgtagagagtcagaagaagttggtgatcccaaggacccaggcaacttggccgtgggacaagccatggctgggtggagttgagggagtagacagatatttgctccccttctcccaggccccgagtggagtgtttagcaggaatacccacttcacttacgtttttggagcctccgtttccaacatcaggtgcagcagccatgtgggggcacccccagcctccctggtgagggtgactaaggcatcagtgttggtcttggagggcatcctggtagaagagtcaggccaggtgctgatgtggtcccagatcagccaggttgggggtgatgggcagagtcttgt

SEQ ID NO: 8126 - DNA, 539 bp, Homo sapiens
  MAP TO CHR14.3; EXPRESSED IN ADULT LIVER, SIGNAL = 0.98; EXPRESSED IN PLACENTA, SIGNAL = 1.3; EST_HUMAN HIT: AU140599.1, EVALUE 1.00e-104; NT HIT: gi14784246, EVALUE 1.00e-111; SWISSPROT HIT: Q16937, EVALUE 2.30e+00
caaaaagacatgtgaaaaagcctttttggactgtaatacaccattccaatgttaattttgttatttttaccctcacttcatgcaaatgtatttaaaattataggaataagtaacacagcaaccagctaggaggcctccctgctgttcacctaagaactgaagccagatgcaaagcaaaacccagacctatattttctctttcttaaagtcccccatcatataagataggttggggttgatcatagagtgagaagcccgttccctttctcttgatgcgagggcccataccttctgatacacctgcagctccgccagcttcctctgtagctcacactttagtccttcttggacagccgtgtctgaaatgcagtaggccagaatctccaggcatgactccaggggccacctgtccacaaactgtagggccagccgacttctcagagatgcatccttcacgggaaacaggtattgccaaccttctttgtctataagacaaaaaagatgctcagaggcagcaagcgtgggaccagaagagttca

SEQ ID NO: 8127 - DNA, 567 bp, Homo sapiens
  MAP TO CHR16.3; EXPRESSED IN BONE MARROW, SIGNAL = 2.5; EXPRESSED IN ADULT LIVER, SIGNAL = 1.2; EXPRESSED IN HELA, SIGNAL =   2; EXPRESSED IN PLACENTA, SIGNAL = 1.6; EXPRESSED IN LUNG, SIGNAL = 2.4; SWISSPROT HIT: O60268, EVALUE 2.00e-34; EST_HUMAN HIT: BI907235.1, EVALUE 1.00e-92; NT HIT: gi7662163, EVALUE 1.00e-114
ctctgggcctctgcagttagcaggcgcataccccagcctcactggcctcgtcttgttccctctctcatccaaggaaaaccacagctgctgcccccggagtcccgggagaagcccgcgggcagcatcgactcctacctgaaatccgcaaacagctggctggccgaaaagaaggacatcgccgagcggctgctgaagaacacctcggccaggactgagaatgtcaagggcttcttcggggggctggagaccaagctgaaggggcccctggccaggaggaacgagtacgtgtggccttggggtccctcccacctgcaggggactggggagaggctggtgtggagctcggacgggggcagcagggagggtgcgggtgaggcccagagactgtcaggaacactgcgctgcccagccacttctgcccccacggcttgctatggtctgcaaagccaagccccccccactgacatgcagggatgtccctgggggccacactccctgggactgatgaggagcccaagggattgtcagatggcagagggaactgcagccctcccttctgtctcctct

SEQ ID NO: 8128 - DNA, 510 bp, Homo sapiens
  MAP TO CHR19.3; EXPRESSED IN HEART, SIGNAL = 4.8; EXPRESSED IN HELA, SIGNAL = 3.8; EXPRESSED IN BONE MARROW, SIGNAL = 2.6; EXPRESSED IN FETAL LIVER, SIGNAL = 8.4; EXPRESSED IN ADULT LIVER, SIGNAL = 1.4; SWISSPROT HIT: P04350, EVALUE 1.00e-34; EST_HUMAN HIT: BG766460.1, EVALUE 1.00e-57; NT HIT: X00734.1, EVALUE 0.00e+00
cttcttgctgcctcatcctcgccccgacaccatgcctctaggtcccccgttcaccttgctgggggagaggtggcagctagggagctagttgggggctgggggcagtcctcggcttggccaccggcttcccctctctcaactcttccgaccacctctctctctagttttgggaggttatcagtgacgaacatggcatcgaccccacaggcacataccatggggacagtgacctgcaactggagaggatcaacgtgtactacaacgaggccacaggtagggcgaaggaggcaccttccaggtgggaaggggcagctgggagggaacaggatgctaccgggcgcctgtggttcctggcacgcatcgaactgccctccatctgtttccctgcaggaggaaattatgtccccagagcggtgctggtggacctggaacccggcaccatggactctgtccgttctggccccttcggtcagatctttcggccggacaacttcgtgtttggtgagtccc

SEQ ID NO: 8129 - DNA, 594 bp, Homo sapiens
  MAP TO CHR18.3; EXPRESSED IN ADULT LIVER, SIGNAL = 2.7; EXPRESSED IN PLACENTA, SIGNAL = 3.8; EXPRESSED IN HELA, SIGNAL = 3.6; EXPRESSED IN LUNG, SIGNAL = 3.4; EXPRESSED IN BONE MARROW, SIGNAL = 2.4; EXPRESSED IN FETAL LIVER, SIGNAL = 3.4; NT HIT: AL096805.1, EVALUE 3.60e-02; EST_HUMAN HIT: BF810437.1, EVALUE 5.40e-02; SWISSPROT HIT: P49907, EVALUE 1.20e-02
  unsure 36
  unsure 419
gtgagaaccaggagaggctggcactgcgggctcggnctgtctcctgcggcgtgagcactgctgcctctctcttccctgtgtgtcacttaatgtttgcagttaagtatttacagatatgttcccatggcaaccaaagcctcaaagttactctcacaattctgttttctcaaatgtgtttctctggctgattgcacagggttttctggaagccagccaggctgagtgagtcacattccctgccctgtgctcccatgctttttcccttccccctccagggtccagccagccagcatggtccccacccccatctctcccacgctgaacagagctcccgggcccatactccccagcttggtcaggttgtcccagggcctggagtgcagagccacaacccccaccatctagaccctccagctctnctggatcattgcaagcttccccttccaggaatccttctccagcttccctggcccatgaggcagacctgaaactgcccccaccccatgcttcttgaggttccttaaaggtggggtcttccgccttcacttctgaccctggacacctggcctgggggccccattcacataatccctg

SEQ ID NO: 8130 - DNA, 578 bp, Homo sapiens
  MAP TO CHR16.3; EXPRESSED IN LUNG, SIGNAL = 3.7; EXPRESSED IN BONE MARROW, SIGNAL = 2.1; EXPRESSED IN BRAIN, SIGNAL = 2.7; EXPRESSED IN ADULT LIVER, SIGNAL =   3; EXPRESSED IN PLACENTA, SIGNAL = 2.7; EXPRESSED IN HELA, SIGNAL = 3.1; NT HIT: gi14775055, EVALUE 1.00e-108; EST_HUMAN HIT: AU125937.1, EVALUE 1.00e-108; SWISSPROT HIT: P39981, EVALUE 4.30e-02
tctggaaaccaatctccctggggatggagaggggcaggatgaagaggaaggcagtgaggctgatggtgaacttgcggtctgtgtaccaagggccgctggccccctccggctctttcgccatcacagctataactgcacagggaggaaggagggaatgtcaagccaggccaccatggggtgtggccctcctgctctgctgggccccaggacctccctctgcctggagggaggattcccagatgaatgctgggcccaggtaagtcctggagaggtgttcagtgccttttccctccaccccaggatccctggggctgataagaagagatggggtagggactgagggagaagctcactcttgtcctgctggtcgccaatgatgattaggaaggcaatgcaggtgccaaaggtgtagacagcgatggccacctcacatagcacacctgtcagcttgccacacacagcccataccacctcctggtaggtcctctcattgctggcctgggagcagtaggccaggatgacaaggccactgatgatgaaaaccagcataccctgcaggcagaggcagaacaagagct

SEQ ID NO: 8131 - DNA, 527 bp, Homo sapiens
  MAP TO CHR19.3; EXPRESSED IN LUNG, SIGNAL = 1.4; EXPRESSED IN FETAL LIVER, SIGNAL =   1; EXPRESSED IN BRAIN, SIGNAL = 1.7; EXPRESSED IN ADULT LIVER, SIGNAL = 1.3; EXPRESSED IN PLACENTA, SIGNAL = 1.7; EXPRESSED IN HELA, SIGNAL = 1.7; NT HIT: gi14767217, EVALUE 2.00e-34; EST_HUMAN HIT: W96499.1, EVALUE 2.00e-69; SWISSPROT HIT: P03186, EVALUE 1.00e-02
ggggacctaagcttctcctgccacagggtctttgtacaggtggagtggtccgggccacgatggaggtagcgctgggctgagcggtcagggcttggataaggaaagaagttaccaaccacgaactctcaactccaaatccaatcagaaaaactcacttattgtgggtgtctgagggtgttttcccagcttcctcatccagacgctccctagaggcagaagagatctctcagctcagggttccagggccccagagaaggaaggcaccgagcagcctccccattaagcaccttcctccccaagtcagcctgtggggtcccacccaatccacccaggatcagagggcccaacccgccagggtgcccggccctgtgaccccacgctggcctacctgtccatgtgactcttctccagcagacactgcaagacagcatccagttggttccgggctttggccatctccagctctggggcaagagaggacccagcaggagtcagctcccaggccccagctaggtgggcagctgact

SEQ ID NO: 8132 - DNA, 585 bp, Homo sapiens
  MAP TO CHR18.3; EXPRESSED IN FETAL LIVER, SIGNAL = 1.1; EXPRESSED IN BONE MARROW, SIGNAL = 1.6; EXPRESSED IN ADULT LIVER, SIGNAL = 2.6; EXPRESSED IN PLACENTA, SIGNAL = 2.3; EXPRESSED IN HELA, SIGNAL = 2.8; EXPRESSED IN LUNG, SIGNAL = 3.8; NT HIT: U30332.1, EVALUE 1.40e-01; EST_HUMAN HIT: AI378891.1, EVALUE 2.10e-01; SWISSPROT HIT: O08734, EVALUE 2.50e+00
tcaaagctggagaaaatgggagacgggggctgagcaggaatgggtgggactggagctggctgaatcccacaagcttccagcacaggcttccatgagtggtcaaatccctctgaaggagggggttaggcaggcagatccctgcccagcagtcccgtctccctgcctgcctggccaggagtcaagggagcattatctccgtcctggttctgggaaggcctcttccattgatattctgctttgcttcctcccttttcctctgcaccattcctgctgttatggtgagaatcgtcctttcctggaacaaaacaaacatactcctctaggagagcattagtcttttgtgcccagacagcctgaagttaaatcctctaagcacagacttttcactgcagctgcacagagcacagccgcgcggtcctatgtctcccgaggtggctgtttgggttcctggtgtctagtgcccaaactcaccacactggcgtcaggtggactctgatgtgcacctcccacctcaggcctgcagacaccctcggctcctgctctaggctgcaagtgttggtgccctcccagacttccttggtgtgt

SEQ ID NO: 8133 - DNA, 583 bp, Homo sapiens
  MAP TO CHR16.3; EXPRESSED IN PLACENTA, SIGNAL = 5.2; EXPRESSED IN HELA, SIGNAL = 5.8; EXPRESSED IN FETAL LIVER, SIGNAL =   4; EXPRESSED IN HEART, SIGNAL = 2.1; EXPRESSED IN ADULT LIVER, SIGNAL = 2.1; EXPRESSED IN BRAIN, SIGNAL =   2; SWISSPROT HIT: P13662, EVALUE 5.00e-14; NT HIT: gi14776119, EVALUE 5.00e-66; EST_HUMAN HIT: BG541320.1, EVALUE 5.00e-67
tcagctttgcactgaggatgctcatggctgctgcctccagagggcaccatgagccctaacctctgcctgttgctgcccaatccaaaaccatgtgccatgacaaatgctggccacatggaatggcaagcccagaacagcaggattctcactcttgtggaagttgacaaaaggaaaagtatagaccaggtaattacttgggccaagcgtcagacccctgtcccgtggacaaaagttcagatacagaggtgtagccagtccagatagggctgccagaacttgtgaactggacacactggcccaacatccaaattgatcccctagggtccattctggccctagagctggaaacttacgtaaattgcgcctagttgggttctatcattatcaaataactggtagtaatgttgaatgaagctggatccaatctgctcccaaattggcttgtctcccattctggagcgtcacccggcctcacggagacctgcaagaccaatgagaccaggagggaagcattggtaccatgagagtaggtgaccagccactgacccccacccctcactggccttcctggagtcctttgctg

SEQ ID NO: 8134 - DNA, 516 bp, Homo sapiens
  MAP TO CHR18.3; EXPRESSED IN ADULT LIVER, SIGNAL = 1.6; EXPRESSED IN HELA, SIGNAL = 4.9; EXPRESSED IN HEART, SIGNAL = 3.4; EXPRESSED IN FETAL LIVER, SIGNAL = 2.8; EXPRESSED IN LUNG, SIGNAL = 2.7; SWISSPROT HIT: Q09556, EVALUE 4.00e-03; NT HIT: gi7706500, EVALUE 0.00e+00; EST_HUMAN HIT: BG010507.1, EVALUE 0.00e+00
tcaccataagctcattttggcttttagtccaaataccaaatacaagagcaaatatacttgctaatgcaagatattttgtcctggcacgatgcacccagctttggtacctccccttgggatctgcccccctgggcttttcccaccagctcccttgctgaaccctgagattttaagtgccccacccggcttgattcagcgatccaaggtagataatacaagtgcagccaccgttgagaagaaagccacagcaaccgtcactgccaaaccacagatcactaatcccaaggcagagattactcgatttgtgcccagtgcattgagagtacgtcgggagaataaaagggctactgctgcttcccaaagaaagtcagaggataattctgctgtgcctcttgccaaagcagcacccaaatctggtccttctgttcctgtctcagtacaaactaaggatgatgtctatgaggatttcatgaaagagatggaagggctactgtgacagcttttgatgccagaaca

SEQ ID NO: 8135 - DNA, 508 bp, Homo sapiens
  MAP TO CHR14.3; EXPRESSED IN LUNG, SIGNAL = 6.6; EXPRESSED IN ADULT LIVER, SIGNAL = 3.9; EXPRESSED IN BRAIN, SIGNAL = 3.7; EXPRESSED IN PLACENTA, SIGNAL = 4.8; EXPRESSED IN HEART, SIGNAL = 5.3; EXPRESSED IN HELA, SIGNAL = 4.5; NT HIT: gi11434029, EVALUE 0.00e+00; EST_HUMAN HIT: AW875084.1, EVALUE 0.00e+00; SWISSPROT HIT: Q13546, EVALUE 1.00e-10
tgagaggggtgtagaccagctgaccttgacgtgcagctctgggtccagcaggacgttggatggcttgaggtcccggtgcaggagcaccgggttctggtcgtgcaggtaaaacatcccaagcaccacttctttcagcaggcggcaaaggagcggccagggccgagggcactgggactgcagcagccccgacaaggagccgttctccatgaatttagtcaccagagccggcttgggatcttggtcccagttcaccttctcgataaccccttctaggcgcagcacgaattcgttatccagacttgccatggccttgacctccctggatatcgccttcctacactccaggagagagctggagtcgcaccggggtcgtgggaaaatccctcccttcgccattcaggccccagagcacagtggctccacctttttggccagattgcggctggggtcaaccggggtcactcacgagtttacgatcttgaccgccacatcgtagccccacttccta

SEQ ID NO: 8136 - DNA, 597 bp, Homo sapiens
  MAP TO CHR18.3; EXPRESSED IN HEART, SIGNAL = 1.7; EXPRESSED IN LUNG, SIGNAL = 1.1; EXPRESSED IN BONE MARROW, SIGNAL = 2.1; EXPRESSED IN FETAL LIVER, SIGNAL = 1.5; EXPRESSED IN ADULT LIVER, SIGNAL = 1.2; EXPRESSED IN BRAIN, SIGNAL = 1.9; EXPRESSED IN PLACENTA, SIGNAL = 1.2; NT HIT: gi14760943, EVALUE 0.00e+00; EST_HUMAN HIT: BI860191.1, EVALUE 0.00e+00; SWISSPROT HIT: P42698, EVALUE 4.40e+00
gccaatttggaaaagcagagatgggctttcagcagaatatcaaccaatacatttttcacatgcaaaactcatcaccagttgcctttttctaacttaatggacattttgttggtgttggtgcaagggcaataggatgtaaatttgtatataatctaatgtcttcattattaattgaatagtacatgttaacattttaatctatttaaatttactttgaaatatatacatacatatgaatgaaaggttgttacagagcctcaaagctgttgcagactatcccaagagaaaggatctggcacaaaggaatctgcctttcctccgtctcaagtctcccacccttgactggttgggatttgctcgtccagcctctagacacttcccaaagcaagactggacacatgccgagggcgttgcggatagtgcctcaccattgcccaccctgctgcccaactcctgtgagagaaaaaccaatcaatgtttacaaaatggaaaaggacacagcatgtcctttgaactccctaagtaaggcccacagttcttgatgcagagaaccaaagtgaatcatagaaaagcttttgctaacagtccgctttccag

SEQ ID NO: 8137 - DNA, 571 bp, Homo sapiens
  MAP TO CHR16.3; EXPRESSED IN ADULT LIVER, SIGNAL =   1; EXPRESSED IN HELA, SIGNAL = 1.2; EXPRESSED IN PLACENTA, SIGNAL = 1.1; EXPRESSED IN BONE MARROW, SIGNAL =   2; EST_HUMAN HIT: AL042417.1, EVALUE 0.00e+00; SWISSPROT HIT: Q09625, EVALUE 4.80e-01
cccactgatggttgacacagtcagtgtgtgcttttgaaaacacctttcctacttgttttgggaatatccactctgggtgcagcctgtgtttgctgggcctgtgtgttgttttctgggagactctggctgctggagaggattctcacaaaggcatgcacacctgggcaggctgctcccccgtggtgacctgctcactggttttcacgttgccgcccgtcttgtcctcctgcacgctggtgtggctgctctgcctgttttgggcactgccatccagccggacgctctgacggctgctggcctgggtggagggaaggctggctgtggaagtcagcagcccgctgctcaccttgtaggtgagggcactgctgcccaagctgatgaagctggcgctggacaggatgctgctgccgctgccgctgccgggcaggctggcctcactctttccctccagtctgcttggtgctgtgggcggggccagtcagccggctctttagagagctgggagggtctatggagcccagctggctggtttggttactggccgcctgggtgttgagccttctgttcagcc

SEQ ID NO: 8138 - DNA, 525 bp, Homo sapiens
  MAP TO CHR16.3; EXPRESSED IN HELA, SIGNAL =   2; EXPRESSED IN PLACENTA, SIGNAL = 2.4; EXPRESSED IN LUNG, SIGNAL =   2; EXPRESSED IN ADULT LIVER, SIGNAL = 2.9; NT HIT: L11000.1, EVALUE 1.30e-01; SWISSPROT HIT: P11079, EVALUE 2.20e+00
gtccactctctctcccatgcacggggagtcaagctgtgctcttcaaacacaaattccttctcccacttcctgggtagttatgctcttttcttccctgaggttgctaattgtgggcagtacagtgtagagtcactttgatttttctcatctccttcctggaatgtgccacagaagaaaacccacgaagtcttgagctaaacgaagcagagatgggagaagggacaaggtgggaggcggtagtggtgctgcatgggataaaaatggaaacacacacttttgccctctgtacccaaaaggaaatgtcggtggaggcaggcgttcaagctggcctcgtgtttgtggttttagacacagctttgagtcgtgaccggtgtggccaagacctatttcccttgcaaatgctctctctcttttttcggtaactgtgttactaaagttctcttagatactttacatttcctttcacggatttccaaaatttctttctttgagaatgtcaggaccagtaggaggttcagcacgcat

SEQ ID NO: 8139 - DNA, 598 bp, Homo sapiens
  MAP TO CHR16.3; EXPRESSED IN BRAIN, SIGNAL = 1.9; EXPRESSED IN ADULT LIVER, SIGNAL = 2.4; EXPRESSED IN PLACENTA, SIGNAL = 1.1; EXPRESSED IN HELA, SIGNAL = 0.95; EST_HUMAN HIT: BG209929.1, EVALUE 4.00e-58; NT HIT: AE002066.1, EVALUE 1.40e-01; SWISSPROT HIT: P21978, EVALUE 1.30e-01
tctttcacctccgttgcttctttgggctcttctgccctcatctccgtcttcgggagcctggctgggatcacctgctcatcaaatgaaggaagttgaaggttaaacttgcctctgagacgagggatcctcaggggcctgaggtgtccaaacatcgtggagttgcgagcagacagcgcaggtttcttcctcgagggggggctccagaccacaggaggcaggaccctctgtggggtgcccgtgttctgagggctaagacacagcctcataggggcaccatcccacctgtctggaaaagaaggcccaagatgtcgctgacggttgaagagtgggaaatggccccagattccccgggcaggcacaggtgcaggagccgcggggtgagcccggccagctgggaaggcctcacggacaagacgagcaggtggccgatggcatggccaggacctgcggcggaaccaggaacaaaatacgcttagtgagttgcccattttgagcgagttgtgcacagacgaaagtaagggtgagaagcggagaggatactcctaagtcacccacttctctgtggccgggtgcacactgggcatctgggagtttatga

SEQ ID NO: 8140 - DNA, 591 bp, Homo sapiens
  MAP TO CHR16.3; EXPRESSED IN FETAL LIVER, SIGNAL =  26; EXPRESSED IN ADULT LIVER, SIGNAL =  26; EXPRESSED IN HEART, SIGNAL =  61; SWISSPROT HIT: P13073, EVALUE 1.00e-21; EST_HUMAN HIT: AI524229.1, EVALUE 0.00e+00; NT HIT: AF005889.1, EVALUE 0.00e+00
ggtgtgcctacgataatgggattttacttatataaagatctcttgccaaaaacctcaaatttcctacatcaaggaattctatattttcagtttttatataatgtccccttatacaatttaagatactagatttttgccatttcatttgcacccaaaatatatttactccagacccttgggagaaacctattgttttaattagctttcatttaggtatcattaaagaactgatcacaaagggtttcaggtaaactggtcatttattagcagtggtacaactgtttggcataacaggtttccagtaaataggcatggagttgcatggcggtgacagagccaggcgcaggtgcaggcgcaggccagcatctctcacttcttccactcgttcttttcgtagtcccacttggaggctaagccctggatggggttcaccttcatgtccagcatcctcttggtctgcttggccacccactctttgtcaaagctttgcgggagggggccgtacactacggtgtgagacaggttatggggcaagactatctcaacaggttgtttctaggccaatccctcacacaggttaaatcctcccga

SEQ ID NO: 8141 - DNA, 539 bp, Homo sapiens
  MAP TO CHR18.3; EXPRESSED IN BRAIN, SIGNAL = 7.3; EXPRESSED IN PLACENTA, SIGNAL = 8.8; EXPRESSED IN HELA, SIGNAL = 7.2; EXPRESSED IN FETAL LIVER, SIGNAL =  10; EXPRESSED IN ADULT LIVER, SIGNAL = 9.3; NT HIT: AY035074.1, EVALUE 2.00e+00; EST_HUMAN HIT: AI239829.1, EVALUE 1.20e-02
gaatacgtacaacccctgcctcactaccctttatgagacagagcattgtagaaatgatgctccttcaaattccatgaggcagaattcactggaaagagatgtctcacctcaccctgtgtcccattgtctcatttgttttgcgtatcagaatgcaggctatcaatgcacctctgcagctgtggctggacatgttcaagagcaagaatccttacattatctctcttcttggcaccactaatttcagtagcacttgctttcaacatgacccttcatccccaaggtacatgattcactgctaagcaaaaacactttgtgacttattatagttcttataacttaaaattattatacattccaggaactccttaaatatgaggacagaacaatacagaggctgcccttttttcttcttcttcttctcagaggttaccatagataccaagattacaatggcaactgctggcaaattcacctaattggatttagataagggtaaaaaaagtgcaattatcaacctatgggcatggtgttttactgtg

SEQ ID NO: 8142 - DNA, 572 bp, Homo sapiens
  MAP TO CHR18.3; EXPRESSED IN HELA, SIGNAL = 1.5; EXPRESSED IN FETAL LIVER, SIGNAL = 0.95; EXPRESSED IN ADULT LIVER, SIGNAL = 1.5; NT HIT: X95276.1, EVALUE 2.20e+00; EST_HUMAN HIT: AA608832.1, EVALUE 2.00e-01; SWISSPROT HIT: P20480, EVALUE 7.20e+00
cagaggtaggggtggaagtgaagggtattttgtcattccagagacattcagaagctagaatggataggctcgaatgaggcaaatgaaacataagaaagactcttgaataattctgagatttctgttttagataactgagtgggtgaaggtgtcaacaattactaatgaaaaaagggcaaatatggcacagaaatcggatggtaataagcttggttttgatgaattaaagttcaggtgaaaaagctagactataatattggggtacagaagagagatcaagtttaaatttaaaatatataggtagctggtgaaggcacgtgtttagacaagattgtccatggaaagtgggaagggctttgggtcaaaggtgaaaccctgtgaaaaatcaacacttaagtttttctagatgtggcgaatgggtagaagaatgtgtgaagagtctagggaggcaggaagagaatcaggaacaaaggcattatgaagtatcagatgtgagagctgatgatgaggtcaaatgtgctggagaaagtccatggatgaagtctgcaaagtgtcaattgtgctgcacttgc

SEQ ID NO: 8143 - DNA, 535 bp, Homo sapiens
  MAP TO CHR16.3; EXPRESSED IN BONE MARROW, SIGNAL =   1; EXPRESSED IN ADULT LIVER, SIGNAL = 0.96; EXPRESSED IN PLACENTA, SIGNAL = 0.84; NT HIT: AB015317.1, EVALUE 1.00e-111; EST_HUMAN HIT: AL045231.1, EVALUE 1.00e-111; SWISSPROT HIT: O43747, EVALUE 6.00e-24
cttcgctaagctggatttggcagtcttgaattcttaaaaactagtcaaaaatttaaatgggaagttgtgtgaatagctttggtagtaaaaaatgtgaacatctctatttaatgtctttccatatccagaggatgccagcccccatcagattgcgggagctgatccggaccatccggacagcccgaacccaagctgaagaacgagaaatgatccagaaagaatgtgctgcaatccggtcatcttttagagaagaagacaatacataccgatgtcggaatgtggcaaaattactgtatatgcacatgctgggctaccctgctcactttggacaggtaggctgggctgagactacatgtagcaagggtattctttgacattgttgctcagggattgtccatctttttctggtggggaggtacttttgatagccttgtagtctgatcattgtggaactgagggtaagattgagagagcaagccacagacctggaaaggcatgatattgctatcaattatcctttccactgggagtctca

SEQ ID NO: 8144 - DNA, 558 bp, Homo sapiens
  MAP TO CHR18.3; EXPRESSED IN PLACENTA, SIGNAL = 1.6; EXPRESSED IN LUNG, SIGNAL = 2.1; EXPRESSED IN BONE MARROW, SIGNAL = 2.5; EXPRESSED IN FETAL LIVER, SIGNAL = 1.8; EXPRESSED IN BRAIN, SIGNAL = 2.2; EXPRESSED IN ADULT LIVER, SIGNAL = 1.7; NT HIT: U62542.1, EVALUE 5.30e-01; SWISSPROT HIT: O35893, EVALUE 3.10e+00
catttgcatctggtgtctgcatgcactgcagcctcttgtgctctcattccaagcatccctgggtcctctactaccctctgcacctctaggactatcatggcagcaaggagaacttctaattttttgcattctctgcctcagggacatttatccaagcctcctcttaccatcacctccatgttgagtgaagtgtccagccaaaagcttagtacttccaggagccctaggcatccaccaattctgatgctttcagacttcttctgatccaccctcatgtttccatggccatctccccagctcaaggtttggtcttgagggatgtgggacagcatttattttacttgtctgtcctggcatttgatttttatttgactttccctaagtcatggccttctccttctgattttatcctcatgactcaatcctaaaaactagctagtgtgcagagagagaaaccagcatcccaaccgaggaacacaaattacagggcatttccaaatcaacatgtctgcttcctgttttatagacctgtataaagcctcctcatccttctcctcc

SEQ ID NO: 8145 - DNA, 506 bp, Homo sapiens
  MAP TO CHR14.3; EXPRESSED IN PLACENTA, SIGNAL = 3.5; EXPRESSED IN ADULT LIVER, SIGNAL = 3.6; EXPRESSED IN HELA, SIGNAL = 3.1; NT HIT: X57678.1, EVALUE 1.20e-01; SWISSPROT HIT: Q94819, EVALUE 1.60e+00
ggagagaagcacgtttggagtggtgatggttttgtaccgtaacgtgtagcatccaatgtacaaatgcctatgagagtcaggatggctatcagtgccgttaactgcatgggcgacttacagtggcttctatttgttttttaatcataactgaaaagtcacaaatttgaaccagcaatctctaggcaaaatcatcatcatggttcctacccccacttcttgctcacttggcctccaaataagtggcattcttggattgtcttctaatgagctggctgatggggctgcaagcaatctatgctttcgattaatcagccaaggggaaactagagccgcaaaaaaacaaactactggcattatcaccacaggaacactgggcatgacaatgatgacgtagtgctgatttacctccagcaaaagacatactactgcactttcctgaaacttggaagaggggcattcaccctaagagagaaattttcaccctacctgtgaccctcccaactcat

SEQ ID NO: 8146 - DNA, 585 bp, Homo sapiens
  MAP TO CHR14.3; EXPRESSED IN FETAL LIVER, SIGNAL = 4.8; EXPRESSED IN ADULT LIVER, SIGNAL = 3.1; EXPRESSED IN BRAIN, SIGNAL = 3.4; SWISSPROT HIT: Q9HQD6, EVALUE 7.40e+00; EST_HUMAN HIT: BF356892.1, EVALUE 0.00e+00
tgtgcaagtggacatgtgtgtatttactaaactctgtggacctggaaatacattctgatatgactatcaggaacaatgtgattacttctgaaaccaacttccttaaactctcatgtataaggtagctatacacctaggatccctcttaaacacttactacttggttgggtaattctcatgaataacagaagcttgaaaattaacagagtattggattcagtgattgtacaagagcagtggagttttctccacaaagtagagaaaatcatttgtgtattgttatgcaaatagcttacagaactattaataattttgttttctttaatttgtaatttcttatgtaactagtccatttgctttcacccagtgatgagcatcttacctgcttcactcggtagcgctccattcctaatctttttaaggacaaattcatcaacttggcgttaaagtctatcagtaacatgatcccagctacttctccagattcctcttgagctgtccttactacatgtgcactacactgcagccacactgtgtgacttattccctggggtttctattgtttctgccttgcttttctcatcc

SEQ ID NO: 8147 - DNA, 559 bp, Homo sapiens
  MAP TO CHR18.3; EXPRESSED IN FETAL LIVER, SIGNAL = 1.6; EXPRESSED IN BRAIN, SIGNAL = 1.7; EXPRESSED IN ADULT LIVER, SIGNAL = 1.2; EXPRESSED IN PLACENTA, SIGNAL = 1.4; EXPRESSED IN LUNG, SIGNAL = 0.99; SWISSPROT HIT: P24578, EVALUE 2.40e+00; NT HIT: AF287911.1, EVALUE 1.30e-01
agagctgagaggactgcctggggctttgaaagcagtgatcctggagagaccctgtggctggaggggcagtgtttccaagaacagtctagcatgagggagcagctgtgtggcactcaccgcagtaggcttggggagccagcgtttgggcaactcccaggctctaacttcctgcttccatcaacatgcttctcattgtaattcactttttcacttttccagagcctgctggacaagaagtttcccactatagaccatgagcattcttttctgttgccatccaccctcagggtttgaaaattatgaaccccgttgctggggcagagcaactttggagtgatttgaatggtgatcagcaggtacaaatatctgaacaccatattcttcctggacactttataattcttattagtttggcataatctttcctgacttttcagaaggaccatgttattcagtggagccttgcattcagataaccttccaaggagactctggtacttagagataccatgtttgtaactcttaagcggcctgttaaagcctttaatgagttgctggc

SEQ ID NO: 8148 - DNA, 515 bp, Homo sapiens
  MAP TO CHR19.3; EXPRESSED IN HELA, SIGNAL =  17; EXPRESSED IN HEART, SIGNAL = 3.9; EXPRESSED IN FETAL LIVER, SIGNAL = 7.5; EXPRESSED IN ADULT LIVER, SIGNAL = 4.7; NT HIT: gi14759311, EVALUE 2.00e-92; SWISSPROT HIT: P54726, EVALUE 7.00e-33; EST_HUMAN HIT: BF736815.1, EVALUE 0.00e+00
tgactcaggaggaagttggcagccaagttctcatttttttcacacgcgaaataggcctggatgaccaggctctctgggaagcccagggccttcaactgtgggaagataggttaagtgtgagcaggagagggtaggggtcctgcccacctgcagtcacccctcagccaggcctcttaccctctctatagcttctttctcctgcggcgtcacctggatgtagttcatctgcggggcctcctctcctatggcgcccacctccccctccacatctgagatgtccgccagctccccagggggctcgttcagcatctggatgaactgctcctggtgccggctgatttgctgcaggagagggtggggaagggaaggtaattcacagccctggtcccctcctctccccaggtcatcacagcccttgctttttcattcagtcaggcaaatatccagaggagcctgttctggccaaacacaacatagcagtcgacacaagccctaccctggaagagctgatgatg

SEQ ID NO: 8149 - DNA, 595 bp, Homo sapiens
  MAP TO CHR19.3; EXPRESSED IN ADULT LIVER, SIGNAL =   1; EXPRESSED IN PLACENTA, SIGNAL = 1.5; NT HIT: gi14766369, EVALUE 1.00e-72; SWISSPROT HIT: P28700, EVALUE 2.00e+00; EST_HUMAN HIT: BG740598.1, EVALUE 2.00e-72
acctttggatatgggggttcccaggagatgcccccatcctgtggatagtgaaacatggcaggagggaatgtagctggtgcccaggccaggaggggtatctagtaccttcacagacccaggcaggcagcagtggcattcctgaggcttgtgtccctgacctgggtatgtgtaggggtgcaggtgtatggggccaccccaggagcaggccttatatctctcccccaaccctcccaccccagactattccctgcaccacatcagccagttcttccgttcccactacatgttcctgttccagctgccctggctgcccgagaagctgctgtctatgtctgactttcaggtacagagggtgcaggttgaagggaggagggaagcaggtcggggctgggcaggctgggcactgaagccagagtcctgctgtgtacctagattctgaagaccaccctcacccaccgcaagacaggcatcccatgcttgacccccagcgagctcgaggccttcctttataacttctcacagcctggtggcctcactgggcccctcaactactaccgaaacctcttcaggtgagaccagttgccaagcataagct

SEQ ID NO: 8150 - DNA, 503 bp, Homo sapiens
  MAP TO CHR19.3; EXPRESSED IN ADULT LIVER, SIGNAL = 2.6; EXPRESSED IN HELA, SIGNAL =   4; EXPRESSED IN HEART, SIGNAL = 4.4; EXPRESSED IN LUNG, SIGNAL = 3.4; EXPRESSED IN FETAL LIVER, SIGNAL = 4.9; EST_HUMAN HIT: BF751301.1, EVALUE 1.00e-51; NT HIT: gi4758771, EVALUE 3.00e-36; SWISSPROT HIT: O95167, EVALUE 1.00e-10
ctgcttaggaaagacctgcccataactgcccttacgccagcacagggaggctgggcctattccggggatccctgcctggcccccactcacctgggtagttgtagggcgtggccttgttgatcatgacggagtacttgaagtaggggctcaatgggggcagaattacagctgtggagagacacaggggtgaggcccaggggaaggtggctctgaagagaggggaagagaaggtgagccttggcaaagggaagataaagtgcgcagggggagggcagcagggagggccagcacgtccaggaggatccttggtaccttgggatccctacttatagacaggagggtttaaaactcttttttggggggttaagtggaggtaggggttggagcctaacactcacagatacgtggggcctggaggaggcagcagtggggttggtcatggaatgagcacgtttgagtgtagggtcatcatggagcatcctgggggtagtgtcatgggactg

SEQ ID NO: 8151 - DNA, 583 bp, Homo sapiens
  MAP TO CHR18.3; EXPRESSED IN FETAL LIVER, SIGNAL = 1.3; EXPRESSED IN ADULT LIVER, SIGNAL = 1.4; EXPRESSED IN BRAIN, SIGNAL = 1.4; EST_HUMAN HIT: AI360404.1, EVALUE 2.10e-01; NT HIT: gi15320657, EVALUE 2.20e+00
tttggcagctgagaaaaaggactccacagtgatgaacttaccgaggactggggcagtatgggacaggtgtttgtccttggttcttccagctccagcaacagtttggttttgctgtgatctgttcttagcagcttctctgctcatgttccagcctgtgaggaacaaggacatcttgttatatttctatttgagccactgcagttttggggccctgtcacttacatccctatttttttttctttgcaactgtatggggccatgattttatctccatttctttccacttcttctttaagaaacttttcatgctaatgttttgagttgtttgtacactccagccctcaccaaggattgcaaagggcaggaagggctctgctccatgggctaaggactttgtttgacatcttcataaccagcagtgctggtggtcaccacaccacgtaagagccaaggatacaagtccctgttcaaggtgggcagtctttgctatgcactccttttttcagctgacactgtccatataaggcaagtagaaagtgtgaactgagcacagaataagagtgcttcattctggctggaggag

SEQ ID NO: 8152 - DNA, 509 bp, Homo sapiens
  MAP TO CHR14.3; EXPRESSED IN LUNG, SIGNAL = 1.2; EXPRESSED IN ADULT LIVER, SIGNAL = 0.99; EST_HUMAN HIT: BF203489.1, EVALUE 7.10e-01; NT HIT: AF043195.1, EVALUE 1.20e-01; SWISSPROT HIT: Q12389, EVALUE 3.60e+00
acacagtggttttcaagggcttttcccacatccagttctcctgctggaaattgctcttactgagcactagctctgttcagaaacatggccctgctcgatttccatggttgccacaagcttccttatagagttttctccagagcagaaaagcattttctgcaggtgattttcccctttctgttgtaattccaagtctctcttccaccccgcccccaactcttcattttccggtaactgccaagaaaaacctctctctgatcctgctgttaccacacctcatggagccggctttggccagcaattgtgatgctcctgacagcgtttccattgtcagctcttttaaatcccagcatctgcagcccgttttctctctgcggtatggttttgcttccctgacatgctgcctctgctaacaactgctccagtttctctactgctggtgctgtggcttctcctgtctgtctgggcccagtcactcctggtgggggacaggggttggttgaacaagt

SEQ ID NO: 8153 - DNA, 556 bp, Homo sapiens
  MAP TO CHR19.3; EXPRESSED IN ADULT LIVER, SIGNAL = 2.4; EXPRESSED IN BRAIN, SIGNAL = 3.2; EXPRESSED IN PLACENTA, SIGNAL = 2.7; EXPRESSED IN LUNG, SIGNAL = 3.5; EXPRESSED IN FETAL LIVER, SIGNAL = 2.8; NT HIT: AF166267.1, EVALUE 1.00e-07; SWISSPROT HIT: O88448, EVALUE 1.80e-02; EST_HUMAN HIT: BG389193.1, EVALUE 0.00e+00
tatcacaggggagatgggagccatggaaggttcttgagcaagatgggggtgggggtggggtgggctgtggattctgctgatgtcagggctctttgccgacctgatcaacactcacccggctgctcctgccgccgcctcgcctcggagccgggagaccagcttctcacttcctcgcctgatagactcacggatcttggagagtgagctgctgcggcgaagggcctggggaggggccggggatgctgctcagtcccccaggcccatgcagtccccacgcccaccccaggagccgaagcacagcccatcctcacctgttctgcgtcaccagctgtgcctgtgttgggggcacctagggggaaagatgggggacactgagatggggacatagagaagccaccaggagggaagacagacaggggctaggggctcaccgagaggggcgggtaggtcctccttgtggaggatttctttgtacagctcttccgcttgttgatacttgttctgtttcaggtaggctgaggcctgcggagaagggagtgtctgggaacttttcgga

SEQ ID NO: 8154 - DNA, 568 bp, Homo sapiens
  MAP TO CHR18.3; EXPRESSED IN BRAIN, SIGNAL = 1.3; EXPRESSED IN ADULT LIVER, SIGNAL = 1.4; NT HIT: gi6754627, EVALUE 5.40e-01; SWISSPROT HIT: P24278, EVALUE 9.30e+00; EST_HUMAN HIT: AI186121.1, EVALUE 2.00e-01
gggccataatgtgaggtgtctgtctgcccaggcctctgatgatctttaagagaaaacagaactctcccactgagctcatgttttccacgtatgcctcttcctgattcccaagtcacctgccctttattcttagatctttcaattcagtatcacatggccgtttcctcagggcagcaggcattaaatatcattgtcttggagtgatttggaattcagatccctagaacctagagtttctatccttttctgcctctggaatcatctcccttcccccagtcattggagttgggcactttccttttttataaacactcaaaaatgaaaagtactgaccccatcaattctgctgtctcaaactggagcttaattccttgtatgagacccatatgttcaaaactgtctagcttgggggtttcttgagggagtaggcttgcatgctttgattccataaaaatctgattattttctccttcatctaagcctgggaatgggaaatagaaactaagggatcatttcctagccttactagtgagacactatctctattcccgaagcagagagaaaaagc

SEQ ID NO: 8155 - DNA, 600 bp, Homo sapiens
  MAP TO CHR14.3; EXPRESSED IN FETAL LIVER, SIGNAL = 0.78; EXPRESSED IN LUNG, SIGNAL = 2.7; EXPRESSED IN ADULT LIVER, SIGNAL = 1.2; EXPRESSED IN HELA, SIGNAL = 1.7; EXPRESSED IN PLACENTA, SIGNAL = 1.1; EST_HUMAN HIT: AU155656.1, EVALUE 3.00e-03; SWISSPROT HIT: P24307, EVALUE 3.40e+00
ctatgtcacccaccctgtcctctggatggaagtatggtttttctgtcatcattctgcaaaatcaggatttggtgttgaagagggtatcttcaccatcaatcattccagctgcctctacactgactagtagcatccataacatattttaatgccagaaaacaaatagtagtgctaatttcagttcaattttcattctctgcagaaagtgtatcataaatgattattggtatataaaaatacatgctccagaagatacagagatagatacttgtaaaagtgaactaaaaatttttgcactttctgaacaaagcccacctcttttaggttgtaaccttgccaagaaaatgattgtcctttacaatattatgtatagttatatgctttatatttatggaaatctgatgtgtgacacagaacgcatagtgttggtaactgtgaaacttttttcttgggcaaatatcctcagagaagtgaatcatgatttttaattaagaaacttcaattgcataagtcctactttctgaatattcaaggtctttaattttaatgcaataccactttatatagctgccctagaagcgaggcaaactcacagcgatt

SEQ ID NO: 8156 - DNA, 545 bp, Homo sapiens
  MAP TO CHR18.3; EXPRESSED IN PLACENTA, SIGNAL = 1.2; EXPRESSED IN HELA, SIGNAL = 1.5; EXPRESSED IN FETAL LIVER, SIGNAL = 1.5; EXPRESSED IN BRAIN, SIGNAL = 1.3; EXPRESSED IN ADULT LIVER, SIGNAL = 1.4; EST_HUMAN HIT: BE785466.1, EVALUE 2.00e-90; NT HIT: AJ318054.1, EVALUE 4.00e-94; SWISSPROT HIT: Q9UPE1, EVALUE 9.00e-25
acacttggcagaaatggctctcttctcagggatcagcttcaccatgggcagtaagaaatctgtgaagccagctgcctcttcctgagaaacactcatacttctccagtagaacctcaaaaaaacccaaggttttcagctttgtgatgtgtttcaggtcacatttttggtgaaaaattccttggaatgcttccctggcacagtgagcttgtgagtcaccttccccagaagttctgtgatcaatgcaatgtgatcttcatcttgagtgtgctctttccctgaaaggggttcaagcaaggagtcacctgtagccagctcaaaggccatacatgctgaactccaaatgtcagcagggtgttatagccagaccagaaaacatagaaacaaaaggcccagttttcataattgacaggacattttaataaggagagagaacctgtaacttcatttggaaatgcttctccagcaaataagggctttctccactatcatttaaggaaccagatgaattagaagatgtagaaagctgcacctgtggaacctgatct

SEQ ID NO: 8157 - DNA, 519 bp, Homo sapiens
  MAP TO CHR16.3; EXPRESSED IN ADULT LIVER, SIGNAL = 2.3; EXPRESSED IN BRAIN, SIGNAL = 1.2; EXPRESSED IN HELA, SIGNAL = 3.2; EXPRESSED IN FETAL LIVER, SIGNAL = 1.3; EST_HUMAN HIT: BF791601.1, EVALUE 5.00e-79; NT HIT: gi14776462, EVALUE 3.00e-79; SWISSPROT HIT: P54851, EVALUE 3.00e-21
cctttccaaattctccctcctcctggcttccctcctggcggctgggaagggagtgcttattccagaaagccccttgttagggaagcccgttgatgtacttacatgacattagctggatgatggaggttaggacaaacctctctccctgcttcaggcggaagagctggagcacgaagatgaagaaggcgatgcagcagagaatggtggagaggatcatggtggcctggaccgcctgcagcgtggagtactctgcgggaaaagggcaggggcgcaggactgaggaccttggccagccggcactgtggggtacacagcgaccgcagcagctccagagtaggtgtgacaggaggcaaacaggaaggggttcaggcggtcgtctacatggtctgagcacaagggcagccaaggcgtcttccagaccccctgcccctcacctccagtgtccatttgactggacaatcctcgaccccttatctggaagacgaggcaagaaccacctgctctgcattcttcctggtc

SEQ ID NO: 8158 - DNA, 587 bp, Homo sapiens
  MAP TO CHR16.3; EXPRESSED IN HELA, SIGNAL = 0.99; EXPRESSED IN LUNG, SIGNAL =   1; EXPRESSED IN BRAIN, SIGNAL = 1.3; EXPRESSED IN ADULT LIVER, SIGNAL = 1.1; EST_HUMAN HIT: BI835834.1, EVALUE 3.30e+00; NT HIT: gi9910569, EVALUE 8.70e+00; SWISSPROT HIT: P22987, EVALUE 1.10e+00
tccctgaggcacaggttaagacaggtggacattcttctgtaaacagtggagaagtcacaaaaggtttctgaacagaagaagaatctgattggatatgatgcttataggggagctggactgggaagacaaaactcaggtttgaaaagctggtgggaagatgtggagcagtcaagacgagaggtagcaaagagaggtgctgaaagtggaaagagaaacagggccctacctttaaacagcctgcagggtgaatccacgtagatgtgatcatgtggtacggtaccattaggccaatgcatgcatttagcaagactcttctagagatgacggcttcaatccaaagggctattatggtgggaagtgtatcccagtaggtagttggggaagggcgtctttctgggagggaagacactggagcctctcaaatcctggcaaagcgactcctgctttccttagcttcccatcaccagagagcacctttctcaaccacatcaaccagataagaaatgaaaagacagggatttttttttgttctgttccatcattggtgtccttgtctcttccccttgtgcccatgttctaacccagaa

SEQ ID NO: 8159 - DNA, 552 bp, Homo sapiens
  MAP TO CHR14.3; EXPRESSED IN HELA, SIGNAL = 6.2; EXPRESSED IN HEART, SIGNAL = 2.1; EXPRESSED IN FETAL LIVER, SIGNAL = 6.6; EXPRESSED IN ADULT LIVER, SIGNAL = 3.8; SWISSPROT HIT: P55010, EVALUE 4.00e-18; EST_HUMAN HIT: AU134403.1, EVALUE 0.00e+00; NT HIT: gi14754020, EVALUE 0.00e+00
cgatgatgttaaacctggggggatttttgtgtgttctttccctttttctttcagagctgttgcgcagccattggtacctgtattggggaaacatagcatacaagcaagaagcttacagcctcagtggcgaaaattttttcatgtcagagaccgagaactcttgcagtcgtttatgtcatcccttcttctccagacagaagataccaaaaagttgcaatcaaagatctcttcatcttattgataaagccactaataagccaaaatgtctgtcaatgtcaaccgcagcgtgtcagaccagttctatcgctacaagatgccccgtctgattgccaaggtaataaactgctcttcaatttagttgatagctctttttgtagaattttgaagtttgcatttgtcaggggaaactgcacaactaaaattcttatttcctttaggttgagggcaaaggcaatggaatcaagacagttatagtcaacatggttgacgttgcaaaggcgcttaatcggcctccaacgtgtaagtaaagcttggaaaagtccacagggcata

SEQ ID NO: 8160 - DNA, 504 bp, Homo sapiens
  MAP TO CHR19.3; EXPRESSED IN LUNG, SIGNAL = 1.8; EXPRESSED IN ADULT LIVER, SIGNAL = 1.1; EXPRESSED IN PLACENTA, SIGNAL = 1.2; SWISSPROT HIT: Q61345, EVALUE 3.10e-01; EST_HUMAN HIT: BI054423.1, EVALUE 5.00e-82; NT HIT: AL115033.1, EVALUE 8.00e-03
attttggggctctgggtgctcggtcagcccctccctgcccgcactggccaggccctgacaccctggcgtctgctcctccacccaggtgaaatctgaacggagcagaaactctcgcaagtggtgccgccgccggggcatagaggagcatcgactgtacgaaatggccaaccttcggcgccagttcaaggtgaggctcgggaggaggggtaaggccggccccactcaggcagacgtgtgtaagcacactccagaacactgcttccccttcccggacagtggtcagaccagaatcccaccctgcacccacctcccccaccacccggtgaccaggtgttggggcagctgggcagagcaaagggagcagaaatccaggagggcttcctggaggggtggaccgagtcagtggacatgcagcatcctcgggaagagctcgccctccggactggggatgctgagctggctgcatgggcatggtgttggaggcagcctacggttgtggttggc

SEQ ID NO: 8161 - DNA, 542 bp, Homo sapiens
  MAP TO CHR16.3; EXPRESSED IN HEART, SIGNAL =   3; EXPRESSED IN HELA, SIGNAL = 3.6; EXPRESSED IN LUNG, SIGNAL = 3.2; EXPRESSED IN ADULT LIVER, SIGNAL = 2.6; NT HIT: gi14775465, EVALUE 1.00e-121; SWISSPROT HIT: P14380, EVALUE 8.80e+00; EST_HUMAN HIT: BI826802.1, EVALUE 1.00e-121
tgtgaaaacagctggtcctgatttagaaggagaacgctatactttgattttaagtgattggagaaaagttagcactaagagctcagtttttttttttttcaattctttttttttcttctataaaatttcagcttaactcttctactcacttcagtatattaaccagtagtcccagaatttaaagtgttcttgggtttataagattacctttgggattgggagagggataactgaaatcgttttgtgctgtctttcctttttcctgtgactgctggtgattaggaagagaagacaaggtggcctctcattagaagaagaggaagaggaggatgccaattcagaatctgagggaagcagtagtgaggaggaagatgacgctgcagagcaggaaaaaggcattggatcagaggatgccaggaaaaagaaggaggacgaactctgggccagcttcctcaatgatgtgggaccaaaatcaaaagtgcccccaagtacacaagttaaggtaagttgagacattagtgaggtgaatgcctctccagaaa

SEQ ID NO: 8162 - DNA, 559 bp, Homo sapiens
  MAP TO CHR14.3; EXPRESSED IN HELA, SIGNAL = 3.6; EXPRESSED IN ADULT LIVER, SIGNAL = 2.5; EXPRESSED IN PLACENTA, SIGNAL = 1.3; EST_HUMAN HIT: BG714268.1, EVALUE 1.00e-102; NT HIT: gi4758037, EVALUE 1.00e-100; SWISSPROT HIT: P12787, EVALUE 6.00e-36
gaagaaggcagagtggcatcctaacagggaatgaaagcacaagaagtttggacaggaaatgaaaattatatatacagagtcaggaagaaaccctcctgaatggagagaaatttggacagatcagttggaagtgattaagaaaagtttcaacccgccagctccggagcagcccgcgagctcacgccaggcctctctctagcctcagcctgcgatcttactaggcacagctctctggccctcgaggccttctgcacccagctgtgacccccgcccggccgtggctatccagtcagttcgctgctattcccatgggtcacatgagacagatgaggaatttgatgctctccgggtaacatacttctacaagccagatatagatgcttgggaattgtgtaaaggggtgaacacacttgttggctatgatctggttccagagcccaaatcactgatgctgctttgtgggcattcagacagttatatgattttgctagtgcagttggcatcctagaggctgttaaggacaaagcaggacctcatagggaaatctgcccctatgtca

SEQ ID NO: 8163 - DNA, 594 bp, Homo sapiens
  MAP TO CHR18.3; EXPRESSED IN ADULT LIVER, SIGNAL = 0.92; EST_HUMAN HIT: AV721423.1, EVALUE 9.00e-07; NT HIT: AF349446.1, EVALUE 1.00e-105; SWISSPROT HIT: Q28614, EVALUE 1.00e-28
actcatcaccgctgggtaacttaccaggggcatttccatctctgtccaggtgatattgggcactgaagacacaggctctaccagtgttgtggggaagaagaggttgtagtggcctgtggctgcaaggtacaaggtgactgcaatgttgaagggcagagtgaagaccgggaggtcccacttgctgaagatggaattcaaggcactagaaagaactgggctgaagatgcaagagacagagggttaatccctgtgacatcctgaggtctacattgtctcagcagctctggccactgtatcatccactgcctcctctcctaggcacagcattcctggcccccttgagactccagtgttccaatgatctgggatagggaatagaataaggtattcaatttcagctcttacctttttcttttttttttgccaatttattgtcatctgcttcataagcttacacctctgagaaacaaattttaaaaatatcgtaacttattttgagtaaaacactttataaaatagtggaaatatttccttgttttttaaaccaagaaaactaaacaaaatgtaatgtattgcctttgaatcaccaaggtg

SEQ ID NO: 8164 - DNA, 510 bp, Homo sapiens
  MAP TO CHR16.3; EXPRESSED IN ADULT LIVER, SIGNAL =  12; EXPRESSED IN PLACENTA, SIGNAL = 0.82; EXPRESSED IN FETAL LIVER, SIGNAL =   1; EST_HUMAN HIT: AV691928.1, EVALUE 5.00e-88; NT HIT: D21084.1, EVALUE 2.00e-77; SWISSPROT HIT: Q29550, EVALUE 1.00e-17
actctccgaagggaaactggaccagaagacagccatgtcactcttctggaagtcctatccctttgttgtaagagtctaggaatcacgggaattggctaggacccacagagcgacaaggattgcccaaattatagagcaattaaatggccgaatgaagactggggcctcagggtttctcccatctttccacctttcccacttcactttccaccctagcggggagttgcacagggcttgtgggattcaccattgaggcagcccttcctggtgggctggagaagctacatcgctcaccagggggtggttgtcactttattgatctattttagcgcattcctaaggaattgattccagaagccattgagaagtacttaggaggaacagatgaccctgtcaagaagaaagacctgttcctggacttaatgggggacgtactgttcggtgtcccatctgtgactgtggcccggaaccacagaggtgagtcctagaggtcgaacaggggagggatat

SEQ ID NO: 8165 - DNA, 582 bp, Homo sapiens
  MAP TO CHR14.3; EXPRESSED IN ADULT LIVER, SIGNAL = 0.92; EXPRESSED IN LUNG, SIGNAL = 1.1; SWISSPROT HIT: P55583, EVALUE 5.60e+00; EST_HUMAN HIT: BF885867.1, EVALUE 6.00e-82; NT HIT: gi16162543, EVALUE 4.00e-82
ttcaattctggactcccctgatttatatcaatatttctggattcctttctgtaccaagattttatttatgtattgtgatgatctctttctctctctgctttcctctttttgtgtcagctgttctctggtgctgagcacttgaaatctctaagactctcaaagaggcaagcattgagttgatctgaatttatccagcttgctgaaaggtaggtcacacatttataaggatacattttcattacataagttagaagccactccatattcttgttacattagccaaaggggtactgatcctgcttcaagcaccagcatccactcaggatgttgctctctgacttgggggatgcaaggacatacctttcacttgcacgaaatccagctggtggatggattgcagcagagggctgttgtccagactcaagtcaaagtccgtggtcatccttggagtgagtgtgcctttaccccactgatcctcagtcaggtgcactcttcttatgagggcgtcagaaatctaatcagataaagaggaccacagcctaagaaatacaccaccacacttgaaacacaacactgcccctt

SEQ ID NO: 8166 - DNA, 509 bp, Homo sapiens
  MAP TO CHR19.3; EXPRESSED IN LUNG, SIGNAL = 5.3; EXPRESSED IN ADULT LIVER, SIGNAL = 3.2; EXPRESSED IN PLACENTA, SIGNAL =   4; EXPRESSED IN HELA, SIGNAL = 5.1; SWISSPROT HIT: P05128, EVALUE 2.00e-11; EST_HUMAN HIT: BI490011.1, EVALUE 3.00e-40; NT HIT: gi16162962, EVALUE 2.00e-40
tttctgtctgctggggtctcccgctggactaatccatgcctccgtctgtgtctctatgattttcatctatagtctgcagctttgtggttcatcgacgatgccacgaatttgtgaccttcgagtgtccaggcgctgggaagggcccccagacggacgtgagtgctcggacacctggttctcctcctcgggccgtgcccccgccctcaccccctcggcgtccgtcccaatttctcctgctatttttatggctgggaggggaggggggctggagagatagggggagctatctggcccagattccttgcccttggcctggaaagggggaatgcgagggggactgacaggctggggacacgggtggggcacagagaggaggccggggtgaggagactgaagatgggtgctgccgggggtgggctgtgatccaggggtgaagggatttaaaaattgagagctgaggggcacacggagaaaaatatcagtgcaggtgcggagatgccaacataaga

SEQ ID NO: 8167 - DNA, 590 bp, Homo sapiens
  MAP TO CHR16.3; EXPRESSED IN FETAL LIVER, SIGNAL = 2.1; EXPRESSED IN BRAIN, SIGNAL =   2; EXPRESSED IN ADULT LIVER, SIGNAL = 1.1; EXPRESSED IN PLACENTA, SIGNAL = 1.6; EXPRESSED IN LUNG, SIGNAL = 3.9; NT HIT: D84188.2, EVALUE 1.40e-01; SWISSPROT HIT: P13360, EVALUE 1.50e+00; EST_HUMAN HIT: AW291002.1, EVALUE 0.00e+00
gtttgcctgtaagtgcatggggcctgctggggccgccccttctcagcccttctgcagtggctctccagccagacccactgcccagcactgcaggtttccaccaccgcgtggccccaaataattcccctgtgaagagttcctaagggcacagatgccatgtcggggcgtggaggtttctgactagaggcagagcccgagtagaaacaggtctgaacggatggaactgcaggctgggccccggggtgggatttggaacttcctcctctctttaacaccaacttacaaccaaaacgtctacatctgttttaaaaagattaaaataaccctcaaaatggctgagaccacagctctcgaatgacctccctgacatacgggtgacgcagctgccctcaccagctcccgtagatgtgggctctgccgggtgttccttgcaaggcgcccgcagatgccgaggcagacagaggagaccaccaagatgcccaggtcaggggccaccagccggatggcgttggggatgtccttcaggtccagcctgcggagagcagggagcagccgcggtcagaccaagaggacaggtgtgggtgtgagtg

SEQ ID NO: 8168 - DNA, 597 bp, Homo sapiens
  MAP TO CHR18.3; EXPRESSED IN BONE MARROW, SIGNAL =   1; EXPRESSED IN BRAIN, SIGNAL = 1.6; EXPRESSED IN ADULT LIVER, SIGNAL = 1.6; NT HIT: gi16165088, EVALUE 3.00e-09; SWISSPROT HIT: Q9Y5Q5, EVALUE 2.00e-03; EST_HUMAN HIT: BE185505.1, EVALUE 4.00e-09
accgtttctgaaaatcgcacggcagatcatttatctcagtttgtggcaaattattctaatcttttttttttagatttgtaatgtgagtgatttactactgaatgtcagttataactttcctcctttgtcttgttcttcttctttttagctccttgtgaaggcaacacattcttctgccatagtaacatgtgtattaataatactttggtctgcaatggactccagaactgtgtgtatccttgggatgaaaatcactgtaaaggtaatgattagtgcctgaaatttgaaaaaaatttcctccctgtggagtggggtagaagtttatatgtatcaatcagacagtctttaaaataagagtgtatagtgccttttatgaccaccgcatatgtcttataattgatttgtaagcgtttttcttagcctttactcatgctctgtccagatgttccgttattagtgcacagtggactatcctcagtacttgaattctcattaaagacatcaccttattagagcctgcagagctatgaaaacgggagctttcaggggagcacactactttcctgtcatgtgtgatgctgtctgcttgtggctaca

SEQ ID NO: 8169 - DNA, 593 bp, Homo sapiens
  MAP TO CHR16.3; EXPRESSED IN BRAIN, SIGNAL = 4.7; EXPRESSED IN ADULT LIVER, SIGNAL =  14; EXPRESSED IN FETAL LIVER, SIGNAL =  40; EST_HUMAN HIT: AL583483.1, EVALUE 0.00e+00; NT HIT: gi15718686, EVALUE 0.00e+00; SWISSPROT HIT: P17073, EVALUE 4.00e-42
gtgagaacagccagggattctggaattgactgctgtagttcagaagagatttggcttcccacagggcattgtagagctttatgctgaaaaggtggccccagaggtctgtgtgccattgcccaggtcgagtctgcagtacaaactcctaggagggcttactgtgcggagggcctgcgatggtgggctgtggttcatcatgaataggggggccataggctgccaagctgtggtttctaggagactctgaggacagagggtcaaatccatgagtttgtggatggcctgatgatccccagcggagaccacgttaactagtacattgatgctgttgtgtgccatgtgctgctcagatagggttttctgggcatcaaggtgaaggtcatgctgccctgggaccccgctggtaagactggccctaagaagcctctgcctgaccacgtgagcatcatggaacccaaagatgaggtagtgcccaccactcccatctcagaacagaagggtgggaagccagagccacctgctatgccccagccagtccccatagcataacgggctgtccttggcagttgtattcggagtctggatgttgcttt

SEQ ID NO: 8170 - DNA, 500 bp, Homo sapiens
  MAP TO CHR19.3; EXPRESSED IN ADULT LIVER, SIGNAL = 1.3; EXPRESSED IN PLACENTA, SIGNAL = 0.89; EXPRESSED IN HEART, SIGNAL = 2.2e+02; EST_HUMAN HIT: AL532430.1, EVALUE 8.00e-81; NT HIT: X90780.1, EVALUE 0.00e+00; SWISSPROT HIT: P78688, EVALUE 2.70e-02
cctggaaggagagaaaccaaggaggggggttagtggtgggctgtgtcctgtctcctaagggacccctggagtcccctctgaacaagaggtcgggggaccgcgcttccccttccttgggttccaggagtctgactcgcaaacccacttcctctcttcacccaagagtccctacgcctacctcgcaggccaagggtccagcctctcagctgcgacccctcttgggaacccgggaggtcgcccccaactcccactgccttggggcatcactcacccatccgccatgctgagactcaggccgggaatggcaggaggcagggcgaggacaggggcgtttggagggtcagtgagggggccgcccgggtgaccttcagggtcccagggaccgtcagtctcctccgggctgcttgagactccccgaggacactgagataaagggcgaggacacagactaaatatactgtcacctcctcctccccctgcccactatgccagataacggg

SEQ ID NO: 8171 - DNA, 529 bp, Homo sapiens
  MAP TO CHR18.3; EXPRESSED IN ADULT LIVER, SIGNAL = 1.8; EXPRESSED IN PLACENTA, SIGNAL = 2.4; EXPRESSED IN LUNG, SIGNAL = 2.6; SWISSPROT HIT: O60583, EVALUE 2.90e+00; NT HIT: M63391.1, EVALUE 5.00e-01
atggtcaagcgactggattccataggcagatggacatagaaagggttaaaggctgtttttgttgttttgctttattttttagaataatcatcattgtaacaccaatccttattaattcaggtcatcttcacaacaagatacagattctattatcctgctgataggctgtgggaaaactgctggtagagaggaagaagctggcaatgggcgtgccagctgatgatgagtggaacaaagtccacgaggagtgggaggtggaagctcggacggagcaggtggcaaaggggaactcatccactgagacattaggaaagaagacgtcagtgtgttcacatgcggggcctaacctggtggttggatgttcttgtcaaaagaggaataatgaagtggatgggcttgggcaggggccttgagggcaacagtgaggtgtgggcagcctctgaaggcagtgattgaggggccaggcaggagcccgtgcatttgctgtggctgttttatgctgcagactgggagggaggagagcagagat

SEQ ID NO: 8172 - DNA, 545 bp, Homo sapiens
  MAP TO CHR19.3; EXPRESSED IN BONE MARROW, SIGNAL =   6; EXPRESSED IN FETAL LIVER, SIGNAL = 4.3; EXPRESSED IN ADULT LIVER, SIGNAL = 2.3; EXPRESSED IN PLACENTA, SIGNAL =   3; EXPRESSED IN HELA, SIGNAL = 5.1; EXPRESSED IN LUNG, SIGNAL = 5.2; NT HIT: AF246218.1, EVALUE 1.00e-10; SWISSPROT HIT: Q9PVZ9, EVALUE 5.90e-01; EST_HUMAN HIT: BI908500.1, EVALUE 2.00e-41
gaaagagggctggggtagaggtgggaggactggttatggccctggccgggtctgtattcgtactgggaggagtattggtactctgtgtagaaagaaatggggagggggaaatggggtggcctcagcatctccctaagtcccagcctttaagtcctcctgttgcagttcgtcgcctgcagcttcgagaggagttggatcgatcttcttgtggaaacgtcctcttcaatggttacctgccgccaccaggtaggcactcccaatggaatggaggggcgcggaggtgggccaaagactacatttcccataaggctgcagctctcgggtgcctgtgctgtgcgtcctgagatacagtgggaggtgtagttccctatcagatgcttgggctgatgcttggaaaggaagttggacacagcatttcccatgagacaatgggccagctaactcttgaggctcagaaggatgtcctggagccccatgggagttgtagtccgggtttggtttctttgtagggggggctttggaagacctgggattcttcgtatgga

SEQ ID NO: 8173 - DNA, 586 bp, Homo sapiens
  MAP TO CHR18.3; EXPRESSED IN BRAIN, SIGNAL = 1.1; EXPRESSED IN ADULT LIVER, SIGNAL = 1.2; EXPRESSED IN PLACENTA, SIGNAL =   1; EXPRESSED IN LUNG, SIGNAL = 1.2; EXPRESSED IN FETAL LIVER, SIGNAL = 1.5; NT HIT: AB010819.1, EVALUE 9.00e-03; SWISSPROT HIT: Q11158, EVALUE 1.10e+00; EST_HUMAN HIT: BE866103.1, EVALUE 2.00e-50
aatgcagccgtaaccttgagtttgagaagcactgctctgaaatcctgtcttccattagctttggagccagcatccttctttaccatgagagagaaggcagaggggcagcacagacgtgagtttctgggcagtcgatgtcagtctttatgtgggctgcctaatgaccactcgttggattttttgtggtgtttttctctggtctatgcacagcagagggcaaggctgggggagacaaggtttttataagtcactatctcaaaaacaagtggaagcgagtttctggctcatctgccttactacctggccccgatccagagctatttatgagcatggctgggccgtgaagctgcatgccctggcaatgcccggtggatgggctgtcccacaccctaattgtgctggaatggaacccacaaagacatctcactttcacgactgcactttccaggatggctggcctggatcttctgcttgcaggcctgtgcgtgcttctccttccccttgaagctccccttaaagccctcaaaactgtgcttcactgaaggaaccagggcgaaaaagggctgcataagatgagactctgggc

SEQ ID NO: 8174 - DNA, 581 bp, Homo sapiens
  MAP TO CHR19.3; EXPRESSED IN LUNG, SIGNAL = 4.1; EXPRESSED IN ADULT LIVER, SIGNAL = 3.7; EXPRESSED IN HELA, SIGNAL = 5.1; NT HIT: gi15301799, EVALUE 4.00e-51; SWISSPROT HIT: Q9UPR5, EVALUE 2.00e-13
tggagtctgggacagaggaggtgcttggaaaactgggtggctgccaggagggttgcctggtgagtctggggagggggccttacactgagtgttctgcctcccccttaccccctgcacaggaaaactcttcaggtgaagatagttgatgacgaggaatatgagaaaaaggataatttcttcattgagctgggccagccccagtggcttaagcgagggatttcaggtgaggggtgaccagtgggctgtgggagaagtaaggggtccagggtcgggggactttcaggggctcaattgcaggcactccttaaagctcgtggacctgagcttcgtggggaactgatctcactgtctgcctgtctctgtctctccccagctctgctactcaatcaaggtgagtgaagtcacctctgggctctgagtggggaggagccactggaagagggcctgggggagggtcccagccccaaagctactcttccaggttgggtttgaggcagattggaggtgagataaaggcagattcagggctgggggacagtggggtctggcctgagagttggtggtgcctgtatgagtttggg

SEQ ID NO: 8175 - DNA, 571 bp, Homo sapiens
  MAP TO CHR14.3; EXPRESSED IN PLACENTA, SIGNAL = 1.6; EXPRESSED IN ADULT LIVER, SIGNAL = 1.5; EST_HUMAN HIT: AA090742.1, EVALUE 7.00e-32; NT HIT: gi14784510, EVALUE 5.00e-32; SWISSPROT HIT: P49750, EVALUE 2.00e-13
acctggcagtggaaagacacatgttgcaaaacttattcgagtgagtatggggaagctgaaaaatcagctgcttgtgctgcttgtgttagtagtcacttgccttcttattaatagcaagcaacataatgccaatagaattgtcttccatttgatccattacagttggcccatgtggtagatgttgtcccatatatatttttatctactcagagaaacatttttgcctctgcttgatttgaaaccaccagaagattgtatattatttagccacaagagggaactttggtgtgaacattaatttattccataaattcgttttaaccttcttgactgtatgattcttaggataaggaggtagaatttggaggacctgcacccagagttctaagcctggatgattacttcatcactgaagtggaaaaagaagaaaaagatccagattctggaaagaaagtgaaaaagaaggtatggtattcatctcagatctcgttctgattcattaatagtatttaaaggaaaatgtgtttggagagaaatgtggcttttttgagggcagggacctctctctttt

SEQ ID NO: 8176 - DNA, 501 bp, Homo sapiens
  MAP TO CHR16.3; EXPRESSED IN ADULT LIVER, SIGNAL =   2; EXPRESSED IN HELA, SIGNAL = 3.6; EXPRESSED IN PLACENTA, SIGNAL = 2.3; EXPRESSED IN LUNG, SIGNAL = 3.4; NT HIT: gi14785609, EVALUE 5.00e-72; SWISSPROT HIT: P34692, EVALUE 1.00e-05; EST_HUMAN HIT: BG114819.1, EVALUE 1.00e-116
cagccagtagcttctctggggcccccagagagggtctctggtcctaaccataacctgacaacctctctgtcttgttttttgcaggttgtggacctggcctattagcagatgccaagatgcgggtatttgaacgttcagtgtattttggtgattcctgccaagatgttcttagcatgcttggctctccacacaaagtcttctataaatcagaagacaaggtaggggaattatgttgcagtctcctccttttttttaatcaacactaatttaatattgagtataaactgtttgctattttcccatagaacttgttctaagtaaagctaatggtaaagtaaattgaaaactgttttctaacccctgtagtccaattaccctgactctgtccctctccatagtgcctacctttccttagagaccaagacagtccctagtcaacgacagctggccccctctcctcctagattggtcagcaccagcagctgagactccccactcttg

SEQ ID NO: 8177 - DNA, 506 bp, Homo sapiens
  MAP TO CHR14.3; EXPRESSED IN ADULT LIVER, SIGNAL = 1.5; EXPRESSED IN BRAIN, SIGNAL = 1.8; EXPRESSED IN PLACENTA, SIGNAL = 1.3; EST_HUMAN HIT: BE219313.1, EVALUE 1.00e-125; NT HIT: AF111167.2, EVALUE 0.00e+00; SWISSPROT HIT: O83993, EVALUE 4.80e-02
gggtcaagcattgccttcaaaataaaaaaggcagacacttctggcagtgccaagggtgaccttggtgtgagttaattgagcaacttttcctctataacaggaaggactttacggcaggaagagcagctgggtgggaaagggattcaggggaacattggtgaaagaagccacagtcctggcaagacgagggacttgagccctcctggagcccccaacctggctgactgtcctgctcttttcctgcccactccaggctggcctgccactcctcctgctatgatgcctgggcagatcccggacccttcggtgaccacaggctccctgccagggcttggccccctgaccgggctccccagctcggccctgactgtggaggagctgaaatacgctgacatccgcaacctcggggccatgattgcacccttgcacttcctggaggtgaaactgggcaagaggccccagcccgtgaaaagtgaggtgagcgagccttttacccctggcagatt

SEQ ID NO: 8178 - DNA, 570 bp, Homo sapiens
  MAP TO CHR18.3; EXPRESSED IN ADULT LIVER, SIGNAL =   1; EXPRESSED IN BRAIN, SIGNAL = 1.2; EXPRESSED IN PLACENTA, SIGNAL = 1.5; EXPRESSED IN LUNG, SIGNAL = 1.1; EXPRESSED IN FETAL LIVER, SIGNAL = 1.3; SWISSPROT HIT: P25502, EVALUE 1.90e+00; NT HIT: L06209.1, EVALUE 1.40e-01
ttacttctctggaccccacccttgctgtgtcccctccctgggaatctgcagcgacatttgggaagagaaaatgttgcaaaagactgaagtttttgtgagtgaggcagatgagatttcagactatcaagattaggggagttgcaaaatatatgactatatttttactcctcaactatttggaatgtgaaatgaagaatctttaaggtataaatgttttggataaatccaccttttatctaaacaactgcaagggaaatttaaaatgatcacattcggcaaataatttacacggacactttaggcaggggtaaggggtgcctgaattgtttggataatagccttatttctccttttaagctttgtggaaggaaattttttgacatgtttcatcctggaagtcactcaatttctcagtgtttcttttatgcaactgctcaagaaagacttggggaagctcaggaagcaggtggtttggaggtagaaacgttacatattttgtttgttctaattatttgcttgcggcatatggagagagagagtcaattaggcagctaggataccgaccaccaa

SEQ ID NO: 8179 - DNA, 590 bp, Homo sapiens
  MAP TO CHR18.3; EXPRESSED IN BONE MARROW, SIGNAL = 1.1; EXPRESSED IN ADULT LIVER, SIGNAL = 1.2; EXPRESSED IN BRAIN, SIGNAL = 1.1; NT HIT: gi15296343, EVALUE 5.60e-01; EST_HUMAN HIT: BE928164.1, EVALUE 8.30e-01
gcaaggcaaagtaatccaaggagattgttattttgtgttacaaattaggttatttctgtcataaaattaaagaaaaaaatcaacgttaggacatttcagcttaatatcatttaccagaaggcatgtgtaacagatttaatgagctagcaggtcacctgaatccagctgttcccgaccagctttatgaaacagagaatgcagctagcagtgggaggtaagcattattacaagctctcaaggagttacaaaatcgatttctgcttgaatgaattaatttagattatcaatttataaccagctacacgaatcccatcaactcaacagttccgtgaatgatcaggttcagtccttgtaagggcttcacaattaggggcctctcgcagctctgcagttagcacctgcctgatggctctcctgacaaagttactgggcccagcaaaaggaaaagggaactgcttgttcaggcccatcgcagacgtaaaatacagcctcttgaaaaaatagacataacaaaaacttaagtaaaaaaaataaataaaaagactaaatgtgcatgtttgagatttttgtccttgtgccctttttgtgtc

SEQ ID NO: 8180 - DNA, 552 bp, Homo sapiens
  MAP TO CHR14.3; EXPRESSED IN ADULT LIVER, SIGNAL = 2.1; EXPRESSED IN HELA, SIGNAL = 2.6; EXPRESSED IN HEART, SIGNAL = 3.3; EST_HUMAN HIT: BF853254.1, EVALUE 8.00e-81; SWISSPROT HIT: P46939, EVALUE 5.20e+00; NT HIT: AF040732.1, EVALUE 5.30e-01
tttgtttttccccagaccagaatttattacagaattctcaaagctgacggatcggtggcagaatgctgtccagggtgttcggcagaggaagggtgacgttgatgggctggtgaggcagtggcaagatttcactacttctgtggagaacttgtttcgcttcctcactgacaccagccacctgctatctgcagtgaagggccaggagcgcttcagcctctaccaaaccagaagtctgatccatgagctgaaggtagtgtatgcatcgtagcagtgtgagaaccacagggtggtcattgtttgcaagatgttcattcacctttggtttaatgtttttgatgatgatgtgatccaagtgggctctctgcagtgtgaggccagcaaggtgcagtcaccaccccccacagcccagtccctagcattgtggggttggaaacccgatattacccattcatccagaaatactagggttctcttgggccatgagaggaggcatggagtggagatgggtgaataaattgggggaggtttagggcaacagactcaaaccaccca

SEQ ID NO: 8181 - DNA, 599 bp, Homo sapiens
  MAP TO CHR14.3; EXPRESSED IN ADULT LIVER, SIGNAL = 2.3; EXPRESSED IN PLACENTA, SIGNAL = 1.6; EXPRESSED IN HEART, SIGNAL =   3; EXPRESSED IN HELA, SIGNAL = 2.2; EXPRESSED IN BONE MARROW, SIGNAL = 1.4; EXPRESSED IN FETAL LIVER, SIGNAL = 2.6; EST_HUMAN HIT: BG563989.1, EVALUE 1.00e-115; SWISSPROT HIT: P76113, EVALUE 3.00e-13; NT HIT: AF282920.1, EVALUE 2.00e-03
catttaatcttcaaatttcccccctagattggccatttcttaggttgttccagagtggtgggaatttgtggaacacatgagaaatgcatcctcttgacctcagaactgggctttgatgctgcaattaattataaaaaagacaatgtggcagaacagctccgtgaatcatgcccagctggagtggatgtttattttgacaatgttggtggtaacatcagtgatacagtgataagtcaggttgtttgctgatttctataacaaatttgaatactgcactttatatgttgtgatatctttttacctaatactgagaaaaaaatttataaaattggagggattattgtgacttaatgtgatgatcagtattgtatttaagtgatacaaaagagcttgctgatacctacttccatttacttgcagatttgtactatgaacttcaatttcagttatttgctaccaatattatatttttcacttttggtttatttttgtgaaaaattacagttgcattgttgaaatgctgaagcactgatccctaactcaccactgaccaactcacagccatggccccagacctatgggtttcataggctgcatgt

SEQ ID NO: 8182 - DNA, 553 bp, Homo sapiens
  MAP TO CHR14.3; EXPRESSED IN BONE MARROW, SIGNAL = 3.7; EXPRESSED IN FETAL LIVER, SIGNAL = 1.8; EXPRESSED IN ADULT LIVER, SIGNAL = 2.8; EXPRESSED IN BRAIN, SIGNAL = 3.6; EXPRESSED IN HELA, SIGNAL =   3; NT HIT: M14158.1, EVALUE 8.20e+00; EST_HUMAN HIT: BG911429.1, EVALUE 0.00e+00; SWISSPROT HIT: P42287, EVALUE 2.30e+00
ttccagaatgacagctggtgtccgcaagaacagcaggaactcatcagcatttggaagtgagactgggtggatgtgcagtcccggaaaaagaggcggagatttatgtctggtggcggggagcccgtgtgttcagcagcttctggaaggaattgatagatggaagctgctagaggcgttgctgacagcctctccttgaggccagactccagagctggaacctggtagaagccttagtctcctcatttaccgcagcggtgacgggtggggcagtgtgagatctgagccgagggcccgcatcaaagtcccctttcggcttctccatctgtgacatgggttgcacctgctctgactgctgcttacgagagatggtgagcagtgttctgtgctgcgtggccgtgactgccgaggttctgtgaagacgggaaccacgggctgaaagcaatagagaccccagaccaccagggtcagctcgcccccgcccccacccatcttctttctgaaggctgcgcttttccttttcaatatgacctaagccctttgcaggatatctcca

SEQ ID NO: 8183 - DNA, 578 bp, Homo sapiens
  MAP TO CHR14.3; EXPRESSED IN BONE MARROW, SIGNAL = 2.3; EXPRESSED IN BRAIN, SIGNAL = 1.8; EXPRESSED IN ADULT LIVER, SIGNAL = 1.5; EXPRESSED IN HELA, SIGNAL = 1.6; EXPRESSED IN PLACENTA, SIGNAL = 1.7; SWISSPROT HIT: Q9GZZ6, EVALUE 6.40e-01; NT HIT: Y00460.1, EVALUE 3.50e-02; EST_HUMAN HIT: AI400204.1, EVALUE 0.00e+00
agaacagggcctcctctctctgtctccccatcgcatgcctcctcagggacctgctcctgcatggctcctgaccatatgccccgctgtgtctgcagggccacacgcatgctgcgtatggtcagtcctgttccacaccttttgcagcatggctccgtagccactgtcgcagttttcagactctttttctcctacctgccagtaacgagcacagccctggacccagctctaatcaggtgaaatcacaagggacacatcttcataaagcagacctgctagagacctgagacgtgtttgtgccccttttcccctgattcgaggagtgcaggggaccgctcgggagctcctctgagactgcctctttcccttgttcctttgggtgtttgaagcctgttgcctcctgctttcccttttcttttcccttttaaaaaattctccattttttgacttagaaaaaaattatttatacgattgagatccactaattaaagccattttctggtatttggttactggagcgtttgatgtctctctgacaagaccatgaaatgcatggagtgtccacagggacagaatttgct

SEQ ID NO: 8184 - DNA, 592 bp, Homo sapiens
  MAP TO CHR14.3; EXPRESSED IN BONE MARROW, SIGNAL = 1.5; EXPRESSED IN ADULT LIVER, SIGNAL = 1.3; EXPRESSED IN PLACENTA, SIGNAL = 1.4; NT HIT: gi15828471, EVALUE 3.60e-02; EST_HUMAN HIT: AI248224.1, EVALUE 2.10e-01
tagaaaaacccacggacagcaatgtatattcatggtcttgaagcctatattgtctttaaataattcaatatttctgtcagttagtgaaaatcatccccaagtagtgtgccaatggaatattggacaaatggaccaaactccttcttcttcttttttttttttgtgtgtgtgcgtgtgtcctttttttgatgtctttcagatggagttacaagatgatggaatcacgatgggtttagagcacagcttatcaaaggacattatttctattataaacaatgtcttccaagccccctgggggggatcccacacctgccagaaggacgaaaaagcaatcgagtgcaacttatgtcagtctagtatcctctgctatcagcttgcttgtgaactcctggagagactagctcctaaagaagaaagccggctggtggtaagcagttgaagaaacgagatgacccatgtataatagcattaaagactgcagtagctgatgtaatggagtcttcctccagcagcatcttatactccatgctgggttatacgtgagactgtgttaaaagaaacttttcccattgcttctgccaactcaggctct

SEQ ID NO: 8185 - DNA, 569 bp, Homo sapiens
  MAP TO CHR18.3; EXPRESSED IN ADULT LIVER, SIGNAL = 1.2; EXPRESSED IN BRAIN, SIGNAL = 1.1; EXPRESSED IN PLACENTA, SIGNAL = 1.1; EST_HUMAN HIT: AW846310.1, EVALUE 5.10e-02; SWISSPROT HIT: P36431, EVALUE 7.10e+00
tccccagatttccatctcagtgaaagtagtccaagggagaaacctggaaatgggtgatcctcttcctcttcccacccccgccacctcccacagcagcgggttctctgcttccaccctgttcccaggagctctcatttctatctgtgcctcttcacttctgaactttataaaggacaggtttgggtgtgcgcctttgccatttcctgctggagaacttccaggccttctcactcttctctttgcctctagctctgtgagggtctgaggcaacctctctgctgccggaggcctctttctaacacacagacgcaccatgaaggccacaggcttctgccctgactccaggacggccggttaagcacacttgcttatcaccatgctggctcctgcctctcagggcgtaggaagctgttattttcatgtttagagtgtaaacatctgcattgcacctaaaaacagtgggcacagatatagaagaggaaataggtttgtgtatatgtcattggtcccaagcagaaaagagttttaaggccactcttgttcatgtgggtttactgggcagatggcat

SEQ ID NO: 8186 - DNA, 585 bp, Homo sapiens
  MAP TO CHR16.3; EXPRESSED IN FETAL LIVER, SIGNAL = 4.4; EXPRESSED IN LUNG, SIGNAL =   5; EXPRESSED IN ADULT LIVER, SIGNAL = 4.9; EXPRESSED IN BRAIN, SIGNAL = 4.1; EXPRESSED IN PLACENTA, SIGNAL = 5.1; EXPRESSED IN HELA, SIGNAL = 5.2; SWISSPROT HIT: P21997, EVALUE 1.10e-02; NT HIT: gi4508014, EVALUE 9.00e-74; EST_HUMAN HIT: BI003330.1, EVALUE 1.00e-130
agtcaggtagggacacacggtgtatgtcctggggtcgggggacagcaggtcctggattaccctggccttgacgggcggggccccaccagcacctgttctgcaggatctctgcagaactttctgctcctgatgacaggaaatagcgattccaatttagcctcggctttccctgagccggttacactgagatgcgaggctcttgcttcagcaataaaggggacaatacaaaatagcattctttcaaaaataggacccagaaaacatcacagagagtgggaccatcggataggatctgggagactttctttccgattgggaccagggagcgctggtactcgtggggattttcagggctctttgggggtgtccaggaagcgagggctggtttctgtctgctcttctaggctcctggccagaagctggagggggcttggccaaaaagagggagaaacaactcagctgttctttctagctctgaaatagaaaatgtctgcagacggcggaggcatccaggacacccaggacaaggagacacccccggaggtacagatggggctggctgagggaggtgtgcggtagaagagg

SEQ ID NO: 8187 - DNA, 501 bp, Homo sapiens
  MAP TO CHR16.3; EXPRESSED IN BONE MARROW, SIGNAL = 1.2; EXPRESSED IN FETAL LIVER, SIGNAL =   1; EXPRESSED IN ADULT LIVER, SIGNAL = 1.4; EXPRESSED IN BRAIN, SIGNAL = 1.9; SWISSPROT HIT: Q09103, EVALUE 6.00e+00; NT HIT: AL161492.2, EVALUE 4.80e-01
ggagaaagcctgacatctgcagaacagggagctgcacctgggagaggaggccggagaggggagtgacctggagaagggaacagcctgaatgcgaacagaaattggccccaacagagcgttcaagagtctgagagaaggctcctggggcttgagcacagacatttagtttactgggatatggagagaggagaagcaattggaaaatgagtaaatatatcatgcttttaaggaggcatgctgtacaagtaaatgtcaggtacagtgactcaggttattgatttgaaagattagtcagtggagacatgtgctggacttactcagtccctctgttgtcaaggaagtccaacgccaccagcactagatccttcaacaatgcagagtcctcccgcaaatgaatctgactttgcctgtaaaccgcggagagtttcaaaaactggaaagcattacaggtggccagtttgtttccatttatataaagtgcagcaaaaatgatctgtcaga

SEQ ID NO: 8188 - DNA, 580 bp, Homo sapiens
  MAP TO CHR14.3; EXPRESSED IN FETAL LIVER, SIGNAL = 1.3; EXPRESSED IN BONE MARROW, SIGNAL = 1.3; EXPRESSED IN ADULT LIVER, SIGNAL = 1.2; EST_HUMAN HIT: BG436569.1, EVALUE 8.20e-01; SWISSPROT HIT: P42003, EVALUE 8.40e-01; NT HIT: AF322216.1, EVALUE 5.50e-01
cacagtgaccatcatcccagagttaggaagactgaaaggaaagctaaactagctccttgaaaagtcatgtaaactatgtggaattcctcctggatgcatccagaaactactggctgggactgagcaaagataacagctatttaacatgcttagcaacactctggaactcaaatacactttaccaaataaatcactcaccattgttctaggcctggggctcccctggcattgcaggacaaacatgactgtgttcccctgccaagaatgagaaagcacagccagccagctccctctggagcagggcatgaattggcggtggatgaaattggtcttagctcattcctcaagaccttccccgcccagtcactcagtgtgtggaagtggaaagtgtttaacaaacagggtagaattaacttccaaaacagaggtaaaaactcccaggccacccctaccctgcatcctgtggtgtacaactacaggaactcaacaagggcaaaacaccaccaagaactcaaagacgcaagtaagagttaagtctgacctcacatgtcccccagcatgcagcaactcaagcaaacac

SEQ ID NO: 8189 - DNA, 600 bp, Homo sapiens
  MAP TO CHR18.3; EXPRESSED IN PLACENTA, SIGNAL = 3.4; EXPRESSED IN LUNG, SIGNAL = 3.6; EXPRESSED IN ADULT LIVER, SIGNAL = 3.3; EXPRESSED IN BRAIN, SIGNAL = 2.3; EST_HUMAN HIT: AV652525.1, EVALUE 2.10e-01; SWISSPROT HIT: Q13490, EVALUE 5.90e+00; NT HIT: U18133.2, EVALUE 1.50e-01
cctgctggatctcactctcctcctcagacagtagagcttggaccccctgccatcagacccacttggtctgaattcctgttgggtttcatcttttaccaactgctctgaatgtgagctggcacatgggggatttctctcctagtttcaagtatgtatggagaccaaaatgttatcttactgctttccacagccattccatgttttgggaccaggacaggtgtagtgggctctgtattcagctaaggcctgagcttggtgcaacgctattgtctttcccagagctctggcattcttgggtgaaacttaccagtctttaagttgtaccttgcaattaaaagggctccaactagaacagacatgttgtggtcagggaaagacatgatgacgagggtagtgatgagtagctttatctttgggagttcacaaagttttaggccaggtatgatagaacctgtgtgtgagaagagcatagcaccagagatttgaaggaaaaagacccatctgggagtgggaacggggaagagaagggaggcagagtcattctacagccgtcacgctaatccaggtgagaggtgatgaggtcttgaacaggggcagtgt

SEQ ID NO: 8190 - DNA, 575 bp, Homo sapiens
  MAP TO CHR14.3; EXPRESSED IN ADULT LIVER, SIGNAL = 3.1; EXPRESSED IN PLACENTA, SIGNAL = 2.9; EXPRESSED IN LUNG, SIGNAL = 2.6; EXPRESSED IN BONE MARROW, SIGNAL = 3.3; EST_HUMAN HIT: BF972991.1, EVALUE 8.10e-01; SWISSPROT HIT: P07676, EVALUE 2.50e+00; NT HIT: AL583918.1, EVALUE 2.20e+00
atggaagctgtggacaggacagcttttagctctgggagcaggtgctggagccaagtcacacacaggtagcagtcagtgaggttcacatccaggaacctttttacagaaacccctctctctctctgtacagctgtataagcaccagcacaggctccgacaacatgcaggtgaggaaggggacagaagggcctaagatcccaccatggagagagagggaggagaggggaggggggcttgtagcatcagcttatcagaaggaccccctggtgcaccagaagattgtagtcctgggtgaacaagagctgccctcgggggttagcagcctgttgcttctgttgacttggctttctgccctgcagccagtgaaacctgacaggtcagtttctagatctgggctgattctctttcacttcctggttctcataccttcatcttgacagtctgtgtatttctcctcattctgtgaaagaatggagttttttggtcctaaatgctcaaaaaaaatctggtctcttaaaaaatctcagcaattctgatacctgggaagttatttaaggggtcagaatgactgacgt

SEQ ID NO: 8191 - DNA, 597 bp, Homo sapiens
  MAP TO CHR16.3; EXPRESSED IN BRAIN, SIGNAL = 1.5; EXPRESSED IN ADULT LIVER, SIGNAL = 1.7; EXPRESSED IN HELA, SIGNAL = 3.1; EXPRESSED IN HEART, SIGNAL = 2.8; EXPRESSED IN LUNG, SIGNAL = 2.5; NT HIT: AF282903.1, EVALUE 0.00e+00; EST_HUMAN HIT: AW295242.1, EVALUE 3.00e-77; SWISSPROT HIT: O75351, EVALUE 9.00e-26
gaatgatagggagccgtgaggagggcccaggttcctgggcggacgctgcagacactcaccccttgccctcactctggttctctttgactggcttcttgccgtgtttctctttgcttcgtaaataatccttcagcttctcggcccggtctaggtactgcacgcacttggctcgaatgctctccttggccttgtcgctgtgggcctcatctgtgaaagggaacacagaggggcccctgtgaggctcgtgcgccaccccctctcctccgctcccctctggagtgcggcagcctgaggacccctcgtgtgactcacacttgatagcgtggaggaagtactccaccgcatgctggtacagccgcagcgcctcctcgtagttcttggctttgtcctcctctgtggctttcgtcaccagatcaatggctttctggaaaggcaaagcaaatggctcagtgcttcctcggagaggtggaaagtccctggggtcacaggcatggggatgaaacgtgacgagggatgccgctgggcctgtggatttattgcttgcgggccatttcattggcctactttttcaacatcggctagaaaggccttcaaaga

SEQ ID NO: 8192 - DNA, 569 bp, Homo sapiens
  MAP TO CHR16.3; EXPRESSED IN FETAL LIVER, SIGNAL = 4.6; EXPRESSED IN LUNG, SIGNAL = 7.9; EXPRESSED IN ADULT LIVER, SIGNAL =   7; EXPRESSED IN PLACENTA, SIGNAL = 7.4; EXPRESSED IN HELA, SIGNAL = 7.6; SWISSPROT HIT: P36752, EVALUE 5.50e+00; NT HIT: AY004837.1, EVALUE 5.40e-01
taaaaggcaacacctgaccctccagaattggtacctgacaccctggccactcgagagtttatccctgcagggtctggccatcccaaaaccagaggcccccttgtcaagatcctcagaacctctggaagtgcattgatttgttcagtttctggcaggcagacagaaacacaagctgcagaaataaggcagttaccttttctcgcagttataggtttaattaaaaagccccatgctgccagattccaagcaccctccactgatatgcgagacctattgattgcctagctctccctgcgagacatagcagagagaagactttatcttcctttaatcagacctgcttccttccaatctggctccaacaggactgctgagttcttgtgtagaacgcttccatggccccaccttcatccagccccgaatacagtgggtagagccagcatcagctacagagagctgtgatctgtgctcgcagtgtagccggagagatggcatcatcatcatcatcaccgtggccagcacaaatggaacatacaccacgtaccaggtgccgagctgatacttcaaat

SEQ ID NO: 8193 - DNA, 525 bp, Homo sapiens
  MAP TO CHR14.3; EXPRESSED IN PLACENTA, SIGNAL = 1.6; EXPRESSED IN FETAL LIVER, SIGNAL = 1.3; EXPRESSED IN BONE MARROW, SIGNAL = 2.2; EXPRESSED IN LUNG, SIGNAL = 1.5; EXPRESSED IN ADULT LIVER, SIGNAL = 1.7; EXPRESSED IN BRAIN, SIGNAL = 1.8; SWISSPROT HIT: O70361, EVALUE 2.80e+00; NT HIT: X53515.1, EVALUE 1.30e-01; EST_HUMAN HIT: AA235838.1, EVALUE 4.70e-02
aaagcaattcttatgggggagttaccaattttgtatagaatatggttcaaaccacttcagaagggctgagatcaaagagccttaatcttgaagaggtcacagagctatgaggcattgttcttggggtagcaagcttggcagctcctcgggggatcggctaagctgatacacacccctgctcctcccatcccttctccatgtgtgctgtaccacttccacacttatgcccccagagttgggtggcagtgtgagcaatggaaaattcctttgaccccagaactgagctgtgaaggtcatgccacggggtgcatctttccaaaatagaaccaatggatctcagctcagcttcactttctttctctaaagtccaagatacgttcagtagccccataatctcctctgtcttgaagggctgcagggagaatggttagaatagtcattttccatgcagaagactggccatctgctaaacttgtagacatcaagataatatccttttatctatccccctaatcttaccctccc

SEQ ID NO: 8194 - DNA, 537 bp, Homo sapiens
  MAP TO CHR14.3; EXPRESSED IN ADULT LIVER, SIGNAL = 0.96; EXPRESSED IN PLACENTA, SIGNAL = 0.98; EST_HUMAN HIT: BF038259.1, EVALUE 1.90e-01; SWISSPROT HIT: Q9SEH4, EVALUE 7.00e-06; NT HIT: AE003905.1, EVALUE 1.30e-01
gccctggctagtgacttcaggtgagtgagacctgcttcctgctgaccaggaggctgggttgttctcttaaaggcagggctgcacctgccccagacatccttgcctggttcccaggtcaaatgctgctgcatctgggtctcatttgagaatgacttgctggtctctcaggggtcacccccagtactggagggagcatcttgctgaagccctccatgaagggccacccctctgcaatcgcaccatctgtaaatggtcacccctctgaaatcacaccatccatgaacggccatgcctctgaactcaaaccatccaggaatggctgctcctctgaaatcacaccatctgtgaatggccacccctctgaaatcacacaacccgtgaatggccacccctctgaaatcacactgaccatgaatggctacctctccaaaattacagctgtgctgctctgggttcaacttgcccaattctgctgagcacagaagctgagccaggagggttgctcagggcatcttgcccaattctgctgagcacaga

SEQ ID NO: 8195 - DNA, 599 bp, Homo sapiens
  MAP TO CHR16.3; EXPRESSED IN HELA, SIGNAL = 1.4; EXPRESSED IN LUNG, SIGNAL = 1.1; EXPRESSED IN BONE MARROW, SIGNAL = 1.2; EXPRESSED IN BRAIN, SIGNAL = 1.5; EXPRESSED IN ADULT LIVER, SIGNAL = 1.5; EST_HUMAN HIT: BG819235.1, EVALUE 8.40e-01; NT HIT: U82695.2, EVALUE 3.70e-02
tcctcagtgtggaaacctccctttcggatagacactcacttgaaaatgatccccgttggttccattttgtctgtccgaagcctgacaccaatgtgggtcatcttgcagcatctaaaaaagcgccctggaagggaagctgagtctcctcctcctagcagtcctgatttctactaacccagagagttaaagaccatcaccctacagattgaatctagggatggaatgccatttccataatggcaccttatgaagtgatcattccgtaaataaaggaagtcaaaaaggatgcctaaaaatgactggaaagcagacctcctaaattgttccatttcaggagtttaagcaccaattaactgagatactacacaaagacaatctatctagccttggtggcagtataaactgaggcaggagaagcttctttctgtcactaatgttttacttccatctctgtattccagccactctagcttttcctcaagctcatactgctctctccaaatcctgaaaactctgagcccttttgttcccccagggcatctgcagagcccagtactctccctagtgtttaataacccccctggcttgatgaatgggtg

SEQ ID NO: 8196 - DNA, 509 bp, Homo sapiens
  MAP TO CHR18.3; EXPRESSED IN HELA, SIGNAL = 5.8; EXPRESSED IN BONE MARROW, SIGNAL = 2.1; EXPRESSED IN LUNG, SIGNAL = 6.8; EXPRESSED IN ADULT LIVER, SIGNAL = 2.6; EXPRESSED IN PLACENTA, SIGNAL = 4.9; SWISSPROT HIT: P55289, EVALUE 3.00e-08; EST_HUMAN HIT: BG324693.1, EVALUE 1.00e-05; NT HIT: gi16306488, EVALUE 1.00e-115
ttttggttcctgacaccagctcttctctttgttctgataggtacttactacaccattctttggcgaaggctattcagcagtggtgacctcttccaatccaacactctacagattattatctctggactcccagctgacaccctgccggaggcaagagctactaagccaactggaactgtgccttttctcttgtcaaggtttttttcttacacaggaaaaagaaagaaaaaaaaaagatgaagttgggcaaagtggagttctgccattttctgcagctaatagctcttttcctgtgtttttctgggatgagtcaagcagaactctcaaggtccagatcaaagccctatttccaatcagggaggtcccggaccaagcgcagctgggtgtggaatcagttctttgtgctggaggaatacatgggttcagaccccctctatgtaggaaaggtagggtattgtgacctttcaaagttgtaaatgattattgtccatgtctatggtttgatgaaa

SEQ ID NO: 8197 - DNA, 538 bp, Homo sapiens
  MAP TO CHR18.3; EXPRESSED IN HEART, SIGNAL = 2.6; EXPRESSED IN BONE MARROW, SIGNAL = 1.8; EXPRESSED IN BRAIN, SIGNAL = 1.7; EXPRESSED IN ADULT LIVER, SIGNAL = 2.2; EXPRESSED IN PLACENTA, SIGNAL = 1.8; NT HIT: AF305057.1, EVALUE 8.00e-03; SWISSPROT HIT: P34734, EVALUE 5.00e+00; EST_HUMAN HIT: W69605.1, EVALUE 0.00e+00
tttgatccagaaagcatccctactgaccctgtaacctacaccctctctgtccaaagaacagaggccgaccagagttgccagcctggagaggcaccatggagatgaagcttgccctttctgcactcaacccctgcagcctgaaggagtgtgagacgatgaaacccacatgtgccggagcccctgcagaggtgttctcacaccctcagcgacctgtgcacagtggccggatcaggggtgggggcctgtcatactgggcgctcctttctctgacgaagtaactgtatgcaactcccaattgctacttcctgaagcacctgcttttcagggaaccagtgtctttcttggtttaaaaaataaataagtaaatattgggggacctcttaaaacacttaatacttttcagagcctcaaaggcaaaattcacctggctttgaagccaaatctgtatggtgctgagaatgaaatctgtccgtctaagatgacaataagaccttccagggaaccaggcagaaaggtgggcaggtacagtggccaattt

SEQ ID NO: 8198 - DNA, 586 bp, Homo sapiens
  MAP TO CHR14.3; EXPRESSED IN PLACENTA, SIGNAL = 1.9; EXPRESSED IN HELA, SIGNAL = 3.4; EXPRESSED IN BONE MARROW, SIGNAL = 2.3; EXPRESSED IN ADULT LIVER, SIGNAL = 1.8; NT HIT: gi16190779, EVALUE 2.00e-83; SWISSPROT HIT: P09951, EVALUE 1.50e+00; EST_HUMAN HIT: N94762.1, EVALUE 0.00e+00
cttcagctcagaggggtcagcatctgttggccttgacttgattttgcctatatgttgttaatgatgctttttaaaaactctgtaaagtcaggttatttccctcgctttatttctaggtaacaaacctgaatttggcaactggcatcataaacagaagcagtgcttcagctcccccaaccctccgacccatcatcagtcctagtggcccgacatggtctacacagtcagacccccaagctcccgagaatcactccagctctcctggaagcaggtatgtgaagggccctgcaactagcatttgggttactcagggatggcctgtgtcccaagcaagccattcccaccttgagttctgtatggagatagcactaaggcatatgccctttctccacctgcctcgatcctctggcacctgactaagagagcctcattttatttgtaagacagttttcaagcatatcaaatgaaaaggacatttctgagatagttaagaaaatcaccttagggtaaaagagcaagaatttacactatgtttaaaccttgcttatagtcatcatttttatgtgccaactttttgcactttgtc

SEQ ID NO: 8199 - DNA, 575 bp, Homo sapiens
  MAP TO CHR19.3; EXPRESSED IN PLACENTA, SIGNAL =   2; EXPRESSED IN FETAL LIVER, SIGNAL =   2; EXPRESSED IN LUNG, SIGNAL = 2.2; EXPRESSED IN BONE MARROW, SIGNAL = 1.9; EXPRESSED IN ADULT LIVER, SIGNAL = 1.5; NT HIT: AF105008.1, EVALUE 0.00e+00; EST_HUMAN HIT: BI753950.1, EVALUE 2.00e-87; SWISSPROT HIT: P27544, EVALUE 6.00e-27
ccactcctagctcagttggccccacccttgtcctactcctttcctgtatagccccgccccttcagtcccacccaaatcatgaggcccctcccctgtcatgccacacacccacctcaccgggccccgcctccttccctgcctggtcccgccccttttctggacacacccacctcaccaggccacacctccctccctgcccagcactccctaccactcaccagctgaagccgaagctgaggcagcccaagtctgctgccaaggcatgcagccgatggtaggagccgccgcgggacttgaagtaaatgttgagcttggtgaactcaagctgcacgtcactgatatcgtgcaggaagagcacaaggatgcccacattgtggtacctgggggagcagcaggcagagaggagagggcagctcacattgggggacctccactctgcactaaggcccccagcagagtccctgggctacacctcaggctccccgtgggcctcttcaaagccacccttcctgcctcgcctgccctgcccatctccacttcccaggatgccctttcctcactgtcccccacttagc

SEQ ID NO: 8200 - DNA, 592 bp, Homo sapiens
  MAP TO CHR14.3; EXPRESSED IN HEART, SIGNAL = 1.9; EXPRESSED IN LUNG, SIGNAL = 1.1; EXPRESSED IN ADULT LIVER, SIGNAL = 0.93; SWISSPROT HIT: P25338, EVALUE 3.30e+00; EST_HUMAN HIT: BF222689.1, EVALUE 0.00e+00
ctcaacattgacgtcaccatcaacatcatcatcttcctcctctgataacaagtatggatttctattaaaaatattcaatagcatttcactaacgtcaatgacatcacttttattttcaattttcttcttcaataaaattataaatggtttacagtactggaagtttcattatttattttaatctaaattagttttttccctttctttgagaatttcaaaatatgaagaaaaaatgtttaatacagtgaacaattaaaataacaaaataaagacaagcattaactgcttgactaagagtcaaacttaccttagcagcattgtaacatggtttgtttgtagttttaattctttgattgcacttgcaacagggtctccttgagcctgggcttctttcacaattaacccaatttctgtccaatctatctggttagctaaagcacttcgaactacctgaatggctctgtcaactatttgtaggttcatttctatgagctctcctttcagtttgtctatttccttaaaaaacaaaccacacacatttactacattgccagttaaagttaacatttttgaaaaagcactgagaaagcca

SEQ ID NO: 8201 - DNA, 530 bp, Homo sapiens
  MAP TO CHR14.3; EXPRESSED IN ADULT LIVER, SIGNAL = 2.9; EXPRESSED IN PLACENTA, SIGNAL = 4.2; EXPRESSED IN HELA, SIGNAL = 3.2; EXPRESSED IN HEART, SIGNAL = 2.7; EXPRESSED IN LUNG, SIGNAL = 4.1; EXPRESSED IN FETAL LIVER, SIGNAL = 5.7; EXPRESSED IN BONE MARROW, SIGNAL = 4.9; EST_HUMAN HIT: N49804.1, EVALUE 7.40e-01; SWISSPROT HIT: P40757, EVALUE 9.80e-01
gcaacaacgtgctacactgctgtgtttgccttaccttcctatgtggaaattaagcccagtagagctagtaactcaggctttgacctctttcttgctctgtcaaggcctgaactcctgtcttttccaatgatttgaccctgagtctcccatttcctttcacagaatgaggcctgctggagccgacaggggatctgtgttggggatagatgctgctgacaacctgaaaaagaatccaccctatggctctgaaattaacagtgttcagcagtcttgtgggcagagtgagagcacctgccctctggagctgtcctggggagccccagaccagaggagtgaggagtgccctctgttgcaggtgggggtggcgggacgggagtgtggagatccagagtggccaccaggccattgctcaacctagttcctgctcagtccctctggggctggcagacttcacagtccagcttgctctggggagaccatattccgaaggcggcagcatccaccaccgtcctggggctctgtctttcaaa

SEQ ID NO: 8202 - DNA, 528 bp, Homo sapiens
  MAP TO CHR16.3; EXPRESSED IN ADULT LIVER, SIGNAL = 1.7; EXPRESSED IN PLACENTA, SIGNAL = 1.1; EXPRESSED IN LUNG, SIGNAL = 1.2; EST_HUMAN HIT: BG777667.1, EVALUE 1.20e-02; SWISSPROT HIT: P57738, EVALUE 2.20e+00
gggaactttggaaggaggaggaaacaggaagtccaagcgagctccacgaagcctccgggcaggaacgcaaacaggaaagcggttctcagccagtggtggcctctcgctagctaggtctggtgtccccaaggcccccctggtgcgtgttatttttggaccatgccacgtggtgagtaagtgcctgttggattagatagagtcaaggccagcttccaggctggtgtctcccaagcaacaggggtcagtggccccagggacatggcctatggcggagtttcaaatcacactacccccagccaccccccagacatctctgaggcccttggataacaaaaggaagcagggaaagaaagagggaactgctcttccttcccctccaatcagaggtctccactctgggtacagtggccagatctgatgaccttagcaaagccgctcttggcctggagaatcttgcaagcttggactttctggggctcgtgcactgatgggcaagctgggtttcctggactgggaggggttagcttc

SEQ ID NO: 8203 - DNA, 545 bp, Homo sapiens
  MAP TO CHR16.3; EXPRESSED IN LUNG, SIGNAL = 2.3; EXPRESSED IN BRAIN, SIGNAL = 3.6; EXPRESSED IN ADULT LIVER, SIGNAL = 1.8; NT HIT: gi15920163, EVALUE 8.10e+00; SWISSPROT HIT: P46313, EVALUE 3.90e+00
acgttagccaggctgtatggaaagggggtgatgtggtagttagggaggagtataatccaaataagcaacaataacaaaaaaacaatttagggtaaatccaaataataaaatgctttaaatgaaattgtttggccttattttctcagtgccaacagatatattgatgtaattagcttaagacatactcgtcgaatttgggatagatgggtctctgctccaaatctacagcagagagcattctccttcccttcttgtgggtgggggatttactcttaaaaccgaatatttagaagccctggggggccttcagtgaagatggggtcaagaccagccacctggatttttcaaatagaggcaccaagaaatcagaactcacagtgttggttttcacatgtcttttgtatggcaccacgtggttcaccatttctgttaaaatatgttgatgggttctgcaagggaaatttggttatggcttctttacttttacatttgaaagaagtagctatacacgttgcgctaagacacccacaccaacactcagcatc

SEQ ID NO: 8204 - DNA, 589 bp, Homo sapiens
  MAP TO CHR14.3; EXPRESSED IN HELA, SIGNAL =   3; EXPRESSED IN FETAL LIVER, SIGNAL = 2.7; EXPRESSED IN LUNG, SIGNAL = 2.5; EXPRESSED IN BONE MARROW, SIGNAL = 4.8; EXPRESSED IN BRAIN, SIGNAL = 5.6; EXPRESSED IN ADULT LIVER, SIGNAL = 3.6; EXPRESSED IN PLACENTA, SIGNAL = 3.6; EST_HUMAN HIT: BE299617.1, EVALUE 8.30e-01; SWISSPROT HIT: O53553, EVALUE 7.60e-02
tagctcatccccaagtccaccctacagctggtcacctccgtcttggtgcagcctgcctccatggccccgcctgaatgctgagtgcccaagggccagtgttgcaaggggaccccaccagcctttctacagaggcaaccagaaccctctggcctctccccatcttcctgccctcccacatttctgcctccctagctctgccccctgccccaggaagctgaggctgcaaactcagaatctgccttcgcctctggtgcgctgccaactcccccttgggcaggcctgtcgcctgcagcctgtgtctgtgctgccctccactgccgtggcagtgcccaggccaactggtcggcatgcttgggctcagggacaacttcacggtcagcacgtggctgtgcatggccttggacacctggaacgtggagccggtcagccagcagctttcagacagggaggggccgaagggtccaggccacacagagggccagggccagcagccaggcactggctgccaccacccgttttcccccagcagccctgggctctcccttggtggctctgctctgtgactgcgggctggttcttggacctcggt

SEQ ID NO: 8205 - DNA, 517 bp, Homo sapiens
  MAP TO CHR18.3; EXPRESSED IN LUNG, SIGNAL =   1; EXPRESSED IN ADULT LIVER, SIGNAL = 0.97; SWISSPROT HIT: Q04941, EVALUE 6.20e+00; NT HIT: X68445.1, EVALUE 4.90e-01; EST_HUMAN HIT: AA247560.1, EVALUE 7.20e-01
cggaggacaatttagaggacagtccattattctgagctgaagttctggtgctaaaatatctatatttagtgaaatggtgataattgtatatcattttgtgattcattttgtaaatgtacttactgtgcaaacataaaatgctggtgacttaaggtcagtccccagggttttgtgaaattcagaatttgccaatttgattgcatccacttttctactgagtgttgtgaggacatttgcagcattccccgtagtgatcatttattctctggacactcctggtgacctcagtctctccctcattgaaagatttatcactctcattgccaacaatccttaccagtgtaaagttcttactgtctgccctgctgatctgaaatctttcctctattcatttaacaggctttctactttcagcaccccaccattaggtcttccttttttaggttgaacaatcttaattcctatacatattctttatgtgacccagtcagtatattgggttccaggtaagcttgtg

SEQ ID NO: 8206 - DNA, 582 bp, Homo sapiens
  MAP TO CHR14.3; EXPRESSED IN HELA, SIGNAL = 3.3; EXPRESSED IN PLACENTA, SIGNAL = 2.8; EXPRESSED IN LUNG, SIGNAL = 3.3; EXPRESSED IN FETAL LIVER, SIGNAL = 2.3; EXPRESSED IN ADULT LIVER, SIGNAL = 2.3; EST_HUMAN HIT: AA412165.1, EVALUE 2.00e-29; SWISSPROT HIT: Q9ZRI7, EVALUE 1.30e-01
atgaggccttgatggacaacccaggctttctcaggcccttggaggcctctgtcttcccggtcaggtgtgcaggcaccaccttggacccactgcccctagcaggagaagctgccttggtgtttggctcctgcccagcaccctgggcagctgcccttttaggggccttggccttggccaccaccttctttttggtgggggaagcagcaccgttcttgaccttgctagccgtgggttttgaactcttactcccagctttgatattcctgtgagcctcagcgtctccttagctgctcctgctgcctttggcctttggcttcttgctgagcccactggcacaggaagaggcctacatggctttgcctttgtgtcctcagcctcactgccctgctggggggggtgggggcttctccttggctgcatctaatttgggagacgtcggcagctctgctggcctcttggctgcttttttcaccttgcccgagttgggagggtccttctttgcctcacctggtttgttggggccctttcccctggcctcattagctatcctgggggctgtccgggggagccatcttcctagac

SEQ ID NO: 8207 - DNA, 538 bp, Homo sapiens
  MAP TO CHR14.3; EXPRESSED IN ADULT LIVER, SIGNAL = 1.4; EXPRESSED IN FETAL LIVER, SIGNAL = 1.4; SWISSPROT HIT: P32901, EVALUE 2.20e+00; NT HIT: AL163300.2, EVALUE 5.10e-01
cagaagcaggaaagaatggcatttccgtagcaagtgccaacctttccagctgactttttaaaggcacatgtaaacatgagagagaagtaagagaaggagacacaggccttccaaacagccaaagagttcatttgaaagaggaagtgtgccacaaaagccatccaaaacaaatgcagttcctaatggacttcaagagctgaaggggttttaagtcccatggggattaaaaacaagaacaagctcaccctcaatccctccgtccatccacagagcaaccagccatggcctcagcgactggttggctgtgctggttccctgagatccagaaccagctctgatatgttcctccaggcactgagctgaagaggaagaggaatcctttggaagaaaagggagcatcaaaactgcgatctaattttctctgttcctgggggaatgttgggagaggagtttttaggcccttcacagtatctcagtgtgtacaaacacacacacacaatcaatttctcaggatgcgagatgctcctggggtagtcct

SEQ ID NO: 8208 - DNA, 537 bp, Homo sapiens
  MAP TO CHR14.3; EXPRESSED IN ADULT LIVER, SIGNAL = 1.8; EXPRESSED IN HELA, SIGNAL = 0.86; EXPRESSED IN HEART, SIGNAL = 2.1; EST_HUMAN HIT: BE008065.1, EVALUE 0.00e+00
ctcatttgaaaaaccagggcaagttattgttaggcttgggatgattattttcttcaagagattgagacagtggcctactctaataggtctccaaacttactgccctacttgccctcttagttctcatcactaatattccctacacaacagaagataaaccagacctcttcttcaaaatccttcaatagattctacttgtgcccaagacaggatcttaaacaagaccctctaaggtcccgtgctatgaaatgtttggtccttgcctacctctctaactccatccctcatctatgtattcttggtaattattttccagtattatttcttacttggaggccaagtcttgttccccctcattatctgtgctttcacatatggttttcttacagaatgagcttcaccattagctacttccacgtagctaagcttccctggcagcatcccccaaattccatgttctaattttggttcccttgccatcttctcatccacgctcttcttttccttcatcgatccttactgtgaaaagtgccattt

SEQ ID NO: 8209 - DNA, 511 bp, Homo sapiens
  MAP TO CHR14.3; EXPRESSED IN HEART, SIGNAL =  11; EXPRESSED IN FETAL LIVER, SIGNAL =   6; EXPRESSED IN BONE MARROW, SIGNAL = 4.4; EXPRESSED IN ADULT LIVER, SIGNAL = 4.8; EXPRESSED IN PLACENTA, SIGNAL = 3.8; EST_HUMAN HIT: AA312002.1, EVALUE 7.00e-72; NT HIT: gi16306564, EVALUE 5.00e-72; SWISSPROT HIT: P09896, EVALUE 8.00e-28
ttgtagaactgagggcctggcccaacagaatgggaatctggtttatcaaacatgaccaaccttcgccattctggggtgggggaagcagggaggggaggtagagaggtctaagaaggcgagaaaggctttctgtgctaacagtgcccctgcaaacatggtgaaccttcctaaaacccatcggactttctgtcacagtgtggcacacaccaatcccacaaagtgacacagtagaggaagggcaaggattctctgtatgcccagggaaagcagcatgacaggaagcagagtgactatggtgggcagactaggctgattttcccgaaaaagggtaaaactacaaagactgtgctgaaggttgagtgcgctgagctcaactgcagatctaagaggatgctggctattaagagatgcaagcatgctgaacccagagaagataagaagagaaagggacaattgatccagttgtaagcatcatcttttgtttcacggtaaagataataaaatcttgagg

SEQ ID NO: 8210 - DNA, 524 bp, Homo sapiens
  MAP TO CHR14.3; EXPRESSED IN FETAL LIVER, SIGNAL = 0.95; EXPRESSED IN BRAIN, SIGNAL = 3.8; EXPRESSED IN ADULT LIVER, SIGNAL = 1.6; EXPRESSED IN HELA, SIGNAL = 4.6; SWISSPROT HIT: Q9JHU4, EVALUE 2.00e-38; EST_HUMAN HIT: AL045688.1, EVALUE 4.00e-67; NT HIT: gi15300984, EVALUE 3.00e-67
tgtaaagtcgggcaggtaggcctgttctctttggctgaagaaagccttagtccccaggcattcaggcaggcagcctggcatgctgtgtgactctcactttgtgtgtgcaggtgggtgatgctgaagaatgtgcatctggccccagggtggctgatgcagctggagaagaagttgcattccctgcagccgcatgcctgcttccgactcttcctcaccatggagatcaaccccaaggtgggtggttgaaggagtggagacgttgcaggctggcctggcactgtgctgtcggcacgtgtgtggtggaattgaacaggcgccctcatccacacccgagcataactggaacggcgctctcccttaggtgcctgtgaatctgctccgtgcgggccgcatctttgtgttcgagccaccgccaggggtgaaggccaacatgctgaggacgttcagcagcattcccgtctcacggatatgcaaggtaagtaccttgtcctcctggtatgctttccccatagaagctaaagccc

SEQ ID NO: 8211 - DNA, 558 bp, Homo sapiens
  MAP TO CHR16.3; EXPRESSED IN ADULT LIVER, SIGNAL = 6.4; EXPRESSED IN BRAIN, SIGNAL = 8.3; EXPRESSED IN PLACENTA, SIGNAL = 5.9; EXPRESSED IN HELA, SIGNAL =   7; EXPRESSED IN FETAL LIVER, SIGNAL = 4.3; EXPRESSED IN BONE MARROW, SIGNAL = 9.9; EXPRESSED IN LUNG, SIGNAL = 7.4; NT HIT: AF053485.1, EVALUE 1.30e-01; SWISSPROT HIT: P13993, EVALUE 2.40e-02; EST_HUMAN HIT: BF183604.1, EVALUE 5.00e-02
tcttaacagggtcctcctgcgttctggccaaggcggctcacaaccattttgaaaagtatctcttcctcctgtcggagaaaatcctttagaagcttgaagtcagacatcttttctcttctctacctgcctccctctgcatggttttccacgaagagggacgaggagggcctagcggtgctggccaagtggcctgaaagaagtgggaaacagaacggcaggggcttcccagaatctctcctggtccacgggtgtcacgatcccactctgcccagttcccaggatgcccagaaaaacagagacaaggcctggggcaccctagcagctctatgtggcttatggggcatctccagctgctctatgaggttacggggcacctacggctgctctatggggttacggggcgcctcccgctgctctatggggttacggggcacctcctgctgctctatggggttatggggcagctccggctgctctatggggttatgagacacctctggccactctgtggggttcatggggcacctccagctgctctctggggcttatgagggactt

SEQ ID NO: 8212 - DNA, 520 bp, Homo sapiens
  MAP TO CHR16.3; EXPRESSED IN LUNG, SIGNAL = 2.3; EXPRESSED IN BONE MARROW, SIGNAL = 3.1; EXPRESSED IN ADULT LIVER, SIGNAL = 1.7; EXPRESSED IN BRAIN, SIGNAL =   2; EXPRESSED IN HELA, SIGNAL = 2.4; SWISSPROT HIT: P15265, EVALUE 1.90e+00; EST_HUMAN HIT: R77013.1, EVALUE 2.90e+00
tgtgatttactgctgccctgggccggccagacggcactggggggatgcccctgcctgtgtccagccctcaactaaaatgctgactctgcttagatctcctgggtgagaggattagcacttggggtgtcctcatggcaaatgtgtcctctggagggagccaagtccgtggagggtgggagacctgctcttgtttggcccgtctgctcttgcctcaagaatgtattttggtgtcagtgaacgactgcacctgctgtcccagaaacaggtctggagcagccccagcatgctgcagcctcagggcaaacctggccttaacctgctcagccccagctcaccctgggcaggccaggggtgttggcattgaggggcagtcagagtctgccaggatggtgcagacagtggtaacgtggcccccatgcctgggaagattcaaatcctttggggtagaggaagggggtggctgaggataagataatccagggggcagaaaagaaaccagagaagccagagaagctccatg

SEQ ID NO: 8213 - DNA, 502 bp, Homo sapiens
  MAP TO CHR16.3; EXPRESSED IN HELA, SIGNAL = 0.94; EXPRESSED IN BRAIN, SIGNAL =   2; EXPRESSED IN ADULT LIVER, SIGNAL = 1.2; EXPRESSED IN PLACENTA, SIGNAL = 1.3; NT HIT: L39062.1, EVALUE 0.00e+00; SWISSPROT HIT: Q01113, EVALUE 1.00e-12; EST_HUMAN HIT: BI261351.1, EVALUE 5.00e-45
atctcacttggctgggactgagaacactcactgggcctcaggggtcacaggctgcagggccctgctcccagcccccaggcagccaggatgttcttgccaaagggccctgccccaggcctatagccgctgctcaccgtgtctccagggcaggtactccgggtccaccaggctgacctgctccctcccagacacgcatttggaaagtgatgatgcaactgtcggacggcaggagcactgcctcgggcggcagcacaacggtgcactcactgcctcgcaaggtgcacttacgtgtcccaccatgagcctggttgctggaaagggcatgtgtcagcaccacggggctgctacactatcctggcatatctgctgccatcctggggacctcaccctcatccctgtccaggtgggcatggccctccaaggtcacctggtgaagaggagcccggggctggagccctgtcccagctctggggcagaccagtggcaatcgatcctgagaatg

SEQ ID NO: 8214 - DNA, 548 bp, Homo sapiens
  MAP TO CHR19.3; EXPRESSED IN PLACENTA, SIGNAL = 1.4; EXPRESSED IN HELA, SIGNAL = 1.3; EXPRESSED IN BRAIN, SIGNAL = 1.9; EXPRESSED IN ADULT LIVER, SIGNAL = 2.2; EST_HUMAN HIT: BI022759.1, EVALUE 5.00e-76; NT HIT: gi14763070, EVALUE 3.00e-73; SWISSPROT HIT: P98070, EVALUE 4.00e-03
ccacattgattccttccgacacccccgggtgcccctacctgatggtaatcatgtcaccacggtcgccctggatgtaccagctgcagttggtgcctggcgggtagttgaggggccaggccgggctgtagatgaccccacgccgctccgtgtgctgctccagcttcccactgcaggccgctgtcgggagaggaggccgagaaaggccggcccatctttggttgggatgcgggttgcagtggggggaagggggcttcagcacaggcctcccccatggtgggatcgagtccagccaagggtggccatggccaagggcaaggccacaacttgtgacttcatggaggtggtgtgtacgggaggccaaggagggccccctagacttgaggcagctgtagccccccaaccctatgcagtggactacagcataggtcctgtcccccgcatctctggcagagctgggagaaaacccaccaacaacccgtcctgccagccggcacctcacaaggtgtagcctcgtggcctcgggtcagtggagaatcccacacccctag

SEQ ID NO: 8215 - DNA, 510 bp, Homo sapiens
  MAP TO CHR16.3; EXPRESSED IN PLACENTA, SIGNAL =   1; EXPRESSED IN HELA, SIGNAL = 1.4; EXPRESSED IN FETAL LIVER, SIGNAL = 1.1; EXPRESSED IN BRAIN, SIGNAL = 1.9; EXPRESSED IN ADULT LIVER, SIGNAL =   1; EST_HUMAN HIT: AF072812.1, EVALUE 2.00e-44; NT HIT: gi14778096, EVALUE 0.00e+00; SWISSPROT HIT: O00268, EVALUE 2.80e-02
cccacctcaacaaacaaaccagaagggcacaggccagagcacagcttgcctggcagtccagtcctcatgcatgggagctcaggcctggtgggaggggaggcagagggcccagccgtggcccttgggtgccagcagtcctgggggagggaggaagcagacctgcgacgggaccgaggaatggaggggtggtcgggtgtgtggatggcagagtgacagctagggagaagccggatgtggaaggggaggaactgtgtggtatgcccaggcccctgggcccagccctggcttggcagcccttgctccctgctgagggccctgcctttccttcccctgaaacagctcccggagccctgcctgttccctgtccatccaggccagcagctgaaggagcctcacctgcctcccttctctgagtagcacggatttgaggtaagaaatcccccagaacccccattcccagtgcagcctgtggcagagatcggtccagtgtctcctccgactgccttagtg

SEQ ID NO: 8216 - DNA, 531 bp, Homo sapiens
  MAP TO CHR14.3; EXPRESSED IN PLACENTA, SIGNAL = 1.3; EXPRESSED IN HEART, SIGNAL = 1.7; EXPRESSED IN LUNG, SIGNAL = 1.6; EXPRESSED IN ADULT LIVER, SIGNAL = 0.99; NT HIT: X64696.1, EVALUE 3.20e-02; SWISSPROT HIT: O15296, EVALUE 8.50e+00
agtgttgtttggtgcttccctagagctgactcaaccttgtgcccattcttggtctccagggtccctgtgatttgggagagaaggatccacccacagctccagagattatactccaccaatcagcaggatgccctcagtgactagttctcagattattagatactcctggacctaataattggctcaggggtgtcccacaaccttagagagaagccaagggcttgtgaccgtcctgagtagagcagcactttcagctcaggttggtgaggttacgggtgtgaggccgggagccgctgcagtcagtgctgcatccttggtgggagtcagtccaagatcaccactgacacggggcaagggcaaggctgaaagaacatcagagacctgcggccaggggccagatcaaattgcaccagaggcagtcccacttctgcatggttctgttgtgagagtcaacgaattccttttatcacctaaagcagctggagttacaatcagccatacattataacctgggaaaaggcaacagactga

SEQ ID NO: 8217 - DNA, 569 bp, Homo sapiens
  MAP TO CHR16.3; EXPRESSED IN ADULT LIVER, SIGNAL = 5.1; EXPRESSED IN PLACENTA, SIGNAL = 7.6; EXPRESSED IN HEART, SIGNAL =   5; EXPRESSED IN HELA, SIGNAL = 6.6; EXPRESSED IN LUNG, SIGNAL = 6.3; EXPRESSED IN FETAL LIVER, SIGNAL =   3; EXPRESSED IN BONE MARROW, SIGNAL = 7.5; EXPRESSED IN BRAIN, SIGNAL = 6.1; NT HIT: AY004837.1, EVALUE 5.40e-01; SWISSPROT HIT: O66377, EVALUE 4.20e+00
taaaaggcaacacctgaccctccagaattggtacctgacaccctggccactcgagagtttatccctgcagggtctggccatcccaaaaccagaggcccccttgtcaagatcctcagaacctctggaagtgcattgatttgttcagtttctggcaggcagacagaaacacaagctgcagaaataaggcagttaccttttctcacagttataggtttaattaaaaagccccatgctgccagattccaagcaccctccactgatctgcgagacctattgattgcctagctctccctgcgagacttagcagagagaagactttatcttcctttaatcagacctgcttccttccaatctggctccaacaggactgctgagttcttgtgtagaacgcttccatggccccaccttcatccagccccgaatacagtgggtagagccagcatcagctacagagagctgtgatctgtgctcgcagtgtagccggagagatggcatcatcatcatcatcaccgtggccagcacaaatggaacatacaccacgtaccaggtgccgagctgatacttcaaat

SEQ ID NO: 8218 - DNA, 554 bp, Homo sapiens
  MAP TO CHR14.3; EXPRESSED IN LUNG, SIGNAL = 1.1; EXPRESSED IN FETAL LIVER, SIGNAL = 1.6; EXPRESSED IN ADULT LIVER, SIGNAL = 1.1; SWISSPROT HIT: Q03368, EVALUE 2.10e-01; EST_HUMAN HIT: BE871968.1, EVALUE 1.30e-02; NT HIT: U29924.1, EVALUE 2.10e+00
gattccctcgtttccaggtctggatgcgttgctgcgcttggcttgcagcgtggagcctgctagtgacccccgggggaagggccctccctcgggatggagccggcttccctctgcaaccacagagtggtgttttaattagtcaagtcttcaaatcattgtttactgctctccactcatgaagggtttattaaaagctgggccaagttaaaaatactggcaacagggacatgcaggccatcggagccgccgaaacaggcgccctgaaccacgaggaagccgtggtggctcctccccagggaatccctgcccacgtcctgtcggtggcccagctggcagacaacccgtcagccatgtggagggagacagggtggccccttgcagctgtgccagcactgctcagcctgtgccgagcaccagcgcgtgaccaggtctcacacccctgggtattgaaaaggcctggcagggtggaggtggggcccctcctcactccactccacccctccaggagcttccagtccctgggaagcgtgtgtggttagccacacccaatcacc

SEQ ID NO: 8219 - DNA, 532 bp, Homo sapiens
  MAP TO CHR19.3; EXPRESSED IN ADULT LIVER, SIGNAL = 1.9; EXPRESSED IN PLACENTA, SIGNAL = 1.9; EXPRESSED IN HEART, SIGNAL = 2.3; SWISSPROT HIT: Q9JIF0, EVALUE 5.00e-24; EST_HUMAN HIT: AW250676.1, EVALUE 3.00e-83; NT HIT: AF222689.1, EVALUE 0.00e+00
gtctctgtgccattcttgccctaggagatgctgaaggacgaggtgcgcaccctcacttaccgcaactccatgtttcataaccggcacctcttcaaggacaaggtggtgctggacgtcggctcgggcaccggcatcctctgcatgtttgctgccaaggccggggcccgcaaggtcatcggggtgagtctccagggtggccaggcggggccgggcctgagggatggaggggagcccatcagggctcagggattggatggaggtgatgggggcaggggatgggtctcaccctcccttcttcctgggccctcagatcgagtgttccagtatctctgattatgcggtgaagatcgtcaaagccaacaagttagaccacggtgagcccagaaagaggatgggtttgtgggagtggagggggtgatgccctgcttccccagggccctctgaagagcagtggggtctacagatgaccacagattcagcagctcccaacccatggtcttttgggctgccggccgcctgagaatctgagtgt

SEQ ID NO: 8220 - DNA, 511 bp, Homo sapiens
  MAP TO CHR14.3; EXPRESSED IN HELA, SIGNAL = 4.8; EXPRESSED IN PLACENTA, SIGNAL = 3.9; EXPRESSED IN HEART, SIGNAL = 3.9; EXPRESSED IN FETAL LIVER, SIGNAL = 3.5; EXPRESSED IN LUNG, SIGNAL = 5.1; EXPRESSED IN BONE MARROW, SIGNAL = 4.7; EXPRESSED IN ADULT LIVER, SIGNAL = 4.6; NT HIT: AF074333.3, EVALUE 7.60e+00; SWISSPROT HIT: O14204, EVALUE 1.60e+00
ttcattttctgggtgggaagcaactatatttctgtctcatgatgggaaatagaacccaaaattcaaggctttagcaatatgttgatcacacagtttgattaaggaatttcactttttcccatctttttcccttggtgtaaggggtattttcctgaatatctagctggattgcaattcacttgggaaaaaataaaattctatgccaattttcattattaaggtcctctaaatattgacctctggtaattggtaggttttggtggatggaattttacttttttgacatgacattgaattgtacatttagcactgggtctgggtgttctctctggggagagtggaattgatggttcttttttctgtcagtcccaggtggcctgtcaggagagcaggtgttgctgggatggtgcatgcattcaagagtcatagtgcaaatctcatcaaggcatgtatccccaaaccactcaggctggtatctctcctggggaagaggccaacactggcctctgct

SEQ ID NO: 8221 - DNA, 505 bp, Homo sapiens
  MAP TO CHR19.3; EXPRESSED IN BONE MARROW, SIGNAL = 4.5; EXPRESSED IN ADULT LIVER, SIGNAL = 2.4e+02; EXPRESSED IN BRAIN, SIGNAL =  21; EXPRESSED IN HEART, SIGNAL =   2; EXPRESSED IN FETAL LIVER, SIGNAL =  83; NT HIT: AF261279.1, EVALUE 0.00e+00; SWISSPROT HIT: P02649, EVALUE 4.00e-33; EST_HUMAN HIT: BG716503.1, EVALUE 1.00e-106
gctttccaagtgattaaaccgactcccccctcaccctgcccaccatggctccaaagaagcatttgtggagcaccttctgtgtgcccctaggtactagatgcctggacggggtcagaaggaacctgacccaccttgaacttgttccacacaggatgccaggccaaggtggagcaagcggtggagacagagccggagcccgagctgcgccagcagaccgagtggcagagcggccagcgctgggaactggcactgggtcgcttttgggattacctgcgctgggtgcagacactgtctgagcaggtgcaggaggagctgctcagctcccaggtcacccaggaactgaggtgagtgtccccatcctggcccttgaccctcctggtgggcggctatacctccccaggtccaggtttcattctgcccctgtcgctaagtcttggggggcctgggtctctgctggttctagcttcctcttcccatttctgactcctggctttagctctctgga

SEQ ID NO: 8222 - DNA, 576 bp, Homo sapiens
  MAP TO CHR16.3; EXPRESSED IN FETAL LIVER, SIGNAL =  67; EXPRESSED IN BONE MARROW, SIGNAL =  64; EXPRESSED IN BRAIN, SIGNAL = 9.8; EXPRESSED IN ADULT LIVER, SIGNAL =  41; EST_HUMAN HIT: BG166801.1, EVALUE 0.00e+00; NT HIT: gi14779902, EVALUE 3.00e-95; SWISSPROT HIT: P25444, EVALUE 8.00e-58
ctgtggcctctctttccttgaggggtgcaacaggccctgggcggtgggcagtgattgggtgtagggccaccagctgcctcacacacatcttttcgcaggcatttgttgctatcggggactacaatggccacgtcggtctgggtgttaagtgctccaaggaggtggccaccgccatccgtggggccatcatcctggccaagctctccatcgtccccgtgcgcagaggctactgggggaacaagatcggcaagccccacactgtcccttgcaaggtaggctggtggcaggtgatgggcctgccgtggggcaggctccctcgggcccccgtctcctgactccttccctcaccaggtgacaggccgctgcggctctgtgctggtacgcctcatccctgcacccaggggcactggcatcgtctccgcacctgtgcctaagaagctgctcatgatggctggtatcgatgactgctacacctcagcccggggctgcactgccaccctgggcaacttcggtaggtggtccacacatggggcatagccatggtctctcagctccgcttaaccacacgggtccagt

SEQ ID NO: 8223 - DNA, 531 bp, Homo sapiens
  MAP TO CHR14.3; EXPRESSED IN HELA, SIGNAL = 1.4; EXPRESSED IN PLACENTA, SIGNAL = 1.5; EXPRESSED IN LUNG, SIGNAL = 1.6; EXPRESSED IN ADULT LIVER, SIGNAL = 1.3; SWISSPROT HIT: Q10172, EVALUE 7.50e-01; EST_HUMAN HIT: AW452596.1, EVALUE 0.00e+00; NT HIT: gi13899308, EVALUE 0.00e+00
acaggggacaagacagatgggtgacaggaagagccctgcactggcccttccccacccaccccagccctgcccagccccggtcctcaccgtgtatgccacggagcagcacgtccacgccattctgatagtggttgaaggccgcctcatagtcctcactaacatcgcgctccagggccagccggatctgcgtggccgcatccaccagatagtcacgttttgtcatgtcaggcactcccagagccaccctgttgcgaatctgctccaggtacacgtgagcttgggaccgtgctcgtgagcaaggctcaggctccaggccggggctgggcaggcactcacaggccaccaggctcatggctgccctgcagctgggacctggaatgggcaaatgcattagggaggacctagctggtagcaacacccctatccgcaccccagtttcctccactgaatgtcagggagactcatattcacctccaaagactgaaggggtcagagctaaagtgggtaaggtcttttcatggatccaggtcc

SEQ ID NO: 8224 - DNA, 506 bp, Homo sapiens
  MAP TO CHR16.3; EXPRESSED IN ADULT LIVER, SIGNAL = 1.8; EXPRESSED IN HELA, SIGNAL = 2.7; EXPRESSED IN PLACENTA, SIGNAL = 1.1; SWISSPROT HIT: Q9NYV4, EVALUE 7.10e-01; EST_HUMAN HIT: BG485267.1, EVALUE 0.00e+00; NT HIT: gi16164646, EVALUE 5.00e-84
tgtttccaccctttctttgggatcctcagggctggatggagccgatccttcccgtctctccttacactcgcgcactcacgctggctggaacaagtcctccaagtagaacgaagagcgcgttttagcggcgctctagcccgccgagagcatacgccctccccacacggggcccctgattgtctgaaggttgcgctggcacgcgcaacttccgggacagaggctgtggctggaaggagctgggcatccggcctgaggcgcagcggtcgcgttagttcggcccaatggcggcaccgctgcttcacacgttgtttgtcgggagatgcggccgcttcgtcctctgcagtcaagacgctgggcgcgtcgaggactgggtaagattcaggccgcttccttctgcgcgtctgggaccaaagctcaggaccgcgcttagaggagcggattgaaaggatgtgggacaaagctaatggcgtgtgataggagcacggggtcgagggtcatctcacgtt

SEQ ID NO: 8225 - DNA, 580 bp, Homo sapiens
  MAP TO CHR16.3; EXPRESSED IN HEART, SIGNAL =   4; EXPRESSED IN HELA, SIGNAL = 6.4; EXPRESSED IN FETAL LIVER, SIGNAL = 3.8; EXPRESSED IN LUNG, SIGNAL = 7.5; EXPRESSED IN ADULT LIVER, SIGNAL = 5.2; EXPRESSED IN PLACENTA, SIGNAL = 4.9; SWISSPROT HIT: Q14764, EVALUE 1.40e+00; EST_HUMAN HIT: AW935800.1, EVALUE 5.20e-02
cccttactacctgccttcccagatacacagacaatcctgtgtttgccacaagcggaaaagaaaggcgagataggttgcaatcccttcgaggctaccccgggtcatctttatcaaaatgataaaatgttttgggtcttggcagccccctgggctgactctgggttgggcttcctgaggtattaaggggtgaaagaggtgagtgcacggctcttcctggggcatcccaggggcatctcttatgtcaccgctgatagcagttttatcaagataaatctagtgctgctctggaaggatattaataaattatctagtaatgaaaaatgtgagaggaaccatactcttacatcaggcttgtgatgattactttgatagatgcactggcaagatttcctcgacaaggcagaaatgagaaacatgacacagaagcctttaagggtgacctcagaggaaaacagaagttgctggatgatacagaagcagaaaagggaaaaccagagctccgaggcaccgcgtgtcaaccaccagatggattagctctgctgatcaaccgatcatggagtgtggagccagaagcagaaag

SEQ ID NO: 8226 - DNA, 500 bp, Homo sapiens
  MAP TO CHR19.3; EXPRESSED IN PLACENTA, SIGNAL = 2.2; EXPRESSED IN HELA, SIGNAL = 1.6; EXPRESSED IN HEART, SIGNAL = 1.6; EXPRESSED IN BONE MARROW, SIGNAL = 2.6; EXPRESSED IN ADULT LIVER, SIGNAL = 2.4; EST_HUMAN HIT: AA303113.1, EVALUE 7.00e-01; NT HIT: AF017650.1, EVALUE 4.70e-01; SWISSPROT HIT: P15196, EVALUE 1.80e-01
ggaggagctgatgacattgggcttcacacccactggggcaggagcggtgcctgatgccctttgaatgggccaggtgttgtctctctggggctccgcatgctacccgtcaccttcccgcctcagggctgacctcaaattcatgacccctggacatggcctcggagctcagccaggacgaacgttcccctgcctggctcctccccagctctcgggtctcggggaggcggctgaagctgggggaagcgtgtgaggcagaaggcaggccggacaacgtcaccttgagcctcattcacctcgttcgtcagcacttggagggttggtccttttggctggtgctggccaggtcgaggctcagagccaccggtgtccagggggatccggggtggtcctcggccttcctgcaactgccagggtggtcatcagaaaggctcctgagctgctgggagttggtggaaggtgggttgtctgagatcagctggagagttttaaacatagttggg

SEQ ID NO: 8227 - DNA, 526 bp, Homo sapiens
  MAP TO CHR16.3; EXPRESSED IN HELA, SIGNAL = 1.4; EXPRESSED IN PLACENTA, SIGNAL = 1.1; EXPRESSED IN LUNG, SIGNAL = 1.6; EXPRESSED IN ADULT LIVER, SIGNAL = 0.99; EST_HUMAN HIT: R61627.1, EVALUE 0.00e+00; SWISSPROT HIT: P47302, EVALUE 6.40e+00
tgtcccctctaaactgcacctcactacagtagggatggcataagatacttctttacacagcatctttttgttcccacctcacccccagagctgtaataggtagagccagccaaatgtcaaagggatgatttgtcttgtcaccactagtttcccttttctctgccttgtatgtaacaggaatattctttagttcctccttatgttctaaagcacctccccaacctaaaaatagaagaggagttgtgggtcatttacactttagtgtgaatttgcccttgtgactttgccaaggctgttgtgcctaaccctttcaatctaacagcagaatgagagtctctggactatcctggctccttccctgagaagaatgaactgggaattgttggtctagacatcaagactaccagagacctattgctcagagatgtttgggctgtacaatttctgtagatatggcatctggagcagccttttctaagcaatggcattatcattccaggctctctcgctctttccatctctccac

SEQ ID NO: 8228 - DNA, 584 bp, Homo sapiens
  MAP TO CHR14.3; EXPRESSED IN ADULT LIVER, SIGNAL = 3.5; EXPRESSED IN PLACENTA, SIGNAL = 2.3; EXPRESSED IN LUNG, SIGNAL = 2.3; EXPRESSED IN FETAL LIVER, SIGNAL = 2.1; SWISSPROT HIT: P20848, EVALUE 8.00e-50; NT HIT: M19684.1, EVALUE 0.00e+00
tggatattgggaagggacagtgtccacactggagtgggaagtccccagggacgagatctttacctcctcacccctgggtactgtcctcctcatggagcatggatggtcctgcctgaactcagtggtggcctctgcagtagctgtgacccagggatgtgaggtccaccctccccagccctctggccagtcctgttgggcctcagtcctgacatggctcaaaggtctgggcagcttctgactcagcccctgaactggaaatcaccttatgtcaaaggctctctggatattttcaaggtggctgtaggtcaatttttcttccaactgccacatcttctttggatcgggcaggatgaagaaggcagtggcgttccccacatagtgctgtgccagcacccagctggataactccctgtcccggtggatgtcaaatctacccaggtggtttatcataggcactctgatgatggtcttatcatccacatggaagccctctaccataatgcgctcagccttgaatttatctttccacttgcctggaagaaaaggaaggtgggcatcagccaggtgtgggataaaagggtgga

SEQ ID NO: 8229 - DNA, 502 bp, Homo sapiens
  MAP TO CHR16.3; EXPRESSED IN BRAIN, SIGNAL = 1.7; EXPRESSED IN ADULT LIVER, SIGNAL = 2.1; EXPRESSED IN PLACENTA, SIGNAL = 1.9; EXPRESSED IN HEART, SIGNAL = 1.8; EXPRESSED IN LUNG, SIGNAL =   2; SWISSPROT HIT: P90859, EVALUE 5.00e-03; EST_HUMAN HIT: AU141271.1, EVALUE 1.00e-57; NT HIT: gi15318765, EVALUE 1.00e-57
gactccccgctaatcctttcttttaaatcttacaggcatatttgctatacttcagagctaaaatggagaagaaatatgaagacagctaccatacccagaaactaagatggcaaactatgggtgggaaacagtcctatgatgtagggaagaggctaaggaacaaagaaggatacccaagagcttcccagaacactcagtgccagcagcaaggccaggctgaggtaatgtccccactcctccactaggatgagtctcgagcctgggtacacaaagcacacacacgccctggacagaacacctgtcccacatggcccttcacaaagctcctacttgtggaaaagatgtccacagggcagtttccgcgcagcctgcatggagtcccaacagatggcacagtcgtcattgttgacagccagctcctctggagttgcaactgcaaacctgtggaaacaaaacaagcccagcaggaacctcagtcagttccacacgcacactaaacacc

SEQ ID NO: 8230 - DNA, 569 bp, Homo sapiens
  MAP TO CHR14.3; EXPRESSED IN HELA, SIGNAL = 4.5; EXPRESSED IN HEART, SIGNAL = 8.2; EXPRESSED IN LUNG, SIGNAL = 4.5; EXPRESSED IN FETAL LIVER, SIGNAL = 7.3; EXPRESSED IN BONE MARROW, SIGNAL = 5.3; EXPRESSED IN ADULT LIVER, SIGNAL = 4.7; EXPRESSED IN PLACENTA, SIGNAL = 3.6; NT HIT: X17206.1, EVALUE 1.00e-20; SWISSPROT HIT: P25444, EVALUE 3.00e-33; EST_HUMAN HIT: AV759163.1, EVALUE 2.00e-20
gtcttggcacagttgctcagagggtggtgcaacccctggctaaggtgtagcagtcatgagtaccaggtataagcagcagctttttgagtgcaggacctaagatgttgacagtgcctttgggggcgagggtgaggcacatcagcacagagccgcagcagccagtcacttgcagtgcagagtgtggagcttgctgatcttgttccattggatccttgctgcatggggatgatggagagcagggtgataaccccacagatgctactgtccgcctccttggagcaattatccagactgatgtagccattgtagtcccttatggtaacaaatgccttgaacctggtccactggccagtgtgggtctgcttttgccacaagtatagtcttcaaaacctcacctgtgagagggtgtccccagaaatgtcgatgatctcagattccttgatgggcagggagaagagagagatctgctccagggacttgattttcatgttcttgtccaggcagcccagcatgcggatggtgacacactccttgtacttggtcttgcttctgtgagctctgtggtgtgg

SEQ ID NO: 8231 - DNA, 593 bp, Homo sapiens
  MAP TO CHR16.3; EXPRESSED IN HELA, SIGNAL = 1.4; EXPRESSED IN BONE MARROW, SIGNAL =   2; EXPRESSED IN BRAIN, SIGNAL = 1.5; EXPRESSED IN ADULT LIVER, SIGNAL = 1.1; NT HIT: gi15298167, EVALUE 5.70e-01; SWISSPROT HIT: P18488, EVALUE 6.70e-01; EST_HUMAN HIT: BI829631.1, EVALUE 2.00e-75
aagcaatgtgtctgtggcaggtggaagtgctcagagccttcctcctgagaacagggtggcgtgggctctggagaggggacctggatttgggtcctgactcaagttgggcaaaccgcctgccgtttctgctcatctgtgaaatggagtcacgcatccctgctgtggaggagttgggtgaggacttggttgaatcagcgatgggtcacagcctgcagaggcactcaagggtgtgcgcggcatggggtggcgatggagcctgctggaggaagggaagggtggtgagggtctcattattctgaccgtcctcgatatcaggtgtcaggaggaggcagaggtggtacctgtcacagggcgaaggccagggggctgcttcctcacctggctccttccccaggtccctgcttccccttctcggtgagcgcggaactggatggggtggtctgccctgcgggcactgcgaatagcaagacggaggccaaacagcaggcagcgctctctgccctctgctacatccggagtcagctggagaacccaggtaatggagggagggccaggcagctgagccgcagctggggacaagaggactgaggctg

SEQ ID NO: 8232 - DNA, 599 bp, Homo sapiens
  MAP TO CHR16.3; EXPRESSED IN PLACENTA, SIGNAL = 1.5; EXPRESSED IN LUNG, SIGNAL = 1.3; EXPRESSED IN ADULT LIVER, SIGNAL = 1.3; EXPRESSED IN BRAIN, SIGNAL = 1.4; EST_HUMAN HIT: BI831084.1, EVALUE 0.00e+00; NT HIT: AF113943.1, EVALUE 2.30e+00; SWISSPROT HIT: P26371, EVALUE 5.00e-03
ttcacctggctgtcactcacctgggcaccactcgcctgggtgccaccacctggaccccacttacctggatgtgactcacttgggcaccactcaactgggtgccactcacctgggtgttatgcacctggacaatgctagtcacgtggatgccactcgcctgggtgtcactcacctgaatgctactcacctgggtgccatttacctggatgatgtcactcacctggatgtcgtcactcacctggatgtcacctaggtgccacttacctggatgatatcactcacctggatgccactcacccaggtgtcacctggataatgccactcacccgaatgccactcacctgggtgccactcacctggaagctactcacctggatgatgccactcacacagacgccactaacctgaatgtcactcacctaggtgtcactcacctggatgctactcacctgggtgccactcaactgggatgtcactcacctgggtgccacccacctgaacaccactcacctgggtgtgtgagaacagtggaagttcctggaacatagttggcattcatccttcccaatgcttgctctagacgaggaagccatgatgtt

SEQ ID NO: 8233 - DNA, 550 bp, Homo sapiens
  MAP TO CHR16.3; EXPRESSED IN BONE MARROW, SIGNAL = 1.2; EXPRESSED IN ADULT LIVER, SIGNAL =   1; EXPRESSED IN BRAIN, SIGNAL = 1.6; EST_HUMAN HIT: BG718350.1, EVALUE 1.00e-76; NT HIT: AF101388.1, EVALUE 5.20e-01; SWISSPROT HIT: Q01631, EVALUE 5.00e-05
atgcaatacccatttttgcctttgctctttagattttctcaactgaagggcctgaacttgtcccataataaacttgggttgtttcctatattgttatgcgagatctctaccctgactgagctcaacctttcctgtaatggatttcatgacctaccaagtcaaattggcaatctgctaaagtaagtaacttttactagattcctcttttcccttgcagaataaggaacttgcctggggtttggaatgaaggtagtatcttgaactcttgcagtgaactatatcatgtactacttaggattctagtcagcagcagtttttgacctcagagatatacctgcccatagcagtgactgatccctcagcttcaacagcagcggtcttaactcttttaatgttggagggaccatttgtttaagttgtgtgtaaatcatctattaagtctgcatagatggagagttaggacactttactattttgggattgataataaattagtgacataaatcagaatccctaactctgattctgtgcattccagtgaaacctttca

SEQ ID NO: 8234 - DNA, 562 bp, Homo sapiens
  MAP TO CHR19.3; EXPRESSED IN BONE MARROW, SIGNAL =  24; EXPRESSED IN ADULT LIVER, SIGNAL = 8.4; EXPRESSED IN BRAIN, SIGNAL =  11; EXPRESSED IN HEART, SIGNAL =   8; SWISSPROT HIT: Q14002, EVALUE 8.00e-50; EST_HUMAN HIT: AW951207.1, EVALUE 0.00e+00; NT HIT: U04349.1, EVALUE 0.00e+00
tattcttggtcaaggctgggtctgcccaggtttgcttgtggcagaaagtcatggccagcctgggtgcctagaggtgagggtctgtgtacttggacctgagagggactaagaggcctggtctctggctgcatggatttgggctgtcagcctgggccacagaggaacagaagatactcacagcggacattcagggtgactgggtcactgcggctggcacccactgggttctgtatttcacattcatagggtcctatgtcattctttgtggcgctgagtagaacgagggtcctgttgtcagtggagagcagcagcctgggactgaccaggaggctctgattgtttacccaccacaggtaggttgtgttctgagtctcaggttgacaggttaaaaccacaatatctttgttctccaccggattgaagttgttgctggtgatggagggcttgggtggctccgctgtgcagataagagagagaaaagattgccctgtgtggcccccttggttcccccacggacatctttcaatcagagttggcatctcccacctctaagcccactcaa

SEQ ID NO: 8235 - DNA, 515 bp, Homo sapiens
  MAP TO CHR14.3; EXPRESSED IN FETAL LIVER, SIGNAL = 3.4; EXPRESSED IN LUNG, SIGNAL = 1.7; EXPRESSED IN ADULT LIVER, SIGNAL = 1.7; EXPRESSED IN BRAIN, SIGNAL = 2.2; EXPRESSED IN PLACENTA, SIGNAL = 1.8; SWISSPROT HIT: P16621, EVALUE 2.10e+00
cacctggaaggagctgagacgtatactaaatgtatatagaagtattatttgattggaagaaacaaaaaatgcattgtattataatctgtcttcccttgccgtctggtagcttaactgtcagcaattttggaggaaagcccttcccagcaggggactgggaacccctgggcaatgtctttcctatgacacatggatctctatggttgaataaggggctgaaggaggaaatagacaacaggggtcagagagcaaggctagaggaggcctttgagaaaagagagttgtgcccccttttcagtgagtgtggggcctctggaggttggcaagaagaggagaaggtgaagggtttcagcactgagagaatgatgtttctggtggggctttgccagaagggggctcatcacatgtgagtttttgcactcgtaagcctaaggggcacaatgggttttgaaatcccaacatatccaactaagaacaggaagccctgggactcagcacagacttgagtcccccat

SEQ ID NO: 8236 - DNA, 503 bp, Homo sapiens
  MAP TO CHR16.3; EXPRESSED IN FETAL LIVER, SIGNAL = 0.9; EXPRESSED IN ADULT LIVER, SIGNAL = 1.2; SWISSPROT HIT: P51740, EVALUE 3.50e+00; NT HIT: M13008.1, EVALUE 3.10e-02
gagggaagagaacagaaggaaacagagaaaggaggatttggaaagtaaagaaactaaggagaaagaagtatggaaataaaataataaaagaatgggataagttgaatgtcagaaagagaagatgcgagccaaccaagaaaatgacagagttacgtagggtggaagggcatctccaacaattaccccaacctgcatcataacctgcctctttcaccttccagagggagcagacctcattctcttctaccacattgcattgcgtgaaaccactgctgacactccctcccacgatgcaggctccctgggctcccctgagcagctattctttcagactcaggcacgcatgaaaattgagttcagctaaatgcaaactgaactccagaagacctgctcctacccatcactgtaatcgttaagggagaaaattaattgcctgaggccagagtgtcgaaatccaactagacatctcctcccaagtgacctgtccctgagcagattgtggt

SEQ ID NO: 8237 - DNA, 575 bp, Homo sapiens
  MAP TO CHR16.3; EXPRESSED IN PLACENTA, SIGNAL = 2.6; EXPRESSED IN HELA, SIGNAL = 2.7; EXPRESSED IN LUNG, SIGNAL = 2.4; EXPRESSED IN BONE MARROW, SIGNAL = 2.8; EXPRESSED IN BRAIN, SIGNAL = 3.4; EXPRESSED IN ADULT LIVER, SIGNAL = 2.4; EST_HUMAN HIT: BG165855.1, EVALUE 2.00e-01; SWISSPROT HIT: Q10102, EVALUE 1.90e+00
tttgaacgagtgctgaggtggactgcatcacttcagaactttgattgctgtcactcagtgattttaaaattgaattgttttgttcttaaagagtcagaatatgtcactgtcttcagaaatattctcaaaattatggggaggaagtgatacacattcttatacaattatagagcactaaaaaaaagaaacgtattttgtttttaatataaaattaacaggttttttaatagggaatagaaaaaaacagaaaggagaaagattatgcttcatgcttctcagaagactttgttcccttgcagaattatttgacaataaaattatttctagaaaaactcacttttcttgcttatatttatctcgtctccattctctcctttcttttcacctccctgtttctttcttccaatgaattcttttagaagccatggattctggtcaaggtagatgcaacactttggagttagtgagaagaggtcattcctccatccagctttctgctttctgatctctcttccctctgctgaccaacctgttgcccaatggatataataaaagaaagactacttgccactggc

SEQ ID NO: 8238 - DNA, 553 bp, Homo sapiens
  MAP TO CHR18.3; EXPRESSED IN ADULT LIVER, SIGNAL =   1; EXPRESSED IN HELA, SIGNAL = 0.99; EXPRESSED IN PLACENTA, SIGNAL = 1.3; EXPRESSED IN BONE MARROW, SIGNAL = 1.7; SWISSPROT HIT: P98161, EVALUE 7.00e-10; EST_HUMAN HIT: AI652668.1, EVALUE 0.00e+00
aaatgtgagattggggcatctcagtgagagggtgggggccctagcccctcagacagaagggaagaggtctctccaggtgagtccatccccccgcttcttgtccagccacctgccacagttgaagatggtggccacgccggtgctggtgttggtgacctccaccttctccaccagccagcctgagcagtagccactgctgtcgtgctccaggcgcaccttgcgcagctcacccagctccagcgtctccaggaagaagcggtctgtgctgccccgctcgaagaggttgcgcattttctgcttcagctcccgcttgcctgtgtctccgttggccccaaagatggtcacgaagacgttggcatcagtgcctgcccctggctcatagcctgttgtcacgatgacttcgtacttgacgggcaccaggctctggaccttgctggcaaagctctctgtcgtcttggtaacctcgaataccttgaagtacttcctcttcctcttgagggggatgaggcagtcacagttaaagaagtacctggcagagaggtgggagagtgga

SEQ ID NO: 8239 - DNA, 548 bp, Homo sapiens
  MAP TO CHR14.3; EXPRESSED IN ADULT LIVER, SIGNAL = 3.4; EXPRESSED IN PLACENTA, SIGNAL = 2.6; EXPRESSED IN HEART, SIGNAL = 3.5; EXPRESSED IN FETAL LIVER, SIGNAL =   3; EXPRESSED IN BONE MARROW, SIGNAL = 2.6; EST_HUMAN HIT: AA482275.1, EVALUE 7.70e-01; SWISSPROT HIT: P12946, EVALUE 1.80e+00
tcagtgaagcaatggactggggcgttatcagagagtccaaaaggtctgtgatttgcttcttttaaaacaggctcagctccaaagaggctccacaggttggctctgacaccagcccacagagttggggtgacttttgttttactcatctatgtgctttggggtgccacttcattgtcacactgtggtgactcccgcactgggtgtgagccctttgggggcaggatgtggtctcagccacctctgggagcctggcccagagctaacccagtggtgcccatggagtggccacaccgtgccccactgagcatctgggccacctccatagtgggagacgggaggctgctttccaatcagagcttcctgattgagcgtctcgctctgtagaggcgtctctatgttggggtgaaatttccgcaggataggttcctagaaaaacaatgatgaggtcaaacattttattgcccttggtcaacatttatgcttgactgccattctgtttctttcagggtataggtttctgggtccccccaaactcctgtcacttggca

SEQ ID NO: 8240 - DNA, 589 bp, Homo sapiens
  MAP TO CHR14.3; EXPRESSED IN HEART, SIGNAL = 2.3; EXPRESSED IN LUNG, SIGNAL = 4.8; EXPRESSED IN FETAL LIVER, SIGNAL = 2.4; EXPRESSED IN BONE MARROW, SIGNAL = 4.6; EXPRESSED IN ADULT LIVER, SIGNAL = 3.3; EXPRESSED IN PLACENTA, SIGNAL = 3.7; EXPRESSED IN HELA, SIGNAL = 4.1; SWISSPROT HIT: Q07081, EVALUE 9.00e-07; NT HIT: gi14777593, EVALUE 1.40e-01
ctttagaactcaccacgggccagctccatgtccccagctgggcactgtgtctctgactcaatccattcctttcccagccctcaggatcctgtgctaatgaaggcatcatcagcttcagccacgcttttgttctctacaccatcccttcaaagatggaggttggggcaaggacccctccctggaaccaggccaaaggttcagtattggaaaagcattgattctttccccatagtccttaaatattctttttacaaagactacaccagattaaaacagttccgtggcacaatctctacaggtctgttaattcaggacagagctctggaattaatggccaagaacaagaaccagctttattataactgcatcaattccaacaacatgtgctgggtaaatattacctccaacaaggtccaaactagcctatagccaaatgcagcttataaccatgattttccctatacttcttcctcctagcaagatttggacttctctcttgatgaatcaggcctctaggtcatacatccaactggagaagccagaagtaacatcatcttggccaaaaccaacaagtccacctcccagttgt

SEQ ID NO: 8241 - DNA, 512 bp, Homo sapiens
  MAP TO CHR14.3; EXPRESSED IN ADULT LIVER, SIGNAL = 1.5; EXPRESSED IN PLACENTA, SIGNAL = 1.2; EXPRESSED IN HELA, SIGNAL =   2; SWISSPROT HIT: P15711, EVALUE 1.20e+00; NT HIT: AF117897.1, EVALUE 1.90e+00
ttcacagcagttagcatgggtgtgttttgtagggatgacctgtctttgtggaagggcacaggtaagccaactacggcacaaaaaggtgctgggtctccggggccgcacaggagccacggaggaggggaagggtttctctgatgctcaggaagtgagtcggcggaagtgggagcgcggcaagcggatggagccagcgagaaacacatagccagggttctgtcgcatgacccccgacggcacctgctccccatcagcagcatcatactccggtaacttctggaaatgcttgaaagagtggagttttgtggaaattggacctggggctgggttctgacggaggaagcaggaagtcaagtaggtggggagaggatgaggagggagaagtctgggcaccggtcaagtggactctgaaatggtggggaggggctggacgttcatagtaatgtggaattgggctgcgggctagatttaatatgattttgaggagcaggaggtcctctatggatggcaga

SEQ ID NO: 8242 - DNA, 526 bp, Homo sapiens
  MAP TO CHR19.3; EXPRESSED IN HELA, SIGNAL = 1.6; EXPRESSED IN LUNG, SIGNAL = 1.6; EXPRESSED IN BONE MARROW, SIGNAL = 2.3; EXPRESSED IN ADULT LIVER, SIGNAL = 1.5; EXPRESSED IN BRAIN, SIGNAL = 2.4; EST_HUMAN HIT: BG758655.1, EVALUE 3.00e-68; NT HIT: gi13375967, EVALUE 5.00e-69; SWISSPROT HIT: Q13360, EVALUE 3.00e-10
tccatcaagctgactgcaagactcctgacccccaaaccctttcctgcacagctgtggggcagcttggggagagaaggtggtagtatacacagcccaggcctattacaatagctacttcaggatactggagaaggaatgagtgcccacagttcagctttgggaagaacagacctctccctaggaaaaggaggaaaagccgagcccagctcaggatgctggggtggggtgtgagaaccttacccagagaggccagaagtgtaaagttctccagcatcacattgcggtagaggagcctctgagcgtcatcaagcaatctccattcctcctgggagaagtagacagccacatcctcaaaggtcacatagccctgctaagatggacagagtagagtttatctgcagcctccttactgggaaatttaggcatctgcctaaacatccacccctgctcaccctcttccttaatccccatctcagaggagagaccctgccccagagccactgatgcccactctctcctcatgctc

SEQ ID NO: 8243 - DNA, 569 bp, Homo sapiens
  MAP TO CHR16.3; EXPRESSED IN ADULT LIVER, SIGNAL = 1.1; EXPRESSED IN BRAIN, SIGNAL = 0.99; EXPRESSED IN PLACENTA, SIGNAL = 1.1; EXPRESSED IN LUNG, SIGNAL = 1.4; NT HIT: X86744.1, EVALUE 1.40e-01; SWISSPROT HIT: P23091, EVALUE 5.50e-02; EST_HUMAN HIT: AI024399.1, EVALUE 4.00e-83
attgccttggctttcaagtgaaacaagagggtttctagagcacaacagagttacaaaaccacccctagtttaggcaagtgagaagaccacagtgcacagggtggggctcccagtgatgaggaagccacgcagtggtacagcccgagctgcatctcagaactccacccacaccctgcactctactgagttgtgggactggatgtcctgattgaaggagggtccatttttcagacccagtgcacctagaagctcctgagactcaccccttcccgttcctggattcccaggggttctcctgcctcctctggcctccctcacttacttcaactgcgggatgtccctgcacagctccatgttggggcgccgggtccggcactccagccttgtctgggccaccttcagcgggccctccttggccatgatggacctttccagcagcatgatggtgttctcggcctggaagatctcctgcagcgtctgcgagggaacacacaggtgtcaccacccaccaggcccttctgacctcctctgactgggggcctggggggagcaagtcagctaggtcagcc

SEQ ID NO: 8244 - DNA, 599 bp, Homo sapiens
  MAP TO CHR19.3; EXPRESSED IN ADULT LIVER, SIGNAL =  16; EXPRESSED IN BRAIN, SIGNAL =  19; EXPRESSED IN HELA, SIGNAL =  12; EXPRESSED IN HEART, SIGNAL = 9.8; SWISSPROT HIT: P06731, EVALUE 5.00e-41; NT HIT: M59260.1, EVALUE 0.00e+00; EST_HUMAN HIT: AW858762.1, EVALUE 0.00e+00
cggccttacagtctctgagccctcagatcatcgtacatctgtcttgtgatacacacacctgccatgggcttttaaggactcgggtgggctgaagggtgggagttgccaactctgattgaaagatgcctgtgaggaatcaaaagtgccacacagggcaatcttctctctgttatctgcacagcggagctgcccaagccctccatctccagcaacaactccaaacccgtggaggacaaggatgctgtggccttcacctgtgaacctgaggctcagaacacaacctacctgtggtgggtaaatggtcagagcctcccagtcagtcccaggctgcagctgtccaatggcaacaggaccctcactctattcaatgtcacaagaaatgacgcaagagcctatgtatgtggaatccagaactcagtgagtgcaaaccgcagtgacccagtcaccctggatgtcctctgtgagtatcttctgttcctctgtggccctggtttccaacccaaatccacacagccagaggccaggactctcagttctcctcaggtccaaagaggcagactcccacccctggacacccaggctggccataacttcctgtc

SEQ ID NO: 8245 - DNA, 507 bp, Homo sapiens
  MAP TO CHR19.3; EXPRESSED IN HEART, SIGNAL = 1.6; EXPRESSED IN FETAL LIVER, SIGNAL =   3; EXPRESSED IN LUNG, SIGNAL = 1.7; EXPRESSED IN ADULT LIVER, SIGNAL = 1.4; EXPRESSED IN PLACENTA, SIGNAL = 1.4; SWISSPROT HIT: P06914, EVALUE 8.20e-02
gacagcactgttgaggaggctgccaggggagccttcgggagggaggggtggcctgcacaggtccctcaggtgcacccactgcaggcccctggccttgcctggaggaatctggttctaaatcagggcgaatgctattaggaggtctgaggactcacatcggccgggacgcaggacgcgggacccaggacccaggacccgggcatcgccactcctctgcaccactgtccacagcacccccagcggggtctccatctccgtgttctcaaagccctggctgtctgccccccgtacccactccctctgttctggaatgctgtacacaagtccttctggaagacagtaaaccacaaagtcatagaaactcggctccgcatctccagcccgggatctggagccatatacctggtagccacccttggtgtctggtgctggccgcagaaggctccacaagctccgtgagagccatacgtggtggtgaccaggaggtcaagaaacaaacccaggcat

SEQ ID NO: 8246 - DNA, 545 bp, Homo sapiens
  MAP TO CHR14.3; EXPRESSED IN BRAIN, SIGNAL = 3.1; EXPRESSED IN ADULT LIVER, SIGNAL = 2.4; EXPRESSED IN PLACENTA, SIGNAL = 1.7; EXPRESSED IN HELA, SIGNAL = 1.9; EXPRESSED IN LUNG, SIGNAL = 1.9; EXPRESSED IN BONE MARROW, SIGNAL =   2; NT HIT: gi16168817, EVALUE 5.20e-01; SWISSPROT HIT: P16869, EVALUE 3.50e-01
tggctgttcacaaagagctggccaaggacattccggctatgccaggccaccgggccaagttcccagggacagcaatccaccgcctctctccccccatcacacccaagggaagcacacaaagtaggcctgggtccatggcctggcagacacctgtccccggctttctgggacagtgcactgcatcagctgccagcaaaacaaccagccccttttcaatgggccagtgggcagggctgccattggcggagccctggtgatttacgacaccccggctcagtgcaccatcagggagcttccaggtagaatctccaacttcaccaggcaagggctctcccttccagtgatttatggagccagagtgagccagttgttttttttccctttccctcctccctcctcctccaggacaaataggtttcacatcgctgtgggcactctggtctgcaatgacaagacaaagaggttccacttgtccctctgccccctgcacctgctgtcaggggatgatggttattggtcagcagccacatccatttcactggcac

SEQ ID NO: 8247 - DNA, 548 bp, Homo sapiens
  MAP TO CHR19.3; EXPRESSED IN HEART, SIGNAL =   2; EXPRESSED IN HELA, SIGNAL = 2.7; EXPRESSED IN LUNG, SIGNAL = 4.3; EXPRESSED IN FETAL LIVER, SIGNAL = 3.2; EXPRESSED IN BONE MARROW, SIGNAL = 3.4; EXPRESSED IN ADULT LIVER, SIGNAL = 2.6; EXPRESSED IN PLACENTA, SIGNAL = 3.1; NT HIT: AF019413.1, EVALUE 2.10e+00; SWISSPROT HIT: P37938, EVALUE 2.70e-01
tatcaggaaatgggctcagggaggggctgggtggggctggcccttcccggaactgaagtccggggacctggctttaattgactattgatttgtattgggacgacgtgaaggctcagggcactgtccccaggggtcctggtggccaggagtggatgggtggggcagacagggaaccaggcccagccctggagagggaaatcattaaagtccactgggtgcctctggggtgctgagccccattaaatgttctctgtgttttctgctgtttaacggattaggaaaccgaggctcaccaagggtcctgcatggaggagggggctgggctgggttaggatttgaggccagagcccggctctcagtcgagcccagagtccacatcctctgggcgcccaggctgccaaaattgcccgtcagtgtgtcccccatgctggcttcatggaacaacttgagacgccaagatctgggggtacccctgcttctgctcacacacccacgggggctcccagctcctgtgctcgctgctctgggcccttcttgatgtgactgca

SEQ ID NO: 8248 - DNA, 583 bp, Homo sapiens
  MAP TO CHR18.3; EXPRESSED IN LUNG, SIGNAL = 8.8; EXPRESSED IN ADULT LIVER, SIGNAL = 7.8; EXPRESSED IN PLACENTA, SIGNAL =   7; EXPRESSED IN HELA, SIGNAL = 6.6; EXPRESSED IN HEART, SIGNAL =  10; SWISSPROT HIT: P41832, EVALUE 2.90e-01; EST_HUMAN HIT: BE280617.1, EVALUE 5.30e-02
caacaagctcccaggcttacgggggaggtcaggggaaagtgatttcaattagaaggggatcaccggggtctcaagccagcacagacaagttgtgcaacaccagcggcgcggagaccggagtcatttatccttcccgaggccagtcagccttggctttgcaggaagcccctgtgccccctcccacccccatcttccttctctttctggcttttgaaagaaaagggaaagaacaggaaaacagaaagagtggcctgccgctaaatttctcatctctggcggctgaggacaaagacgactacacgcagaagagaaggcacccaaggattgccagaggttccgcctcttgcctccaggcccagacaggtctggaaggtttcaaggttggaagcagaaaaaggaaaatgaggagaggcaggctagcagcctgggagccttctgctcttccttttctttttgtctgaactcttcccatcctcagagcccatctccaggcctccgcctcctccatgcagtggccctggctttgccttctctgggtattcagagcattgttctatcctgccctgccttggtctcccagtag

SEQ ID NO: 8249 - DNA, 530 bp, Homo sapiens
  MAP TO CHR16.3; EXPRESSED IN ADULT LIVER, SIGNAL =   2; EXPRESSED IN HELA, SIGNAL = 3.1; EXPRESSED IN PLACENTA, SIGNAL = 1.2; EXPRESSED IN HEART, SIGNAL = 1.7; EXPRESSED IN FETAL LIVER, SIGNAL =   1; SWISSPROT HIT: P13667, EVALUE 1.70e-02; EST_HUMAN HIT: BI461137.1, EVALUE 1.00e-121; NT HIT: gi14775331, EVALUE 1.00e-121
aatcgccacaattggaaatcctttctgttgctttatagaaagctctgtaacttagaaacgactcctggagttcaccttggcaaagtctgcccgttgggcaaggtgtctctgtggggacatcctgccctacatataggactgacagtcatttgattcttaagctgaatgtgagcattacctgatctgaaagccgacttgctgcttgctcaatttctgccctggcagcgatggactgtccacaccaaggggcatagaagaagagcagtaccacctctgaatcccgtcgaacgtactctgcataatccagctgcccctggaagaggtcaaggactggagacctcaaggagaaaaagctgacaggtggctttgctggtattatcacatcttttgctcgactaaaaaagagcaaacacagaaaagattgcttagtttatcttcttctaaaaatagctctgtggaagtagaatgaagcttaaaaggaaaatcctcttttgaataagaaaatggagtcccaaaatcactgccctaga

SEQ ID NO: 8250 - DNA, 526 bp, Homo sapiens
  MAP TO CHR18.3; EXPRESSED IN FETAL LIVER, SIGNAL =  12; EXPRESSED IN ADULT LIVER, SIGNAL = 1.5; EXPRESSED IN BRAIN, SIGNAL = 1.5; EXPRESSED IN HELA, SIGNAL = 2.4; SWISSPROT HIT: P22830, EVALUE 3.00e-26; EST_HUMAN HIT: T87808.1, EVALUE 1.00e-88; NT HIT: AJ250235.1, EVALUE 0.00e+00
gatgtcagccacagtgatccctgggcacctggtttaaggaaagcacaggtttcccctcccactgcatggaattaactcaatgtgttgagattattactcagatgaagtattattcaggagaatgaggacaccgtacatgcaaacaaatacagtaaacaatatttctgaatgatacattagttagttgcagaaaaaatttccttttaaaacaagtcatgatgggaaaaaggcagatgggtgcatttacctccttggctaaaacttgagagtactcgatgtccagctcatacagcgtttcaatatggtcactggtaaatgctatcggaaccaagaggatattcttcctccccctctcacaaagccctttgatagattcgtctgtttgaggacccaaccagggcatcggaccaacctatgcgaaagatagacgaatgcgtaagtggactatgcctcctgacggtctgtagtacccctgtttgcccccctgggcacacgcactgcccatgcggcaagagccactctttac

SEQ ID NO: 8251 - DNA, 506 bp, Homo sapiens
  MAP TO CHR19.3; EXPRESSED IN ADULT LIVER, SIGNAL = 3.9; EXPRESSED IN HELA, SIGNAL = 3.5; EXPRESSED IN HEART, SIGNAL = 4.7; EXPRESSED IN FETAL LIVER, SIGNAL = 5.1; EXPRESSED IN LUNG, SIGNAL =   4; EXPRESSED IN BONE MARROW, SIGNAL = 3.3; EXPRESSED IN BRAIN, SIGNAL = 4.7; NT HIT: gi13430887, EVALUE 1.00e-41; SWISSPROT HIT: gi12644096, EVALUE 1.60e-02; EST_HUMAN HIT: BI766100.1, EVALUE 0.00e+00
tatggctgaaggggactgaggccaagctgggcaaggagaactcgggcgcagattgtggagattactgtggggaggcctgagtcccgccacagccacatcaccccggttccaactagcccctccctcactctcaggatgtcggactggcactgtcactgtttctaggcttccagggggtcctggagtcttagctgtggatctcccaaaacctgcaggtcagagggacacagagcctgggcctctaggagcagacgacacagagtagtgaagaccagacctggagctcccgctgcagcgagagacaaaggccccaccaaacccagaagtcgtcctgttcgcttcagcttcatgcctgatttgaggatttcctgcccagcgtccctgactggataatgcttaaggctccgccccttcaggccctgagtgacagaagatgtcatcagatgctgggctgagtgaagaaagactgacaacctaagctgcagccttttcaggcagggtttcct

SEQ ID NO: 8252 - DNA, 577 bp, Homo sapiens
  MAP TO CHR16.3; EXPRESSED IN PLACENTA, SIGNAL = 2.9; EXPRESSED IN HELA, SIGNAL = 5.9; EXPRESSED IN LUNG, SIGNAL = 3.9; EXPRESSED IN FETAL LIVER, SIGNAL = 3.5; EXPRESSED IN ADULT LIVER, SIGNAL = 3.2; NT HIT: gi13649869, EVALUE 2.00e-47; SWISSPROT HIT: Q13263, EVALUE 5.50e+00; EST_HUMAN HIT: BE275078.1, EVALUE 2.00e-94
aacagtggaaacagaacccggtgacctgagccacctagtggctggggaccctcccctctacctggcggaccagcctggcgacctctgcccctccccgggcccctgggcctttggcatgatgctgatggggcgctgtgggcagtgaagtcccttgactcaaagcagagacttgaatgggtgctggagagtggggacagtggagagggcggggagggggagagggcagggaaggcctggcaggcccccagggctagggggagcagcggaagtggaggaagccaggagctggggagatggtgtctatttttgttttctgaaaaggggcgcctaggggcttgcacacaggtggcagctgcagctggggtgggtcacgcactgacatccccgcctgtcttgggaacagcttccagcagccggtccctgaacactcctcctctccctccttggcctcgctgacctcagagttggggacccggaggccggcgtcgatacactgctgcatggggaacttggccttggtggggtccatcttgctgcatttgcgcgtccttcgcattgaagcccttttggagttcct

SEQ ID NO: 8253 - DNA, 574 bp, Homo sapiens
  MAP TO CHR19.3; EXPRESSED IN PLACENTA, SIGNAL = 2.1; EXPRESSED IN LUNG, SIGNAL = 2.5; EXPRESSED IN ADULT LIVER, SIGNAL = 1.3; EST_HUMAN HIT: AI394679.1, EVALUE 2.00e-60; NT HIT: AF135025.2, EVALUE 0.00e+00; SWISSPROT HIT: Q9UKR0, EVALUE 4.00e-27
tcttttggttagccattgccattgtcctccgggaaagtgattatactcttttgtctaatgaccagacttggagccctccccaaggcccaggactgggttgaagggttggggaggaaaacagaaataagatgtctcccttgttcagacagtacttctcttcccttccagggtgattctgggggccccctggtgtgtgggggagtccttcaaggtctggtgtcctgggggtctgtggggccctgtggacaagatggcatccctggagtctacacctatatttgcaagtatgtggactggatccggatgatcatgaggaacaactgacctgtttcctccacctccacccccaccccttaacttgggtacccctctggccctcagagcaccaatatctcctccatcacttcccctagctccactcttgttggcctgggaacttcttggaactttaactcctgccagcccttctaagacccacgagcggggtgagagaagtgtgcaatagtctggaataaatataaatgaaggaggggccatgtctgtccatttgaagtcctcatgctggttgagactg

SEQ ID NO: 8254 - DNA, 566 bp, Homo sapiens
  MAP TO CHR19.3; EXPRESSED IN BRAIN, SIGNAL = 7.4; EXPRESSED IN ADULT LIVER, SIGNAL = 4.6; EXPRESSED IN PLACENTA, SIGNAL = 4.9; EXPRESSED IN BONE MARROW, SIGNAL = 5.9; SWISSPROT HIT: O00268, EVALUE 1.10e-02; EST_HUMAN HIT: BG259593.1, EVALUE 1.00e-100; NT HIT: AF243529.1, EVALUE 9.00e-77
ctaggcctgagaagggaagcagtaccggtacccagcttagcatccgccaagggtgctgggcactgcaagctgaccccagtctatatgctgtatttgggaccctcagggacctgctgaaccggggtcttgaagaccagcttctcctgcccggcagtgaccagtttgacagcgtcctctgcagcctggtcaccgatgtggatttggatgggcggccagaagtcctggtggccacctatggacaggtgggacctgacagttggagccacacccaccggcctccctccactgtccccccatcaacctgtgtgacctgattcttcacccccgcaggaactgctgtgttataagtaccggggcccagagtcggggcttcctgaggcccagcacgggttccatctgctgtggcagcggagcttctccagtcccctgctggccatggctcacgtggacctgaccggggatgggctgcaggagcttgccgtggtctccctgaagggcgtgcacatcctgcaggtatccccagctcttggggtgggaggggagtcgacctcagcagtttcgagcag

SEQ ID NO: 8255 - DNA, 588 bp, Homo sapiens
  MAP TO CHR18.3; EXPRESSED IN LUNG, SIGNAL = 5.7; EXPRESSED IN FETAL LIVER, SIGNAL = 4.8; EXPRESSED IN BONE MARROW, SIGNAL = 5.1; EXPRESSED IN ADULT LIVER, SIGNAL = 3.7; EXPRESSED IN HEART, SIGNAL = 5.1; EXPRESSED IN HELA, SIGNAL = 8.3; SWISSPROT HIT: P28737, EVALUE 9.00e-20; EST_HUMAN HIT: BG611706.1, EVALUE 0.00e+00; NT HIT: gi14249497, EVALUE 0.00e+00
ctaacacagaggagggcagcatctcaacacatcgcatttaggtcccttcctgaaaacgcatcagtttcctgggcaacttctagcaggtctacatgcctatccacattttcatttttcaagatgagtttcaggattgcttctttctgttttaaagcaggctggttgatgtgaaatcttgtaggaattcttctcgttatagccgtgtcaatgtcctgaggatgaatggtagctcccattactatgacctggcagcggtgatcagtgtccagtccatcccagagactcataaactgagctttcattatggctgtagcttcatggtcagaactctgaacggtttcgtacaaaggagtctatttcgtctataatgatgatggacagttgtagctttatggcaagggagaagacagcagcagccagtgtttgagattctccataccacttattggtcagtgtcgaaggctcaaggttaataaatcgacagcctgcttctttggctgtggccttggcaatcaacgttttaccacagcctggggaggctcatagagaagaacaccttttggaggctgcagaagcctggaattctca

SEQ ID NO: 8256 - DNA, 531 bp, Homo sapiens
  MAP TO CHR16.3; EXPRESSED IN PLACENTA, SIGNAL = 1.6; EXPRESSED IN ADULT LIVER, SIGNAL = 1.2; EXPRESSED IN HELA, SIGNAL = 1.4; SWISSPROT HIT: P38565, EVALUE 6.60e-02; EST_HUMAN HIT: R22783.1, EVALUE 2.90e+00
accagatatccctgtggcagtaattttgcagaaccagtcattgaaaactgcccatgctgtccttctcaaatagctgttccccggtgaattcacagcacgcacttgctctgtgcctctgctaaacagagaatccatccatataagcaggtaaaagagtgctttgagaatcgacttttctgacagtcggcaaatggtagcctgccatctgcaattggaggattgaagccgagttcctgtggcgtaacgcaggccggacagttctccttctaaattgctgcggaaacctctgtaactcagtgatcctgaaatttgttagctcctactcacctagctttcaggaaggctaagaaggggttagtataggtgaacatctccagggtctcagattctgtctcccaagagcagatcagaagccaaggcaacacgggaaataaacgatctggaggtgaaacccacaggccgccgcttttctgatcaggttcattcttagagcactgttgagacagcagtgctgttcaggagagaaaaccc

SEQ ID NO: 8257 - DNA, 503 bp, Homo sapiens
  MAP TO CHR19.3; EXPRESSED IN ADULT LIVER, SIGNAL = 8.4; EXPRESSED IN PLACENTA, SIGNAL = 8.7; EXPRESSED IN HELA, SIGNAL = 7.4; EXPRESSED IN LUNG, SIGNAL = 6.3; EXPRESSED IN BONE MARROW, SIGNAL =  18; EXPRESSED IN FETAL LIVER, SIGNAL = 6.5; EXPRESSED IN BRAIN, SIGNAL =  11; SWISSPROT HIT: P45385, EVALUE 9.20e-01; EST_HUMAN HIT: AA400618.1, EVALUE 2.00e-72; NT HIT: AF287892.1, EVALUE 0.00e+00
gtgaaaacagaggctcctgcctcatggatggtggggcccgaggttgctacagatgtggagccccacagacaaggacgctcgtgaaatgctcaccgtgcacccgtgagctcattcttgccccaagccctggacccatccaggtccttccagctctggcttcagggattctgttcccggtctgccctgccccaggtctctctctccctccccagggtcaatgctcacatgatgaagatgatgcagaaggacaggaaggccagggctgtggctccagctcccccgactgctgccagtgtcacttgtgatacaggtcttgaggtgcctgcagatggattggagttgctttggggatttatatcacggagaagtgggtctcttcccctcccactgtctgcagggccctagacttccattcccctcttctccttcccagacacagaatacgaatgggagggaggaaaggagactacttctgaggccagtgaggcatgagagtgctggat

SEQ ID NO: 8258 - DNA, 567 bp, Homo sapiens
  MAP TO CHR14.3; EXPRESSED IN ADULT LIVER, SIGNAL = 2.8; EXPRESSED IN HELA, SIGNAL =  10; EXPRESSED IN BONE MARROW, SIGNAL = 1.5; SWISSPROT HIT: P26446, EVALUE 7.00e-49; EST_HUMAN HIT: BG200216.1, EVALUE 0.00e+00; NT HIT: gi12725812, EVALUE 0.00e+00
catgacgggctacatgtttggtaaagggatctatttcgctgacatggcctccaagagtgccaactactgccatacatctcagggaggcccaacaggcttaatcctgttgggagaagttgcccttggaaaatgtatgaactgaagcacgcttcacatatcagcaagttacccaagggcaagcacagtgtcaaaggtttgggcaaaactacccctgacccttcagctagtattactctggatggtgcagaggttcctcttgggactgggatttcatctggtgtgaatgacacttgtctactatataatgagtacattgtctatgatattgctcaggtaaatctgaagtatctgctgaaactgaaattcaattttaagacttccttgtggtaattgggagaggtggccaagtcactcccgatggctctggtataaattcagccgaagcccttctgcaccaactcacctggccggctaagttgctgatgggtagtacctgtactaaacctcctaagaaaggattttacagaaacacattaaaaggttttctccaacttttcgagtcccttg

SEQ ID NO: 8259 - DNA, 596 bp, Homo sapiens
  MAP TO CHR19.3; EXPRESSED IN FETAL LIVER, SIGNAL = 1.6; EXPRESSED IN LUNG, SIGNAL = 1.4; EXPRESSED IN BONE MARROW, SIGNAL =   1; EXPRESSED IN BRAIN, SIGNAL = 1.3; EXPRESSED IN ADULT LIVER, SIGNAL = 1.4; EXPRESSED IN HELA, SIGNAL =   1; EST_HUMAN HIT: BG741091.1, EVALUE 9.00e-07; NT HIT: AB002456.1, EVALUE 3.00e-21; SWISSPROT HIT: Q08477, EVALUE 3.00e-03
cagacaaaccccacataccccaaatactcttggccacagctgagccctagacataaccatctccatatgatcccagggatgtgcctcatgtctggaacccagggtctgtgtgtaaacattctgagacattgtttgagtattgtttgagacaggcttcagggtatatttgagtcatgactatggaacatttgggaccagacatgggctatttctgggatattaaagggaccatatttaaatctgaatcctaactggggcctgcctatagggcatgctaaggtcatttcagagtgtctaagatccttgttagagcacagcatagcatgctagggcttgttgtgtattttgtgaccatgtcaggacatgttaacacatatcggggccatgtcacatgtttctactatgctgcgctttgagggagtaagtgtggtctctggcttggagcctcaccccacacccaaagtccctccctcaccctttccatggtttctgatggtcctcattcatgtcagccaccattgcaccaaaagacgaggccttctacaagttcctgaagccctggctgggtgagtacctgtaggtgaacaagggtggga

SEQ ID NO: 8260 - DNA, 569 bp, Homo sapiens
  MAP TO CHR19.3; EXPRESSED IN HELA, SIGNAL = 3.3; EXPRESSED IN LUNG, SIGNAL = 4.1; EXPRESSED IN BONE MARROW, SIGNAL = 1.5; EXPRESSED IN ADULT LIVER, SIGNAL = 2.8; EXPRESSED IN BRAIN, SIGNAL = 2.4; EXPRESSED IN PLACENTA, SIGNAL = 2.6; EST_HUMAN HIT: AA542994.1, EVALUE 2.00e-78; NT HIT: AF166330.2, EVALUE 0.00e+00; SWISSPROT HIT: P49862, EVALUE 2.00e-24
gtcagaacccttccctcctcaaacagcttccatcctgggaggaccagactgtcggctgaagcccccgctcttcctgcttctgctgactcagggggtctctgtcccctccaggccctgcctcctgtgctcagggtctctctgtggttccccagatgagatgcgcctcctgggtttctgagtgggctccttctgtctgtctctatccctatctcttgctttctctgtatttctccacacattttcatctgtctctgtccatctctgactctgggaatccctgaggtgcagcctcagccttcccctaatgctagctacccacgtgctcctccatgtctccatccagcccagggtgacaagattattgatggcgccccatgtgcaagaggctcccacccatggcaggtggccctgctcagtggcaatcagctccactgcggaggcgtcctggtcaatgagcgctgggtgctcactgccgcccactgcaagatgaagtaggtgccgcccaagtctctgctggaggtgcaccagcgtctccagctcgctatgggggtggaagggcagtctttctg

SEQ ID NO: 8261 - DNA, 571 bp, Homo sapiens
  MAP TO CHR16.3; EXPRESSED IN HEART, SIGNAL = 2.6; EXPRESSED IN BONE MARROW, SIGNAL = 4.2; EXPRESSED IN ADULT LIVER, SIGNAL = 3.7; EXPRESSED IN BRAIN, SIGNAL = 4.5; SWISSPROT HIT: Q58597, EVALUE 1.10e+00; EST_HUMAN HIT: BF031605.1, EVALUE 2.00e-01; NT HIT: AB012161.2, EVALUE 2.20e+00
tcgtgttggggaattagaggaattccaattaagccctttcattttgatttctcattagattcgtagaatatctgcagaaaattaaatcgaacgagagacctccagccgggagatttatccgatttaatgttttgaaagagacttattatcttgtcaggaataatttgaaaatccaaataagagcaattgaatcagcagaatttaggcctcgagataacaatcactttgtaagaccaaccatagcatttaaacagctcagcccttcctaactctgctcctctctttctctgtcttgcctaccaccacccacaatcttttgaagaccacaaccagaaaccacagcaatcacgttgaaacgaagcctataactggggtcttcaccctgtctttctttgtcttcactcaatgccacttctaatttgtgtgcagacaggctgtagcctgatgaccttgtgaaatacttcttctcccagcccactgggtgtctttggcgggctttattctccatgaaaatagcagctgactccttcctcctcatgatcccctcggatgggtggctcactgctagaaa

SEQ ID NO: 8262 - DNA, 502 bp, Homo sapiens
  MAP TO CHR18.3; EXPRESSED IN FETAL LIVER, SIGNAL =  17; EXPRESSED IN BRAIN, SIGNAL = 5.6; EXPRESSED IN ADULT LIVER, SIGNAL = 6.2; EXPRESSED IN HELA, SIGNAL =  51; SWISSPROT HIT: P04406, EVALUE 5.00e-46; EST_HUMAN HIT: BG388726.1, EVALUE 2.00e-75; NT HIT: AF261085.1, EVALUE 3.00e-73
ctcccctaggtctcaccctcttcagggggtctgcatggaaactgtgaggaggggagagtctcagtgttgtggaggactgagtgcggcagggactccccctctctcttcctcttgtgctctcgctggggctggtgtccagctagctgctgcctttggaggccatgtggaccataaggtctactaccctgttgctgtagccaaattcattctcataccaggaaataagcttgacaaagtggttgttgagggcaatgcccaccccagctttgaaggtggaagagtgggtgatgctgttaaagtcagaggcgacaacctggtgctcagtgtagcccaggatgccctcaagggtcccctctgatgcctgcttcaccaccttcctgatgtcatcatatctggcaggtcaggtccatgaccaacacgttggtggtggagacaaggaaggccatgccagtaagctttctattcagctccaggatgactttgcctacagccttggtagcac

SEQ ID NO: 8263 - DNA, 575 bp, Homo sapiens
  MAP TO CHR16.3; EXPRESSED IN LUNG, SIGNAL = 1.6; EXPRESSED IN BRAIN, SIGNAL = 1.6; EXPRESSED IN ADULT LIVER, SIGNAL = 1.4; EXPRESSED IN HELA, SIGNAL = 1.5; EXPRESSED IN PLACENTA, SIGNAL = 1.5; EXPRESSED IN HEART, SIGNAL = 2.1; SWISSPROT HIT: P17277, EVALUE 4.00e-04; EST_HUMAN HIT: BG107694.1, EVALUE 3.20e+00; NT HIT: AF036166.2, EVALUE 9.00e-03
gtctctgtggcgtcttcctccccatcctgcgccatggggcgcgcgtgcaggctgcgctctgcccgccagtcctggcatagcctctcctgaatgcgcggagcggggtgcagccgaggtttctgggatttcgagcctactggggagtcgcaaggaggctccagagcttgcggacccatggctgctcctctgattgtgaaagcagcgctgcggctcacaaagtggccctttcagtggtttttgcagcagcagaaaagcgcctgcaggcggccgggttcctctacggtgacctccgagctggtggtaaattgcatctctcgacagaggtggctgagggaagcgccgggatcaatcctcacccggggaggacaggactggagtgctggacctgcacgaccctgagtgcagtgcggtcggggtggagggtccgctggggatcggccatgccaaaaggcatgctctggaagccaggccacgacaagtcctcccagtcccgcggaatgctggggaaggaggagactccacctggagcccccagatcctaggaactcttggggtggttggaagtgtttggagga

SEQ ID NO: 8264 - DNA, 575 bp, Homo sapiens
  MAP TO CHR16.3; EXPRESSED IN BONE MARROW, SIGNAL = 1.1; EXPRESSED IN BRAIN, SIGNAL = 1.2; EXPRESSED IN ADULT LIVER, SIGNAL = 1.4; NT HIT: U92048.1, EVALUE 5.50e-01
ttctgccacttgttcccttcacatgtcctcgtctctaactaaagtgtgtgtcacagttgtcagacacacctcatgctttctggtctgcacaccttgttattgctgatctctctacctgtaccaccatctaaggtgtggagagatttatagcaactgatctataattctcatgatgccccagtaatcctctgccatatggcataattctgtagggctttttttttcccccaattaggctgtaagttccttggtgggtgtgctcatacccctaaatctctcttaccagcaagcaccagtgccaatacatgggtgtaaggcagatactgccaagtgtttgcatctacgcatctgcttacatcatctagttgtgtgcttacatcatctacccatgtgcttacatcatctacccatgtgcttgcatcatctatccatgtgcttacatcatctacccaagtgcttacatcatctacccatgtgcttacatcacctacccatgtgcttacatcatctagtcatgtgcttacatctagtcatgtgctcatatcatccacccatgtgcttgcatcatctaccca

SEQ ID NO: 8265 - DNA, 562 bp, Homo sapiens
  MAP TO CHR18.3; EXPRESSED IN BONE MARROW, SIGNAL = 1.4; EXPRESSED IN ADULT LIVER, SIGNAL = 1.1; EXPRESSED IN PLACENTA, SIGNAL = 0.99; NT HIT: AL163210.2, EVALUE 8.40e+00; SWISSPROT HIT: O27131, EVALUE 9.20e+00; EST_HUMAN HIT: BE515311.1, EVALUE 1.30e-02
ttgagagtttcaggcaaaagctttgcctatagtaaagtttaccgtatgttttctagtaatttttaagaaacatctctacaagtaagcattcaaaagaatgatatgtggtatctacaaggtaggccagatcctggtgacatatctcagatttgtctttgttgttgtcttctggtctccctataagggaagcagagataagggaaagctgaacagcccttgatgctctccacttcttattttggtggtttcaagtctttcactgcccctgtcattcagaaagagcttactctggggcttcttgagggtccagactcatacttaacaccctgattaacagcccaattgtgttttgattcatggctagagtgtttactatcatctctcctaaagagccattggtcagtaaacatgggaataaaaagtgctgcttcttgtccatgaatcatctcattttccccaccacattctttatattgttcactagattctatgaaaaactaatgcagaggaaatgaaaatgaaaattattcaggaaagagcaactaaggagggaaggaggagg

SEQ ID NO: 8266 - DNA, 516 bp, Homo sapiens
  MAP TO CHR18.3; EXPRESSED IN ADULT LIVER, SIGNAL = 2.3; EXPRESSED IN PLACENTA, SIGNAL = 1.9; EXPRESSED IN HELA, SIGNAL = 1.9; EXPRESSED IN LUNG, SIGNAL = 2.2; EXPRESSED IN BONE MARROW, SIGNAL = 1.5; SWISSPROT HIT: Q57484, EVALUE 3.60e+00; EST_HUMAN HIT: BG427903.1, EVALUE 1.80e-01; NT HIT: AE007651.1, EVALUE 1.20e-01
ttctaccgcagcacacaaagactgagctttgcaagagtggaacatcttagcactgccatcagcacttttgaaacaataaacccaaacacctccaaactgaaagcatactttcaagtccacaacagttataaatcagggtggtattaaagtgatttaagattgtcaaaacaagtatgttcaccattaatatttttggtagggtaggaaaggaaatggtcaagtagatttcaataaaatgctgataatattttatctgtttatgcttgaatgaaagaaaaattaaataaggcttcaaataaaatagagtaagctttcaatgactatttctctcaccttacctcttgcttgtactgtccatctcgaacactctcacatgcctccttccctccagcatccctgctgtggtgccatgcagactgcgactgctctgtgctctcttctactctgagtcgccttcccccatggcaggggctcatgggcactccttccccaactcctcccaccaacagcagctat

SEQ ID NO: 8267 - DNA, 502 bp, Homo sapiens
  MAP TO CHR14.3; EXPRESSED IN BRAIN, SIGNAL = 1.5; EXPRESSED IN ADULT LIVER, SIGNAL = 1.4; EXPRESSED IN PLACENTA, SIGNAL = 1.3; SWISSPROT HIT: P07686, EVALUE 2.10e-02; EST_HUMAN HIT: AA889124.1, EVALUE 4.50e-02; NT HIT: AF170811.1, EVALUE 3.10e-02
tcagcacaggaatctctccacacccctcgttcttattcttcagatagtccataatgatgaagcttggagtatgatttcacctgatgaactgccaatccatctattggcaatgtattcatctagaaataattatatcaatgacaattgaagacaactttttaactatgtctttcattctcctgcctgtgtaagtgccctgggtttacctctccttgtacatgttacctgtacttctatctgggtcagctttgtctcccattctggcattgttcccccactttctttctttctagtgatgttcccaggattctgttgtcaagcatctcctcaccccgcccctgtgaatactttcctgctttgaaatgcaatgtttattacattgtttgggtgttgactctcctcaaagccaatagaatatgggattcattaggaagatgataaaactgtgctcctaagactcaattatttaacaaggattatatgccctttcctgtttcctgat

SEQ ID NO: 8268 - DNA, 595 bp, Homo sapiens
  MAP TO CHR18.3; EXPRESSED IN LUNG, SIGNAL = 1.6; EXPRESSED IN ADULT LIVER, SIGNAL = 1.2; EXPRESSED IN BRAIN, SIGNAL = 1.3; EXPRESSED IN PLACENTA, SIGNAL =   1; NT HIT: gi15305857, EVALUE 9.00e-40; EST_HUMAN HIT: AI656941.1, EVALUE 6.00e-42
cataagcaggctcaaggaccagttactatatttaaggaaagacaaaattatcttatcttagggctacatgtacttcttcaacctctttatggacttctggtggaattgccaaaatggctgttttcagcatgaaattgctgggatatttcagtgcaaaagcccataggtaactagttaagcttagtaacagagcaggagggtagaccttgcatttctaatcttctgctcatttcacatgttcggtttcatgtttaactttaaacaattcaatgtttgcattattcctaacagatccagaaatgacgctgtctgggtcaacatttcagggaggagtctgccaccagtgtaatgtatcaataaacttcatgcaagcatacaattttgtattgcttttttttgtaatttaggaggactacaaccaaccaaccaaacacaaaaggcctatcaatcatctatcttttcagacttataaagcaatagcattttccaactcctatgtgtatacttttttaaactattcccactctaacagatctagtaacaaattttctaaccaggtagttccacttgattctgcatttgagattcacaccga

SEQ ID NO: 8269 - DNA, 541 bp, Homo sapiens
  MAP TO CHR18.3; EXPRESSED IN LUNG, SIGNAL = 2.6; EXPRESSED IN BONE MARROW, SIGNAL = 1.3; EXPRESSED IN ADULT LIVER, SIGNAL = 2.3; NT HIT: AF179680.1, EVALUE 3.30e-02; SWISSPROT HIT: P02463, EVALUE 2.00e-01; EST_HUMAN HIT: AW370722.1, EVALUE 3.00e+00
gaacatcccaagtctctggcatgtggcgtcaccaccctggggagtggcagtggctctcctgcgtggagcactctgtgcaggctgtgcccctcccaggcagggcaggcatgctgcattcagagcctgtgagacactccccagggctggtcggaaagcagctggttctgaagaggaggctgtaaggcttccaatcttggggaccccttgtgtctggaaagagggatctgggagtcctagaaaaatcttccagggcaggtctccattccagagagtaaaagctgcagccttgagcagcctcttctcctcccagctgtccccgttcaggtcagggaccagggcagtctttgtcaccagggaggtgggtaccaggtggtcctggccaagtggccaggatccaggtcttgggcagcctttgagctgtccctgcagggcttgagaggtggggaggagggagaaggacaggctagaagcccagtacaaggaagtgaggtcaggcctgagtgcagacactgggcagccaaggtccagagatgctgaggtc

SEQ ID NO: 8270 - DNA, 544 bp, Homo sapiens
  MAP TO CHR16.3; EXPRESSED IN HELA, SIGNAL = 1.1; EXPRESSED IN LUNG, SIGNAL = 1.2; EXPRESSED IN ADULT LIVER, SIGNAL = 1.2; NT HIT: AF064875.1, EVALUE 3.30e-02; SWISSPROT HIT: Q09472, EVALUE 8.80e+00
gggaagggaggacttctgtcactttgtgaaggcatggttgaattttggtgagctgttttggaaggtcataagcagctcaagactgggctcaggaatagtaaaaccctgatgtcaagtggatccacccacttctgaggctgggttctgaaatgcacagatctggatctggaaggaagtggatgtggcccacatgggtgaaatctggagcatggaagaaggaaacatgttatgggaaagaggcagtttttgccaagctatggccacgagcaaggaatcaggaatgagttgctcaatccaggatctggaccaaatatatccacagtgatcaagtatccagggtttgtgatatgatcagtggcctcaaaagcatcacatggggtcagagagaggaacaggagtggtggtggcatcatagatgacatttccaagatgggatggaatgagctggatcccagggatgaagcagggctgtatcagatggtgtctccacaccctgatgatgatgatgatggtgacagcaatagcagcagacctttcatgagca

SEQ ID NO: 8271 - DNA, 533 bp, Homo sapiens
  MAP TO CHR18.3; EXPRESSED IN ADULT LIVER, SIGNAL =   1; EXPRESSED IN FETAL LIVER, SIGNAL = 1.1; EXPRESSED IN BONE MARROW, SIGNAL = 0.76; EXPRESSED IN BRAIN, SIGNAL =   1; NT HIT: AJ006345.1, EVALUE 1.30e-01; SWISSPROT HIT: P35616, EVALUE 7.50e-01
aagcaaacagcacccaattctcgacctccagggccttatcaggaggactttgcaatccatttcttggcaattgctagtaaaagttgtaggtagatatctagctccttacccatagcctattgtgctctccgtgaggtctccatcagtgccaaagggtctactaggagaaccatgttttatcttgtcctttcaagacccttcttctctacatggtgtacttcttcccaatttatttccccttttcctttctattcctagattgttctcccctccattcttacatctccttccttcttttccccaagtacctgctttgctctgccatccccctcattctcagcagttctttttcttcccagttctttctttccaccagtgccctcaagaacttcacacccaaactgccagccataatcctgaatggccttgggtgaggattgagccacgccggtggaaatgcacagggtggtttctggcaaccatgccctccccaacgcagggtgcactctggtcgactaaggctggagggatgg

SEQ ID NO: 8272 - DNA, 581 bp, Homo sapiens
  MAP TO CHR16.3; EXPRESSED IN ADULT LIVER, SIGNAL = 0.99; EXPRESSED IN PLACENTA, SIGNAL = 0.97; EXPRESSED IN HELA, SIGNAL = 0.89; EST_HUMAN HIT: BG285334.1, EVALUE 9.00e-47; SWISSPROT HIT: Q9QY14, EVALUE 2.00e-04
tgctgtctgcttcaggattgctgaggcggcctctggcctctgggcctgggcccccagaggcaggccttgggagcaagatttgggggtgaccccaggcagccctggggagtgggcaagtcaggcagggaaggagctgttaagggctgatgagcaggggtcactgtgggtaactgggctctgagcctctggggactcccctagaggagcggaacatggaacgcaccaaggagtgggcaagttgggtgggaaaggagctgatgagggctgatgagcaggtgtcgctgtgggtaactgggctctgagcctccggggacgcccccagaggagtggaacatggaacgtaccaaggagtgggcatctgtcccgcagtccccacacgctgctgaagcagctgctcccatggcctccctccctggccccgtggcctctcctgtggacagggagcaagctgcctggcagaggccccgactctcacagcgggagctgtcagcatgctggggacggtgagtgccaggtgccatgggccagagcctttggtgtaggctctggcgaagggacccaggacacatgcctggaactct

SEQ ID NO: 8273 - DNA, 576 bp, Homo sapiens
  MAP TO CHR16.3; EXPRESSED IN FETAL LIVER, SIGNAL = 6.9; EXPRESSED IN LUNG, SIGNAL = 7.7; EXPRESSED IN ADULT LIVER, SIGNAL =  10; EXPRESSED IN BRAIN, SIGNAL =   8; EXPRESSED IN PLACENTA, SIGNAL = 9.4; EXPRESSED IN HELA, SIGNAL = 8.8; EST_HUMAN HIT: AI190492.1, EVALUE 1.00e-126; NT HIT: X05117.1, EVALUE 1.40e-01; SWISSPROT HIT: P04487, EVALUE 2.50e-02
cagctgattggtccctcacgagagacgcggggtcagcggctcagagcgcggctgtgtggggctgcggggctcccgccatgcccgctggggtaggtcctgcggaccccggccactggagccactcatcatttccgacggatgggccggaggggccgccggccgccccagccagggtctcggtagcctgcaaggagagaaagaggtgggagcagcccgcgcggggccctgcgtcttgcataggcgcttctggtaaaatcactcctttatctcagataatgagttggcgctggatcgctgcgtcctcaggtggggctcgaatcgtgacttttagagaaataggttttctttctttttttttttttttaacaacatggggtttaaagggcgcggaattggaagcagtcgtcacccggaggcctgggcgtgcaagcaccgaagctctggctggccctgagcctccccaccccacccgctcttttcgctggaacgcgtgtactttgggcagttgctgacgtggagacaggacgtatgtcttcatattttagtaaaacccaatgccctctgcctctctgatta

SEQ ID NO: 8274 - DNA, 501 bp, Homo sapiens
  MAP TO CHR16.3; EXPRESSED IN BONE MARROW, SIGNAL = 1.5; EXPRESSED IN FETAL LIVER, SIGNAL = 1.4; EXPRESSED IN BRAIN, SIGNAL = 1.4; EXPRESSED IN ADULT LIVER, SIGNAL =   1; NT HIT: M35647.1, EVALUE 1.90e+00; SWISSPROT HIT: P14078, EVALUE 6.00e+00
gggctgccctagttagtgtgacaaacactcctttgcgtgctggtgacccaatgtgagccagcccatggatattgatagaatttgctagcaccatcactctcaccccgcaggcgctgacaacctctcgttccaccccaagatgcagggtccgccgatagtggcaccctccgagaatcactttcctgaattatataagatcgcacagtgctcggccgacaccttggagcagaatgacaaagctgtctgggagcctgcaggcccctccaccccagcgtggggactggaggattttgtgagttaagacgcacaattgcttcccttccttttctgtgccttttttttttttaatagcacatgacaggcatccataagacagacccacacaactcaagtgaattatgcagccccgctcatttgtaaagtgaaatgcagatttcacctgctgaaattcagatcttgcctcctgttccccataagtcgaggctggcacaaggaaatcta

SEQ ID NO: 8275 - DNA, 577 bp, Homo sapiens
  MAP TO CHR18.3; EXPRESSED IN FETAL LIVER, SIGNAL = 2.2; EXPRESSED IN LUNG, SIGNAL = 3.7; EXPRESSED IN BONE MARROW, SIGNAL = 3.7; EXPRESSED IN ADULT LIVER, SIGNAL = 3.4; EXPRESSED IN PLACENTA, SIGNAL = 2.9; EXPRESSED IN HELA, SIGNAL = 2.4; NT HIT: U66699.1, EVALUE 5.50e-01; SWISSPROT HIT: Q9Y613, EVALUE 1.90e+00
cgaatttacacacacattcacatctgtcatttagatatacttgtttgcttaaaagccttttagatctttaaaagcttaagatacacccgccaaaagaaggcactgccactgatgaagaggagcctgaggaatgggaaagatctgatgggggtgagagtaattcttctgaattgttaatccgggagggcacagcaaacagtctccatttcccctgtggagggaactcagggcctgcagcgaggtgggaaggctccatctgagcctcagcaagaacctcattatcgcacagatggctctctcaccgcggggctcgttcagtccactccgctgctgactgcctctttggtacctccttctaataggattgtgacctctcctttgcaagttacttgggcagtttacagaatgcaggaggtttactaggtgacctggaagtcctttctgccttgtcatgctctggggcagaccagaggaggttggaactctccccgccccccacccccacgtgagccacaccctcagaggctctggctgactttgagccaggttttcctggagccaggaccagagacagaag

SEQ ID NO: 8276 - DNA, 506 bp, Homo sapiens
  MAP TO CHR16.3; EXPRESSED IN PLACENTA, SIGNAL = 2.9; EXPRESSED IN HEART, SIGNAL = 2.5; EXPRESSED IN BONE MARROW, SIGNAL = 4.5; EXPRESSED IN FETAL LIVER, SIGNAL =   5; EXPRESSED IN ADULT LIVER, SIGNAL = 2.4; EXPRESSED IN BRAIN, SIGNAL = 3.1; NT HIT: gi14775074, EVALUE 2.00e-95; SWISSPROT HIT: P03231, EVALUE 1.60e+00; EST_HUMAN HIT: AL046037.2, EVALUE 2.00e-96
tgcatgaactgtcaggatggaatctaagatggtaacacaaggcctagtcattacttctgcttgataattagaaggctcaccaaaacgtatacaaagtttcaccactacattatgtgggaaattatagtttgcgatatacatggacaagtaccatttaagatagtatcctagctaacagaagccttccttgactaattagcacacttacttgtggttgtgatgggagggagttcttctggctgcttgacatctttctttggagcagagagttgctcatctaaattcttcaggcgatctttatcctttaggaggtttccaggttttagctcattgatgtctaatgcaaggttcttgcagagaacctcgatttcaaacttcaagtttaactgcacagttccagagttggattagaatttttaaaagaaaactttagttttactcataatatactctactttcagttattatagtacttcccccgaaataccctgccttcactgtacgtt

SEQ ID NO: 8277 - DNA, 533 bp, Homo sapiens
  MAP TO CHR18.3; EXPRESSED IN ADULT LIVER, SIGNAL = 1.2; SWISSPROT HIT: Q00742, EVALUE 2.00e-01; EST_HUMAN HIT: BF815146.1, EVALUE 6.00e-14
cgccaactttcaagctaaggagaaataggtggatgcccataaagggactacaaaaagagaagccctcagtcagccctacctgctccactgagaaacagactcacgaggacaagatgctgccactcagaaagggacctggagccaggcatgccgtctttttgactggatgcttcggcctcaatgctccaaccttgatgcaggaggaacctattcctggatgccccaggacttgtatgaccaattctatgcctattcctgtaagattggctcgtcgtagaagggtaaaaaatgtttccaagcaggataaaaaataggaattgtgggcagtgtgaatggggataaaatacctatatttgttaagaatttacatgccaataaactgtgtgactcgagcattcagttactgtgtctctcatcctttgcagcttaatccactgcacataataccagagcattctgactatggctgcatggaagcccaccttgactgagggtccttctcacctcttggatgtcctctatgtgggctctgc

SEQ ID NO: 8278 - DNA, 561 bp, Homo sapiens
  MAP TO CHR16.3; EXPRESSED IN BRAIN, SIGNAL = 1.5; EXPRESSED IN ADULT LIVER, SIGNAL = 1.1; EXPRESSED IN HEART, SIGNAL = 1.6; EXPRESSED IN LUNG, SIGNAL = 1.9; NT HIT: AF285100.1, EVALUE 3.40e-02; SWISSPROT HIT: Q64733, EVALUE 1.20e-01; EST_HUMAN HIT: BF798697.1, EVALUE 2.00e-01
ttggggaacaagtggatctctccaacctgtcagtccctctcaccttgcccgtttctctcacctcccccactcccgccagcccccacacttccttacatgatgctgacagggggtaccagcacccccaggccatcgtaattagcatctggccgtgatcccagtctcctggcagcacattcctcatcttcctcgccagccaatctcctttccccagcaaccctccgacagcactgcagcagctgccgcaccgacagcctccgcgccaaggtcacccaccaccagcaccagcaatgacgaagcacccgcctgctccctgggtggacatgacaccgttaatgcctcactgtgtctaaaccatttggggtcagaaaattgtgattctaaaaaaaagagaggttgtccttaggaagatgggtgaggctaaactccagttgctggaggggctaagagattcatacggcttaagtttcatcgcttaaggtctccaggagagagggaactgagcaggaggggcataagacattccagaagggtgaggaaagaatgagacaagtttgcgca

SEQ ID NO: 8279 - DNA, 516 bp, Homo sapiens
  MAP TO CHR16.3; EXPRESSED IN BRAIN, SIGNAL = 2.6; EXPRESSED IN ADULT LIVER, SIGNAL = 1.7; EXPRESSED IN PLACENTA, SIGNAL = 1.9; EXPRESSED IN HELA, SIGNAL = 1.6; EXPRESSED IN LUNG, SIGNAL = 1.3; EXPRESSED IN BONE MARROW, SIGNAL = 1.7; EXPRESSED IN FETAL LIVER, SIGNAL = 1.1; EST_HUMAN HIT: BI764403.1, EVALUE 0.00e+00; SWISSPROT HIT: P09042, EVALUE 1.00e-02
acgacaggatttggagatggaggctcagtcgtgagaggagctgggctcctcctggagggacatcagacaacaccagtgcttcctccagcaggactcctcatccagtgctctctttgccacctgacctggcacccggtggatgctcagagatggcaggggagttgaatctttgaggcctggcccagcagtcaaaggcctcccacagatgtctgtttgtgctgcccccaggactggagtgacagcctggcccaactggctcaagccagggcagccctctgtggaatcccaaccccgagcctggcgtccggcctgtggcgcaccctgcaagtgggctggaacatgcagctgctgcccgcgggcttggcgtcctttgttgaagtggtcagcctatggtttgcagaggggcagcggtacagccacgcggcaggagagtgtgctcgcaacgccacctgcacccactacacgcaggtgagtgtgctgcaggtgaggccagcgtgccagctcccagatacagac

SEQ ID NO: 8280 - DNA, 552 bp, Homo sapiens
  MAP TO CHR18.3; EXPRESSED IN FETAL LIVER, SIGNAL =   1; EXPRESSED IN ADULT LIVER, SIGNAL = 1.8; EXPRESSED IN PLACENTA, SIGNAL = 0.98; EXPRESSED IN HEART, SIGNAL = 2.3; EXPRESSED IN HELA, SIGNAL = 1.3; SWISSPROT HIT: Q9ULJ7, EVALUE 9.10e-02; EST_HUMAN HIT: T74968.1, EVALUE 1.00e-48; NT HIT: S75733.1, EVALUE 1.30e-01
tgcttttaatttgttctctctcaggatggagccactgccctcttcctagctgcccaaggtggttacttggatgttattcgattactgctggcttcaggagcaaaagtcaaccagccaaggcaggtaatgtccactgttgacatttgcccgagcacatggcgcatggggcagggagggctgggtgtccgctggcagcacatacctgagataaccagtaagctcaaggcatcctttaaacccttctgcttctgtgatgaaaagttaatctttgattagggtatctcctgttctatgctctgagctggcctgaaagcctatgaaaccaagctgacatcacagttcagtactttcaaaacttaagtatttgatgtctgaggtcaagtacacaagtacacactctgccacctcctgtgcaaacaaattatggctgcactgatctaatgagtgcaggctggcctgggacataggtaaacagatgtgggccaagtagcctggcccctgctgataatgctgccttactacctgcccaccacttcttccaccaagccaaag

SEQ ID NO: 8281 - DNA, 527 bp, Homo sapiens
  MAP TO CHR16.3; EXPRESSED IN LUNG, SIGNAL = 4.3; EXPRESSED IN ADULT LIVER, SIGNAL = 6.9; EXPRESSED IN BRAIN, SIGNAL = 6.3; EXPRESSED IN PLACENTA, SIGNAL = 6.2; EXPRESSED IN HELA, SIGNAL = 5.7; EXPRESSED IN FETAL LIVER, SIGNAL = 7.9; SWISSPROT HIT: P15265, EVALUE 9.00e-08; EST_HUMAN HIT: AA706498.1, EVALUE 1.00e-108
ggaccccctgaataaaaaccgcagaggaggtctgcccacctggcgtgggggccagggaggaggtgggcagggggaggggccttgcccgagaccagaggtggctgggggccgagggtcggcaggaagccaggcgaccgatgggcgcagcacagactgcctccacgtggccctgcacagcctggcctcactaggggaagggtgaagacagcagctggcgcttcccctcaaaaaaaccctgggggctcaaggccacccctgaggtctccaggctcctaggaacagggcctgacagggaaaaggctgacaggcaggtcgggggactggacagcagctgcctattgggtgacaggcaggtcgggggagtggacagcagctgcctactgggtgacaggcaggtcgggggagtggacagcagctgcctactgggtgacaggcaggtcggcggagtggacagcagctgcctactgggggtgagggctccggccaccctgcacccagtgtcctcctgggtggtcttaggaagaggg

SEQ ID NO: 8282 - DNA, 554 bp, Homo sapiens
  MAP TO CHR18.3; EXPRESSED IN LUNG, SIGNAL =  20; EXPRESSED IN FETAL LIVER, SIGNAL =  21; EXPRESSED IN BONE MARROW, SIGNAL = 7.3; EXPRESSED IN BRAIN, SIGNAL =   4; EXPRESSED IN ADULT LIVER, SIGNAL = 5.7; EXPRESSED IN HELA, SIGNAL =  35; SWISSPROT HIT: P38982, EVALUE 5.00e-56; EST_HUMAN HIT: BG256741.1, EVALUE 6.00e-85; NT HIT: gi15299494, EVALUE 4.00e-85
tttccatattacccagagagggtccatatgacattattctgaattcctctcagaacttaaagggaaacttttacaatggccagaacctgtgatgtcctgaacatgaaagaggaggatgtcctcaaatttcttgcagcaggaactcacttgggtggcaccaagattgacttccaagtggaacagtacatctgcaaaaggaaaagtgatggcatctgcgtcctaaatctgaagaggacctgggagaagcttctgctggtggctcatgccatcatcactgttgaaagccctgctgattcagtgtcatattctccaggaacactggcaagtgggctttgctgaagtttgctgctaccacttgagtcactcctattgctggccactttgctcctggaaccttcccgcaccagatccaggcagccttccaggagctgcgtctgctggtggttaccgatcccagcctctcacacaggcatcttacactaacctgcctaccattgctctgggtcacacagattctcctctttgctgtgtggacattgccatcccatgtaaca

SEQ ID NO: 8283 - DNA, 534 bp, Homo sapiens
  MAP TO CHR16.3; EXPRESSED IN BRAIN, SIGNAL = 8.6; EXPRESSED IN ADULT LIVER, SIGNAL = 8.8; EXPRESSED IN PLACENTA, SIGNAL = 7.7; EXPRESSED IN HEART, SIGNAL = 5.2; SWISSPROT HIT: P78536, EVALUE 2.20e+00; EST_HUMAN HIT: BF804358.1, EVALUE 0.00e+00
gctagttgtgagtccacccctgcagggctggttccccataggaacagggagctgttaccaaaagtggacatgacatcctctgtggagaggtctatggcattgtggcctagaggaggtgatggtggggcactggggaaggcttcctggtagaggcggcaccagtacctggcgggatgggtagcattttgagcattccagggacactaaggcctgagcaaagaaatggaagagtcaggcagctgggtagcaggtggaggcagataaggatggaaaagtgagttgggccaggtgggggtccccgagaggcaggaggaggaggcaggacttgcctctggaggcacaggcaagccatggaagttgtttgaaggaggggcaggcacgtcgcagagcctagggatttagggtttagagcggggagaacgcctggctggcctcctccctgctggcttgcacccagcacccaccatgtgccttgtcggcatttctcacagccccccacgggctcccagcagagtgggccacatctcctgactt

SEQ ID NO: 8284 - DNA, 583 bp, Homo sapiens
  MAP TO CHR16.3; EXPRESSED IN HEART, SIGNAL = 1.7; EXPRESSED IN LUNG, SIGNAL = 1.5; EXPRESSED IN FETAL LIVER, SIGNAL = 0.78; EXPRESSED IN BRAIN, SIGNAL =   2; EXPRESSED IN ADULT LIVER, SIGNAL = 1.4; EXPRESSED IN PLACENTA, SIGNAL = 1.4; NT HIT: X92589.1, EVALUE 1.40e-01; EST_HUMAN HIT: BI822227.1, EVALUE 8.20e-01
cttgacctcttgacgccttctacttcttactagagattcaaggtctttgaccctggtgacacaacaccagtacgggattttttcaaactttttgcatttattgtcgaagaagcaggggcagcaaagaatatttggctttccctggaagtcccaagggatgctggacagaacaaccccaagtggaaagacccttgttaggagaagtcgagtaaatacactagtgagtagaccattcctccactacaagctcagcactcccaaggaataagtaaatccctacttaaattgcctgggaggcctccctcaattacacaaatctaagacatgacagggtacagcagagattctcctacagcaagtctgaaggctgagagcaaagcaatggagctaaggcatcatcctcatactgctcatggtgggaggaaaaaaaaaaaaaaaaagactgttccgagtctcccctccctggctgttttgctaagccccaggcctacaggaggctggatggcccaggggaagaggctgccttgcctaccctgggaaagtggatggagggtagcttcttcctctgccaagaaaatcaggc

SEQ ID NO: 8285 - DNA, 556 bp, Homo sapiens
  MAP TO CHR19.3; EXPRESSED IN HELA, SIGNAL =   2; EXPRESSED IN LUNG, SIGNAL = 2.4; EXPRESSED IN BONE MARROW, SIGNAL = 3.2; EXPRESSED IN ADULT LIVER, SIGNAL =  19; NT HIT: gi14769082, EVALUE 0.00e+00; EST_HUMAN HIT: BF990045.1, EVALUE 0.00e+00; SWISSPROT HIT: O35608, EVALUE 2.00e-14
atgtaaggaagaggtgggggcaggaaacagatgcaatgtggggttgaaggcaggacagagcagcagaaagataaggagggaagctgctggctgggtgtggcatggcagggcctgctcaccagagaggctcttggcgcagttcttgtccctgcggaggtcgtgatcctggtcccaagtggagaagggtacggagaggccgctgggtgggacggtggtggcgcccagctggccggccacgggtgcagtgagctgcaggctataggccgtgtcctcgccacccaggtgcacggagaactgcagcaactcggcgttgccatcccagtcccgcagctgcacggccaggcggctgttgcggtcccccgtgatgctatgcaccttctccagacccagccagaactcgcctggagtgggagaggccactccatgaggcagggccacttctgagggtccctcttcctcccctgcctctgtccccactagaaacacctaccgtggggatccccaaaccccgccttgtaggcttcccagggccggttgaagtccactgagccatcgt

SEQ ID NO: 8286 - DNA, 599 bp, Homo sapiens
  MAP TO CHR14.3; EXPRESSED IN BRAIN, SIGNAL =   1; EXPRESSED IN ADULT LIVER, SIGNAL = 0.92; NT HIT: AL163284.2, EVALUE 5.70e-01; SWISSPROT HIT: P48755, EVALUE 6.70e-01
agctcaatccctcagagcagagagattccagggcagcagcttgcagccttgctgtgagcaggaagggatgcccttccaggggtggccagctctccttactcaagtctcagcccacggatggaaagccagggccatgcctcccttgctgtcccaactagatagtgaaaactgtgatccttcatccatgctctgtaaaaaacaaaataaacctaagccccacacagaagaaaaccctaaaactaaacttctatcaccatttttgttaattttccctggagctgtttggcctgcaacctttgggatgtttttagaaggatggagggaggaaaaatgaacaccattttctcaactagatttttacgaattcacttcccttttcccctcaattctagagtcacaggtttcccaggccccaaaatgaccctcactctctcctatttcctctgccttacacctatatataaaaagagactgggaagtgcacatcctgattccctcctggatcaggatggacaaccggattttttaatccactgtgaactggaattacagccgctcaaagccaaggtggtgagtcctgctagttgaacccctgcaga

SEQ ID NO: 8287 - DNA, 511 bp, Homo sapiens
  MAP TO CHR18.3; EXPRESSED IN PLACENTA, SIGNAL = 1.3; EXPRESSED IN HELA, SIGNAL = 1.1; EXPRESSED IN LUNG, SIGNAL = 1.3; EXPRESSED IN BONE MARROW, SIGNAL = 1.7; EXPRESSED IN FETAL LIVER, SIGNAL = 1.5; EXPRESSED IN ADULT LIVER, SIGNAL = 1.8; EST_HUMAN HIT: AU119681.1, EVALUE 4.60e-02; NT HIT: gi14720691, EVALUE 3.10e-02
caaaagagtgcacttggacctttattaattctgagtgaggggtcttaggtccctggaaatagggaaggcagaatacatgcagcaaaggatctaaaaagaaaacgaaaacatccacatggacatcctaggtaagaacctaaaattctaaccaatgcaaagagcaaaaatatttttaatcaggcactgtgtttagtcttctactttgctatttatatttattaccagaactcttgaaatataaactgctgaaagatttctaatggctaatttttctcttctcacctcgggggaattaaattgatatctggaatgcaaaggagactatcagcacaacctctgcccctaacacatctacctacacccccctccacacacacatatgtgcagttatcagaagactcagaaacactttcagcaagggttccatccgtatgactgctcatctataggaaaaatcactgctgtagacagtagctagaggcatattatgtggacgtgagcaaggagaaaa

SEQ ID NO: 8288 - DNA, 503 bp, Homo sapiens
  MAP TO CHR16.3; EXPRESSED IN ADULT LIVER, SIGNAL = 1.2; EXPRESSED IN PLACENTA, SIGNAL = 1.5; EXPRESSED IN HEART, SIGNAL =   2; EXPRESSED IN HELA, SIGNAL = 1.5; EXPRESSED IN BONE MARROW, SIGNAL = 1.7; EXPRESSED IN FETAL LIVER, SIGNAL = 1.7; EXPRESSED IN BRAIN, SIGNAL = 1.4; SWISSPROT HIT: Q14746, EVALUE 8.00e+00; EST_HUMAN HIT: AA365556.1, EVALUE 1.00e-106; NT HIT: D50319.1, EVALUE 7.50e+00
tcctgatagctttaggctccctgtcatcaggcacagaagaaagggcgagcctgcttccccattctgcccaatccaagatctgagcgtcctgctcagatgtagcagtgtgggttttcattagcgcaagtctgaactccagccagcccttctctgagcttcatggagcacagctgtcagccagtctggcattggagtgggtggcaggcacagtcagcaggaagtcacgttcttccttcctcatctcccaggtgactctgaacaacgtggaagtctgcagtgaaaacatctccactctgaagaagacactggaggtacgagggaaattgcctatcagtggtcagcagccatcttttcccatgttgagatagagccctatacaaacatcatggtgaagacacttatcttggtgacattgagccacacttgaggggattctttggtgactgacatgatagcaaggcatccttggaccagggagaaaagctcaggagttggaagatcag

SEQ ID NO: 8289 - DNA, 564 bp, Homo sapiens
  MAP TO CHR18.3; EXPRESSED IN BRAIN, SIGNAL = 1.2; EXPRESSED IN ADULT LIVER, SIGNAL = 1.2; SWISSPROT HIT: Q96063, EVALUE 3.10e+00; EST_HUMAN HIT: AW236701.1, EVALUE 3.10e+00; NT HIT: AJ132263.1, EVALUE 1.00e-04
ccttgtgtcagcgagtttttcactacctctctagggaactgtaggttttagcaattgaaataattgtaagattatttaaaaataattacagatgatggaggcaatacaattgcaagtaagttgctatattttaaaatagcatgttacactcttccaaggtccaggttgtttttatggcagtctgggttctgcctctccttccctctctgttatttgacccagccgtgtgcctttccattttcttgaatgcgttcattctgagttactaaaagaaatggaaagctgtttaaattattatagattacaacattttattaaaagaggcttgtagaattttagcagcttttcaaatgattaaaaaataaatctacttattgaattgatgataaacccacatcctttgtgccttggtctccagagttcacaccaccctctttgtcattggcttcaagcccctggaaagcccggtggctggtgttgaggagcccgtggctgtggacagctgcctgccccatcctgccgtgctgtgttttcccacggagctggatgtggagaaatggcagt

SEQ ID NO: 8290 - DNA, 535 bp, Homo sapiens
  MAP TO CHR16.3; EXPRESSED IN LUNG, SIGNAL = 1.3; EXPRESSED IN FETAL LIVER, SIGNAL = 0.87; EXPRESSED IN BRAIN, SIGNAL = 1.1; EXPRESSED IN ADULT LIVER, SIGNAL = 1.4; EXPRESSED IN PLACENTA, SIGNAL = 1.2; EXPRESSED IN HELA, SIGNAL = 1.3; NT HIT: L10340.1, EVALUE 2.00e+00; SWISSPROT HIT: P54548, EVALUE 2.60e-01; EST_HUMAN HIT: AW966578.1, EVALUE 1.90e-01
cttcaaggcctcctaaaccctagctgacacttcctgtggcactcaggcaaaggaacaaacaggcttccagtgtacaggccgggagcatgccctgctggacacttcagtgattctgcccggactcaagggttggaaggtgggcagtgactggtcacctttctcttcatatctataccgcctggcactgaggagtcaccaaatgaatctgtcttaaagcaaagtgggcgtatttttgaagaagtaaatatcagccaggcgccgagggtgggcagatgcaccctgggcacagcacaggtggaagagggcagggcgtgtacaagactgagcaagaggaggtagaaggcgagccaggatatgagggtgtggcagtgcagagaaggggccctgctgaaggacaggaaagtgggctgggagcagctccaggaagcccacttccatggcacagttagcagggatgaggtagcaagaatggaggcggcagctggtgaaacatgcctctctcattcaccccaggtgagaggacagtgacccaagc

SEQ ID NO: 8291 - DNA, 552 bp, Homo sapiens
  MAP TO CHR14.3; EXPRESSED IN ADULT LIVER, SIGNAL = 3.3; EST_HUMAN HIT: AA227813.1, EVALUE 1.00e-119; NT HIT: gi16190404, EVALUE 1.00e-120; SWISSPROT HIT: P04523, EVALUE 7.90e-01
ggaaaattctgtaccttcctgcaagattggtacatactattaagaaacttagaaattggtcttaccacaccactcttaaagttctcaatccttttcttccccatcttgttggttatccaccaggcccaggttggcatgtattgccacaaatatgttactaacaagaaaggttgttctgagatccaaacttctttcaaatcattggccatgctgattaacatcagccgcacacaacgactggttgtcatcttgtgggactggtctccattattgcctatagtctaagaaaagttaaaaattaagtgaatttatccaagcgatttcacataactttaagctagaaaggactcaaatgccgtctagttgagtggttcctttagtggagcttcatgccccttaggagtctccataggtactaatgggagtttataaactatttgtaatatttcaaaaagcctaacagaaaccatatgcttactagataatatagtgcaggctaactaaaagatgaagattctttgcttttaattagaattgcatcaccctaatgtg

SEQ ID NO: 8292 - DNA, 505 bp, Homo sapiens
  MAP TO CHR19.3; EXPRESSED IN BONE MARROW, SIGNAL =   3; EXPRESSED IN ADULT LIVER, SIGNAL = 1.1; EST_HUMAN HIT: AA894359.1, EVALUE 2.00e-69; NT HIT: AF072845.1, EVALUE 0.00e+00; SWISSPROT HIT: P32845, EVALUE 4.60e+00
ttgccatcttctggggataggggagagaaagcatgaagcttgaccacccatatctccacttccctggggaccccctgcttcaggggtttcctcaggggttcccccaggcacctcccccagggtttccccagcacctcctccagggcttccccaagggccccctccctgggaccccctccctagggacactatacaccttccaggccccgcccatctccgccctcaccttgggcggggctgcggcgtgggcgtgcgcacaggaacaccgcccccacgatgagcagcgatgccaccgcatcagcagccacgaggcctgccaggagcggcagagagagggacccacatccggaacaagagcctggagagtgggggccggaacagggagacaactcaagctctgcgtcctggggctgtgctttggccacaggcagagaggaagtcccctgcgagggggcgggtcccaggttccttggagttgcgcttggggaatgaaacgggagacaga

SEQ ID NO: 8293 - DNA, 593 bp, Homo sapiens
  MAP TO CHR14.3; EXPRESSED IN BONE MARROW, SIGNAL = 1.8; EXPRESSED IN ADULT LIVER, SIGNAL = 1.4; EXPRESSED IN PLACENTA, SIGNAL = 0.89; EXPRESSED IN HELA, SIGNAL = 1.6; SWISSPROT HIT: P10805, EVALUE 1.10e+00
aaaagggttttctcccctccacagtaacttttttccacaagtgggaagaataatccaaaaaacaatttcagtaacttacaataccagctgtgatatgtatttactgcacaggagggcctgtatagtaaaatcttcaaggtccacctgtggaaaacttaactgggatagcacagtggtcattagtggtcacagcggtcattagtgcacccccacgatgttgcagtgagcacagagtgctctctccacatattcaacaggccccgacaaggcccaggaggcagctgatcagcaacaagtggatgggtcatgcctggactggtactcagaaaactggagctctgaactctactattaccacaagttattatctgaccatgaacctgacccttgtgtctctctctgtatggcaatattgcaattgctcacaggctatgcagaaagcattttagatgtctccgataatgatttttccaaagctttggctactgctaaccagtgaggcattttaagagattatagtgcaaatgggaacttaccctaagtttaaagatatttcatttggaaaaatacagagttttgggagctgcaatttg

SEQ ID NO: 8294 - DNA, 538 bp, Homo sapiens
  MAP TO CHR14.3; EXPRESSED IN BRAIN, SIGNAL =   1; EXPRESSED IN ADULT LIVER, SIGNAL =   1
gtctcgttctttccactcgccctccagcttttctgtgtactacatattatgcctccggaataggaacttaatttaagaaaaaaattttctttagcatctatttaaaatatcaacattttcaaatagcgtgtctatgtcaaagcagaagttgcaaaatgtaattgagatgatacccagaaagcacgcaggactgcatgtggtgcagtgtaaaccgaaagtaagaggtggcaggtagaattttcttcttactattctaaatgttatataatgtaaatcttagctcaccatttctatgacaaaatctttcttttgctcctaacacctaaggtaaatttaaactcaacataacttacacagcctgttatcatcgggatcaaatctattaactatgactaatagcttcttaagtagccatttgatgactggaaagaatgcttcattttgctttattgaacttccaagtccagctaatataaagcctttctactcttacatgaggtatttcaactcctcaaatgtctcaccttctcatcctcca

SEQ ID NO: 8295 - DNA, 559 bp, Homo sapiens
  MAP TO CHR18.3; EXPRESSED IN HELA, SIGNAL = 2.1; EXPRESSED IN BONE MARROW, SIGNAL = 1.9; EXPRESSED IN ADULT LIVER, SIGNAL = 1.7; EXPRESSED IN BRAIN, SIGNAL = 2.1; SWISSPROT HIT: P07510, EVALUE 1.40e+00; EST_HUMAN HIT: AI825669.1, EVALUE 2.00e-01
gccctagaacaggcacagagtggtagaaagagtacctgttcacatctgtgagctgcagggggccgccctccactagcagcagcagctggacctcctgctgcatactgtgccctttctgcagactaccaggatcaggtagattgcagccacaatactgggctctggggcttgcagccagagatctcctgcaccagctgccaccctctaaatccattttgccctttgtctgctgagggcctgatagcagtagggcccagcagcttgcagccagttcagcaaatgtgacattctctgctgaggcaaaattgcatgtagtgtctgtctgcaagaaaaagcaccacctaaaagaagcgtgtcagatccctagccagccagacacccaattatttgtctttgcatgttttttctttcaatttttaagttctgacaaaaatgtctggtacaaagcaggcagcggtgtgactgatcattttttcttcctttggctaatttagctttcaaccctgtagggcaagacctggatgtccagtgcctggtccctgctcattgggttccaaat

SEQ ID NO: 8296 - DNA, 536 bp, Homo sapiens
  MAP TO CHR14.3; EXPRESSED IN HELA, SIGNAL = 4.9; EXPRESSED IN ADULT LIVER, SIGNAL = 4.5; EXPRESSED IN BRAIN, SIGNAL = 1.9; SWISSPROT HIT: Q06323, EVALUE 7.00e-05; EST_HUMAN HIT: AI378146.1, EVALUE 0.00e+00; NT HIT: AF079558.1, EVALUE 0.00e+00
tcttcaccctttgggttgacaattttctccaggttgctgctgatgatatgataaagctcagcctgggagaaggccagagtgcaagagtcaggttcttagccaatcccctgcctgcccccactcatccacctcccctaaagccttactccacactcacatagaaggccctcaggtccagcaccatggccctgagctccccataggctgcctcatctcgctcatgcaccaaggcccggtaatccatctgcaatgtgggaggcaaagctgagtcagtcccatgggaggctgggacatgagtctggtttccttttataggaaataggttaacttgagaatgaaccccttcttagcaccaagaaataggatcccaaaggactgagcagagaaaagggtcaaggttgttgaagcccaaaccagtttttctaggtaatgcttttagcttaatattctccacattgggaaagtcacaaacaagacaaggaggacttcttcctccacacctcctcgtcccacacccagctaaaaggctggtggac

SEQ ID NO: 8297 - DNA, 539 bp, Homo sapiens
  MAP TO CHR19.3; EXPRESSED IN ADULT LIVER, SIGNAL = 1.5; EXPRESSED IN HELA, SIGNAL = 4.2; EXPRESSED IN PLACENTA, SIGNAL = 1.8; EXPRESSED IN LUNG, SIGNAL = 2.7; EXPRESSED IN FETAL LIVER, SIGNAL = 1.5; SWISSPROT HIT: P36956, EVALUE 3.00e-03; EST_HUMAN HIT: BE910027.1, EVALUE 7.00e-29; NT HIT: gi14764315, EVALUE 6.00e-47
acagaacgggcctatgtcagggacctccgcagcatcgtggaggtaaggcgggcagacaccagagggcagtgggtacccaggccagccccttggcccccataaccccagtcatcccaacaggactacctgggccctctgctggacggcggggtcctggggctgagcgtggagcaggtgggcacgctgtttgccaacattgaggacatctacgagttcagcaggtcaggggcaggggggacaggcagggggcattgattggttggagggtctatttcctaatccaaacctcggagcttcgtagtgtcctgtccaggctggtacgtggggttgtgacattgggcaaggatcagggatcacgactgggagggaggaccccgagtgagggaggggcataggggatgggaggaccccgagtgagggaggggcatagcggatgggaggaccccgagtgagggaggggcatagcggatgggaggaccccgagtgagggaggggcatagcggatgggagtcagaggacctggatgaagcccaaacact

SEQ ID NO: 8298 - DNA, 517 bp, Homo sapiens
  MAP TO CHR19.3; EXPRESSED IN ADULT LIVER, SIGNAL = 1.6; EXPRESSED IN PLACENTA, SIGNAL = 1.2; EXPRESSED IN BRAIN, SIGNAL = 1.4; NT HIT: gi9629267, EVALUE 3.10e-02; SWISSPROT HIT: P25439, EVALUE 7.20e-01; EST_HUMAN HIT: BE731523.1, EVALUE 0.00e+00
ctgtgggctgtgattctgagtatcctattgtccaagggtgagtgaccctcaatggggaggggttgcgtctggcccccctggggacacaaaacccccactgcatggcgcaccaactgcgccctggcgtcttgctcgcgtctgagcgtgagcagagtgtgtgtacatctttgggccgtttgcagtcacgcgtgtgcacatggcgtgcacgtatgtgtgcgagtccccacgcgtttgtctcccatcggcgtgtgtgcacatagtgtgcgctatatgcctgcctgcccgcccgctctgtggtcccgagtcgggggaccccgcaccccccgggcaagggaaggatttccgagtccctggccttgcctgcaggagcctctctccgcagcctccacggagcgcgcggcgctgctcggctgccaggacctgctgaggacaaacggtgtgtgcagagccgggcgcctgggcgcccggggcgtgtgcggcgggagcgtctgagaccccagagatggagtcctgggtg

SEQ ID NO: 8299 - DNA, 517 bp, Homo sapiens
  MAP TO CHR18.3; EXPRESSED IN FETAL LIVER, SIGNAL = 6.7; EXPRESSED IN BONE MARROW, SIGNAL = 3.7; EXPRESSED IN BRAIN, SIGNAL = 1.6; EXPRESSED IN ADULT LIVER, SIGNAL = 1.3; EST_HUMAN HIT: AU130901.1, EVALUE 3.00e-65; NT HIT: AJ250235.1, EVALUE 0.00e+00; SWISSPROT HIT: P22830, EVALUE 5.00e-11
tccttccacactggcttttcccagcacctttcctcccaggcagcttgtgtctattggtgtctgcatcgataaagagaaattcttatttgtacctgatgttagactcatacctcttctgcggttgaacttgaggttttgcaccctgggcatgctgggctgtttctgtggtgacggccgctgcagctgcacctgacttccacctccatggctgacagaccctccagctgctggatgccactgtgacaaaattaaagtgctcgcatgaaatctagctagaaagtaatttcttctgaagaggtcctcagagcataattcctgactttaaaatttaaagagatcccatggcagaaatgattttcctagcatttctctgcaggcaggtaaaggaacttaagccctctccaaggggatggggtggaggatcgctcccctaggatggccgatgagagcctgcagagaagcattttagaaactacacacacctcctctccccacctcggctgcagattttgataca

SEQ ID NO: 8300 - DNA, 528 bp, Homo sapiens
  MAP TO CHR19.3; EXPRESSED IN BONE MARROW, SIGNAL = 1.1; EXPRESSED IN BRAIN, SIGNAL = 1.4; EXPRESSED IN ADULT LIVER, SIGNAL = 1.7; EXPRESSED IN HELA, SIGNAL = 0.93; SWISSPROT HIT: Q9QZS3, EVALUE 5.00e-02
ttcccctctctccaacacacacccacacatcccacaggcaggtcaccccgcaggcgtccccagcacatagcaaagctcacccgctctctcctgcgtggtcgctcttggattcggtgcaggaatcactggggcttcttgggcgccgggaacctttcatggtgaaaatttccagggttctccaagtcagccactgccagtgtttgtctgtctcctgcaaagatttcttcttggctcccgaatcctttagttcctttgagagagtggtgtcagccccaaagctgctcccgaaggcttgggttgtgtagcgacggggctgtggccagcggcaggtggacgaggctccgacaactgagctcttgggggaatcttgtacactgtcagcagggggtggagccaggggatttgtcagcaggaactgatgtgattggctgttcctggtatgacaacgggaggggccctcatggaggattggggcgtaactcaatccatagatgaccgatcaacagaacctgcctaatcccatcaaga

SEQ ID NO: 8301 - DNA, 592 bp, Homo sapiens
  MAP TO CHR16.3; EXPRESSED IN LUNG, SIGNAL = 1.3; EXPRESSED IN ADULT LIVER, SIGNAL = 1.2; EXPRESSED IN PLACENTA, SIGNAL = 1.2; EXPRESSED IN HELA, SIGNAL = 1.9; SWISSPROT HIT: P52824, EVALUE 6.60e-01; EST_HUMAN HIT: AW505223.1, EVALUE 4.00e-43; NT HIT: gi14778795, EVALUE 2.00e-43
cctttccttctgctcacctggcctgaagcatcctgacggtaggacacgtgactgccacccttgccaagcagagtagggttgacacgcagatgctgttgctgctcaggctgcaagattgtggcaaaggtgtcaggagtggaatcccctaccccaggggccccagaccttccttgccttgcaagggagtggggtgaatcaggtatagagagggactgggctgcagaggcagtggaaagatcacttactcaagcttccggagccgtggtaggtgagggagaacctccacaatgttcagcaccacctggtcactgagctggttgtcccgaaaactgcgaggagaccaaggcccagtccctttgccctggggttggggcacttgcaagccccagttagcaagtgacaggatggccaccctcatgtgggagacataagacaggggcccagaaagagctgatggcctgctcgccggattccagcaggcacggctaggaggaaagaccctctgctggcctcaattctgggtctattctgttcctatggggaagtttttgcctggcggctcaagggatctagaagacagactgacggcctc

SEQ ID NO: 8302 - DNA, 569 bp, Homo sapiens
  MAP TO CHR16.3; EXPRESSED IN LUNG, SIGNAL = 1.1; EXPRESSED IN FETAL LIVER, SIGNAL = 0.82; EXPRESSED IN BRAIN, SIGNAL = 1.3; EXPRESSED IN ADULT LIVER, SIGNAL = 1.4; EXPRESSED IN PLACENTA, SIGNAL = 0.95; SWISSPROT HIT: Q02817, EVALUE 2.00e-13; EST_HUMAN HIT: BE970015.1, EVALUE 3.20e+00
actctcaggtggactggtggtattggaggtgacagctctgaagttgcgtagtgtggccctgctgtcaggtggactggtggcattggaggtgacaactctgaagttgtatagtgtggccctgatgtcagatggactggtggcattggaggtgacgtctctgaagttgtgtagtgaggccttgctgtcaggtggactggtggcattggaggtgacagctctgaagttgtgtagtgtgaccctggtgtcaggtggactggtggcattggaggtgacagctctgaagttgtgtagtgtggccctgatgtcagatggactggtggcattggaggtgacgtctctgaagttgtgtagtgtggccttgctgtcaggtggactggtggcattggaggtgacgtctctgaagttgtgtagtgtggcctcgctgtcagttggactggtggcattggaggtgacgtctctgaagttgtgtagtgtggccttgctgtcaggtggactggtggtatcattctttgggtgtggtcagtggctgcatgttcagctgggaggctggccactctgatgtttccaca

SEQ ID NO: 8303 - DNA, 520 bp, Homo sapiens
  MAP TO CHR16.3; EXPRESSED IN PLACENTA, SIGNAL = 1.5; EXPRESSED IN BRAIN, SIGNAL = 1.4; EXPRESSED IN ADULT LIVER, SIGNAL = 1.7; SWISSPROT HIT: P49849, EVALUE 1.20e+00; NT HIT: L22358.1, EVALUE 4.90e-01
tcagaaatgctgccagacacatccccttcatgcattcttctgggtattactttactgcttaattttgcaaatgtagattggttctcagattccctggaatgacaccccttataacaatgatcatgaatagcagcgctttggagtagccgccagaactgtttgagccaccgcacaaagacggcaccctgcatagccattttgcatgtctgcttcactgggtggactgagtcgccaatgcccagcaagacagtagggccgattttgatctctttgggaacaggcattgagtctttgacttcaatcactcgccacatcaatgtctctgcgcgaacgaaggcattgatgagagagtggacttgctactttcaaacacagaacaggaaacttgaccatcttcagtgctttagtccaaggatctgaaactctagtgcctacaaggcgagacaggtgacccaagtttgggaagtggccaagggtatgaagaaccaggtgagcatgatgatagagcagcagctgaccc

SEQ ID NO: 8304 - DNA, 553 bp, Homo sapiens
  MAP TO CHR16.3; EXPRESSED IN HELA, SIGNAL = 3.5; EXPRESSED IN BONE MARROW, SIGNAL =   4; EXPRESSED IN BRAIN, SIGNAL = 4.4; EXPRESSED IN ADULT LIVER, SIGNAL = 3.6; EXPRESSED IN PLACENTA, SIGNAL = 2.9; SWISSPROT HIT: P01266, EVALUE 1.00e+00; NT HIT: M84359.1, EVALUE 1.30e-01
aacacttggtctctgtccccaaatttgggtccccaaattcccaaacacttagtctctgtctcaagaagcctttaaagtattaggaaatgaaacatgtatgtgcataaagcagtgaatataccactcacttgctttccactgggaaaaggagttcagtgtaagctgtggtcagtgcagcctcactaggagaagggggccttacatgagtcacccgctctttcaaacagccagtagaggtggggatgcgctgaggaggatgaaggctaagagagggcaggaagcttggcaagaggcagctcacccaaaaccttacccagcacagttacagtagaacagcaggactgaagccaggctccagcaaatcaggagaaaatggatgggtaagaattggaggcacagcaagagagaaggggagaaaaataagaagaaatgggcactctttctaaaaagagtgaccggtcagaaaaagtcaggagatggagtttggttttgttcaagagaagagaaatctgatcatacttgaaagagaaaaagaggaggaaagggcaaaatc

SEQ ID NO: 8305 - DNA, 523 bp, Homo sapiens
  MAP TO CHR14.3; EXPRESSED IN PLACENTA, SIGNAL = 1.1; EXPRESSED IN LUNG, SIGNAL =   1; EXPRESSED IN FETAL LIVER, SIGNAL = 1.4; EXPRESSED IN ADULT LIVER, SIGNAL = 1.1; SWISSPROT HIT: P73327, EVALUE 5.60e-01; EST_HUMAN HIT: BG212115.1, EVALUE 4.70e-02; NT HIT: AF273053.1, EVALUE 3.20e-02
gcagaattcttgccatccacttttctgagtttcacttttatctccttcctgttctattaacagagtatgctttaaaaatttacatgtgtggaataacgtcagggaacaacagaatgaaaatttatgaatctctcccaaccctcttgagggagctatgactacctttcagatagactacatttcaggaccagatctcaggcaaacactgaacttcactctgctgacaattcgaaatcttattgtgggtgacttatggcccaggatcttattatattcagaagatgtcacaggcaagagtgtcagtcctgctacaggcagattatctgccaggtaccaatccctacagaaggccaatcccatgaccctgaggcccatcggaagcaagattcattgtaggtgttgagtaatgggcaaattggcaccctttcttgatagtggctagggcaggctcctaagctataggacacttgccttaattccactgcctgctggggcccaaggaagcccacagatcaagaatggt

SEQ ID NO: 8306 - DNA, 527 bp, Homo sapiens
  MAP TO CHR18.3; EXPRESSED IN BRAIN, SIGNAL = 1.2; EXPRESSED IN ADULT LIVER, SIGNAL = 1.2; EST_HUMAN HIT: BE747077.1, EVALUE 4.70e-02; SWISSPROT HIT: O35625, EVALUE 4.00e-03; NT HIT: AL591790.1, EVALUE 5.00e-01
ttcatgtagacacgggggaccaagtggctctgagagggaaaggatgtgctcagttagtgacagagccaagactagagtgttttgtacttgtgtgtaatcatcacagatgccatcacccaagaccacacctcaccctaaagctccattttgaagcacttcctggagtgggtatctcttcttaccattgcgaagctgggttttgggaaaccgccctaaacccacctcaagcccaagaaggctttgaccccaaatccatacaaacacctgctggaactcacagttggaagagatctcttggagagcatgttccacttgcccagtccccaggccactcttttttacagtgacctccaaagcctctggacccagctgccagctccactcctggctctgaggtcccccctggcaggagcacacatgccacagctttgcaccaaatccccaaagtgcccagcacattccaggctcccactgtctccaagggaccctagggccctggtagaggagggtaatggcaggaagccata

SEQ ID NO: 8307 - DNA, 565 bp, Homo sapiens
  MAP TO CHR18.3; EXPRESSED IN ADULT LIVER, SIGNAL = 1.1; EXPRESSED IN BRAIN, SIGNAL = 1.7; EXPRESSED IN PLACENTA, SIGNAL = 1.2; EXPRESSED IN FETAL LIVER, SIGNAL = 1.5; EXPRESSED IN BONE MARROW, SIGNAL = 0.91; NT HIT: AF267747.1, EVALUE 2.10e+00; SWISSPROT HIT: Q9NYV4, EVALUE 8.10e-01
gtggggtggaggttaatgtggaatggtgggagagtggggtggcagggatttccaagtcactcaccagtgatgagtgttaaccacatccccatttttttcctatgaaggaagctgcaatgctgtggtttgaggttaaacatgctggctccttctcttaggtcttgatttggtttttgttgttgttgttttttttttaattctagtctgttcttgttttgctgtgctgatatcctcttagattttacgagcatattaattgtgagtatttaacattcttctttggtttattctgagaccctgtttgcctgccctttggcatcattggcagtttttggtggtctactgatcttcctgtttgtgcctcctggttgcccctttttcactggaatgtgccaggttgaagcaatatgtagggcccggtgggatgggccaggaggtggcctttcagatgtggctcctgcatggccctgcttgctctcttgagctgcctgcacttcagtcttaggaccacattcctgctttggcctacatgaagtgcaaggtagcagtgggaaaagcagagagg

SEQ ID NO: 8308 - DNA, 519 bp, Homo sapiens
  MAP TO CHR16.3; EXPRESSED IN FETAL LIVER, SIGNAL = 1.4; EXPRESSED IN ADULT LIVER, SIGNAL = 1.5; EXPRESSED IN PLACENTA, SIGNAL = 1.2; EXPRESSED IN BONE MARROW, SIGNAL = 1.4; SWISSPROT HIT: Q9P2N7, EVALUE 3.00e-09; NT HIT: gi13649599, EVALUE 9.00e-86; EST_HUMAN HIT: BF795046.1, EVALUE 1.00e-85
atcagcaattctgacccctgtgaccacagagttcccatccacgcggctaacgacatgaccagagaagttcgggggttcagagcatctccatcccccttttggggactcagagcgtctccatcccacttttggggattcagagcatcttggtgaaacctcgggggctcagagctcccacctgaagaagccctctttattcaggtgcagttccctttcccaaacattctccggggttgtgcattccgcagacacatttgggaaccgcagcgccagatgttgatgctgtcccgggttcggggaagggaaggtacaggtatctcaactccacaggtggcctccatgaaccagcgccgtgtggatttctaccttgcctccatcgaagacatgctggtggccatcggcggccggaatgagaacggagcgctctcttcagtagagacgtacagtcccaagactgactcctggtcctatgtggccggcttgccaaggtgatctggggcttggtggaaggttctccaa

SEQ ID NO: 8309 - DNA, 516 bp, Homo sapiens
  MAP TO CHR16.3; EXPRESSED IN HEART, SIGNAL = 2.7; EXPRESSED IN LUNG, SIGNAL = 4.4; EXPRESSED IN BONE MARROW, SIGNAL =   3; EXPRESSED IN FETAL LIVER, SIGNAL = 2.9; EXPRESSED IN BRAIN, SIGNAL = 3.3; EXPRESSED IN ADULT LIVER, SIGNAL = 4.4; EXPRESSED IN HELA, SIGNAL = 2.8; EXPRESSED IN PLACENTA, SIGNAL = 3.1; SWISSPROT HIT: P21538, EVALUE 2.80e+00; NT HIT: AJ277662.1, EVALUE 7.70e+00; EST_HUMAN HIT: AI015688.1, EVALUE 4.60e-02
aattgatcacagggtgagccccatcaactcgtcattttctccctgtggtctggattttgacagaaacctttgactttctcctgatgcatttctaccttattgactcaggggaaaagtacagaacatatgagtattccgaatgtttccagagcgattatgctcgctggcgagtgatcccttcatgttgccaccacatggaacgccacctgttcccccgccacggcctctttggggaaaaccaggaaggggatgcagacacgatggacatttcaacacagcgaactcaatttcaagagaaaagggccaaggaccttccgcccctccacgtttgcctctttatgtttttgatccgtattggagaccatctggccacgtttctgttctctgctgcttgtgggttggttggcgttgactctggtcagaaggagaacagaaaaatcctcagggaaagtacaggatgtgacagaaaactgagctggtgaatcaggggtgggctggtccccattgtgtcaaagt

SEQ ID NO: 8310 - DNA, 599 bp, Homo sapiens
  MAP TO CHR18.3; EXPRESSED IN HELA, SIGNAL = 1.1; EXPRESSED IN BONE MARROW, SIGNAL = 1.1; EXPRESSED IN BRAIN, SIGNAL = 1.4; EXPRESSED IN ADULT LIVER, SIGNAL = 1.2; EXPRESSED IN PLACENTA, SIGNAL = 1.2; EST_HUMAN HIT: BG612138.1, EVALUE 8.40e-01; SWISSPROT HIT: P58145, EVALUE 1.20e+00; NT HIT: AL161541.2, EVALUE 5.70e-01
ttcaggtgaaaatacaagggcaagtttttagtattttataaaatagaactggtaacatctatcaggcagtggtataaatatgatgtcatctgctgtatttgtctacagtattctttctctgaagtccttgtctctatgtttattgtttcaattttaatttatactctgtcatggctcctgaaaagatacttccatccaaagatcaaagttaattttttttactctctttttatttaatcatcacgtgtaggaccatggcaaaaatgtttactagtcaacattccaagtgaattttaattttacaggttttcatgattataagggtttgaaataggattcctttaccttgttctgtttttctttttgttttttctatcccatacagtgtttaaaacccatacttcacaccagcttaccacagtgtcatacctgctgtgggccttcaaggaactctctgaacaccagtcgagattaggtaaatagtcacaaagctattaaaaaggccaatccatattcatcacacagctttttccaagttattttttagttgatgttcaagaataaaaaacataaacaaaacaaacaaaagccaggaaagg

SEQ ID NO: 8311 - DNA, 510 bp, Homo sapiens
  MAP TO CHR14.3; EXPRESSED IN ADULT LIVER, SIGNAL = 1.4; EXPRESSED IN PLACENTA, SIGNAL = 1.1; SWISSPROT HIT: Q09701, EVALUE 1.20e-02; NT HIT: AF030001.1, EVALUE 3.10e-02
ctgaagcccaaggaagactgtccaatatcccttctagcctggactgcccggtcaggttgtgaatttcctaaaagtaggggttttttcctggcacttggtagaccctgggtcatagttggttgactgacagacaaaatactttgtttccttttaggcattatgtgactctcccctgtgtatcacttagtaggacaaagatgcgtgcaaagagaggccttatgaccagacatgtgtatacatacatgagtacatgggcctggatgcacatgtgtgtacatgtgtgtttgagcatggtgctagggaaaagcaacatgagaagaggagattccaaatagaactccagctctccctgaaattctcaaagtgtatcattcaagttaaagcgtattctgatattaatgaagtggatgaggaaaaaaacatgaacaacacgtatggtgtaagtgttaattatcaagacacacatttattttattttaagaaaaaagaagcttccgtaaatcatcccaa

SEQ ID NO: 8312 - DNA, 515 bp, Homo sapiens
  MAP TO CHR18.3; EXPRESSED IN ADULT LIVER, SIGNAL = 1.6; EXPRESSED IN PLACENTA, SIGNAL =   2; EXPRESSED IN HELA, SIGNAL = 2.3; EXPRESSED IN FETAL LIVER, SIGNAL = 2.2; EXPRESSED IN LUNG, SIGNAL = 1.7; EXPRESSED IN BONE MARROW, SIGNAL = 1.8; EST_HUMAN HIT: BI520280.1, EVALUE 7.20e-01; NT HIT: U82695.2, EVALUE 3.10e-02; SWISSPROT HIT: P21237, EVALUE 5.50e-01
agtgatatgggcacagggtgtcaagtctcaatgcacagctgtgacaagcctgggccgatcagcctggaggtggaaagaagcgggaggggcagggaggctttccctggtgttcgcacccacaaggtgctgtctagagtctgggaggaggtgggcaggggggtggtgtcagccagaggcttcaaacactgggacactgctccacatctgtactgtgtgtaactgtccatttattcttgaccaggtattcacttgccctttacgttctcggcattctgctagggctgtggggattgatccaggctctgccctaaaaaaagccaaaaaaaaaaaaaaaatccttgggcaccctctccacccacctctagatgtcttttggtcctcacaggtcctgtggggcttccccaggttgcctcttctgggtctcataccttgaaggcatagctcctaaccaaataggcaaaaacatagtcacgaataggggcttaacgtctgtctccaatctccatgggaggtaa

SEQ ID NO: 8313 - DNA, 529 bp, Homo sapiens
  MAP TO CHR19.3; EXPRESSED IN ADULT LIVER, SIGNAL = 2.4; EXPRESSED IN BONE MARROW, SIGNAL = 1.9; SWISSPROT HIT: O75346, EVALUE 8.00e-19; EST_HUMAN HIT: BE673426.1, EVALUE 0.00e+00; NT HIT: gi14767612, EVALUE 1.00e-66
tcaggaatgtggaaagtttggattaagatgaaacatcatgaagaaattcttttctaaatgaaaaaattctgaagatttttctggaaaaaggagatctgaaactcttgtatgcaaagaataaattactaaaaaacattctacaaaaaagagaaataaaacctttagagtaatattatgaattatgtactcaagttatcctcaccaaggaagatcaggtttctgtagttctctaacatcacatccctatatagattccgctgtgcagcgtccaggcaatgccactcctccagagagaattctatggccacatctctaaattgcaatggtccctgaaaaaaacacacacacttatttttaccaagtggccatgggtggaatttttaatttgacttcaggtgaaatgagagagtaaagagaagtggttctgacttataggactaaaattatccaataaaatgattttcaacacagaaatattctctaatgtattctctaactctgagaagaaagagcagcacaagatccacaa

SEQ ID NO: 8314 - DNA, 600 bp, Homo sapiens
  MAP TO CHR14.3; EXPRESSED IN ADULT LIVER, SIGNAL = 0.96; EXPRESSED IN BONE MARROW, SIGNAL = 0.81; EXPRESSED IN FETAL LIVER, SIGNAL =   1; NT HIT: gi14746508, EVALUE 9.00e-74; SWISSPROT HIT: Q13625, EVALUE 1.00e-15; EST_HUMAN HIT: AA448143.1, EVALUE 1.00e-73
agcagcattcacgttgacaccaaaatccagcaggaacttcacgatgtgatggtggccggcgcagacggcgttgtgcagtggggtgatcccttcgtcgttgggcttgctgggatcttccacctaggacacacggcctgtgagcgcccatcccctcgcccccagcagcgtgcactggtccccggctgcagctcacctcatagatgatcctctgcaccagatcgaactctccttccagagacgcgtctaggagcagtgccagggggttaaaccggactctcagcccgtgccccgtccgctccgagttgggcttcttcaagttggtccgcttgttctgttgggaaggaagcacgctttccagttaaaggtggtccactgaagtctaagaacccacgcctgctgggaaggagtggtgggagctaaagcccaaagacagtggctccgcgaagcagccctggagtggtagcagtagcagcgcccaggtgaccacctcaaataagggccagggccactctgctcactacaagggagagccctgtctgaggcctgagtccctggctcacgcacagagggacacggctgtgtttgagcttctggccactc

SEQ ID NO: 8315 - DNA, 576 bp, Homo sapiens
  MAP TO CHR19.3; EXPRESSED IN FETAL LIVER, SIGNAL = 2.9; EXPRESSED IN ADULT LIVER, SIGNAL = 1.7; EXPRESSED IN PLACENTA, SIGNAL = 2.3; EXPRESSED IN HELA, SIGNAL = 7.2; EXPRESSED IN HEART, SIGNAL = 1.9; NT HIT: gi14767595, EVALUE 7.00e-99; SWISSPROT HIT: Q03111, EVALUE 2.00e-32; EST_HUMAN HIT: BF748184.1, EVALUE 5.00e-36
tgacttcatctccccacctctctctcctccagtgcaccgtccaggtgaggttagagctggggcatcgcgcccaactgcgcaagaagcccaccacggaggggttcactcacgactggatggtgtttgtccgcggccccgagcaatgtgacatccagcacttcgtggagaaggtggtcttctggctgcacgacagcttccccaagcccagacgcggtgagtggcctcaagccctgagtgcccacagcacggacccatctgtcttcactcctcccaaggccaggctccacccctccctcaggagcagcaggacccctccaaccatgaggttccagcttgcgtccctcggcgtgggggcactggagccgtgtcacctccagctgttgagttagtcgtaggaagaaccgaaggaggtggtggcggtctgttgtgtcgtgatttagacccgggctctgggaagcagccagggagcacagccaggttggcatgggtgggacaggtgaagtcagccggctggtgagtgatcaggaagttgccgaccgggcctatgtttgtttgtgtgccatgtgaagaattccc

SEQ ID NO: 8316 - DNA, 590 bp, Homo sapiens
  MAP TO CHR14.3; EXPRESSED IN FETAL LIVER, SIGNAL = 3.2; EXPRESSED IN LUNG, SIGNAL = 2.9; EXPRESSED IN BONE MARROW, SIGNAL = 3.6; EXPRESSED IN BRAIN, SIGNAL = 2.8; EXPRESSED IN ADULT LIVER, SIGNAL = 1.8; EXPRESSED IN HELA, SIGNAL = 2.9; EXPRESSED IN HEART, SIGNAL =   2; SWISSPROT HIT: P17656, EVALUE 1.60e+00; NT HIT: AB026898.1, EVALUE 2.20e+00; EST_HUMAN HIT: BI819977.1, EVALUE 6.00e-51
ttcgagaaatggagtcccacatggggaagggtatggccatgctgggtggccctggtcgcactcccagtgccaagcctctgccccccacccctggaagcctcacgttgcacatctcgcgaacgatggccttctccttctcactcaggtcctcctcacagctgtcctggagctgccggtccagattctcgtgtacctccaggacctgaagggaacgggtctcggggtcaggggcagaggccaccggcagacctcgggcaagtcacctggcccctgatcctcagcctcccctgctgcgaaccaaagctgaggaccctgagccgctgggcccctggggacaagcgtggaaaaaactgaggggcaggttgtcatctcaccctgctgacactggatgccctacaagggaagcagctcatggctgggccacccgggaggaagtagacaggctgggcaaggaagaccctcagacaggtggactcactgcaacccagggcccgctggagatgagtgggcactcgccacgtggagggggtgtgagtaggcgtggccgtgcatgcatgtgggatgtcatggggcacgtacgtaggaggaag

SEQ ID NO: 8317 - DNA, 510 bp, Homo sapiens
  MAP TO CHR18.3; EXPRESSED IN FETAL LIVER, SIGNAL = 1.4; EXPRESSED IN BONE MARROW, SIGNAL = 1.1; EXPRESSED IN BRAIN, SIGNAL = 1.1; EXPRESSED IN ADULT LIVER, SIGNAL =   1; NT HIT: Z15117.1, EVALUE 4.80e-01
tgcaagcagctgttgtgtggggtccttcatgtcagcaggtcatgacaagcagagacacagaggtttgttctccgttgggtttcataatttcatttccctgacttcattaacaccgaaaattgatggttatgacatttaaaagcatgtgagtgttgaagtcagacctgggtgatgttatcaagagaataaatgctttccaaaagtcaatggatgttacctcttgcttcatttcctctgccgctaccatctgctaattctagaatcatttctgactgaagcaaaggattagcacctttgcaacagtgcccttccaggccagcagggtgagtcctccctgtactctgaaggagagagatgtggtttaaatcaggttataaacccatagcctctgagctaatcagcagtgagaaatttctgggaaggcaggtccagggttatcaaactctattagaagcaagagcatcggttatgcaaatagcatcatagtaacaaagtcaaaatccctgtgga

SEQ ID NO: 8318 - DNA, 541 bp, Homo sapiens
  MAP TO CHR18.3; EXPRESSED IN ADULT LIVER, SIGNAL = 1.2; EXPRESSED IN HEART, SIGNAL = 1.5; EXPRESSED IN HELA, SIGNAL = 1.1; EXPRESSED IN BONE MARROW, SIGNAL = 1.3; EXPRESSED IN BRAIN, SIGNAL = 1.6; SWISSPROT HIT: P42230, EVALUE 2.00e-01; NT HIT: gi14747635, EVALUE 5.10e-01
cacacctcttgcatgtccacattcatgtttgtttatcttaccacagccatgaatttccgtttcatgtttctttacctcagaggttcttcttctcttctgagtcatagacataattgaaaatgtgctgaatctaggctccttcctagaaaagtgctcagaaatgctcacaaacgacttcagggcctttctacaatccttgaagctggctcgtgttcctgtggatgctgagttaggaagccctgaatgtgactcccatacattgcaaccactcaaggtagtcccttttccaccctgaagtctctttcttgttaagttcagaccacattaattcttcctcttcataattcttaccacttatgttttgtaggacttatttctaatactgtgcgttataaattatgtttgccttcgttttctccttggggatggagactctattataacactttatattacctatagtttttaggaaaaacatactaataatagggtcaccctaaatatttgctcatgcacagttgccttcacatgggctttttct

SEQ ID NO: 8319 - DNA, 514 bp, Homo sapiens
  MAP TO CHR14.3; EXPRESSED IN ADULT LIVER, SIGNAL = 2.5; EXPRESSED IN PLACENTA, SIGNAL = 2.1; EXPRESSED IN HELA, SIGNAL = 1.4; EXPRESSED IN FETAL LIVER, SIGNAL = 1.4; EXPRESSED IN BONE MARROW, SIGNAL = 2.8; SWISSPROT HIT: Q10156, EVALUE 7.20e-01; NT HIT: AE001701.1, EVALUE 4.90e-01
agcattcagacacaggggacagtcttatcagtctagactaactgacagacggacaggtccctctccacttccacaatccataccctgaatattctgaggagtaggggagagcaaagcctggctcagcccaccccattgcctctgctagactgaaggacaggaaatagagaaggagccagtcctccccaaagagggatagggatagctttttaaactcacctctcccttctgagaggaggctgctattccttgcaacgtatttttgtgcagctgaggatctggaggggttctgacctgaacaatgggctgggagctgagtttgggagctggagttctgcataatagagtaggatgaatttggagtttggggactgtgtagaaagaggagatgaagaaacaagttgagcaggggaaaggaaggatgggtggttgaagtgggaaccagtggaacggcagggatggagggctgaaaagcaggttcgcttctgtcccaccttccactcccaaatcctca

SEQ ID NO: 8320 - DNA, 589 bp, Homo sapiens
  MAP TO CHR18.3; EXPRESSED IN ADULT LIVER, SIGNAL = 0.95; EST_HUMAN HIT: BF949611.1, EVALUE 3.00e-31; SWISSPROT HIT: P42662, EVALUE 8.00e-04; NT HIT: gi16165088, EVALUE 2.20e+00
gaagacataaagcgaatttgggtaaaaatactcagctctagaaaatggtgcatttaagtaaagaaaggataatagcatttgaaaaaaaatattaaacacagtttgttcttatcgtacatcttctttctattcacaagggaaaataataagattgattgcaatcaagattgtcttgtgagactgaaaaagagaaaaggagttctgatactgatgtacattcatattttgatatgtggaaattattttatttttgttttatagatttacttacgattcttggactatgagatgcagaattcaaatgagtgcaagaggaattttgtggctgtgtatgatggaagcagttccgtggaggatttgaaagctaagttctgtagcactgtggctaatgatgtcatgctacgcacgggtcttggggtgatccgcatgtgggcagatgagggcagtcgaaacagccgatttcagatgctcttcacatcctttcaagaacgtaagattctctgcacttgactatttttccttcgtatatgccatatgatgccagtttcataagctgttaatggtgttttcttcacacagtgagcacagc

SEQ ID NO: 8321 - DNA, 537 bp, Homo sapiens
  MAP TO CHR14.3; EXPRESSED IN HELA, SIGNAL = 0.89; EXPRESSED IN BRAIN, SIGNAL = 1.2; EXPRESSED IN ADULT LIVER, SIGNAL = 0.94; NT HIT: AE006883.1, EVALUE 5.10e-01
acagacggactgtgggtagggcaaacaataggcagttaatcaatcaaatgacgaataaaacccagatctcaaaacttaacacccaaactaaaagatgctgcaactcaaggaacctagagatctacatgtcatgttctccagctgggctggcaacttttacaatgcacaggggtcaacatggaatgtaatgaatggaagattacagaagcttcagaaggcagtgagctgaagttgagtttcatgatctatgaggaagttgctggccatcgtgaagctaagtcaggtgtctggaaacttaaataagtgtttataaaaaacaggaaaagggctagggggtctggagaagtaatgattgtttgcaccttgcaggaactcaggcggctaaccacgcaggcttcactttaaattgggaaggcaggttcattccctcaaattaaattgaatttgatattaggaaggcctgctcctttccaaaggctggttttccctgcaaagcaccaagtgtcattatggagagggaaacgctctttagtcccc

SEQ ID NO: 8322 - DNA, 502 bp, Homo sapiens
  MAP TO CHR14.3; EXPRESSED IN BRAIN, SIGNAL = 1.2; EXPRESSED IN ADULT LIVER, SIGNAL = 0.98; EXPRESSED IN PLACENTA, SIGNAL = 1.4; EXPRESSED IN HELA, SIGNAL = 0.99; SWISSPROT HIT: Q05555, EVALUE 3.50e+00; NT HIT: AY051455.1, EVALUE 1.20e-01
ctgtgattgcctcctaagccgtgttcctaagggtgtgaggcttgcaatccactttgcctccagttgccttgattcgttgatcaaataatccggtgcgcacccagtgaccccagcagactcttgaggagctcaggtccctctaggtgtggcttcttgtcttccagtccagcagtgtgacatggctggcagtggttgaggtggtggacttgggggatggctcagctgatgggccttgtgacgtctccatgagccaggcttctggacttgctgctgtgtggcctgtgaattcctcgggccttgctttatgctgtctctgctgtgagcagagaaagcactcagtggcagtgtcagcagggctgttcctcacttctttcttcatttggtcatctgtatggctgtccagccatcagttaaattctggctctttgccaggccctgggatcagaggggaccagacccactcttgctggtaaaaggtgaatgaggcacagacatcaaagca

SEQ ID NO: 8323 - DNA, 587 bp, Homo sapiens
  MAP TO CHR16.3; EXPRESSED IN BRAIN, SIGNAL = 1.5; EXPRESSED IN ADULT LIVER, SIGNAL = 1.5; EXPRESSED IN HELA, SIGNAL = 1.3; SWISSPROT HIT: P93647, EVALUE 2.00e-09; NT HIT: gi14777715, EVALUE 2.00e-81; EST_HUMAN HIT: AA683395.1, EVALUE 2.00e-81
tgtaatttctgctgctttgtgctattacattttcagaaattttgacactgaacgtattttattttttaaaaagtatgtagaatgtagagaatgcaaataataatgctcagatgttagttttgtctgtttcttaaattcttctgagcagaaataccaaccttgccagtacatcatgtgtgttttcacttatatacagccttctgttggcactactaaagtttttaaaatgttttttgttctcccctaggtgttggatcctgaacaaaaccataacttcacagatcattatctaaatgtggcctttgacctttctcaagttctttttatagctactgccaacaccactgctaccattccagctgccttgttggacagaatggagatcattcaggttccaggtacctgactcttaaatcattatgatacatcttgcctttctgaccataactttaaaattagttatgctatggagttttgactaaaagaagttcatttgccaacatacaatcttcagaagttctgaggaatgtatataaatcagtttctatgtagcttcaaagtctggaagagcaaaacagcaaacgttg

SEQ ID NO: 8324 - DNA, 527 bp, Homo sapiens
  MAP TO CHR16.3; EXPRESSED IN LUNG, SIGNAL = 1.8; EXPRESSED IN ADULT LIVER, SIGNAL = 1.2; SWISSPROT HIT: P25992, EVALUE 4.90e+00; NT HIT: AF108458.1, EVALUE 0.00e+00; EST_HUMAN HIT: AW951879.1, EVALUE 1.00e-76
gtcttgactgcacagatgcccatctcagcacacggccctaactgggctgcatccagcctttgggccagaggggcttgacttccgcatccagaaagcccttcacacagtcctcccaagcctgggctttgttgttcctctccaggtcctggctctccagtttgatcttcaccacctggcacagtagctccctgagaaggaggcagaaatcagaaactccaaactacttcagatgctgctccaaggttccaatcatgtgctttcagcagccctgatgaaagtaaatgagcctaacctttgtcagcaataggggacgtgctcagacactgccccaccaaccctccaaagaggccaagtcccagtgtgggcacacctgatctcatcattccattggaacttcttccgaggtcccattatcctcctgccccctttttcttcatcttcttcctcatccgaacaaatccggtccctctgctccttgtcattctcctcttccagcatcctacggggtgaatagaattacatggggc

SEQ ID NO: 8325 - DNA, 582 bp, Homo sapiens
  MAP TO CHR16.3; EXPRESSED IN ADULT LIVER, SIGNAL = 3.7; EXPRESSED IN PLACENTA, SIGNAL = 2.8; EXPRESSED IN HELA, SIGNAL = 4.5; EXPRESSED IN HEART, SIGNAL = 2.1; SWISSPROT HIT: P20073, EVALUE 2.50e+00; NT HIT: gi14785609, EVALUE 0.00e+00; EST_HUMAN HIT: BF343440.1, EVALUE 0.00e+00
tttagcatgaaccaggggaggttgaggagtcgggaaacccagccattaggtgcaggtatgtcacacaacctccagccctcatgcacaggatctgcctacatccctttacctctcccccttgacccactgtcctcttctcacaccaggtcatgcagaacaaccacattgcctcggtgaccctgtatggcccccccaggcctggtagccacctgagaacagcggaactcccctagggacaccaccacccatgcccctctgtcccgtggaactgtgcatcacatcctgctcagtgggcctctgtaccaccctgtgggttttcttggacacctggccagtgctgaagggctgttgtgatgttctgaggttgggctcaggctgggtgctctgccatgggctgagtggcccagatattcttctgtccatctttggcctgctggtgccagcaggggacacagactgcaaagagaagcacaaagtttgagccttgattcctggacccaggagctctcaactaacaaggaggcaggagaggtcaacccttgtcccatgcacattgggaagacttggggctctttctgtgac

SEQ ID NO: 8326 - DNA, 501 bp, Homo sapiens
  MAP TO CHR14.3; EXPRESSED IN HELA, SIGNAL =   1; EXPRESSED IN LUNG, SIGNAL = 1.7; EXPRESSED IN ADULT LIVER, SIGNAL = 1.7; EXPRESSED IN PLACENTA, SIGNAL = 1.3; SWISSPROT HIT: P32862, EVALUE 2.10e+00; EST_HUMAN HIT: AI559211.1, EVALUE 5.00e-14
tgctaagttttaataagtaccccaggtgttactaattctgtgccctttgagccattctctgaaagaaccaatttctaacatgtctaatcaggcatttattttctttcaggatttaacatgaagcaaaagtgacctggaatcttttctccttttattgccaaaatgcaaagaaaagagtctttagctctcagaaaaagactacatttaagagtgaaaataagaaaatgtgggagtttgaggaaaagtatcatcagctgtcaaatgtcatgaatgcgcagtcttggtcaatgggccacatgacccaaaactcattatcctccccaaagccaccaatatcaatacatgcaccaaatgcatcgacgcaatagttttctaccttggcctgtcaatgaagttattgaaactaaattgccaactcatttccattcttctgttcaatttatcacccgttttgagagctacgccaatcaattctattacacattttcctgcaactcctca

SEQ ID NO: 8327 - DNA, 562 bp, Homo sapiens
  MAP TO CHR19.3; EXPRESSED IN BRAIN, SIGNAL =   2; EXPRESSED IN ADULT LIVER, SIGNAL = 1.2; EST_HUMAN HIT: BF339469.1, EVALUE 6.00e-91; SWISSPROT HIT: Q9MDB7, EVALUE 6.20e-01; NT HIT: AJ006216.1, EVALUE 2.10e+00
ttcgttgtaactgacctgcgctcaggcagaatagccacacgtctccagccgctacggcgtggacagagagcacagctctggcatggaggatctgcagagcctcggtgttgtgtccagggccagagccagggctccttagggaccatccagctcatgccttgtttgctggggttgggggtaggggtggcggattgaagcgccaggcttgggggcacccagtggtgtgggcctgaccccggggctgtccctgcagatgacctacttctcaggcctcctggtgatcctggcctttgccgcctgggtggcgctggcggagggactgggtgtggccgtgtacgcagcggctgtgctgctgggtgctggctgtgccaccatcctcgtcacctcgctggccatgacggccgacctcatcggtccccacacggtagggctggtagccaggctggggtgggggaggccgggtcctagatctcggggtgcacgctgaccacctcgcctgtgtctccacagaacagcggagcgttcgtgtacggctccatgagcttcttggataaggtggcca

SEQ ID NO: 8328 - DNA, 545 bp, Homo sapiens
  MAP TO CHR14.3; EXPRESSED IN FETAL LIVER, SIGNAL = 9.6; EXPRESSED IN ADULT LIVER, SIGNAL = 9.5; EXPRESSED IN PLACENTA, SIGNAL =  16; EXPRESSED IN HELA, SIGNAL =  21; EXPRESSED IN HEART, SIGNAL = 8.2; EXPRESSED IN BONE MARROW, SIGNAL =  10; SWISSPROT HIT: P39188, EVALUE 4.50e-01; EST_HUMAN HIT: BE799178.1, EVALUE 2.00e-91; NT HIT: gi14150152, EVALUE 4.00e-45
tggaattagaggcatgagccactacgcccagcagaaattattatttttgataaatcttgtttattttcttttaaggcttaatataggtcttctcttcatattacagtttttcttcctatttgaattacgttcagatatatttgagatgttcagataaatttgaaaattaagtttatcttttatatttgcctttttattaacagaaatggatgatgaagactgtgaaagaagaagaatggaatgtttggatgaaatgtccaatcttgaaaaacagtttaccgatctcaaagatcagtaagtagtgactttagaaggccattgtcactgaatctcaaccttgtcacttgtatactagcacaagagcaactagattcagtctcagctgttttgtattttatgcgacagaccaatttgaaagaggcttcaactattgtttgtctactaaagacctcattaactaaactgagggtttggaggcagggtttttttgtgggcttgaacccaggagttggagaccagcctgggcaacatcggaagacctggtc

SEQ ID NO: 8329 - DNA, 521 bp, Homo sapiens
  MAP TO CHR18.3; EXPRESSED IN ADULT LIVER, SIGNAL = 1.4; EXPRESSED IN BRAIN, SIGNAL = 1.3; EXPRESSED IN PLACENTA, SIGNAL = 1.3; EXPRESSED IN BONE MARROW, SIGNAL = 1.5; NT HIT: L35930.1, EVALUE 7.70e+00; SWISSPROT HIT: Q63191, EVALUE 2.10e+00; EST_HUMAN HIT: AI902331.1, EVALUE 7.30e-01
gcaaggagagaggtggtttggtgcacttccaaagttgtgtgtgagccttcaccacaagaaccctggttctgtgggaaggacacgcagagcaccttgctgaagcaggagctgggagtgccacacattcgcatgcagactcccctgagatcccgaagcacttctcaaacatgaattaacttgagcactttcactgcagggcactgtgcacagttactcattcaggtattcatcaaagattcacacagtcaacaacacagggcccccccattatgttccagatgttgtgccaggtgagggggccattcttgagttccctggaaagcagatcccaagatagataaaccttcacttccctccctcaccaccattcttgatttcactcaccattggccggcactctggggagtccaggctgcctgactgatgggcagacccagaacttcagcactgagtccttggctgcctcggcctggcctcatcgagccacagctattgcactttcccatttcctgttatcccct

SEQ ID NO: 8330 - DNA, 538 bp, Homo sapiens
  MAP TO CHR18.3; EXPRESSED IN LUNG, SIGNAL = 2.5; EXPRESSED IN BONE MARROW, SIGNAL =   2; EXPRESSED IN BRAIN, SIGNAL = 1.6; EXPRESSED IN ADULT LIVER, SIGNAL = 1.6; EXPRESSED IN PLACENTA, SIGNAL = 1.3; EXPRESSED IN HELA, SIGNAL = 2.2; NT HIT: gi14766071, EVALUE 4.00e-63; SWISSPROT HIT: Q14155, EVALUE 2.90e+00; EST_HUMAN HIT: AV733008.1, EVALUE 1.00e-85
gagctgagtggtcagggaagctgggagacacagccatctctacatggtgtgcacggccttggcgtctctccacgtggaagctcaggctgtcaacgactgggtcatctgattagagagaaatcacctgcggcttcattgcgggcctgcatggcttgagatcaggctttcctaaaagtcatgtcacctgcgagcccctgtcttccagtctgcatcacagggagactcaatccccatgtaaatggaggcacctccctcccaccacgagctaccagacccagccaggccaaggttacctgtgtcgaggctcccctgggtgccgcttgcccggcctatggagaggctgcggtggctcaggttacggaactgggagaaagaggaggtggagtctatggtatttctccgggctccaaaggcatttgtgggtaacagaaattgggtataggaaacagtctaaaaggtgaagacaaaaacaggccagtgattattcccaggcattgctagctctgcattctgatcaagctacagttgtcaccccaca

SEQ ID NO: 8331 - DNA, 563 bp, Homo sapiens
  MAP TO CHR14.3; EXPRESSED IN HEART, SIGNAL = 2.3; EXPRESSED IN BONE MARROW, SIGNAL = 4.1; EXPRESSED IN BRAIN, SIGNAL = 4.6; EXPRESSED IN ADULT LIVER, SIGNAL = 3.1; EXPRESSED IN PLACENTA, SIGNAL =   3; NT HIT: D16307.1, EVALUE 5.40e-01; SWISSPROT HIT: P10077, EVALUE 5.40e+00; EST_HUMAN HIT: BF924973.1, EVALUE 2.00e-01
agcatgcatgaacacattccctcttagctcagagcagaatttgctgccatggtccacattcaggcagaaggctggaggtgatgaactcctgcaggtctatgcagcatgttcagtgaataagagttttgcagggaagtctagcctgataatcaacagaaggcttcatgcatctctctgcacacccttgtttggccatgatagtggcaggagggttattaagataaagtaagagcatcctctaccattcaggttctccaatcttttgctcttagagcaattttgagaaaggagtgataaaagtaaggtggtggggagaaaaagccgggagcagggcaggtatgggagacaaatgtttgtttataagccaagaacatcaagcatcgtgcagaagaaatgtcccagattctttttatcacagagctggtgccaggcagcaaggattagttcattaagaaataatccacccattggagggatggctaagtctgcagatagtggacaggctcttatccaatgtctcatcagctaacaggtgagaagaggggagactggcaggagaagaa

SEQ ID NO: 8332 - DNA, 531 bp, Homo sapiens
  MAP TO CHR16.3; EXPRESSED IN BONE MARROW, SIGNAL = 1.2; EXPRESSED IN ADULT LIVER, SIGNAL = 1.2; NT HIT: gi14776228, EVALUE 2.00e-90; SWISSPROT HIT: P06924, EVALUE 2.50e-01; EST_HUMAN HIT: BE070269.1, EVALUE 2.00e-90
cctcttcacctctgctcctgctccgttcctgccaggaccttgaggctgagcagctcttgggtgggctgcagagtaacagtcctgaagggcgccgggaagccctgaggcgccttgttccgctggcctcggacatgatctttgccagggaggtcatcagccgtaatgggctccagatactaggcaccatcattgaagatggggacgagtgagcacagggatgtgtgggctgggggagatggtgggtctttctggtcctggggtggtcctgctcagccccagatgtcccccctccagcctaggagaggtgctggccctcagcctgagggccttctcagagctcatggagcacggcgtggtgtcctgggagactctgagcatcccctttgtgaggaaggtgggtgggctttcctagggcagcgggtgggggcagtggagcagtggggcagtggtagacccggtcttccatgggggtgaggtggtgacacccccgccccttacaggtggtgtgctacgtgaacatgaacctcatgg

SEQ ID NO: 8333 - DNA, 546 bp, Homo sapiens
  MAP TO CHR14.3; EXPRESSED IN BRAIN, SIGNAL =   1; EXPRESSED IN ADULT LIVER, SIGNAL = 0.95; SWISSPROT HIT: O83600, EVALUE 2.30e+00; NT HIT: gi14749601, EVALUE 2.00e-50; EST_HUMAN HIT: BG997303.1, EVALUE 1.00e-51
gaccctctgagcagctatgggcatatttggatgttttccgaacccagtggtccctggcctgcctagaaggcagccacactttacattctcctatccccttagcaggaatagaccggcctggcatgctctgcagtttccggatccctggtgcctggtcctgtgcctggtccctgaatatccaagcaaataactgcttcagtacaggtgagcctggctccccaggtgcccagagaagaggccttaacaggccttaaaaccccatgtagttgtccctctccccagactacatgtgacataatcttaccagcccatctctgtctccgccaggcttgtctcggcgggtcctgttgaccaacgtggtgacgggacaccggcagtcctttgggaccaacagtgatgtcttggcccagcagtttgctctcatggttggttggattgggacaggcagaatataaaagtttgccccatgtagaaatttggccagattgaaattggactcctctgtgtgccatctagtactctttgacaggggagaaagagcatcag

SEQ ID NO: 8334 - DNA, 576 bp, Homo sapiens
  MAP TO CHR18.3; EXPRESSED IN HEART, SIGNAL = 1.8; EXPRESSED IN ADULT LIVER, SIGNAL = 1.2; EXPRESSED IN PLACENTA, SIGNAL = 1.2; EXPRESSED IN HELA, SIGNAL = 0.87; SWISSPROT HIT: P54795, EVALUE 5.50e+00; NT HIT: U65487.1, EVALUE 8.60e+00; EST_HUMAN HIT: AA282647.1, EVALUE 5.20e-02
gtgaagccatccttggaaaccttggcctagtctgggcctcctcggccagcctccctgaataaacgtgagaaggctagcaagtcaaccactaactaactcgcttcctataagtctcttctcccagggtttgggtttttgcctgctgatgctctgatgctgacaaccactagccccactcccccacccatcccagaagcccatggatggaggttttgcatttttggttatgaaccccagtttggatcagtctattttccctagactcggcctcacagtggtcttggcttggcctcagctctcctttctggaacattgtcccagcataaagctgctaaatcatgggccccaccacgatcctccgcccaggactccacaaccactgctgcctctgattggtgtccttcttctctttccttccacttaaaccttacagagaaatattcaccaccacagaacactgtggttgttttgtgcactaaggacagtgctcatatccattcacctatagatgcatttgtccagttttattcattatccatggagccgtcgctgtgttgcagaaaccctgctatgcat

SEQ ID NO: 8335 - DNA, 529 bp, Homo sapiens
  MAP TO CHR14.3; EXPRESSED IN HEART, SIGNAL = 1.6; EXPRESSED IN LUNG, SIGNAL =   2; EXPRESSED IN FETAL LIVER, SIGNAL = 1.1; EXPRESSED IN BONE MARROW, SIGNAL = 1.2; EXPRESSED IN ADULT LIVER, SIGNAL = 1.4; SWISSPROT HIT: O95180, EVALUE 4.30e-01; NT HIT: gi5174412, EVALUE 1.00e-41; EST_HUMAN HIT: BE741751.1, EVALUE 2.00e-41
tctcaaaatgaaaggtgggcttgagcacctgggcagaggccctcgctgcaaactgttatgcaggggccaggtgagcagcatctggtcacctggacacgagggcagaccccaggtgggagcatcaccagggcaacgctgtctcacctcctgctgctctgatgcagccacagacatcgacggggacgcttctggcttcggagcttgtgtttcttgctcactagctgagctggtctgtgagaaccaagaaagaaagagtggggtgaaaggacatattctacatgatccagactctacttacaagttctttactaataaaagcagattctgtctagcccagaagtcccagcggttcttactcctggatcctatcaccccttgggtctcctcacagacccctgctccactcccagctggccggcctgccctgaggacccctgcacttggcttcctcagctgagtggtgattgcgtgggcaggtggagtctgacaagtcacagtcaccccgctgaggtgagaatttgcctggaga

SEQ ID NO: 8336 - DNA, 500 bp, Homo sapiens
  MAP TO CHR16.3; EXPRESSED IN LUNG, SIGNAL = 1.4; EXPRESSED IN BONE MARROW, SIGNAL = 1.4; EXPRESSED IN ADULT LIVER, SIGNAL = 1.2; EXPRESSED IN PLACENTA, SIGNAL = 1.5; EXPRESSED IN HELA, SIGNAL = 1.3; SWISSPROT HIT: Q9Z883, EVALUE 1.20e+00; NT HIT: gi15315787, EVALUE 2.00e-65; EST_HUMAN HIT: AL135642.1, EVALUE 2.00e-65
tccccacactgaactgattggtttttaacttttcccccctctgcacccccgccagctggcacccgtccctgttcccatgttccttgtgaattgttactgtgccagtctgatgcatatgggtagactgtgctgggcatcctgagctctgtgaaatgaacatcaacacgggaggtgtgtggagtggcgcaggtcagttaccaagcctgcacatccaggtgtctcctgtctgccttcacgctgaggtttacacctggcggcttactcacttcctggagatgctggggccgccctagttgctactcccttttctggggggactgatgagtcattggttttctcacagggtcacctgtctgtgtgcccagtttgaagccgtcctgcagcatggcttgaagaggagtcgaggattggcactcacagcggcagcgatcaagcaggcagcgggctttgccagcaaaaccgaaacaggtactgctctgcctggctgtagcttggaggag

SEQ ID NO: 8337 - DNA, 525 bp, Homo sapiens
  MAP TO CHR18.3; EXPRESSED IN FETAL LIVER, SIGNAL = 1.9; EXPRESSED IN LUNG, SIGNAL = 1.9; EXPRESSED IN BONE MARROW, SIGNAL = 1.6; EXPRESSED IN ADULT LIVER, SIGNAL =   2; EXPRESSED IN BRAIN, SIGNAL = 2.2; EXPRESSED IN HELA, SIGNAL = 2.5; EXPRESSED IN PLACENTA, SIGNAL = 1.9; SWISSPROT HIT: Q81999, EVALUE 8.40e+00; NT HIT: AF234171.2, EVALUE 2.00e+00; EST_HUMAN HIT: BF184192.1, EVALUE 1.90e-01
tttctcactttgccaggaccaacaaacaccattttcacatttaggtattaactctattctactttctcagtgcctcacctaggaaaacttatttattttctcagggcctgtttttcgtttatttgattttacaaatataatgtaaatatctgtataatatgactcctatattcccaccaggaataataatgactgcagtgcctgcgggagacttcaatctccttagggattctaaaataccaagagctattccgaatagctcagcccagctgcgacacattcctcagattggtggtagttttgaagagctgctggccagatatttcaacttgcaaactccccaacttgcaaagctgctgctgtttgcactttagctctgggtcttgaagttctgcctcttcgtgcttattgggtttacactgtgtgaaccaggactgcagaggaaaattgctgctgttctcattattgcatgtctggatttgggctccagctgacatgtttatttggtttgttgacttcagccct

SEQ ID NO: 8338 - DNA, 501 bp, Homo sapiens
  MAP TO CHR14.3; EXPRESSED IN FETAL LIVER, SIGNAL =  99; EXPRESSED IN ADULT LIVER, SIGNAL = 6.1; EXPRESSED IN HELA, SIGNAL =  54; EXPRESSED IN HEART, SIGNAL =  27; EXPRESSED IN LUNG, SIGNAL = 9.3; SWISSPROT HIT: Q90835, EVALUE 3.00e-53; NT HIT: gi16173286, EVALUE 1.00e-78; EST_HUMAN HIT: AI114441.1, EVALUE 2.00e-81
gctctggactgcgtcctatcactaacttgtccaactgtcaggcccttgcatctgccactccaggatgtctacagacttggtggtactgatactatctttgtgggcagagttggtggtactgatactatctttgtgggccgagcaaagcctgggtttctcaaacccggcatggtggtcacctttgctccagtcaacattgcaactaaagatgtgttgaaatgtaccatgaagctttgagtgaagctcttcctagggacaatgtaagcttcaatgtcaaaaaggtgcctgtcaaagatgttcattgtggcaacactgctggtaacagcaaaaatgacccaccagtggaagaagctggcttcactgcccaggtaactgtcctgaaccatccaggccaaatcagtgttggttatgcccctgtaatggattaacacacaactcacattgcttgcaactttgttgaactgaaggaaaagatggatcaccattttggtaaggagctgg

SEQ ID NO: 8339 - DNA, 537 bp, Homo sapiens
  MAP TO CHR14.3; EXPRESSED IN ADULT LIVER, SIGNAL =   2; EXPRESSED IN PLACENTA, SIGNAL = 1.5; EXPRESSED IN LUNG, SIGNAL = 1.5; EXPRESSED IN BONE MARROW, SIGNAL = 1.9; SWISSPROT HIT: Q60401, EVALUE 8.00e-03; NT HIT: AY009158.1, EVALUE 4.00e-17; EST_HUMAN HIT: AW997120.1, EVALUE 3.00e-09
aaagggggacactgaggaaggggcaggctggggacgtgtggctgaggcccagggtctgtgtgtttcctttccaggggtgttcatcacccatggggacgtcggggtgggcaccatcgtgggctctgctgtgttcaacatcctgtgcataattggagtgtgcggactgtttgctggccaggtcagtggtttctccctgggcccggcagatgcatgccctgaagcgtgggggatgagcctctaatgacaagaggttggggtagcagtggggacgcccacaggacagctgagctggattctggatacatttggggcctggttttggcctctccaacagggagcatgaagctggtttgtcattgataccccattagatatcctcagagccccagggggaatgttgggcttgacctcagagaggcgggctcatgagtgaggccctgccttgcagagggagatggaagtgggcagccgactgtgcctgaaagtgccagggtccggtggagagcgagagcctctggcctctgctgtgaaacacac

SEQ ID NO: 8340 - DNA, 516 bp, Homo sapiens
  MAP TO CHR18.3; EXPRESSED IN LUNG, SIGNAL = 1.6; EXPRESSED IN BONE MARROW, SIGNAL = 1.9; EXPRESSED IN BRAIN, SIGNAL = 2.2; EXPRESSED IN ADULT LIVER, SIGNAL =   2; EXPRESSED IN PLACENTA, SIGNAL = 2.3; EXPRESSED IN HEART, SIGNAL = 1.6; EXPRESSED IN HELA, SIGNAL = 2.1; SWISSPROT HIT: P07506, EVALUE 3.60e+00; NT HIT: AL445565.1, EVALUE 1.20e-01; EST_HUMAN HIT: AW994315.1, EVALUE 1.80e-01
tgcctgtatagaagctgccctaagattgttagatcaataatagcacagtgatattttatttgagctcactgatatagatttattcttctaggattcaggatgcagtgagttgcctagaggacttgagcatttgtgtaatagcatctacagtctgctatatttttagtcaatgtaattttgaaacaagacctgctttaacacattatagagaaaggaactgaagatacagggagatgaggatgttcaagggcatcatactctctgggatctgactaactactctttcaccacaactcatgagaggacacgttcttcactaagttcaggggatggcttagcaaggtggatattaatctttgaaatgttctatggcgactatgttttcctggaccagagatcctgctttaatattgaattatcaggtctcagtgtgaatgaagaaatcatagagctataccaatcaggtggtaacaattcaccttcagagacaaggtgagtgaaatgatcacagcacaa

SEQ ID NO: 8341 - DNA, 534 bp, Homo sapiens
  MAP TO CHR18.3; EXPRESSED IN BONE MARROW, SIGNAL = 2.1; EXPRESSED IN BRAIN, SIGNAL = 4.8; EXPRESSED IN ADULT LIVER, SIGNAL = 2.4; EXPRESSED IN PLACENTA, SIGNAL = 3.9; NT HIT: X02624.1, EVALUE 1.30e-01; EST_HUMAN HIT: BG541421.1, EVALUE 7.50e-01
ggaggaggaggaagacaaggagcaggaggagaaggacaaggagggaggaggaagataaggaggaggaggaagatgaggaggaggaagacaaggagcaggaggagaaggacaaggagggaggaggaagacaaggaggaagaggagaacaaggaggaagaggaagataaggaggaggaggaggaggaagatgaggaggacgaggaggaagaggaggaggagaaagaagagaagggggggagaagcagtcaaaacaggattataaaaacagtggaatattttatgtttagaggaaataccccaaccccatccttgatgccttcacttatgtggaagaagaaatcacattagcataacaagtggcatgatttaccatcttgttgagcttgaaggagctgggcttggacagctcctcttctgctctccaggcatttctctgtgatcttctactccatggtctagaagggttgctccttcctcctcctgctagggaaggcttaggtcaagagctgccagtgactgggaggggaagttagc

SEQ ID NO: 8342 - DNA, 569 bp, Homo sapiens
  MAP TO CHR18.3; EXPRESSED IN LUNG, SIGNAL = 1.4; EXPRESSED IN BONE MARROW, SIGNAL = 1.9; EXPRESSED IN ADULT LIVER, SIGNAL = 1.4; EXPRESSED IN BRAIN, SIGNAL = 1.8; EXPRESSED IN HELA, SIGNAL = 1.5; EXPRESSED IN PLACENTA, SIGNAL = 1.4; SWISSPROT HIT: P27315, EVALUE 1.10e+00
cattgcattttcagcaccactctcagccttactgtagcaggcaaccacttagtgggtgtttgaagatgacaatgccccacgctcagcccttctttagcgttaatggacaagagcaagctgtatgtcttcttaaataaaacagcagccttttgtgacctcccttttctcaggcaacaccaactcaattattcactcagaactgcaaggaacacttcagacgttactcaagcattcatcatccacccccacccccacaaatcatataaagggaaaataatcaaagacatttaaataatcacaatttttaaaagtataaagcagaacagacagttttattttagatcttaagtgaaagtggattaaggttttccttagaaaacatttattggagaatttcagatgaatttcagttttgccgcctggtgtcgaatcctgctttttaaaccttgtctctgcagagtcacccctttttctccagtcccactctcactgctgttggtctgaccctgtatgtctgtgattggatagacagcaactgtccctaggaaaggcatagcatgggaaagtgt

SEQ ID NO: 8343 - DNA, 503 bp, Homo sapiens
  MAP TO CHR14.3; EXPRESSED IN BRAIN, SIGNAL =   2; EXPRESSED IN ADULT LIVER, SIGNAL = 1.3; EXPRESSED IN PLACENTA, SIGNAL = 1.5; EXPRESSED IN FETAL LIVER, SIGNAL = 1.3; EXPRESSED IN BONE MARROW, SIGNAL = 1.3; NT HIT: AF064043.1, EVALUE 1.20e-01; SWISSPROT HIT: P32362, EVALUE 8.00e+00
tgggacagttgagaccttcctaaaggtttggtggattatgtgaacctatatcagaggacgaggagaaggggtgcttggggccaagaatgttcattgccaaaagtctggtgctcctgctgggagagcctgtcctcagtctggtaatctctcagttgacttttccaaagcagcccagtgtctgtgactgttgccattagaaacactgagaaaatcccggcagggattaccttgctagctgctgatgagtgaaggagtaattaggcacaagtagttccctgacagcagctgcaaaaaaggcactggcttccttctggagagaatttccaatggcactaatgttatgacacacaggagatgcactgccctccatatggaatgaagccaagccatcaaactcatctgatttaggactgtgaacctgaattcctatggagatctcaaaagaacaaggtcaagacttctagtttgaagtaattcagcatgcctttttctacagctgcgga

SEQ ID NO: 8344 - DNA, 505 bp, Homo sapiens
  MAP TO CHR14.3; EXPRESSED IN ADULT LIVER, SIGNAL = 1.1; EXPRESSED IN PLACENTA, SIGNAL = 0.94; EXPRESSED IN HEART, SIGNAL = 1.6; SWISSPROT HIT: O18964, EVALUE 5.40e-01; NT HIT: gi16177049, EVALUE 1.90e+00; EST_HUMAN HIT: AI984623.1, EVALUE 0.00e+00
ctggctttgaacaggaaacctgaaaggactggcaggaagtcggtgcccacctgccctgccctttcagaggccaaagagattctcaggctcagaaccatttcagtaacactgtgactcaaggacctctgctgaccagaatacccagccttagactattcgtgtgttattatgactctgcttacaagggagggaaacccaagagcatggctgtgtgaaagcccagtgcagtggggagcctgcgggtagaacccagtggctcagccagtcagccctgcacctttgctgggccacagacacagcgccgagatacatcccatcggccaaaacgcccacttccgccagctcagccagaaagggccatgttagaacacccgccgtcttccttggctcccaccagcaactgaatttgaggttctcatccttcaggtcggccttcctagcccttggggacagctctggaagctcaggccccagaagccagctcagcagaaggttccctttcctc

SEQ ID NO: 8345 - DNA, 582 bp, Homo sapiens
  MAP TO CHR16.3; EXPRESSED IN PLACENTA, SIGNAL = 0.95; EXPRESSED IN HELA, SIGNAL = 1.1; EXPRESSED IN LUNG, SIGNAL = 0.99; EXPRESSED IN FETAL LIVER, SIGNAL = 1.2; EXPRESSED IN ADULT LIVER, SIGNAL = 0.99; NT HIT: AF162137.2, EVALUE 8.70e+00; SWISSPROT HIT: O54897, EVALUE 8.50e-01; EST_HUMAN HIT: BG981148.1, EVALUE 1.30e-02
attgccaaattctggagtggtctttgaaggctttttgagctgaatagtaatcaggaaactacagcttcacgaagcaagctctcagacaaaaacaagccactctagagttgtgtacttttcgtgcctctgatttagttgaatttccttctgataaggaaattttaaggacattgatgggcaaggcaagcacatttattgcacacatgaattctttcaacagacttcatgatacacagccagtctcataatcagaagtatttctctctgtttaaaacccagaagggtagctgacatcttttatcaaaaagacagacaattcttatcccctgacaattccagattatggatctcaggaggctctccttacactggtattttatcactggaatcagagagactgctgtttattttctaaacctctgcatagttttcaaggtgttgccagcagggcctgggctgacagtgacacgtgttattgtcacattgctagatctgaaagaaaacagaagataaataaatatcagtgttttcttggatctcttttttttgctattgtgggcaccggaggcactggtatttgtt

SEQ ID NO: 8346 - DNA, 576 bp, Homo sapiens
  MAP TO CHR14.3; EXPRESSED IN HELA, SIGNAL = 5.5; EXPRESSED IN LUNG, SIGNAL = 5.1; EXPRESSED IN FETAL LIVER, SIGNAL = 4.2; EXPRESSED IN BRAIN, SIGNAL = 7.6; EXPRESSED IN ADULT LIVER, SIGNAL = 5.7; SWISSPROT HIT: Q27589, EVALUE 5.50e+00; EST_HUMAN HIT: AA436123.1, EVALUE 6.00e-20
gcccaacactagctcctcactgagcaccccctccatgtctttcttaaccagggtgtagaggcaagcactgaaggcccatgatcagccgtgggagccacgggaatcaattgcttccagtacgactggatgcatcggaaagagcctggggcaaggctggaggccacaagaggagctgccaggccacataagcagggaacaaagccgatgatcacacgcccatcagtgagccaacttggtgaagggaaatgcccaagttctcagcacctgcagagcctaagacataacaagcagcatgccctgacgctcaccaaggccaggtgctgtggtaagtatttcccatacattgccttgcttgttaaaatttcactatattcctacatgggactaactatggcttagaaaggcaaccactgtggtagagagtgacagagacttgccaactctgctgtcccacagccttttcccaggagtggagcctcggacaacaggcttactccacccagcctccttttctgcccctgtaaaatcaagaccatcattgcaaagtgagggaaaggggaagagtcagccaaacac

SEQ ID NO: 8347 - DNA, 514 bp, Homo sapiens
  MAP TO CHR14.3; EXPRESSED IN PLACENTA, SIGNAL = 2.2; EXPRESSED IN HELA, SIGNAL = 2.2; EXPRESSED IN BONE MARROW, SIGNAL = 3.3; EXPRESSED IN ADULT LIVER, SIGNAL = 2.9; EST_HUMAN HIT: AV752851.1, EVALUE 7.20e-01
agcatgcttggggtagagtgggacacacaggatgcaggaaagacttctgagtaaagaagatatttggtccatgaatatcttgaaacaacatgcatatgattttgtgtctgtgtgtttcttgcgcgagaaagtccatgatctttatcagattctgcaaacgatcgacagctcattaagcagagtctgggccagagattgagaaggctaaggggccagggcatggagatggggtagcatgaaagagtctggacgtacaagaaggacaagggccaccactcggaggagcacggacgtcactcttagggcaatagacagttattgcctaggtgggtctcggttttactcatggcctgtgtcatgtaaccctcagagttctggtaagtctcatcatatctaagggacacaatgaatagccgagaacaagcttcctacaaacatcaggggaggcctctcacaggcaatctactgggtctcaaagcatgaagaggaatttgcccggcaaatgttttaatca

SEQ ID NO: 8348 - DNA, 599 bp, Homo sapiens
  MAP TO CHR19.3; EXPRESSED IN ADULT LIVER, SIGNAL = 2.5; EXPRESSED IN BRAIN, SIGNAL =   3; EXPRESSED IN HELA, SIGNAL =   3; EXPRESSED IN HEART, SIGNAL = 1.8; SWISSPROT HIT: Q05315, EVALUE 2.00e-05; NT HIT: gi11425973, EVALUE 0.00e+00; EST_HUMAN HIT: AI167958.1, EVALUE 0.00e+00
tttgatttcctgatgcctcccatagaatgtcctggaccctcttggggatgaccacttcctcttttcccctcttaaagcaagaaccaatcatgtgaagtttggtgctgttttaatgatcaagtgtaggggaaggggtgaggagggattattctgttagtaggctctgggaatcccatggtcaggtagaaagagggattcctcaacaatgaggagtctgatcatctccctcaatcgctgataagcactctggtcagggagatatctctgaagacttgcagcatcttcacagatgctggcgggaatcgatgggcaaagttgtaaatgcgttggccatttaccattacctacaagaggaaaaatgcatcagaaagacagcatgccaccaaacaggttttcagccctttctcttctctgcccagttacaaataaccttccccatgaaaactcctagttacacaagtgaacctagtagacacacttctgtgattttacaggctatgtttcgtgcctatttgagacagatgctcattttatttctaatgttttctctcattcccctagtgaagttatacaccgtgtcacacagtccgtttactcgg

SEQ ID NO: 8349 - DNA, 549 bp, Homo sapiens
  MAP TO CHR18.3; EXPRESSED IN ADULT LIVER, SIGNAL = 1.2; EXPRESSED IN LUNG, SIGNAL = 1.7; SWISSPROT HIT: O88799, EVALUE 3.00e+00; NT HIT: AL163302.2, EVALUE 8.20e+00
atgcagcccttttgaatgactccacccttctttctctagggattatttttttctgtgtctcttagatctacgaagccaaaggcctctcagctctggaattagatggaagagcaatcctggttaatgaggatcctccaggaatggtgtctggggcctgcctgtcccctgtacacacgcaatgccaggcatgaagtcaccaactccctgcagagagacatgcacacaggacacagggctgtggcccttcccatgggtgcgaccttcccgccctcctggctggcccatgttcataaacacaattttctctaaactatcataccatataccatcacctctttaggtattcagattttgcctaggattttctttattaacaagaaaatgtttactacaatgaacaattctgactcgtaacaacagtatcccctgagcactttagtctgtcacggcatgcgcccctcagggccacatcagtgccacgctgtctgggcggcagctgttccagaacctgctctgggtaatgatgttcggcagacacacagatccatg

SEQ ID NO: 8350 - DNA, 546 bp, Homo sapiens
  MAP TO CHR14.3; EXPRESSED IN ADULT LIVER, SIGNAL = 2.3; EXPRESSED IN HELA, SIGNAL = 2.3; EXPRESSED IN PLACENTA, SIGNAL = 2.3; EXPRESSED IN LUNG, SIGNAL =   3; EST_HUMAN HIT: BE185656.1, EVALUE 0.00e+00; SWISSPROT HIT: P47150, EVALUE 5.90e-01; NT HIT: AF307160.1, EVALUE 1.30e-01
acattgaacctgaccccaagcttgatcccgacatcaaaacaactaggggatggagaggcctttgggattgcaacagcttgtcaggcagccctgcttttccctaggaaaaatggccacaggcaaatatttccacttccatggccaatctacaaaatatccaaaagacagatccttcccaaaagaagggagctaacgagtacttcgctgggctgggtcctctacaaattcgaatccatgcttataaacctcctatggaggagtcttatgtcctcattctccagagggaagttgaggctctgctgttacagagccagaagcaagattcaaatctttatcttgtgtcttccaagtccttgctctttccaccaccctcccagaaaaatctgaaatctacaccggtgggcctcagaaggaatgctacacttgagaacttcacaaagccagctccggagctgctgctcttccctgggggcatttccaagcacagcatggtctattaacactcctcttaagaaattatcctagccccagtcagccagaaacagt

SEQ ID NO: 8351 - DNA, 593 bp, Homo sapiens
  MAP TO CHR14.3; EXPRESSED IN HELA, SIGNAL = 2.4; EXPRESSED IN LUNG, SIGNAL = 1.2; EXPRESSED IN BONE MARROW, SIGNAL = 1.3; EXPRESSED IN ADULT LIVER, SIGNAL = 1.5; EXPRESSED IN BRAIN, SIGNAL = 1.5; EST_HUMAN HIT: AI220777.1, EVALUE 0.00e+00; SWISSPROT HIT: P51003, EVALUE 4.00e-15; NT HIT: gi14249159, EVALUE 3.00e-58
tggaatgttgttttgtttgtgtttcagattgatattttgtttgcaagattagcactgcagacaattcctgaagatttggatctacgagatgacagtctgctaaaaaatttagatataagatgtataagaagtcttaacggtatgagaaagcctacttccttttgtgtacttcagtttttgtcagatattagttgtttttacacaagttttgtattgaagctttttatagctatattgttaacacagtagtgagttaaataaaatgaactttgcctaataaactacagaagagtatgtagtagtttatttcactctacagtattttatacactgtatttcttctgtcattaatggtatactcaggacacttaaaaagaccatctgacttttgtactctgttgctagtgatttaggtttcatggcctaacccaaattaattttgatcctgttattctttagtaatgctttcagcattgctgagatcagaaggactactttggtacaattttatattagcatagcttgttactgtgctcttgaagagcagttcttggaaactttagtggattaagtcttccgcagtatatgtggga

SEQ ID NO: 8352 - DNA, 562 bp, Homo sapiens
  MAP TO CHR16.3; EXPRESSED IN HELA, SIGNAL = 1.9; EXPRESSED IN PLACENTA, SIGNAL = 1.4; EXPRESSED IN LUNG, SIGNAL = 1.5; EXPRESSED IN FETAL LIVER, SIGNAL = 1.7; EXPRESSED IN BONE MARROW, SIGNAL =   2; EXPRESSED IN BRAIN, SIGNAL =   2; EXPRESSED IN ADULT LIVER, SIGNAL =   2; EST_HUMAN HIT: AA464111.1, EVALUE 0.00e+00; SWISSPROT HIT: P51828, EVALUE 3.00e-13; NT HIT: AF184150.1, EVALUE 2.00e-53
atgagacgtgtgtgcgagaggcggcgatgggtggagggaaccccacacccttcctgagaagcaggggcagcctggctgcggctatggagtggcggctgcttcaccgcttccttcttgcctgcagctcctactgaagcccaagttcagcggcgtggagaagatcaagaccatcggcagcacgtacatggcagctgcagggctcagcgtcgcctcagggcacgagaaccaggtactcaagcccaagaggtgaaattcagctgactgtcctcacttaaaggtgacctgtcaccttacttaaagggtgtgcccttatctcgtcctgggggaggggcacaggtacttgtagggctcagccaggattttagtggtggggatcctcaacaagagtggcgcgccagggcccactaggtctgggggctctggagatgcaaggatctgacccacagcctgtcccgcaggagctggagcggcagcatgcccacattggtgtcatggtggagttcagcatcgccctgatgagtaagctggacggcatcaacaggcactccttcaactccttccg

SEQ ID NO: 8353 - DNA, 507 bp, Homo sapiens
  MAP TO CHR14.3; EXPRESSED IN HELA, SIGNAL = 1.1; EXPRESSED IN ADULT LIVER, SIGNAL = 2.1; EST_HUMAN HIT: AW166015.1, EVALUE 1.00e-122; SWISSPROT HIT: P42173, EVALUE 6.00e-05; NT HIT: gi14748462, EVALUE 0.00e+00
tcacttgtgagtgagccacccactgacagcctttcttctactgacaggacaacaatctcctgagaatgacaacaccatcaaggacctgctcccagaagacgctgggatcgaccaccagacagttcaccagctgattacagtgctcatgaagttcatggccaaggatgaaagcagcgctgagtcagacatcagcagtgcaaaggccttcaacacggtcaagcgacacctgtacgtcttactcggctatgaccagcaggaaggttgcttcatgattgcacctcaaaaaatgcgcctgtcaacttgctttaatgcattcattgcaggaattgcccaagtaagtgtaataacagctttcagaagtcacacctttatacttttagtagaagcaaggcattacataccatgtagccaacgttggttcagcataaaggtttgtacaaattgcttggtattatgcaggagtatgtggaggggaatgtgaacattagtaagaattgggagcctggc

SEQ ID NO: 8354 - DNA, 525 bp, Homo sapiens
  MAP TO CHR14.3; EXPRESSED IN ADULT LIVER, SIGNAL = 3.2; EXPRESSED IN PLACENTA, SIGNAL = 3.4; EXPRESSED IN LUNG, SIGNAL = 3.5; EXPRESSED IN FETAL LIVER, SIGNAL = 2.5; EXPRESSED IN BONE MARROW, SIGNAL = 4.8; EXPRESSED IN BRAIN, SIGNAL = 4.1; EST_HUMAN HIT: BE549014.1, EVALUE 7.40e-01; SWISSPROT HIT: P40362, EVALUE 9.60e-01; NT HIT: AF274563.1, EVALUE 7.80e+00
ctcagcctatgagtgggaggggctgcttgtgttgttcttctacagtctgtatcatcaagcccgaaacagttgttataggcactattttcagggggcctgaaaaactaattgatattactctccattgtcacagtaaagcatattgcaaacactaagtgtcatgtgcgtaattcttccttacagacaaacaaggccaaactgtttcattgctcacacagtaactctgatgaggaaaatcagggaactgcatgaaacctgggctagttccacagctgggatcttagacctgggccttctgcctcagtttctcttgaagaacagcttgttcagctaccttaataagaaaatgagtgtgagaaagtaactgtcccactacacctgaatgcctcagagtgataaaggagaaagaattcagcagttaggagaaggaattcagcagttaggagaaggaattctttggagagaattagtgatgttttatgagcccctcccctttgtggcaagggggagccttgctactttaca

SEQ ID NO: 8355 - DNA, 503 bp, Homo sapiens
  MAP TO CHR14.3; EXPRESSED IN BRAIN, SIGNAL = 1.2; EXPRESSED IN ADULT LIVER, SIGNAL =   1; EXPRESSED IN HELA, SIGNAL = 1.1; EXPRESSED IN FETAL LIVER, SIGNAL = 1.3; EXPRESSED IN BONE MARROW, SIGNAL = 0.88; NT HIT: gi14784242, EVALUE 1.00e-72; EST_HUMAN HIT: BI031307.1, EVALUE 4.00e-70; SWISSPROT HIT: P11688, EVALUE 3.50e+00
ggccaggtgtgttcacctacctctgtatttcttgtcatactgctacacatcataaagaaacttaagtgaccattgcattttattgctattacctgctcatagtaaaattcactccgcaccagctcattttcctcctctttgagatccaaaatccattccacctcatctgctttggggactctcaccacaaacgagtatggagggctttcattcttggagctgtctagagctgagaagagaaatgccattcatgtgtcattcactggctggcagttcagtctaacccagtccagtgagctggcatgagttgcaggtagacacttgcctgctatctcagggcccctttctctctccttggttccttttgtttgctttaggacaccccactaagcacctcaaaccatcttccccaggcatagacctgaggcgagtgttacagtatttgtcacgtaaccttcttgcttcacacaagaaaccttcaaaggggcgtgtttctcaaatag

SEQ ID NO: 8356 - DNA, 559 bp, Homo sapiens
  MAP TO CHR16.3; EXPRESSED IN FETAL LIVER, SIGNAL = 1.9; EXPRESSED IN ADULT LIVER, SIGNAL = 2.1; EXPRESSED IN BRAIN, SIGNAL = 3.2; EXPRESSED IN HELA, SIGNAL = 1.9; EXPRESSED IN PLACENTA, SIGNAL =   2; EST_HUMAN HIT: AI221398.1, EVALUE 0.00e+00; SWISSPROT HIT: O22621, EVALUE 6.10e-01; NT HIT: gi16166884, EVALUE 2.10e+00
aagggaaagaggacagagcgtctgcctcaagaataacaagagagacagtgtcctttgaaagcagagaaggaactcagccatgacattcccattgcagtccagatgaactgggtagtccataagatgttgcaccttgttcaaccctgcgcatcctttctccagacccttggagaaatacctcccaccccgtgttgccaccgcctagggaaatccaaaatccagctgtacaatgtctgtacatttccaggggcttccatcctcaagtcttctctgctcctaggcttggttccttgagtcctgtacctccatccaactgaatatgaaactcagatgcttcactggtttccataacaacagaataaaacaatgccctatcctactcccacaggtcatttgaggagcaatacaatgaggatcacaaaaagggtgtcattgatctcttcacagcagacagcttaaaaaccatgaccagtgacaatcgtctcctggctcaccatgtaactgtccctccagccccagaggactagccccagccacagccctgcaaagaccttgattt

SEQ ID NO: 8357 - DNA, 541 bp, Homo sapiens
  MAP TO CHR16.3; EXPRESSED IN LUNG, SIGNAL = 4.3; EXPRESSED IN BRAIN, SIGNAL = 3.2; EXPRESSED IN BONE MARROW, SIGNAL = 2.3; EXPRESSED IN ADULT LIVER, SIGNAL = 2.7; EST_HUMAN HIT: BG340784.1, EVALUE 1.00e-110; SWISSPROT HIT: Q01113, EVALUE 4.00e-59; NT HIT: L39062.1, EVALUE 0.00e+00
gagtgctgaggagcctgaagggactcagggtcccgtgatgaggctgggctggcacatggaggaaagacagaatgtccaagacacaggcgctgcttggcctctgggtgtggacctcaggagggcttcctggaggaggagggatgctgggcttgccagaaaggaggcagctgctcccaggatgagttctaaacatgctgcctgagcctttccctcctcccgtgctctgttccagacttggatgggggcccacagggccggtgtgctgttgagccaggactgtgctggcaccccacagggagccttggagccctgcgtccaggaggccactgcactgctcacttgtggcccagcgcatccttggaaatctgtggccctggaggaggaacaggagggccctgggaccaggctcccggggaacctgagctcagaggatgtgctgccagcagggtgtacggagtggagggtacagacgcttgcctatctgccacaggaggactgggcccccacgtccctgactaggccggctcccccagactcagag

SEQ ID NO: 8358 - DNA, 528 bp, Homo sapiens
  MAP TO CHR19.3; EXPRESSED IN ADULT LIVER, SIGNAL = 1.5; EXPRESSED IN HELA, SIGNAL = 6.2; NT HIT: gi14766934, EVALUE 0.00e+00; EST_HUMAN HIT: AW571715.1, EVALUE 1.00e-128; SWISSPROT HIT: Q07886, EVALUE 1.00e-08
tgcattcccaattttcttcccaaccctgtgcagaaagaacgctttgccgccctagccaagttcaagtccagcatctaccggatcctgatcgcaacagacgtggcctcccggtgagcagcccccagtctcctgccaagggcactccctcttttactacaaggccccacagatgagaaggctggcctcaggcatgtcaggcagccctagcatccctgctgagtgaccctgggtgagtccttgcctcggtttccccacatggacagtggagctgaccagccacctctgcctccaggggcctggacatccctacggtacaggtggtcatcaaccacaacacccccgggctccccaagatctacatccaccgagtcggccggacggcccgtgcaggtgagcagtggagggggaggccgagccttgggcctctgtccctccagcctgcccagcaaattcaggtggtaggacgtgggtagggtgcagcccacagatgagagctactcagggccatgtttgcaagttggggagttg

SEQ ID NO: 8359 - DNA, 506 bp, Homo sapiens
  MAP TO CHR14.3; EXPRESSED IN ADULT LIVER, SIGNAL = 1.6; EXPRESSED IN HELA, SIGNAL = 1.6; EXPRESSED IN PLACENTA, SIGNAL = 1.3; EXPRESSED IN HEART, SIGNAL = 1.7; EXPRESSED IN LUNG, SIGNAL = 2.2; EXPRESSED IN BONE MARROW, SIGNAL = 1.6; NT HIT: AF224669.1, EVALUE 1.20e-01; SWISSPROT HIT: Q24307, EVALUE 1.60e+00
gcattcagtggcttagggagaaaaaaaaaagagttgaaccttgtttcttccagcatccagagccttgacggtggaagggaagaagcacagcatgaatattgccaaggttatatatgaccaggttactctgagtctggacacaacccatcgagaatcctggtgaaatgcctgcctaagggtagaccccatagcagttaatctgcatctagatcctgttgtttccaattgcataagctacaagagctagcagaggttttattccagagaatggtatgtaaaccaccagccagtcagaatatgtcctcaaaccactagctaataaaatgtcacgtcctcttagaggcctcattcaaatcactctagtaaccctaagaatgaaatgtaacaagtaagaaatgcagctaggttataaacctagtctgaaggagactaatggtagttgactttgacagaactgacaattggcagctgacttctctggggtctcccacacaaaaccttctgtg

SEQ ID NO: 8360 - DNA, 573 bp, Homo sapiens
  MAP TO CHR16.3; EXPRESSED IN HELA, SIGNAL = 2.5; EXPRESSED IN LUNG, SIGNAL = 2.9; EXPRESSED IN BONE MARROW, SIGNAL = 4.4; EXPRESSED IN FETAL LIVER, SIGNAL =   4; EXPRESSED IN ADULT LIVER, SIGNAL = 2.3; EXPRESSED IN PLACENTA, SIGNAL = 2.2; SWISSPROT HIT: P45753, EVALUE 5.50e+00; NT HIT: AJ239059.1, EVALUE 5.50e-01; EST_HUMAN HIT: BG283733.1, EVALUE 8.10e-01
ctctggttctggaagcttggctgggcctgacctgctgccaagcctcggagactcctcaatctattcacacagcaggagagcaaaagctctctccctgggaagctgtttgcatgaagcaaagcagtgcaatcctccttgacctccctggagggaaggtttgcctccttctcagggagagtttccgcagtagagatagtagaatacaggaggaaatgagctggactggatagataaggctgagaggaaagccacatatgagaccactggaccactctgggatggggacacaagcccccttcatgattctgcctcttcagaaaatgggttttcccatagttctgccagaaagcctttgtcatattcttgatgctcacacacccagatgatggctgtttctccctatccttccagttcatggttgcatttaccaaaatttatatttttttctgagcctctaggacctttcccatgctgtcctatagaagcaggttagctttattcagtattatctgcattgtgtagagttgagtactttaaaaggaacttcacatttccagctaccctgctgtctct

SEQ ID NO: 8361 - DNA, 583 bp, Homo sapiens
  MAP TO CHR14.3; EXPRESSED IN HELA, SIGNAL = 1.8; EXPRESSED IN LUNG, SIGNAL = 2.1; EXPRESSED IN BONE MARROW, SIGNAL = 1.4; EXPRESSED IN ADULT LIVER, SIGNAL = 2.4; NT HIT: AB046842.1, EVALUE 4.00e-45; EST_HUMAN HIT: BF507980.1, EVALUE 1.30e-02
atgatggtagttggggagggaatgggggttggagcagccgaggatgaactgaatacatttttcttttttctgcttattgctctaggtaaagaaatcaagaaatccaaactgattcgaagccagtcttttaataatcaagcttttcatgcaaaatatggcaacttagagaaatgtgctaggtacgatctgtaagcccttcaatttttaacataatttttatctttattcacatcttcatatatatgagtttacattttataaaaatcagaattaattttgaggtttttttataggccagtattttgtgagtgttcttctgtagggattgttatatttaaaaataagagacctccaacaattttcacaaaaataggtattctggcattctaggaagaatactgacatgatactatttaataatatcatagaatccatatattatttcatgagggagatagtagtatatcacatgtgccacttaacttttaatacgtatgagtatgttccattatctaaatgtatatagacatccctttgctactaatattgtttctgtctataaagaatccattggcatgttcat

SEQ ID NO: 8362 - DNA, 552 bp, Homo sapiens
  MAP TO CHR18.3; EXPRESSED IN LUNG, SIGNAL = 3.9; EXPRESSED IN BONE MARROW, SIGNAL = 3.9; EXPRESSED IN BRAIN, SIGNAL = 4.2; EXPRESSED IN ADULT LIVER, SIGNAL = 3.9; SWISSPROT HIT: P36952, EVALUE 3.00e-14; NT HIT: gi4505788, EVALUE 1.00e-66; EST_HUMAN HIT: BG402793.1, EVALUE 4.00e-64
  unsure 57
  unsure 196
  unsure 218
  unsure 254
ttatggaaaagaggagggggggcctctggattctggctctttttgtaccacttaccnttccagctgttcatctcaggaaaggcactttgccggccgtgccctcaggttcctcattggaatggatttatgccccactctgtccctatcatttttcacatctataattgggctccttttactgctacatgctgccccnacataccttgttgagtctgaanaggacattcttttgtttctgattcaggaaatttctntcatccacttgccaacaaagtaggcagcattaaccacaaggattttggtctggtcgttcacactgttgtcagctaaaatgttctcaaagtggcctgcaacaattttaggaaaacacaagtagcagaattattcttccaaactacatctgaaattcacatgcatattcactgagtatttaccacttcatggagtcacaccatgtaaggcctgatggttccaaccatcaaatttcagaaggactcttttctctccttctaccttgacacaaccagatctaccaaagaggtcagcagagga

SEQ ID NO: 8363 - DNA, 598 bp, Homo sapiens
  MAP TO CHR16.3; EXPRESSED IN PLACENTA, SIGNAL = 8.8; EXPRESSED IN LUNG, SIGNAL =  14; EXPRESSED IN FETAL LIVER, SIGNAL =  10; EXPRESSED IN BONE MARROW, SIGNAL =  12; EXPRESSED IN ADULT LIVER, SIGNAL = 9.2; EXPRESSED IN BRAIN, SIGNAL =  10; SWISSPROT HIT: P34545, EVALUE 2.30e-01; NT HIT: gi15302718, EVALUE 2.30e+00
ggcactgtttagccaccttgctgcctcctcgtaggactgaagggcatttttcccttgagcaggagactccacacacgcggacactgacgttgagccgcagggctggtcactgtccccgtcccgtggcaccgcacgccagggcccggcaccttctgccgtgggtcacgtggccttgggtccggcccctgccagaggctggggccccagggacccctctgggctagaaggtgctgctgacacaggcgtttttagataagcaggaagctcctgagaggaagctttatttttactttgttccggcctctgtggtttttggagatggcctttaaagatttgttttcgattttatctttaaagaagatgcaggaaagcccatgggtcaggctccagaagaaatatccgggaggaaggccctgagcctgggacggcggggccaggaggaggcccctgagcctgggagtgtagggcaggggctgcagggatcccaggaggaggcgctcccggccccgcatggccctgtgtctgcagtccctgcctgggcctgtgggcctgctgtgtggtggtcctggggcagggctcacagagcctcactccccaa

SEQ ID NO: 8364 - DNA, 510 bp, Homo sapiens
  MAP TO CHR14.3; EXPRESSED IN BONE MARROW, SIGNAL = 0.92; EXPRESSED IN BRAIN, SIGNAL = 1.7; EXPRESSED IN ADULT LIVER, SIGNAL = 1.9; EXPRESSED IN PLACENTA, SIGNAL = 1.1; NT HIT: gi14746907, EVALUE 0.00e+00; EST_HUMAN HIT: BI755956.1, EVALUE 0.00e+00; SWISSPROT HIT: Q99766, EVALUE 5.00e-48
ttgaaatgaaaatttgttgcgttctgtattatttatgtcagttaatatagttaacaagctagtgattattgtaaaagcaaactgctttttttctcttgccaacagggtggattatgatcgcatcagggatgttggccctgacagggcggcatccgagtggttgctgcgctgtggggccatggtgcgctaccatggccaggagaggtggcagaaggactacaaccaccttccaacaggccctctggacaaatacaagattcaggcgatcgacgccaccgactcttgtatcatgagcattggatttgatcacatgggtaactaccctatcgttttgctaatagaaaatgcagatgatttgcagtgaccattttgttgcagttgactcacgattatagtcataggtatgtcctttttgcccatttcattatagtcaagtttgtttcttcctgtgtttgatatttattttcaaattaaattgaggttacagacaccttcctctccttcctcctc

SEQ ID NO: 8365 - DNA, 500 bp, Homo sapiens
  MAP TO CHR18.3; EXPRESSED IN LUNG, SIGNAL = 2.2; EXPRESSED IN ADULT LIVER, SIGNAL = 1.3; EXPRESSED IN PLACENTA, SIGNAL =   1; SWISSPROT HIT: Q50186, EVALUE 1.20e+00; NT HIT: AF338872.1, EVALUE 4.70e-01; EST_HUMAN HIT: BI753744.1, EVALUE 7.00e-01
tcatttctccctagccatgccatgggactttctctactctgtgccttggttttcgtatctttacaataactccctgcctcaccagtgtgtgtgccatctgctagtgcggtgatggtggtgagtgtggcttggcaaacagaagagctgttctccacgcgttccaggggctgtagcttggccagggggagggcacaagggagcctgcagacagaacaaggactttcactaggagtggggagcagcaggagatgccgcacacacacaaagtggcaagtggggctcactcaccctggccagcaggtgtgtgggggagatggcggacaggatgacattgaagaagtgactgggttgctgttgagcagagggggacacttcttactataactcctgacctccttcaggccccccgccaaggagatgtcaaccctgttcagggagaaactgtctccatgtgtcctgattggtttatttcttcttggagtcagatgcaggcaggaatt

SEQ ID NO: 8366 - DNA, 503 bp, Homo sapiens
  MAP TO CHR16.3; EXPRESSED IN ADULT LIVER, SIGNAL = 1.3; EXPRESSED IN PLACENTA, SIGNAL = 1.6; NT HIT: M91005.1, EVALUE 4.80e-01; EST_HUMAN HIT: BF832219.1, EVALUE 1.80e-01
ctgcaaggttggaggaagagcttccatgcctcctgattccctcttctctcttcctatctggaaggccattcctgacctgttacattgctattgtgtgctaagctaaggaaattaaaaaattgatgctgaaagtgacagacatttccagactggcagccaacacatatgatatacagctccataatagaatatatgtggtttatgatgaattagtaagtgattccttttttcaggggaggaatcttacaagattcttggtgctaataactaggttcaggatatggtatctcaaatgtacctcacttgtaaggtaagtcacaaaaaatttgttaccatttctagttaaactattgaagcttgcaaataattacctatggattcatggttatgctgtaataatagaacctttcttgaattctgcaatgctctcttgaggcagagaaaaagcaattaagatacagctaatgtgcagggaattgtacagaaccccagtctgctttgtc

SEQ ID NO: 8367 - DNA, 589 bp, Homo sapiens
  MAP TO CHR16.3; EXPRESSED IN FETAL LIVER, SIGNAL = 2.5; EXPRESSED IN ADULT LIVER, SIGNAL = 1.9; EXPRESSED IN PLACENTA, SIGNAL = 1.9; EXPRESSED IN LUNG, SIGNAL = 1.6; EST_HUMAN HIT: AA421592.1, EVALUE 8.30e-01; SWISSPROT HIT: Q24371, EVALUE 7.50e+00
tctgagtcgttgtgtggacccctagtttgaatactcctgattggctgtcattttactttcagattcactgagcatctctgtacaggattctcttttctttggaagaaaagacctaactgaagtcatgcagagagagtcatgctttacctacaaggcagctgaagtgggcaatattgtagcaaaagaaggtgttacagttgcctgtaagagaggtccccagggctgtttaagcagaggcagaaagaaatcacacataagcaactctccaagccaacaacgtggtacttctttttattgataattatatcttacatatctgaataagcttaggctcctgaaggtgtaaaaatgccccagaggtatagccactaaaaattaacactccaatgcacatcctaattaggatttaattaggaaaattttaaaaaatgccaagcacatgtttttagcaagtgcagaatcactgacttattgcttgtaggttttctatatatttttcattgtaaatatccaattataattgtcatttaggtcagactttaggaattcaattcttattccaaataatgagaatttgtttccttcagcg

SEQ ID NO: 8368 - DNA, 584 bp, Homo sapiens
  MAP TO CHR18.3; EXPRESSED IN HEART, SIGNAL = 3.7; EXPRESSED IN HELA, SIGNAL = 7.9; EXPRESSED IN PLACENTA, SIGNAL = 6.3; EXPRESSED IN LUNG, SIGNAL = 7.1; EXPRESSED IN BONE MARROW, SIGNAL = 7.1; EXPRESSED IN ADULT LIVER, SIGNAL = 5.4; NT HIT: gi14762412, EVALUE 0.00e+00; EST_HUMAN HIT: BG392284.1, EVALUE 0.00e+00; SWISSPROT HIT: P13983, EVALUE 5.00e-01
tgccttctgtataccccagcccaattttaaaggagctttgcaagctgactcatctcacagtattgctgtgtttaatcataattggtctcttcccattcatgtcactgatcatttgtgttgaattctttattattttaagttattctgcatgagcatagaaagtagttaatattcacgagttgcctgtggtgtatacttcatctcacttgagtctgttgagaagtgtgtttgggggaatcatccactggtgacactgccggtctgagtaaccctgtctccctttctcggctctgaaggaactaccttgttctgcactagctccatccctagagccctgcttctccaggcccgagagaccagcaaaccgtcgccctccgtcccgttgggccccacattcccccactgcctcacagcctcagtcacccggagacccgacgtccttggaggagcatggtggcgaggagccgcccgaggagcagccacaccgagatgcaagcttgcatggattatcacagtataattcactgtaatttgcataaccacaccatcaccatgaacaaaactctgcccaacaggagagatct

SEQ ID NO: 8369 - DNA, 518 bp, Homo sapiens
  MAP TO CHR18.3; EXPRESSED IN FETAL LIVER, SIGNAL = 3.3; EXPRESSED IN BONE MARROW, SIGNAL = 2.9; EXPRESSED IN ADULT LIVER, SIGNAL = 3.3; EXPRESSED IN PLACENTA, SIGNAL = 4.8; EXPRESSED IN HELA, SIGNAL = 5.9; EXPRESSED IN LUNG, SIGNAL = 5.5; SWISSPROT HIT: O35165, EVALUE 2.00e-42; NT HIT: gi14774731, EVALUE 1.00e-122; EST_HUMAN HIT: BG718145.1, EVALUE 1.00e-126
caagagtcatcatggggatgttctcaattgttgttagtgggacttgtgttgtttccatgtcgagatattgtaatgccggtaatttaaacagataataatctccaatagttgtcagaggattgtgattgagaattgttagtggtgaaggttcgagatagaagctcttcttgctgtccctcctgctgctcccttgcatagcaccagtgctggaagtttctgagagcagtctgcaggtgctgaacatcatacttaaactggtcaacccgaagtttggcattctgccttttattagggggctccttgctggacaaaatctcccgatgttctagatggctgaatatctggtctgtgcttgcttggatttcaccttctactaagtgcacagactgcttgtctgccgtctccaggtgtcccatgtgagaatgtatctcatggacctgcttgtgcgtttgctggttcaggggctccatgtcaccggcccagctggccccaactccagctctggcttccttggaata

SEQ ID NO: 8370 - DNA, 524 bp, Homo sapiens
  MAP TO CHR18.3; EXPRESSED IN FETAL LIVER, SIGNAL = 1.3; EXPRESSED IN ADULT LIVER, SIGNAL = 2.1; EXPRESSED IN PLACENTA, SIGNAL = 2.3; EXPRESSED IN HELA, SIGNAL = 2.2; EXPRESSED IN LUNG, SIGNAL = 1.8; EXPRESSED IN BONE MARROW, SIGNAL =   4; SWISSPROT HIT: Q9ULV0, EVALUE 5.00e-40; NT HIT: gi16164058, EVALUE 0.00e+00; EST_HUMAN HIT: AA381227.1, EVALUE 7.30e-01
gttcctcaaggaagctgtgggctctctcaaaatgctccagtacccaagcccccgacacccaggtagggagctgcagacactgacctgctcatcgatcttccgctgcagctggaccaccttgttctccatgcccacgttgagacgtttcagatgctctgctgagcgggcctcaatcctgagggccttcagctcccgcctggccttgagcatccggaaggcacactggatgacaatggctgcatcccgcagccgctggaagtgcctgcgtgccatccagccccgcacgtgcttctggatggtggtggccttgtgctccatgaggacctggcgggaaacaaggatacacatcttgtgggtttgcactgcaggacaggagtgaaggaagcatacatcactgcctgtggagggaagaggccagggcagccttggttctaggagttacacagacaatgtgccccctaagatctaaggctttggtggttgttttataacacatttcagcgaggttctgcgcctacatatcc

SEQ ID NO: 8371 - DNA, 594 bp, Homo sapiens
  MAP TO CHR18.3; EXPRESSED IN ADULT LIVER, SIGNAL =   1; EXPRESSED IN PLACENTA, SIGNAL = 1.1; EXPRESSED IN HELA, SIGNAL = 1.1; SWISSPROT HIT: P95260, EVALUE 2.00e+00; NT HIT: AF417577.1, EVALUE 2.20e+00; EST_HUMAN HIT: BF027335.1, EVALUE 5.40e-02
agatgtacccagtggatggcacgagggtattgacccaagagtcccctgacagagaagagatgtgaggtttgtttagggtctgcagtgagagtcccaaacctctgctgcacatccccactggccagtggaggtggacacagaggcccctggcaggcatgtacccctggtagccccaccgtgccctggcaggcatttctgggtttcattggcatgatgctggcagcttgttagaaagttaggtagccttccttcagccctttctttttttctctgcccaagtgtctgacattgccctaagctcagaaactacggtgcgacacgtttctttgccatctgctccggatttggccttctgttcttgtgcatttgttactgttctgcgtcattactttttcagttgtacagtgtcatcagcagaccagacagtcttataaccagaaacttcggagacttggttttgtttttgttgttttaaataagcatagtggtaagcacacgttggtttaaccctctttatttcaaagttgtcacctcggtaatctaggcacgtgacagtgatagtgctggttctcagaacctgtttagagcatggca

SEQ ID NO: 8372 - DNA, 528 bp, Homo sapiens
  MAP TO CHR16.3; EXPRESSED IN LUNG, SIGNAL = 1.3; EXPRESSED IN ADULT LIVER, SIGNAL = 2.3; EST_HUMAN HIT: BG770233.1, EVALUE 1.90e-01; SWISSPROT HIT: P48634, EVALUE 7.40e-01
aagaggaaaatggagggtgggggaaaccacccatgctcccaaagatatgagacgtagaattgatctaagtgccacaaagcagaatttttctgactccattctgtttctcctgtgataattcagctgctttcaaattcctctcctctcagacggtcctgagaatccagtgggagttttctctgtgctccagaacatagtggcctcttgcattcattccctaccagaaataatgtctcgttcaccagctattttctcagccaataatttttgtccacccccattcctccttcggaaacttgcccttcccagagccctaggagatccagaaccccataggattcttttggctctggccatggctgtgtaccaaggggttggatatgggattacagccaggccatgtggactctctcccagaaatttggagttgaaaatctctgagcttatctctggaaggtgcttgaaactagagggggatagaaagttggtgacaatatagtcatgtttggcctgtggacaattgcaata

SEQ ID NO: 8373 - DNA, 500 bp, Homo sapiens
  MAP TO CHR18.3; EXPRESSED IN PLACENTA, SIGNAL =   1; EXPRESSED IN ADULT LIVER, SIGNAL =   1; SWISSPROT HIT: Q9PJK8, EVALUE 6.00e+00; NT HIT: AJ414150.1, EVALUE 1.20e-01; EST_HUMAN HIT: AW510791.1, EVALUE 7.00e-01
caaaaagaggcccttctgcccttggaaaaccatatgggccagacgagagtcctaagacagatcttaagcaaaatatgtgaaagagatattagcattcatacattgcctaattaactcacctggaacatgaagctgaagctttctttttcgacaaagagcacgcatttgcccatatagagataattttatcattgtcagctgagagcagctgattgaaattcagtctctgtgaaaggaggctgaacatacaaaagaaatataaagttaggttgacatcttacactacaccaaaataaaattcagatgggtacagcatgggttttccaaataaactctggcaaggtttttttcccaaactgggatatgcagagagtctcagggaaaaacagcagtgtagacagaagcatgagaaatcaaagaaaaagctgaaaatatcttcctagattgtttattttttgctaatttggtatactcacagtctgaaaacatttaggccaatg

SEQ ID NO: 8374 - DNA, 526 bp, Homo sapiens
  MAP TO CHR19.3; EXPRESSED IN BRAIN, SIGNAL = 3.6; EXPRESSED IN ADULT LIVER, SIGNAL = 1.7; EXPRESSED IN HELA, SIGNAL =   3; EXPRESSED IN PLACENTA, SIGNAL = 2.1; EXPRESSED IN FETAL LIVER, SIGNAL = 1.4; EXPRESSED IN BONE MARROW, SIGNAL = 1.2; SWISSPROT HIT: Q9JL04, EVALUE 2.20e-02; NT HIT: gi11612658, EVALUE 4.00e-54; EST_HUMAN HIT: AI929519.1, EVALUE 6.00e-54
acatgaacctcctccccttcccttgcccaccccagggaccctgaaatcttccagaacgtctctggtcgcagacccacccgctcccaccctgcaagctcatctcttccccgtctgctaccaccacggtgcgggaccagccacccggttgccatagcgacctgtccgagcatcccttctcccgggactgccactctccaaccgcaggtctggcacaggacgcctgccggggagggggtgtcccagagacccggaggggcgatcgggggggcgcattacaggggcttccgcccacaggaggagcggacctccctcccccaactcccttgccttaccattgcttgaatctcccgacaccctctctcctaggctctcagatcccggagcccccctgcaaccccctccccaaacgacgctcaccctttgtgggggtctgggtcggggtcgccatgctgggccggagcagggggctgctggatgctttggcggcgaaggcgcgctgcagcagctggaagcaggacggaccgat

SEQ ID NO: 8375 - DNA, 569 bp, Homo sapiens
  MAP TO CHR14.3; EXPRESSED IN BONE MARROW, SIGNAL = 1.1; EXPRESSED IN ADULT LIVER, SIGNAL = 1.2; EXPRESSED IN HELA, SIGNAL = 2.2; EXPRESSED IN PLACENTA, SIGNAL = 0.94; EST_HUMAN HIT: BG169398.1, EVALUE 5.00e-67; SWISSPROT HIT: P24785, EVALUE 2.40e+00
cactggttatgtgaatcggctaactgatttagttatgttattatttctaatctcaggcttgtttcttttcagcgttgtccattaggaagcacgatcttgaaagtgaaattacttgacatgggtgagccgagagctctgctggccactgccctttccccgcctggtctgagtgacattgagcgcaccatccttctactaaaggaggtaggactgcctgctggttagtactgttggcatctgtagagctgtgttctactgtggctccctcagtctgtgcctcactttcccactaactctgatcctcccgcctcactttcccgctaactctgttcctcctgcctcactttcccgctaactctgttcctcctgcctcactttcccgctaactctgttcctcagcctccttctggcttgcttcatccattcctggaaaccctgctcttcctacttgggattctttgactgcacacctgactcatactctgctctttgaacttgtaaccgaggccttggtacaagctgtatcctagtgtacatactgtgctggggctgtggacgttctgcttctg

SEQ ID NO: 8376 - DNA, 596 bp, Homo sapiens
  MAP TO CHR18.3; EXPRESSED IN FETAL LIVER, SIGNAL = 1.1; EXPRESSED IN ADULT LIVER, SIGNAL = 1.4; SWISSPROT HIT: O57728, EVALUE 1.50e+00; NT HIT: gi11466252, EVALUE 2.20e+00
tcaaaaggtggacaaaagccacattgtccctccaagtctgagagtatgatatctgtgtcatcatgacttgggattcttacatcatccttattccagattttggttttcttagaattcatccactgtaattattttgcagcctctcattccaacctgaaagttacaagatatgctttaaatgataatatttttaaaaatgttatgctcttgtctgtacttcctattttgcagacttaaggaacaaatggcacctggtgattgaccgcctcactgtgctcttcttaaaattcctggagtattttcacaagctgcaggtgttcatgtggtggattttggagttgcacatcatcaaaatcgtttcctcttacattatctgggtttctgtgaaagaggcaagtgaacatttgtcctatcatcaggctgaacagaaccacagtaggtcatcattttccttttccagctgtccatgatttttttaatgtgatccgcattacatcggagtatcaagactccaagactaagtacttacacttacagaaatccgagggtcagcagcactgagaaaaaggaaagaggctcgtggctgagtttctcgt

SEQ ID NO: 8377 - DNA, 567 bp, Homo sapiens
  MAP TO CHR18.3; EXPRESSED IN PLACENTA, SIGNAL = 1.3; EXPRESSED IN BONE MARROW, SIGNAL = 1.7; EXPRESSED IN ADULT LIVER, SIGNAL = 1.3; EST_HUMAN HIT: BG742331.1, EVALUE 5.10e-02; SWISSPROT HIT: P55265, EVALUE 4.10e+00
tggaggactaccttgctgttggtttctttctgtttctacagaaacaggaaaaagcaagagctactgggcaaggtgtagtacaaaggtatacatgaaagctaagagtcaacaagaaactacgtttttcactagaaggccttctaatgtgaagttacaccaactgctgacatgccttctcttccaaatgcgtaccaatgggtttatttcctattcaagttgcagcaagcattaaaggtaatattttctaattgaggattaatgtatatgccctaccttcttataagaacccgtactcaattttgtgtgtttatttactctttcttaattattttccagctattctttaattgtagctttgattttgtatttggctctaagagtgaaatttaggaaagtgacatagataagtagttgcttttgttttctattttgattaatttcttatttattcctttgtgaccaaagaatatggtccatattatattctctctctctttagatgtgttctttctgcctaacacatagtgagctcttttgagtgttctgtgggcatgctgaagacgatat

SEQ ID NO: 8378 - DNA, 517 bp, Homo sapiens
  MAP TO CHR18.3; EXPRESSED IN ADULT LIVER, SIGNAL = 1.2; EXPRESSED IN PLACENTA, SIGNAL = 1.1; EXPRESSED IN LUNG, SIGNAL = 1.5; EST_HUMAN HIT: BF734059.1, EVALUE 2.90e+00; SWISSPROT HIT: P31629, EVALUE 7.20e-01; NT HIT: AJ276692.1, EVALUE 7.70e+00
  unsure 406
  unsure 407
accatgcagtaggtgggaagggagcagtaattgcccctgcctggctagtagcccacccagggcatgggctaaacctggaagcacagacacagggctccttgaccccgagctcaaggctggcataagtctggtgctgctgctcttgttgggccactgagcgggacattcccccggatgctgctgcttcctcctgctgtcctttccttgaaacatgcctgggtgtgccgctgtgtgcagctgagccctccaggaagtcctccctgccagagaaggagggggacagtcacccacgttggcctcccctgacgacactgtatcccttagatctaagtgctggcctcactgcacctaggaaaggaagcggcggctgctgactcagcaccagcctgcaggtggagagggggtnnggaggagctctctgaggctgggaggaagtgagaattcagtggacacctgtctcaaggaagggcaggaagcgttggaacagctgctgtgccccctctgaagctgagtggaa

SEQ ID NO: 8379 - DNA, 514 bp, Homo sapiens
  MAP TO CHR14.3; EXPRESSED IN ADULT LIVER, SIGNAL = 1.2; SWISSPROT HIT: O42904, EVALUE 4.80e+00
cctttgcttccttccctacctggggcatagcaggcacttctttagtagtgaatggagtaaaactgttcagatcaacatttatttgtcctctccaatgtgccaagcagtgacttagtacttgagataaaagattaaattaacatagatgccatcctcaggggttcaatatgccaagttctgtatttcatctaaataacctgatgtgcatcaatgtatgtatacatgtgcatctacatgcagacatcctctggaaagtgctgcctgatggttttgcctgcttccccatctgctgctgagagtaaatgttataccaggtctagagatcacttcaggacagaggtagttgatgcagggaaaattaagattcaagacaacgttgagactgtatatcaggtaagcaacacaattcaagtcagagagattttggaaggatagttaacattggaaacttcacatttctgcattggccagcagttggtggttttcttgtctgtcttagccctcacaaatccca

SEQ ID NO: 8380 - DNA, 500 bp, Homo sapiens
  MAP TO CHR18.3; EXPRESSED IN HELA, SIGNAL = 1.5; EXPRESSED IN PLACENTA, SIGNAL = 1.7; EXPRESSED IN HEART, SIGNAL = 3.5; EXPRESSED IN BONE MARROW, SIGNAL = 1.7; EXPRESSED IN ADULT LIVER, SIGNAL = 1.5; SWISSPROT HIT: Q15776, EVALUE 4.00e-50; NT HIT: gi14741359, EVALUE 5.00e-10; EST_HUMAN HIT: AW291411.1, EVALUE 0.00e+00
tcagcgaattcacacaggagagagaccctatgaatgtaatgaatgtggaaaagctttcaggcagagctcagagctgattactcatcagagaatacatagtggagagaaaccctatgaatgtagtgaatgtggaaaagctttcagtttgagctcaaaccttatcagacatcagagaattcatagtggggaggaaccttatcagtgtaatgaatgtggcaaaactttcaaaaggagctcagcccttgttcagcatcagagaattcattctggggatgaagcttatatatgtaatgaatgtgggaaggctttcaggcacagatcggtccttatgcgccatcaaagagtccacactataaagtaatttgtgaatactgtgaatagtgtaaatacttcagtcagatttttaagtttgttagtcaaaagagtttactttggagcaaaactccataaaggttataaaatactaggtcttgagtctagcttgctttgtgcagcatttc

SEQ ID NO: 8381 - DNA, 542 bp, Homo sapiens
  MAP TO CHR14.3; EXPRESSED IN ADULT LIVER, SIGNAL = 0.97; SWISSPROT HIT: P18616, EVALUE 2.00e-03; NT HIT: M37277.1, EVALUE 1.00e-66; EST_HUMAN HIT: BF171297.1, EVALUE 4.00e-67
cacacagccacctaccactgcccagaccctctgcaggagggccaagccaccatggggtatggacttagggtctcactcacgtgcctcccctcttgggagaaggggcctcatgcccagatccctgcagcactagacacagctggaggcagtggccccagggccaccctgacctggcatctaaggctgctccagcccagacagcactgccgttcctgggaagcctgggctccaccagaccacaggtccagggcacagcccacaggagccacccacacacagctcacaggaagaagataagctccagaccccagggcgggacctgccttcctgccaccacttacacacaggccagggagctgttcccacacagatcaaccccaaaccgggactgcctggcactagggtcactgccatttccctctccattccctcccagtgcctctgtgctccctccttctggggaacaccctgtgcagcccctccctgcagcccacacgctggggagaccccaccctgcctcgggccttttctacctgctgcac

SEQ ID NO: 8382 - DNA, 509 bp, Homo sapiens
  MAP TO CHR18.3; EXPRESSED IN FETAL LIVER, SIGNAL = 2.1; EXPRESSED IN ADULT LIVER, SIGNAL = 2.8; EXPRESSED IN BONE MARROW, SIGNAL =   3; SWISSPROT HIT: P51471, EVALUE 1.60e+00; NT HIT: X86038.1, EVALUE 1.20e-01
tctaatccaaaccaccaggggaaatgccagttgtgtgggctgtgactttgggatgagaccgcagagcctgtagaatcaagttgaacctcaaagtgccagccttgtggatttcggcccacaggctgctccagcagaatgttcatgcagatgctctttgaacaaactaccttcttaaactgcaaatgcagccttaccaaatggatttgtcaagttggaaatctcttatatatacccatcctcacccttcgtaggcagaagcaattctagagctgtcttctcagcgaattgttaaccaactcagagcctggtggtgtaccgggagtggcaagttctgtcagtttatttcaggacagccagaaggtgttcggtggaactggtcccgtgcctctgcagtgcaggtgtgggcctggtggggtgggaagtgcagccagggaaaacacagggcagaagcctgggcagaaactgtccttatggaatctgactttcctactccctacccaggtcacaga

SEQ ID NO: 8383 - DNA, 500 bp, Homo sapiens
  MAP TO CHR14.3; EXPRESSED IN BRAIN, SIGNAL = 2.2; EXPRESSED IN ADULT LIVER, SIGNAL = 3.2; EXPRESSED IN HELA, SIGNAL =   3; EXPRESSED IN PLACENTA, SIGNAL = 2.9; SWISSPROT HIT: Q10172, EVALUE 2.70e+00; NT HIT: AJ289779.1, EVALUE 8.00e-03
agaccctcttcctcctcagctccaacacccacctacaagattggcagatcctacataattacccacacagtgagcactttctatttctcctgattcttcattcttcttccctaccagcaagtttatatcctgtcagaaattattatttgtgcttctctttcctgcacctagtccaaagccaaaggtgaaaggtgatgggagtgagcaggaggtcatggagcttatccctgaggacctacatggagggcatcttggaagttcaccgagaagagccggtgggcaggatcaggcaaagtagggctgggccctctgctccctcagctcaggagcccttttcctgcctctctagtgggtttcataactccatagaagatgattctgaatgccaaccaaataacttcacacaattagaatggccagccagacctaaaatacagaagtctaaaactactgctcagtggggcctgtcaatgacatcaacaggagacagacacccaggt

SEQ ID NO: 8384 - DNA, 502 bp, Homo sapiens
  MAP TO CHR19.3; EXPRESSED IN ADULT LIVER, SIGNAL = 2.8; EXPRESSED IN LUNG, SIGNAL = 0.99; EXPRESSED IN FETAL LIVER, SIGNAL = 1.9; EST_HUMAN HIT: BG742486.1, EVALUE 5.00e-85; SWISSPROT HIT: Q08477, EVALUE 1.00e-34; NT HIT: AB002458.1, EVALUE 2.00e-49
agtgccctctggatcaagtccaagttcatggatctgacatttcacgtcaaagtccattctacttctgaaattcagatcccagagtagcccaccttggccagcaagagcacgtcaatgaagtccaaagtcttggacttggccttggcctgcaggaagtcatcgacaccctggctagtgagggtgcgacgccgctcctggatgacagcatctgtgaagttgtgcactatgtcacaggccctgcagaagcgtcgcccattgggagtgaggaagtacaagaagtccgtgagcaggaagatgtgctggtgccgtttcagactgagggcactgagctccaagatggcatcaatatattcgctgggcttcccgcagggtcaggccaggaagaggaagcagcttctaaacacacatgaaagcctgggagcaccttctagccagaatcccaggaccacgttcggtgcagaaaagggtgccctgcaagcacacttcactctctgcctcccac

SEQ ID NO: 8385 - DNA, 558 bp, Homo sapiens
  MAP TO CHR16.3; EXPRESSED IN BONE MARROW, SIGNAL =   2; EXPRESSED IN ADULT LIVER, SIGNAL = 3.2; EXPRESSED IN HELA, SIGNAL = 4.8; NT HIT: gi14779133, EVALUE 0.00e+00; EST_HUMAN HIT: BE466150.1, EVALUE 0.00e+00; SWISSPROT HIT: Q09910, EVALUE 9.10e+00
gtgtctccatgccaacaatgacttcctagcgcaggatgcattttcatgcggttaatattcatttggatcgtgggttgcctctagtcttagtgcttaggatgtgagtgtgtggtggctgagagcattctgatactcaccggcttttgtccttgtcagatcctcacactgctggatgctctgagtatggtgcacagtcagaagatgaagaaggccaaggagcagcggcacctgcacaataaagagcacttcagagccaagcagaaggaggaggaggagaagctgaagtggcagaaggacctcaggaagaagctcttccaaattcaggggcagaaggaaagaagaaaccagaagtccagtttgaagggggctgagggccagtttcagtgagcctttggactggagggactgtccctggatctgcagaggtggacagtttcaaacatcacagtttgaatgcctgtgaatgacaagtcagtgggcaagaactcaagagatgtctctacacaaactgtgcctgcaagaggaacagagaagcctggactacttggaccgggttca

SEQ ID NO: 8386 - DNA, 503 bp, Homo sapiens
  MAP TO CHR18.3; EXPRESSED IN BONE MARROW, SIGNAL = 0.82; EXPRESSED IN ADULT LIVER, SIGNAL = 1.1; SWISSPROT HIT: P29508, EVALUE 6.00e-25; NT HIT: AB034984.1, EVALUE 0.00e+00; EST_HUMAN HIT: BF212398.1, EVALUE 1.00e-106
gccagcaatgaaggaaagagggtctattacttatttacagtagtctttaaaaacactaattttgtgaggcttctaattaagacattaatatatttaatatatgcacattgtagaaagattgaaacgttaaaaataagatgaggaaaactttaaatgtcaaaatctcacaacacagatatataatttctttaagaaaattgtactacaaaataccattccatttattaaagtcattctgacaggaatctgatgcttttccaggagttccagatcacatcgagttcaccatgaattcactcagtgaagccaacaccaagttcatgttcgacctgttccaacagttcagaaaatcaaaagagaacaacatcttctattcccctatcagcatcacatcagcattagggatggtcctcttaggagccaaagacaacactgcacaacagattaagaaggtagctatcagcatcattatgttgtcctgttgcagtttttctctggttccg

SEQ ID NO: 8387 - DNA, 529 bp, Homo sapiens
  MAP TO CHR19.3; EXPRESSED IN PLACENTA, SIGNAL = 2.2; EXPRESSED IN FETAL LIVER, SIGNAL = 1.9; EXPRESSED IN ADULT LIVER, SIGNAL = 2.1; EXPRESSED IN BRAIN, SIGNAL = 2.2; SWISSPROT HIT: P71613, EVALUE 1.00e-03; NT HIT: gi14769243, EVALUE 1.30e-01
aacagaatccagcatttcgctggcccgagcccctcattaactgggatgtcttctcggcccaggacctcctggccagagcatctggccggcgccccagccagccccacaccaggccccgtggttccaggagcccggccaggctggggaagagggacgggtgcctgcatgatggggccccggggcccttcctggcagacgtctgctcagccaggagacgtgtgggcgccccggctccctgcctcccgcccccaccgttgcctgcctttgtgaatgcagaaggaaagtatgttgtgaaggcagccgccctgccctgggcgggccgggctgtaggcccccagtctgcggaattcatcagggcggcaggggagggcagcttggcgacctctgcatcctcagcctgccttgaactgggagagacgtactggaggcatctctctagaaggaacaaaaggcaggggtgggatggggggctctgagctttgaagtccaggagacgccccccgactggccgtgtgacctttggcaggtg

SEQ ID NO: 8388 - DNA, 566 bp, Homo sapiens
  MAP TO CHR16.3; EXPRESSED IN HEART, SIGNAL = 8.4; EXPRESSED IN HELA, SIGNAL = 6.1; EXPRESSED IN BRAIN, SIGNAL = 1.5; EXPRESSED IN ADULT LIVER, SIGNAL = 7.6; EXPRESSED IN PLACENTA, SIGNAL = 6.6; EST_HUMAN HIT: BI871758.1, EVALUE 7.90e-01; SWISSPROT HIT: O94855, EVALUE 3.20e-02; NT HIT: U33635.1, EVALUE 5.40e-01
cttacgtggagagagggcagtggggccttggttctcaggctccagccccaacttcctgtgccggccacagcctggtgggaagggaacagtgagaaaagcccctcgaaggacgggacctggagccgtttccgatggtctcccacgctggagtcagcctccacgggctggggagggggccccaggccagctcctcgcaggctgcttccctccctcattcattcccaaggagatcgtgggaagttcggaggaagctggccatggtttggggtgagctatttttggtaacagggtccttcgtctcaggctccaggggccagggtgactgggaggagctgtttgcatttcctctggccccctcagctccccactgccagggcccaggaggacagggccccacccaccatgtgagcttccctctcctcccaggggccgggagccttcctgctggcagctccagcacctcgggagggccaggagaggcactacttggcgctctctggacgttgcccagaggtgggtcccaggccctgcctcttgcctggggcagccacagtgatcctcgaaat

SEQ ID NO: 8389 - DNA, 568 bp, Homo sapiens
  MAP TO CHR19.3; EXPRESSED IN PLACENTA, SIGNAL = 3.5; EXPRESSED IN BONE MARROW, SIGNAL =   2; EXPRESSED IN FETAL LIVER, SIGNAL = 5.1; EXPRESSED IN ADULT LIVER, SIGNAL = 2.1; NT HIT: gi14767612, EVALUE 1.00e-54; EST_HUMAN HIT: AL597906.1, EVALUE 3.00e-37; SWISSPROT HIT: P07663, EVALUE 6.20e-01
aaactgtgaaccccacgaaccaaagctcttcccattcatgaacccgcaccccgagtcaggattctcccctgacgaccttcccgtggcccctgaacaatctgggaaagacctgtgggtgcagagctgcccggagagggttccacgccagggcacagtcactgcgcagggaaaagacaggacaccccggggacccgctgtcaacgcagccgccatgttatggctggggcggagctgggcaatgagaacttggagcgcagattgtggagctgactgccgggaggcctgagttctgccactgccacagccacagccacttcctccccagttccaaccagcccctctccctctctcgggatgtcgaactggcactctcaccatttctaggcttccagggggtcccggcgtcctagctgtgaccctcctaatacctgcaggtcacagggccacagaggctgggcctctaggagctgacggcacagagcagtgaagacgatagctggatctctggcgtcagcgagagacaatgggcccgccaaagccggaagccggaaaccgtcctgttcgctac

SEQ ID NO: 8390 - DNA, 502 bp, Homo sapiens
  MAP TO CHR18.3; EXPRESSED IN ADULT LIVER, SIGNAL = 3.2; EXPRESSED IN PLACENTA, SIGNAL =   1; EXPRESSED IN HELA, SIGNAL = 1.2; EXPRESSED IN LUNG, SIGNAL = 1.3; SWISSPROT HIT: Q03154, EVALUE 2.00e-35; NT HIT: gi16163718, EVALUE 1.00e-35; EST_HUMAN HIT: AI862703.1, EVALUE 2.00e-35
tttggaagggggaagaagaggtccttggcactagttggaatggaagctccaggggcagaggctggggagttctggggctccgctctcgccaggcagtgtgggcatgctggccagggcaggcagcaggtgtgaatatgtgtcaacccaggaggaacgcagcctcatgtagccactcgtcgtggtcatgcagcagcacaggtgtgtggctcatgggtgagaagccctacggcacagaagaaacagctgtcagtggcagccagagtgtgaggttcatgcccttgcagacctggctaaaagctgcccaccagaggtctgagtcattagtaggtgtcactcagagctgcatccgcttctgagcaaactcgaaaatgtgaccctgtctccagctgtctggcaccagccctgcagctgctgctcaaaagctttcaggtccacatctggtgccacagcaaagtctgagctggcgcttatagtggcagttgcccatgttataagccatgcc

SEQ ID NO: 8391 - DNA, 582 bp, Homo sapiens
  MAP TO CHR18.3; EXPRESSED IN FETAL LIVER, SIGNAL =   2; EXPRESSED IN ADULT LIVER, SIGNAL = 1.5; EXPRESSED IN PLACENTA, SIGNAL = 1.6; EXPRESSED IN HELA, SIGNAL = 1.6; EXPRESSED IN BONE MARROW, SIGNAL = 1.2; SWISSPROT HIT: Q00269, EVALUE 7.50e-02; NT HIT: AF223391.1, EVALUE 2.20e+00; EST_HUMAN HIT: BE183321.1, EVALUE 8.20e-01
aaatcatgccagggttcatcttcatcctttgccacagaagccagggtagctgcgtggggggccgtgatgcctgtgggcctgaggctcatcagaactggaacaccagcgctgtaggaaattctccctcatcctggccccactggcccctatcgctccagcgcctgccttcctccctggctgctgagagcttcctagacttttattgcctagccacagtcaaaaagagagagggctccccctccttcactgcccaagtctacacgttcagggaatggggcacactttagtaacagtcaggctgagccctgcagtcacgcagtcttgagtcaggcccaagcccataaccaatcctgggaacaaagcacacaggagtcgtgtggatgcaatgcacgtggatgtagcttccaggaaacaggccgtgctgctcccagaactggtggtgctgggcagacagcacacgtacgccacgggtagacctcctggagacactgtgggtgaaaggtaaatactttcatgaagtgaatcatttctttatctctctggggattactcttcttggtgggcacagggagaaaccatgtt

SEQ ID NO: 8392 - DNA, 503 bp, Homo sapiens
  MAP TO CHR19.3; EXPRESSED IN LUNG, SIGNAL = 2.2; EXPRESSED IN HELA, SIGNAL = 2.3; EXPRESSED IN ADULT LIVER, SIGNAL = 2.1; SWISSPROT HIT: O95644, EVALUE 1.60e+00; NT HIT: gi15299355, EVALUE 3.00e-42; EST_HUMAN HIT: BI462030.1, EVALUE 1.00e-88
agcattagccaatcagaggcgctgggctggaaaccgtccaatcaggcacgcagctggaatgaacaggacggcttccggatttggcggggtctttgtctctccctgcagctggagctccaggtcgtctgttcactgctctctgtcttcttctcctagaggcccagcctctgtggccctgtgtcctgcaggtattgggagatccacagctaagacgccaggaccccctggaagcctagaaatggtgagagtgccggtccagcatcccgagagaggtgaagtgtctgtggcgggactcaggcctcccctcagtcagctccacaatctgcaccccgaattctccttacccagctctgcctcagtcccattcagccataagatggcggctacgctgacagcctggcccccgggcgtcctgtcgcttccccgcgcagtgactgtgcccctggcctggagcgctctgtgggcagctctgcacccgcagtgccgtgtctctcccagattgt

SEQ ID NO: 8393 - DNA, 550 bp, Homo sapiens
  MAP TO CHR14.3; EXPRESSED IN ADULT LIVER, SIGNAL = 1.5; EXPRESSED IN PLACENTA, SIGNAL = 0.93; EXPRESSED IN BONE MARROW, SIGNAL = 1.3; SWISSPROT HIT: P11210, EVALUE 4.00e+00; NT HIT: gi14750914, EVALUE 1.00e-48; EST_HUMAN HIT: BI602615.1, EVALUE 6.00e-54
tggcagtcaaagtccacaaggtgctggtgggcccgatcttccagtagagctcccaccatctgccgtgactcttcccagtccctccacatcactctgaaatagtaacccccatggaggtcaaacagcaagtagtgggtccagacacagacttaacagagattgggtctagagaaagacccttggggcagggccaaggacagaggagacccaggagccttgggcttctaagaagaggtagagggagtggggtactcacaagttcttatccttagggacccagcggagaccttggttctccaggacgatgaccgggggcacacgaggctgaggcaccagtttctgattatccaactgagtggacaaagatgggcaagtgagagtttcaagggtccccccaccctacttgcttttcacctccccacccagaaacccaagcctcaccataataagtactgcatcagggaagaattctgcaattcgcccagcaattttcaaggccaggggcccagggctgtgtagagggaagatcagaggagtgaggagccaactg

SEQ ID NO: 8394 - DNA, 557 bp, Homo sapiens
  MAP TO CHR14.3; EXPRESSED IN HEART, SIGNAL = 1.7; EXPRESSED IN ADULT LIVER, SIGNAL = 4.8; EXPRESSED IN BRAIN, SIGNAL = 1.5; EST_HUMAN HIT: AW418653.1, EVALUE 0.00e+00; SWISSPROT HIT: Q02252, EVALUE 7.00e-13; NT HIT: gi14749380, EVALUE 0.00e+00
cactggcttttctccccttcaaatcatcagaaaatgggataatttttagaaatcaggtttaagcactactttcagataagcatttcatagttacaacagttacctcaaaatagaagtatgaagagcaagtgagaaatctggtttcattgttacactaggcagttccctatagaaactttgcgggggttaatagtcctgaggaagattttagttacaatgtattccaatcccatcgatctgatctgagcaaagctgacaaatgaagctggtcaaaaataaagggagattactcaggatggagtcagtcttaaacaaacttgtttctaacggcccatggtaggcatgacaacagcaggtgaggaaagagtagcatcttcttctttccactgagaagtaatggtctttaactgagtgtagaattggatgccctaaggaaaacagaaaaaaagttagcatatatttctggggtttcatgattcttcttttaattagcttttgaaggaggtattataaagtgctactcactttcctaattgagaaatgcaatcagaatccaa

SEQ ID NO: 8395 - DNA, 563 bp, Homo sapiens
  MAP TO CHR14.3; EXPRESSED IN ADULT LIVER, SIGNAL = 1.7; EXPRESSED IN BONE MARROW, SIGNAL = 2.3; SWISSPROT HIT: P18892, EVALUE 2.00e-03; NT HIT: gi14745980, EVALUE 0.00e+00; EST_HUMAN HIT: AW950918.1, EVALUE 2.00e-38
agccatgggtgaaatacagcaatgaagggagtaggaaagtactcaagtctctatcattatatagaaagtaaaccaccagcatggactcagctgaggctcatagattgcctgtgctacttaatgtagaccacctgtttgatttcctgaatgtggtctatgtaataggtttttgaactggggctctcactcctgatcagaagccaacgtgaagaaggcttggtttgggggctgcagggtacctgttggtgtgcgagttgttgtgcatgaaccagctccggttattgtccacatacattgcccaagctttgtcgtcttttcctaacatcacatccttcatcacgtccatgcgagccacaccaaaggcaggatcagggtggttgtcatagcgatctaccgtgagctcccagtagtggatgcccttggagaagccagtcttccctagcaccacccggtcatcatagctactacaggtcactgtcaggttgtcattggagaggatgatgtccgagtgcgccgagccagggtcgaaagcaaaccaggccactgggaacaacagaagggaa

SEQ ID NO: 8396 - DNA, 556 bp, Homo sapiens
  MAP TO CHR19.3; EXPRESSED IN PLACENTA, SIGNAL = 2.2; EXPRESSED IN HEART, SIGNAL = 1.6; EXPRESSED IN LUNG, SIGNAL = 2.2; EXPRESSED IN FETAL LIVER, SIGNAL = 2.7; EXPRESSED IN BRAIN, SIGNAL =   2; EXPRESSED IN ADULT LIVER, SIGNAL =   2; EST_HUMAN HIT: AI419008.1, EVALUE 2.00e-01; SWISSPROT HIT: O81919, EVALUE 4.00e+00
ctgaggcctccagctcacttggagatacgagcacgtgacctggcgctcccagttcggtgaggtgagaagcgtgctgagaggagacactggcctgctgagcactcgctccagggatcgtggagcgccacttcggggaaggcatggagggcggcggtgagggacaccgtgtggctttggggtgagggttgtgatttttgccctggaggccctccaggtctggaggagaaagattaggaaggacggttaaaatatgaggcattacctgctcgcttctaaaggtaagcatggagtacaggggaacagggcagagggacacccagcgcaatgcagacagaaagatgggctggaagccaggaggcagtgcccccaagttgcaaggggtcactaggggtcagtgaagcaagggtggccctgggcacaatctgggctgtggtgtggtggggagactgtggcatgttatggaagtggtgactagtctagcatggcagaagtctgtgagctcagtgcagagtggtgtttcaggcagggaaagacgacatcacaggaggccttacgt

SEQ ID NO: 8397 - DNA, 522 bp, Homo sapiens
  MAP TO CHR16.3; EXPRESSED IN BONE MARROW, SIGNAL = 2.3; EXPRESSED IN ADULT LIVER, SIGNAL = 3.1; EXPRESSED IN BRAIN, SIGNAL = 3.6; EXPRESSED IN PLACENTA, SIGNAL = 3.6; EXPRESSED IN HELA, SIGNAL = 2.8; NT HIT: AJ303140.1, EVALUE 0.00e+00; SWISSPROT HIT: P39192, EVALUE 6.30e+00; EST_HUMAN HIT: BG165136.1, EVALUE 1.80e-01
ttccatcagcaaaaccatcccagtggctcccaaatggtgctccatcaaagcctaggggtgccctcgataggcctaaggcagagctcccttgcttcccagctagaaaaacttggctttggcctcttttacatgttgagtttctgtatcaaattccatttgaagaaaagactctgtggcttaaaaaaaagtctgtaccttgcactgcagcagctctgtaatcccttccaacccaaatatcccaagattctccatcagaatgacaaatgttcttccaacagccttcgtcctgtttagaggttgtcattaagtgttctttctgctgactgcttcctggagagtggcctcatgtttatccacaggagccttcatcttctggggcatgatgctgctgagcacgatcttcatgctggggccctgggggaccctgggagagaggagaaagcaagcatggggacgaggtggcgctcttttgagagcccagaggcttggcatcccaaggctggggaagaggcttcaaggaga

SEQ ID NO: 8398 - DNA, 506 bp, Homo sapiens
  MAP TO CHR14.3; EXPRESSED IN ADULT LIVER, SIGNAL = 1.3; EXPRESSED IN PLACENTA, SIGNAL = 1.3; EXPRESSED IN HELA, SIGNAL = 1.3; NT HIT: gi14753367, EVALUE 3.00e-42; SWISSPROT HIT: Q28722, EVALUE 2.10e+00; EST_HUMAN HIT: BE276121.1, EVALUE 5.00e-42
tggacctgaagggaaatgagagtcaggtcccagagattagaaaggggtgcatttttctaattcatcttttctttttaattacagtgtgcacacagctcttggtctccagacctgatgaggaaaatataagttcctatttacagctcatagacaagtgtctaattcatgaggtgagtagtgacaggttttacaaaaccattttttttttattgcttagaaatggttctcagagtttctgtgatgtgatcattttagcctccaacaacttgtttttgagtggtggacagttattaataataggttgggcagaactaggctatgacagcctcaaacccaaacacagcttgaacattactttggtgtccaaagatttgcccagactgagtgttctgatgtgcagtgaacgcctgcaacgacttctggctggggaagcagccccgggtggccaagcctcagagggtaacacatgagccctgctgcttagccctgggcattgtcaggtcttt

SEQ ID NO: 8399 - DNA, 545 bp, Homo sapiens
  MAP TO CHR18.3; EXPRESSED IN BONE MARROW, SIGNAL = 1.6; EXPRESSED IN ADULT LIVER, SIGNAL = 1.1; EXPRESSED IN FETAL LIVER, SIGNAL = 1.6; SWISSPROT HIT: P17672, EVALUE 2.30e+00; EST_HUMAN HIT: D59747.1, EVALUE 0.00e+00
gagaagtgaccatttctgccttacaggtttggtgcctggaatgctgacctagatctggaaactagcccagatgaaagcaagaatgatgaggccacagtgtccatgaaagtagggtgaggagggtgtccagtggagccagagggagtgccaagagggaggtccttggaacacggaggatccagaaggcccaggagtagaaagcagcgttggcatttgtaagaaagtagaagaggtggttggccagaggacaggccctgttcaagatctgaccaggacatcagagctggcctctccctcccttcttccttgcaggccacagctgagcagccttaactgacacctccttggcaccagcacacaaacaatggcccatggcctgacgtcttccaggatgccctaggcccgtgcccttcacctgttctgcagctgtaagactgtggtgtttgccctccttgattcttccaggtactgccccaccctgttcttctccccattctttgagtgctgagattggccagtcccatgctgagatgagggagctggag

SEQ ID NO: 8400 - DNA, 504 bp, Homo sapiens
  MAP TO CHR16.3; EXPRESSED IN ADULT LIVER, SIGNAL = 1.1; EXPRESSED IN BRAIN, SIGNAL = 1.3; EXPRESSED IN BONE MARROW, SIGNAL = 1.6; SWISSPROT HIT: Q04632, EVALUE 2.10e+00; EST_HUMAN HIT: AA447526.1, EVALUE 0.00e+00
caagaagcgctgccttagaccttggattttcagttttctgctgtttggtctgtatgttttatatttttagccctttgaaaaaaatgtcatccttttcccagggttcttctgctcactgggtcagaagcatccgatttcctgtcatcggttgcggttcagccatgttaatactgaaagtataagaatatcataatcccagagtgatataaagacctttccaaggaagatgagatacccggaggctgtgaaggagaagtctgaaggatttgaacgcgttcaaatgaaaacctttggttcagcaaaacaccagaaacaaattcaaaagataaaatacactccggagaagcccattctctcaacgcatctgacagttcacaaagagcaactgcagtccaacttaaaaaataaagaaaatggtaggaaaatgggcaacatgcactgaggcaatatataagaagaaggaatgcgcaattaatcaacaaaagcctgctctttcctaacgag

SEQ ID NO: 8401 - DNA, 562 bp, Homo sapiens
  MAP TO CHR19.3; EXPRESSED IN HELA, SIGNAL = 1.5; EXPRESSED IN PLACENTA, SIGNAL =   2; EXPRESSED IN LUNG, SIGNAL = 2.3; EXPRESSED IN ADULT LIVER, SIGNAL = 2.1; SWISSPROT HIT: P38196, EVALUE 7.00e+00; EST_HUMAN HIT: BG993042.1, EVALUE 5.10e-02; NT HIT: Y08501.1, EVALUE 1.40e-01
tgttagggtcaacctgggtctggtgtgtgctcctcctctgaggtggtcagagtgagcagaagcagcaggaatggggtgagcttcgagtggcatttggaggagcttggggtggagaaggggggttgaattctgccctcctacgtgagttcagacagtgaataggcctgggtgtagtgggagacgaaggccatttggggaaagttgagatgcatttggggaatctgagaagagagcgccgttcctcaaaacttaccagaggaccacaaaactgccgagatggctggtattggcttggctgggcatttggtagctctccatggtactttgaagcaatcgtgaggcagttgggcttgcatcattatctattcagggtctggtggtgatgttttctttgttttagggggtcctggtggagcggtgttctgtttgactctgccctacgcagtagagaataacgtggcctgggacatcagggtaaagctcctcaccaccaccttccacatgtccacagtttgcttcctcctcagtagtcttggcacttagagctgccacacagcactag

SEQ ID NO: 8402 - DNA, 600 bp, Homo sapiens
  MAP TO CHR14.3; EXPRESSED IN PLACENTA, SIGNAL = 2.1; EXPRESSED IN HELA, SIGNAL = 2.4; EXPRESSED IN HEART, SIGNAL = 1.9; EXPRESSED IN BONE MARROW, SIGNAL = 3.1; EXPRESSED IN ADULT LIVER, SIGNAL = 1.6; EXPRESSED IN BRAIN, SIGNAL = 2.4; NT HIT: gi14726870, EVALUE 9.00e-37; EST_HUMAN HIT: BE837589.1, EVALUE 0.00e+00; SWISSPROT HIT: Q04689, EVALUE 5.90e+00
cttaggcaggtgctctggtctcacccctgccccttggagtttaggtgcagcagcctctacattcctgttccaagcatgggaccaaggaggccggaacctgtcactggaagccaggtcaaagccatgagcagtggcccacggcttgttgggttcgtctgtatcattgaagctgcctgtctgcatgtatcctctggctcgcgtgctgttggctctgcagtacaatatgtaaccaataaagctccctcctttccatgtaaaaaacaaacaaaacaaagtgtgagttatcccatcagataggccatctagaccagcagaagtgatggctgagactgagaagaatctagaatgaatagtaaagggtggagattgtgagtattagttgtgactttacgacgactgcaccagttgggctacactgttcctgctaaccttcctcttatatattttgccagaactgtgaccaaacagaatccactagaatctataccttaatgaaatgaccttaatgtgcgagaaacaatggatctcaatagggtaaactgtaactgatgttgtttttatctcacttgaatcttttttagtgggctgtgtacccattct

SEQ ID NO: 8403 - DNA, 559 bp, Homo sapiens
  MAP TO CHR16.3; EXPRESSED IN BRAIN, SIGNAL = 1.3; EXPRESSED IN ADULT LIVER, SIGNAL = 1.2; NT HIT: gi16163751, EVALUE 5.30e-01; EST_HUMAN HIT: BG912728.1, EVALUE 5.00e-82; SWISSPROT HIT: P26846, EVALUE 1.80e+00
caaccagggcttactccaagggcagcaccctttctcgcctgtgctctgagaggccacaggaccagccatgccttacctgagagcaccgtgaagacagccgcgaaggcattgagcttgagcccgtcgatgacattgctggagtggaagagctcgagacacatgaggctgaagccaaccaccagcagcagaatgtacagcacctcggagaccacagacagccacaggacccctgtccaacagaggcagagaggccgtgagatgaggggccacccaagatagactcaccctgtgcctattcctcccacaacagcagagggtagcaagtcattctagaatagaacctggttctgggggaggtcctgatggaagcctgtcatggccgtcccatccttgtctgcaggggccggctcagggaccgaagcttaagtcagcattctctggatcctattactggggaagaacttttatcctgtggctggaccaagggctccctttctttctcatggattagatgatcaccactgagagccagcttgccgccaccagtttagggtgaagc

SEQ ID NO: 8404 - DNA, 526 bp, Homo sapiens
  MAP TO CHR14.3; EXPRESSED IN BRAIN, SIGNAL = 1.2; EXPRESSED IN ADULT LIVER, SIGNAL = 1.2; EXPRESSED IN PLACENTA, SIGNAL = 1.3; EST_HUMAN HIT: BG248500.1, EVALUE 7.40e-01; SWISSPROT HIT: Q9NYV4, EVALUE 2.20e+00; NT HIT: AL161582.2, EVALUE 5.00e-01
agcaagatgacacatcagcgtagacacccacgagggagctgcatttttcccttttgcatttccaaggaaccccaggagtcccatctggtctaacataaagtcatgtatctttacctaattttggcctctgagttttccttctgggagacacttgctgcttcactgtggaggggtctaggggtagaaagccagctggagctgtggagctgtttataacaccccaaggactgttgttctgccccaagcagggggtttgttggggcccatgcagggggagtctcaacgggcaatcccccgttcctcgtgggatgtggtttatcattcctgctttgagtttcattaacatggaatcttgcactttcccaaccaatgacgccacaaaagaataaactatattaagtccataaatctcagactgccaagtccctggaatatcaactgatgaaactctccgctttctaacctgaggtgagtaataagtttccctcttcatttgcatcacgggcctcagggtggagagagcact

SEQ ID NO: 8405 - DNA, 516 bp, Homo sapiens
  MAP TO CHR16.3; EXPRESSED IN PLACENTA, SIGNAL = 1.2; EXPRESSED IN HELA, SIGNAL = 1.3; EXPRESSED IN LUNG, SIGNAL = 1.5; EXPRESSED IN BONE MARROW, SIGNAL = 1.7; EXPRESSED IN FETAL LIVER, SIGNAL = 0.98; EXPRESSED IN BRAIN, SIGNAL = 1.5; EXPRESSED IN ADULT LIVER, SIGNAL = 1.2; NT HIT: AE007575.1, EVALUE 4.90e-01; SWISSPROT HIT: P06750, EVALUE 8.20e+00
agatctccaaggatagggggccaccattttttcactggtgactcttatgactgaccactgtctctcttgacgtattgggagcaaacatctcatttttgggcccctaggaaaatgtaaaggagagctcagcatcctcgaatgcttcattgacctcatttactgcaatatctttaaagtattttgaccacagctgactaagacacccaatgtaggccttacaaatgagaaggttcaacaggacaggcaaatcacagtattctgaaagctccatcaccaactattaatattctgacccagctggggttgtcagctctaggtggctcgggtgaaataaccaaatgttccaagggtcagtggaatgtggccacgatgtgctcaacacagccagccacactgagtttggaaggtgagcttttattttgatatttgggaggccacaaggtagctagggattaggaaaagggctctagcactgggtatgcagtatgaatagtaaggtcctctgggaaaactagg

SEQ ID NO: 8406 - DNA, 542 bp, Homo sapiens
  MAP TO CHR18.3; EXPRESSED IN BRAIN, SIGNAL = 1.1; EXPRESSED IN ADULT LIVER, SIGNAL =   1; SWISSPROT HIT: P16843, EVALUE 1.00e+00; NT HIT: AF414606.1, EVALUE 8.10e+00
ttcctgttccccagaaactgtgacatgcgtggtgcccttcaaaactcatgttagaaagcgtggataataaattattcagggaacaaagcccgagctcattgaaaagctattgctctgtgggtaaatacaaccccactgtgtattaaacaaaaattaaaccccattttcttttttatagtgaagttgccatcaattcaaatcccgagaacaaggccctggacacagttaatagtccgcagcctggccagcccaggctttgaaagcagggaagccttcctgaagtgctgcttgtgcccaattataactcactacttaccatcttcataatttaaatctgtccacccctttgggggggagacatttttgctaatcaaagccatgaatgcacctttttccttttgacagcattaaattaaagctaaatggtcggttttgaatgagttactgtgaataaaggcattaatgaggtaatttcattatggagactcatccaggcctatgtgaaaacaagggaagtaagtggaaaggaaagctgctgagga

SEQ ID NO: 8407 - DNA, 500 bp, Homo sapiens
  MAP TO CHR14.3; EXPRESSED IN HEART, SIGNAL = 4.5; EXPRESSED IN ADULT LIVER, SIGNAL = 1.1; SWISSPROT HIT: P30050, EVALUE 9.00e-50; NT HIT: gi16194624, EVALUE 2.00e-93; EST_HUMAN HIT: BE894351.1, EVALUE 1.00e-85
aatgacgttgtgaatggcaggccaggaaacccaccacctctgccatgtcacccaagttcaaccccaacaagatcaaagtcgtatacctgaggtgcacgagtggggaagtcagtactacatctgctctggttcctaagatcagccccctgggtctgtctccaaaaaaggccaatgaggacatcaccaagacaagtgactggaagggccagaggatcccagtgaaactgacggtgcagaacacacaggccagattcaagtggcatcttctgcctctgcagtgatcatgaaagcccttgaggaaccaccaagagacagaaacaagcagaaaaacattaagtacagtggaaatatcatttgtggtgagatcatcaacattgcccaacagatgcagcactgatctttagccagagaactctctggaatcattaaagagatcgtgaggactgcctagtctgtgggctgtagtgttgatggcgccaccctcacgacatcacagatgg

SEQ ID NO: 8408 - DNA, 547 bp, Homo sapiens
  MAP TO CHR16.3; EXPRESSED IN HEART, SIGNAL = 1.8; EXPRESSED IN FETAL LIVER, SIGNAL = 2.7; EXPRESSED IN ADULT LIVER, SIGNAL = 1.6; EXPRESSED IN HELA, SIGNAL = 2.2; EXPRESSED IN PLACENTA, SIGNAL = 2.1; SWISSPROT HIT: P57044, EVALUE 3.50e-01; EST_HUMAN HIT: AW962461.1, EVALUE 2.00e-50
cttgctttggagtcaggaggcctctcttcttcccacagagccctgggatgcaccggccagaggccatgctgctgctgctcacgcttgccctcctggggggccccacctgggcagggagtaagtcagtggggtctgccctcaatctcccctgcctccctccaggagagccagggactcacccggcccttgtcccagactaactctggtcacagaaccatcctgtctgcctggaggggtggggtcccctgttctggcagaggtcacccccatatcaccgcatggggattttcttccctttgggtctctcttttcttcagagatgtatggccctggaggaggcaagtatttcagcaccactgaagactacgaccatgaaatcacagggctgcgggtgtctgtaggtcttctcctggtgaaaaggtgagtagggctatggtcatgggcccagcgccatgtcccctcccatcccacagtttcaggaactcagggcagggggtaagcacccgtggccacttttgccacacatgcctggctactgtcgatgctt

SEQ ID NO: 8409 - DNA, 587 bp, Homo sapiens
  MAP TO CHR16.3; EXPRESSED IN HELA, SIGNAL = 3.4; EXPRESSED IN PLACENTA, SIGNAL = 2.6; EXPRESSED IN BONE MARROW, SIGNAL = 2.5; EXPRESSED IN FETAL LIVER, SIGNAL = 1.7; EXPRESSED IN ADULT LIVER, SIGNAL = 2.8; EXPRESSED IN BRAIN, SIGNAL = 3.2; EST_HUMAN HIT: BI825551.1, EVALUE 0.00e+00; SWISSPROT HIT: P30539, EVALUE 5.00e-01; NT HIT: gi16165038, EVALUE 8.70e+00
aagtccatgcattcctccagccttcatccccttcctgcctaccccacctctcacgtctcccacggtctaactctttgatggcatctgtccaatttcagatacagacatcaaggatgcagtcgacccagagtccactcagcggccaaacccattccgtcgacaaagcattgtcttagatcccatgttacaggagggtacctttaacagccagagggcaaccttcataagagactggtccaacaagatgcctgacatggcttacgaacgcaagctaaagagcctcatggagaaaagcaccgaacctaagatggaaaccatgaggatgttgaagccagaggaggtgctgagctgccggtgagagctgccaccccctgggcagatggggtggggtcctggaacaggctttgctcactcttgtccctggctcaaacaccttggcttagcctgaagatctaggagtaggggcttggtgtggctgagctccgccctttggtcccaaaggactgctccagggctcaagccagtgggtttccagcagctcacctgctggtagaccatcccctgaatgggcatgtcatttaggtgct

SEQ ID NO: 8410 - DNA, 507 bp, Homo sapiens
  MAP TO CHR18.3; EXPRESSED IN BRAIN, SIGNAL = 1.4; EXPRESSED IN ADULT LIVER, SIGNAL = 1.1; NT HIT: AF324892.1, EVALUE 3.10e-02; EST_HUMAN HIT: BE811007.1, EVALUE 4.50e-02; SWISSPROT HIT: P50313, EVALUE 4.70e+00
gggctctagggaatttctgcttccagtaattgaggagtggcttttgcagatgaaccttccttctgagaaccagaaaggatggaatttaaaaaaatgtctctgaaagcattgaaggggtaaaaagaggcttaagggataacaatcccagaaacaaaaaatacacaaagataagaactcaaaatttattactacttttccctttgaggtgtttgctgattctcaagaggcgacggactttgagaagctgagcagagcttccagcaatgctatgtgtctgggagtaagcaaaatttttggtatggcccacagagaagaagggactctgaaaaagggtctagactctcaattagaactgatggaggatgagatcttaaggcatgggtaagcaaatggatcagcctggacagagactgaaatccaacttggaatcacatcaattcttgattggattaaggagatgtattcttagcctaaatagttaccagaagcaaaatgaaattccctcca

SEQ ID NO: 8411 - DNA, 564 bp, Homo sapiens
  MAP TO CHR18.3; EXPRESSED IN PLACENTA, SIGNAL =   3; EXPRESSED IN BONE MARROW, SIGNAL = 3.7; EXPRESSED IN ADULT LIVER, SIGNAL =   3; SWISSPROT HIT: Q09625, EVALUE 1.10e+00; NT HIT: Z49778.1, EVALUE 1.40e-01; EST_HUMAN HIT: BE733346.1, EVALUE 5.10e-02
taaagttcgcatcaccctcccatactggcaagatagagtttggtattgttttcaaatacgaagtcactttccttctcaaggaactggcctgggagtgtctcggagaagttaaatgcagtgtgggctcagccacaaaaccgaataatgccactgcaacaacttgattctcaggagggaaagaagactggctcggagtacatcggtggctacggaaaccagccctgtggacactggagagaagatgtttccatctaagtctattaaaaaaaccccaagactccagcaaattcaggcctgtaaatgttagaagcggtttggtacggtgattaggttaaggcatcaaggacacagctccaggacactgtgtgggtggcggcgccacgggtccagaaaccaggagggagggaaggggggtgtattcctcctgcccagcaggcaaagcagtccaccaggtgggtagtgtctccagcacacaagctgggttttcagggcagtgttccagcaccagcaagggtctggggtgctagacagggaaactgaggcagagacccacccacacaaact

SEQ ID NO: 8412 - DNA, 593 bp, Homo sapiens
  MAP TO CHR16.3; EXPRESSED IN ADULT LIVER, SIGNAL = 2.3; EXPRESSED IN PLACENTA, SIGNAL = 2.2; SWISSPROT HIT: P75318, EVALUE 1.50e+00; NT HIT: gi14776310, EVALUE 0.00e+00; EST_HUMAN HIT: AW954877.1, EVALUE 0.00e+00
taaggcctggagtgagaagcatccctggataaagtatattagatagtaatagtgggttaagagctaatgggttggcagctgcagctgtatttaatgcagcagtagaggatgtggaaggagaacttgacacagagttttctccaccattctctgaactttggctctctgtcctttctgtttttccttctgactccttagagtcacttccctttttgtcttctgtcccagattccgtaggctttgtcaggagtcctcccatgcccaacagatttggtaatccagccattcctgacagcagcatggggaacatagcagccatgtttttagcttctcctccagaaggaaggccggtaggcattcccatcaacccagcagttacttgcagtgactgcaagttttgtaggttttgttgtaaggcctgaagagttgtgagatccacacctggaagtagtccattggctaacaaaggattgcctgaaacactggtggcagatgcagcagctgctgctgctgtggcctttgcaattccacttttaggccgtctcccccgcctgcttacttcctctctcacaacgggaccagtgagaatacgt

SEQ ID NO: 8413 - DNA, 557 bp, Homo sapiens
  MAP TO CHR16.3; EXPRESSED IN HELA, SIGNAL = 2.1; EXPRESSED IN PLACENTA, SIGNAL =   2; EXPRESSED IN LUNG, SIGNAL = 1.4; EXPRESSED IN BONE MARROW, SIGNAL = 1.9; EXPRESSED IN FETAL LIVER, SIGNAL = 1.7; EXPRESSED IN ADULT LIVER, SIGNAL =   2; EXPRESSED IN BRAIN, SIGNAL = 2.9; SWISSPROT HIT: gi12644096, EVALUE 4.00e-07; NT HIT: L17432.1, EVALUE 8.30e+00; EST_HUMAN HIT: BG878309.1, EVALUE 3.10e+00
aagcagggcacagaacaaagccaatggcctgggcagcatgacacgtctgccacagaggtccgagaagcctcagcacacacacagccaggcagggtgtccccatgctcagcacacatgtggccaggcaggctgtccccaggccgagcacacacatggccaggcggggtgtccccaggctgagcacacacgtggccaggtggagtgtccccaggccgagcacacacatggccaggtggggtgtccccaggcccagcacacacgaggccagcggggtgtccccacgctcagcacacatgtggccagccagggtgtccccagctcggggttggggtgtacccagctcggggtcagggttttgatggggactgcactcagaccccccagccagtgacagcaaggcctgtttggcagcctaggacccctggattcacattcctaggcaaagagatgcagagacatggggggattagccacaggccaaaggtcaagtgaaccgcaccaaggaaacttccagacccaccccagggacctggctgcctctgcctgatggccaatat

SEQ ID NO: 8414 - DNA, 584 bp, Homo sapiens
  MAP TO CHR19.3; EXPRESSED IN BRAIN, SIGNAL = 1.9; EXPRESSED IN ADULT LIVER, SIGNAL = 1.1; EXPRESSED IN HELA, SIGNAL = 1.5; SWISSPROT HIT: P15498, EVALUE 1.00e-29; NT HIT: gi14759173, EVALUE 4.00e-42; EST_HUMAN HIT: BF032921.1, EVALUE 0.00e+00
gatccatgttgactccacccacctgtccatcttggagcgccgttccaccgaggtgatcttgagttccccgtcgatcttgggccggccatagtgagccagagactggtcctatgcagtaggcagggggtctagcaagggtctcccaagaaaggagccagacacacactctccccacgtggccacacccctggcccacccggctccaccgcctcaccaggttctcaatggacagctggaaattggtgatctgtcgcagtgtctcgttgtctcgcttgacctcgttcacgcactgagccaggtcctggggagggggcaggggtgaacctggccccccaacaggccgacccaggctcctacctaatcccggctagaggatcagcccctaccaggagggtgtctgcagcaggtgagtcaccagcaccctacacccactcaccctcatggcatccagggccagccgcaggttctccttctccatcgcctcctgcgtgtgtttcaccagctcctgagagaaccaagacgtcagacgtcacctgggcccctccccttctccctgcggggagggccttccaaacaatgctagc

SEQ ID NO: 8415 - DNA, 500 bp, Homo sapiens
  MAP TO CHR16.3; EXPRESSED IN PLACENTA, SIGNAL = 0.92; EXPRESSED IN ADULT LIVER, SIGNAL = 0.92; NT HIT: gi14775105, EVALUE 1.00e-112; EST_HUMAN HIT: AW197402.1, EVALUE 0.00e+00; SWISSPROT HIT: Q9JIQ8, EVALUE 2.00e-06
agtggctacagaaagccctgggagtcttgactgattaggtaagggtttcagccaaactctagaacctcaagcaaactccattattaaattaagataggccctagattggattatccaggtcacccccactgccagcacacacgcagccttctctgggaggaggaatgccttaactgcagatgtgggattccatcctgacacccagcagttctgcaagactggtggtgtatgcagcattctgccgaggaagcagatggactggaccaggttgccaaaatgcatcgctgtgtctgtcttcaggagggctatgttgttgctcatggagttgttatcaaagtcctcatggatgatgatggtattgactggatactctgtgtgagcaatcttgctaggatccatgttacttatacccactataacgacaatgtccttcctggagagagagcaagggaatcttgagaagccaagacagcaaggaagcttcacgcttccctgttttc

SEQ ID NO: 8416 - DNA, 546 bp, Homo sapiens
  MAP TO CHR19.3; EXPRESSED IN PLACENTA, SIGNAL =   1; EXPRESSED IN HELA, SIGNAL = 2.7; EXPRESSED IN LUNG, SIGNAL = 1.9; EXPRESSED IN FETAL LIVER, SIGNAL = 0.79; EXPRESSED IN BONE MARROW, SIGNAL = 1.8; EXPRESSED IN ADULT LIVER, SIGNAL = 2.3; SWISSPROT HIT: Q10586, EVALUE 4.00e-34; NT HIT: U48213.1, EVALUE 0.00e+00; EST_HUMAN HIT: AI684518.1, EVALUE 0.00e+00
agtgctctccccctcttctcctgcaggatgagaaatactggagccggcggtacaagaacaacgaggcagccaagcggtcccgtgacgcccggcggctcaaggagaaccagatatcggtgcgggcggccttcctggagaaggagaacgccctgctgcggcaggaagttgtggccgtgcgccaggagctgtcccactaccgcgccgtgctgtcccgataccaggcccagcacggggccctgtgaggctgccccacatccccacctggcggagctctcctccgccttgctgagacttacgccctgttcccttcctgccctgtggcccacgggccggccagctgggtgccccagggacgtgataatgcagataaatacatttatatttttaagaaaaagcgagcctcccccctcccttgcgggggcggggagggttctctgtgtgtgtccccggcacgtcagggaccctatcctcccaccgcctccgttaacacgatcctgaataaatcttgagaaccccagagccagctgttgtggaagaagagggcag

SEQ ID NO: 8417 - DNA, 518 bp, Homo sapiens
  MAP TO CHR16.3; EXPRESSED IN BONE MARROW, SIGNAL = 2.8; EXPRESSED IN ADULT LIVER, SIGNAL = 1.7; EXPRESSED IN BRAIN, SIGNAL = 1.8; SWISSPROT HIT: P22467, EVALUE 6.30e+00; NT HIT: gi14775437, EVALUE 2.00e-77; EST_HUMAN HIT: BG823323.1, EVALUE 3.00e-77
gagcagttactccagggcaggtctaacctggatctcttacctgccccacaaggaacaagtcgacctgggctatcagccctttttgcctgcaccgcactgcggctctgttcaaatagtaaatctgactgcagtatttttaattcttgaactccgaagccttttggtaaagcagacacattctgacacctaaatacaagggaaaatgcattcagtttaggtgcatgcctagagaaaacagtatctaggattgtggctcacatcatcacccctgagccttagcaggtgtggggatttgtttatttatttgggcagacagtgtttcagaatagaatcaagattgtaagcacctcatggctggaagaagatccttctccctcaatctgcagggataactaagaatcaagtcaacacccttcagggatgtaacaccaaactccattcctgatataggctttgagaaacttgaaaagtttaagcagaaacattaatgtgttggcacctgcttcctagggaatcct

SEQ ID NO: 8418 - DNA, 599 bp, Homo sapiens
  MAP TO CHR18.3; EXPRESSED IN ADULT LIVER, SIGNAL = 1.2; EXPRESSED IN PLACENTA, SIGNAL = 1.1; EXPRESSED IN FETAL LIVER, SIGNAL = 1.3; SWISSPROT HIT: P32947, EVALUE 1.50e+00; NT HIT: gi11466954, EVALUE 8.90e+00; EST_HUMAN HIT: AL581261.1, EVALUE 3.30e+00
gccctagagctgaccttgtgtgtcccagccatggaagaggctgtgcacagcagctcagcaggcttgtgctccagaccagccagtcctgccctctgctcttcatacccaatcccatcatcatcaggtgggtgatgccctccagacgcccccactcaagcacagatgctgcttggaaggcatggggaggctcactgggcccaggctgtcagcatatcaacccacatcagttaatcagactaacttttgtattctgttggctctgtcacctcgtggtgggcagtttcctacccagagcccccagctttcctttcttgagcccaaattcacatggtagagcttgtccccatgcaatttggatttagcagacatctctattggtggattagtgggagaaaggcaacattccctttaccaaaaagtactgaatttaaaaagattaaaacatgatttccctccctccacctgccttcagtgaagatgtcttccccttagataaatgtcgggcttattgattattggatttatacatgttggtttcttgaggtcattaggcaaggacacacgtggatgccctctgtagggtgccataatttccagtg

SEQ ID NO: 8419 - DNA, 527 bp, Homo sapiens
  MAP TO CHR19.3; EXPRESSED IN PLACENTA, SIGNAL = 1.3; EXPRESSED IN ADULT LIVER, SIGNAL = 1.5; SWISSPROT HIT: O75792, EVALUE 7.00e-41; NT HIT: gi14759427, EVALUE 1.00e-108; EST_HUMAN HIT: BG232104.1, EVALUE 0.00e+00
aaaggaagtagctggacccggctgcagagcacactcccaccttgcttctgtcccaaaagtacatcccctacgtgtggttctccttaaacaattttaatgtctgggttggggaagcaggtagagcgcgtagaggcagctgctagaggctggttgctgactccaggccgcgttccaggaaatatcggtgggaagaacggggacgggcttgggacccttcattgaggaagtaggatgtgatcttcctgagtccctcctgattctcggatgctgagtcctccctgtgggagagaggtgatgacagtgaccacttacacagggagcaaccctctcaggcagggctgaacgctggcctccctccttccttccctatagcacccccaggacatccatgacacccaccatataacatcttccgcctctttctccaggatggtctgggccgtgcgccagctgaaccggacaaactgggggaagccgaacacaggctccacgtgctccttcaaccacgcttttgtcttgggatctgg

SEQ ID NO: 8420 - DNA, 528 bp, Homo sapiens
  MAP TO CHR16.3; EXPRESSED IN LUNG, SIGNAL = 1.4; EXPRESSED IN FETAL LIVER, SIGNAL = 2.5; EXPRESSED IN BRAIN, SIGNAL = 1.8; EXPRESSED IN ADULT LIVER, SIGNAL = 1.2; EST_HUMAN HIT: BF811511.1, EVALUE 6.00e-91; SWISSPROT HIT: O14834, EVALUE 1.00e-06; NT HIT: M69197.1, EVALUE 0.00e+00
gagggctcacgcacttaatctaaactgtctttaaacattgcacctttatttcaggagtgacagtgaggattcacatttgggttatttcaagatgagcttcctactgcccaagctgactagcaaaaaggaagtagaccaggcgataaaaagtactgctgagaaggtgttggttctcaggtttgggagagatgaagatcctgtctgtctgcagctagatgatattgtaagtgaatgtctaaaataattggtttttattaataatctgtatattctcacttcagcatctgagtagtacatgagagggagtagtcagggttgggtatatagctgttcatttgttagttcactaagagctgattgtgtgcctgccctgaaccaagcccccaaatctgtgtgtgctgaatctgtcttggatgtccttacccactagaagctgtcaatgctgtttcaccaacaaggtgatggaagagcagaaaactattaacaagcatctgtgaacactatcttttcagtgctcgcaatagtggg

SEQ ID NO: 8421 - DNA, 504 bp, Homo sapiens
  MAP TO CHR14.3; EXPRESSED IN BRAIN, SIGNAL = 1.8; EXPRESSED IN ADULT LIVER, SIGNAL = 1.1; EXPRESSED IN PLACENTA, SIGNAL = 0.89; EXPRESSED IN BONE MARROW, SIGNAL = 1.2; NT HIT: AB029158.1, EVALUE 1.20e-01; EST_HUMAN HIT: BE147924.1, EVALUE 1.80e-01; SWISSPROT HIT: Q57560, EVALUE 1.60e+00
aattccaggcattctgatccccaacaccctacattctagtccctaatgccgtaatgcattacatatcagaaagctggaaagtgacatttttgcaccaatcatgctgagatgacatctttggctaaattcatattttctgctcttttgatgcaaactgatcttcaagcaaaatagtagaattcatccccaaattccaattcatccccaatttctctgttaagcgaaggcaagtggtgttttttatcctcgttactgaacctctctccctcctcctactttggaacaatttctccctggatgatgaagcgcaggatgttcaccactttgtagcgggaagctcttcctgaagccatgtggctgtgttcctgctcgccagctgctcactgcaggtgccgcgaaggggccacacggccgctcaggttaaagatatggatcacagccttcttatcttgggaatctcagcttacaacattttagcattgcagaggccaatacaacagggag

SEQ ID NO: 8422 - DNA, 501 bp, Homo sapiens
  MAP TO CHR18.3; EXPRESSED IN ADULT LIVER, SIGNAL = 1.1; EXPRESSED IN HELA, SIGNAL = 1.3; NT HIT: gi16163926, EVALUE 1.00e-50; EST_HUMAN HIT: BF984064.1, EVALUE 2.00e-50; SWISSPROT HIT: Q9Y4E6, EVALUE 8.00e-15
cctttgaaatgttgctgtccacttccaagtgcaggtcatctcacctggcttcttgtttttgtttttgttgttaaaatgttcaactcaggttctacatggtcagctattatgagcggaatcacagaatagcagttggagctcgccatggttcagtggccctgtacgacatccggactggaaaatgtcaggtaaataaatcattgtgacttcctctccataaagcgtggaagttattgaaaggagagagagactagcacttcaccagttgacgtgctgagctgctggaacattatggataatgctaaagggatcaatagtttaatgaaggacgcacagaatatagagccctactgtcttcattcactgggactgaagggttgccacagaagagttcataagagagcccagagtaaggtggcactgctaacaaactattttgcaatacatcttttcttgttttaaaccgagttttctgatcttatttttgccatgtgttttctg

SEQ ID NO: 8423 - DNA, 570 bp, Homo sapiens
  MAP TO CHR16.3; EXPRESSED IN LUNG, SIGNAL =   4; EXPRESSED IN ADULT LIVER, SIGNAL = 2.3; EXPRESSED IN HELA, SIGNAL =   3; EXPRESSED IN PLACENTA, SIGNAL = 2.4; NT HIT: AL163203.2, EVALUE 8.50e+00; EST_HUMAN HIT: BF819698.1, EVALUE 5.10e-02; SWISSPROT HIT: P36956, EVALUE 4.20e+00
actttccaatttggctgtggctttatcacttactctttggctaactactttggtagtttagcacgtctatcactccccagtctgtcttttggagatgccctaatggattttcctggagtcaagaaccttatcctagatgttagagtaagttaagaagtaaaactatgtgtatgatgctgaacatgacagttcagatagtgacacagctgcatttaattttacctgctggaatggctatgcctatataattgttgaaaaagagggtcctttgttttgcttgtcattcatggaacttcagcgagctgctttgaatgattttatctcagaatttattaactattttgtcataatgtggactaatggacacatatcctctaatttctcttcttcctgttcatcagacagccaaatttttcctttcacatctttgtccgcaacattaatgttcaaaatctagactgttaggaatcaaaataacaaaacaatacagactcttacatgaaaattaagaagagttagatcaacttctaataacaaaaacagtatagaagcatcatcatcagcatttcc

SEQ ID NO: 8424 - DNA, 511 bp, Homo sapiens
  MAP TO CHR18.3; EXPRESSED IN LUNG, SIGNAL = 1.1; EXPRESSED IN BONE MARROW, SIGNAL = 1.4; EXPRESSED IN ADULT LIVER, SIGNAL = 0.97; SWISSPROT HIT: P13868, EVALUE 7.10e-01; NT HIT: U14003.1, EVALUE 4.90e-01; EST_HUMAN HIT: AI000328.1, EVALUE 7.10e-01
aggtgaggtgtgagtacggggaatgaagtggaggggtgggcttcagatctacagaggcagtgagcctaaagatagaaaattataactcatctaaagtaattacttatgtgtcaaacttgaacaaaggctttgggctcaggctcagtctattttgagtacatccctctgcaaaatggaggaaggagccctgggagagctcatttctagtagaactatctgctacctacaggtactgccaagtgaagtggttatacgttctgtggtagtcacagcagacaccaaccaacctgaatggttgcagttaactgccaggaaaattcctggaacatcaagagaagaggagctagtaagaaacgtttctctattcaccctcactgatatctcataccaactgtatgagagctgggaaggggctgttgtctgagctgctttaatatgaagggtataagataccagaattctgcctttactccattagattgagagttattgtgcagctcttttcaccctc

SEQ ID NO: 8425 - DNA, 537 bp, Homo sapiens
  MAP TO CHR16.3; EXPRESSED IN ADULT LIVER, SIGNAL =   1; EXPRESSED IN HELA, SIGNAL = 1.1; EXPRESSED IN PLACENTA, SIGNAL = 0.82; EXPRESSED IN BONE MARROW, SIGNAL = 1.1; SWISSPROT HIT: Q17758, EVALUE 6.60e+00; NT HIT: AL161560.2, EVALUE 5.10e-01; EST_HUMAN HIT: AW770028.1, EVALUE 1.00e-95
ggcaagtcgaagaagcagagatttatttggagagaaagctcctgaaaccgacccagcctttggaagaccagcccgtctgcttagaagttgggactgttgattccttcaattaatgaaatgcatttggtgtttttaatcgtatttattttactttatgagaagggggagaccgctaggagggtgcattaaaaaaaaaaaaaaattctgaaaagcctgcaaaaggatcgaagagtggaaactattgttggagcgagttggtttttacctcaacagcgccacctttcggcaaaggtcagttgaaattgatccgtgtccagttttgtcgatgaagtgaaaagcagctggttacccagtgtgggaggaggaaagagacacacaaagttagtttgactgaagtgggagaacccgaccctataggaaaggggccgaagaaagtgctggcagatgcagagatcatttttgcccctcctcttctccttgattgttgacaaagaggccaggggatacagacaccctcggggtgtaatttctggctga

SEQ ID NO: 8426 - DNA, 504 bp, Homo sapiens
  MAP TO CHR18.3; EXPRESSED IN ADULT LIVER, SIGNAL = 0.98; NT HIT: X16152.1, EVALUE 7.50e+00
tgtcattcatgcaaattgggtgcctctgtttctcgggagctgtgtagagcctagacaagttcaaatcatcccaaaggacttagagtaggtcggaatcaacataatcaatgcccctgacactgcccctccacatgccctacaggagttgggagcgcgcacctccaccctatattgttgtctccaaattcttctctcccttcccttctctcttcttccctgaggtcagcctcacattctgcaggtctagcgaaagggtgtctcacctcaatcatgagaaagaggagtcccagctccaggagaagcaggagcagcccaggaaggggcttctcagaccctgagaactgagccatggagtggccatgtgctgttttagaacacagctgacaggacaccttggctcttcttcaccagagactaaaatcaagagaagcatcagaagttttggagttctcactgttcttgccccagggccacagagcttcagctacctgctcctcccacaag

SEQ ID NO: 8427 - DNA, 547 bp, Homo sapiens
  MAP TO CHR16.3; EXPRESSED IN ADULT LIVER, SIGNAL = 0.94; EST_HUMAN HIT: BE708593.1, EVALUE 4.90e-02; SWISSPROT HIT: Q09894, EVALUE 3.00e+00; NT HIT: AE006752.1, EVALUE 1.30e-01
ccctttgttcctccacattgtgttgagaactatagaaacaagtgtttacaaattgttcttttatattttctacttatctaaaccccccagttgggagtttgaacaacagaattacaggaaaccaactctggcagctaagcatgccgacataatgtctacaatatggggaatgacagtaggggcggaaatcaagaacactggaactgggtccagagaggcagtgcttgcaatgggtgaggcagggaagtgagggaggcctggaggggagaggtggggggctcagaaagtggttagagactaaactgccctctctgaagctttaaaagtattaaggctcttcctacctatggccttagtttctgggtcacgttttctctgaaatatccatgattttcttaattgacaactatttaagaaatcaaataaactatctttaaaattagtatcaaaacaacacacacacatgcacacacgtgtgaacaggtagctcttcagaggagtaatggcaaagaagtttcatctcaggtggtgatgcagaatcgtcgtt

SEQ ID NO: 8428 - DNA, 520 bp, Homo sapiens
  MAP TO CHR18.3; EXPRESSED IN BONE MARROW, SIGNAL = 1.4; EXPRESSED IN ADULT LIVER, SIGNAL = 1.1; EXPRESSED IN PLACENTA, SIGNAL = 1.2; NT HIT: D64032.1, EVALUE 4.90e-01; EST_HUMAN HIT: AW771131.1, EVALUE 0.00e+00; SWISSPROT HIT: P19535, EVALUE 2.10e+00
cggtggtaggaacaagttggccttattgccctaatggatcatccctttctctatctgctgtgatatgagagctgatgagatcctgcctgaggcagcgggactgtctcaacacagattgtctctccattcacaggggtaaacactttactgggaggtttaaagtgaaatttagaattacacagaagtacctaggaaacggattatttttttcttcagtgaactcttgagagggcttctcagtaaagttcaagcaagcaggtgtgccgaaaattgctttaaaaccaaacagacagtaggaggcatgcatatgccagaaatcatagcccccgtgagagagacaagcccatttttcagcagcagcagctgttggtgcatctgcagacaggttgctgtcaggagtgttgagcagagaaatttcaggagaaaggtgcacatgagaagagaagaggcgtgaggtctctggtgtatgagattcagcaaagaaacttgggtgatgcactgagtcctgggctgacattgt

SEQ ID NO: 8429 - DNA, 597 bp, Homo sapiens
  MAP TO CHR18.3; EXPRESSED IN BONE MARROW, SIGNAL = 1.7; EXPRESSED IN ADULT LIVER, SIGNAL = 1.1; EST_HUMAN HIT: AI193860.1, EVALUE 5.40e-02
attcccctatgtccccattctaaaaatgtgctttccctgaatatgtttttcatatataatcctcatttatttgtgtagtatcaaaactcatttgtgcatatgggtttatcagcagcaaaaatgtaatgctaagctgggtctgcccctggggtcacttgatgtttacttatctaatgcaaactaatttcattgtttgtccaagaaaaacatgtctaaaaaggaaaatctgtaattaaaacattctcacaggcattccaaagttgaatgggaactaagagcatacaatatattggtttagatgatcagaaccatttcccctttctatcaagacaactaatatagcactatgtttatttttctttaggatgtttcaactacccccaaaactgccaaaacccaaaatttatcctggagtacaacaaatatttccacaatgtcttctacatcctactattgtgactggtaatatataaatgtagcatactatatatattaggtcatgcccctttaatatgcataataaatagaaaatgagaactttaaaaacaaattttcttttttgttattttctttattccgggtgtcctgcatttttat

SEQ ID NO: 8430 - DNA, 576 bp, Homo sapiens
  MAP TO CHR14.3; EXPRESSED IN BRAIN, SIGNAL = 1.5; EXPRESSED IN ADULT LIVER, SIGNAL = 1.4; SWISSPROT HIT: P57999, EVALUE 1.90e+00; NT HIT: gi16162197, EVALUE 2.20e+00; EST_HUMAN HIT: BE906886.1, EVALUE 3.20e+00
ttttggtaccacttcctggggacgtttcctccctcgagattgataactgagaataaccctagccatactggaatataattcctgatatcctgaaagtgtattttcacattcagatatacaactatacccaggtgtacctattcccgttaattttgggcatggcgcggtagctgaggcccatggattgaaacaaagaccgcttctgccatctgctgggcactctgaggaactcaaaggatttttccacaggaagagggggagtttgatgaatttcgtttcaaatttactttagcacttgagaatttagccaagtattaaacagattaatttttgcctttgtgaaggcttgcatgactttgatcattcagtcgttttaatgaactcaacgtggttgtttccgatttggccttgaaagccttggcatgtcgccgtgctctgagtgggagcctcgctgcctccagcttgggtttctcagttttggcagggctttccttcccactgatggaagatttacagaggaaaaaaaaatcattatgtctgaaattctgccaggatacatcagcgtatttccaggct

SEQ ID NO: 8431 - DNA, 600 bp, Homo sapiens
  MAP TO CHR18.3; EXPRESSED IN PLACENTA, SIGNAL = 0.87; EXPRESSED IN ADULT LIVER, SIGNAL = 1.1; SWISSPROT HIT: P07657, EVALUE 2.60e+00
tgccatcgttctcaaatcacctttcatatgtcagaaaaatctcattaaaaatctccatggaaatgcgtggcaattcacatattaacacaggaaaaatacttttaacagacaccagagtaatgtttatttctacttggtggggtgggtagtgattctctgccaccacacacagctcttataaacatacacattctttctttctgaaggagaaattctctaaggcagtagttttttaagtttttatatagtttggtttgcccctgagctagacttctgtcctgagtccccttgctgaaaacaaaatgaaaaaagttcctcccttgatctccctgcccagcaggagtagcaggggatgctggatgtcagcccacggaggtctcctgttgtggctgtggcctggacacctggttctggcaaggcaagcttgccaaggagtctgaaagctcagaaagctccactggacttgtggagtgctttatccagtccaccgtctccatttcctggattcccagggcctttggaagctcccctcaggatacaatgaacaccacgattcttgatattctataaattccaattccaatgtcatcccagctcaca

SEQ ID NO: 8432 - DNA, 557 bp, Homo sapiens
  MAP TO CHR18.3; EXPRESSED IN ADULT LIVER, SIGNAL = 1.6; EXPRESSED IN HELA, SIGNAL = 0.9; NT HIT: U67563.1, EVALUE 3.40e-02; SWISSPROT HIT: Q9UKF2, EVALUE 4.00e+00
ttttggcccactttgacttcattgcccttggttgttgaccctcaagatagtcttctgtgtttttcttcctgctacttttttctctagatttaaaggaatgctgtttagtcagaattcataacaaagtgctcagccagttttatttactcttctacttgaggagtagtactccaggtcctagcattttttagaaatggtaggttaggaatgctttcatttgcaacaaaaattcaatttacaggctcctttatttctcacataacaagtactctggagattatggagattcagtggtttaacattttcagtgctggcagctttacaattctctcaggtttttttaatggttgctccaattctaggcattacatttccattaaggcaggcagaaaaggggaagaggtcctggtaattatgactccctctccctctttttaaaaacataaaaactttatgagagcactccctactccccacccagtggtcttttatatgatatttataaaagtcctgaattttatgatgtggccatggtaggctgcaaaggaggctaagaa

SEQ ID NO: 8433 - DNA, 546 bp, Homo sapiens
  MAP TO CHR16.3; EXPRESSED IN HEART, SIGNAL =  13; EXPRESSED IN FETAL LIVER, SIGNAL = 4.9; EXPRESSED IN ADULT LIVER, SIGNAL =  16; SWISSPROT HIT: P13073, EVALUE 8.00e-26; NT HIT: AF017115.1, EVALUE 0.00e+00; EST_HUMAN HIT: BI758320.1, EVALUE 0.00e+00
aaccctcctgtgcaagactgcctctagacagtaggcccagaagtgagcagaggctctgtcacacacacgcttccgagagctgctgggcgcgcctgtgggtcccttcaatacccacactcgactttctcatccatggagaggctgctccaggaggccttctccttctccttcaatgccttctggctggcagacaggtgcttgacatgggccacctccggcaaggggtggtcacgccgatccatataagctgggagcgaaaagtcttcgctcttcacaacactttctgaaaaacatattgaataaatctttgaaaatccatgtaagttgagagtcaccccaaggtgatacttctgaaaaccgaaacacagacatgtgcacgccttgaaaccctggatcatctcagggggtcacagccactgtttaaacagttgcaggagtgtggtggagggggaacagaagcacttctcatcacagccaacaaaaacccaccaggggcaactgctaatgaaccctggggccaaggtgcccagaggcagcacttcctac

SEQ ID NO: 8434 - DNA, 567 bp, Homo sapiens
  MAP TO CHR14.3; EXPRESSED IN HELA, SIGNAL = 2.1; EXPRESSED IN HEART, SIGNAL = 1.9; EXPRESSED IN BONE MARROW, SIGNAL = 2.2; EXPRESSED IN ADULT LIVER, SIGNAL = 2.4; SWISSPROT HIT: P78358, EVALUE 3.20e-02; NT HIT: AJ005663.2, EVALUE 3.50e-02
caagcagggactctggctacagtgctagcagggccccaggccttctttctccagagccattgtgccatgctctggaggatgcacacacggtaagtctcttaggaattgttgacaaaacacgctgggttcccagtgtctattatcatcattcaacctgattataattagaaagaggcaggcagggctggccctaatcccaagagaatatcctgtcccccagaatcccaggactggagaaatgtctcttgggcagagggcccaagctagtgtcacagtgggcaaggagggtaaatggcagctgtggacaaaggccctggatgccctacctgtgacagtgagtcatgtaggtgactgtctcctcccattgggccttgatgtccttcagccgggccaggatcccgggcttctggtccccagggcagcatgccaagagggcttcagccatccgtagcacgaggtccaccctcacacgcccctcgggctccagctggcatattttctgttgtggacacacaagccagtttccagggttggcaaaaggcagacaggcacaaccttgggaagata

SEQ ID NO: 8435 - DNA, 577 bp, Homo sapiens
  MAP TO CHR18.3; EXPRESSED IN ADULT LIVER, SIGNAL = 0.95; EXPRESSED IN BRAIN, SIGNAL = 1.2; SWISSPROT HIT: Q03363, EVALUE 1.40e+00; EST_HUMAN HIT: BF698699.1, EVALUE 8.10e-01
ttcaccacatccattccttgcgttaagtattttgagggttctaccacatttaaaacaaaccctcttgaagtttaataatacacaaaaattcacttagagttggccaattctggaaattcttcaaacttgaaaaattcagaaaatattatatcccattgctccaaatgtaatagtatctgtcaacaggtttcctgcaggcaagtgatgtgtttaaataaatggtaaaatatattggtcggtcactgaaaaaaacaaatgagtataaggcttagtgggagtgatttgctttgtttgtttgtatctttagtaaattcagccaaagggacaggaggcaatattaacaaatgcatatttcatccatctgtatagagaattttgaaagaaaatgagaagtctcagccttccactgtgaaggtgtaaatgttctctttcacaaaattttccacgcagtcaacagtatcattgatttcttgagtattgactgtccttacacactcagatatgggataacactgattatgattagttcaggtagagatgcaatgataaatcctcggccaaaacagtcctcagtgca

SEQ ID NO: 8436 - DNA, 518 bp, Homo sapiens
  MAP TO CHR18.3; EXPRESSED IN FETAL LIVER, SIGNAL = 1.5; EXPRESSED IN ADULT LIVER, SIGNAL = 1.2; EXPRESSED IN HELA, SIGNAL = 0.89; EXPRESSED IN BONE MARROW, SIGNAL = 1.1; NT HIT: gi15791399, EVALUE 1.90e+00
aaagcccttttgacatccaggcactgatgaacgagcgagtaaatgcatgcttctgcacctggcagtttccggacaccttccaagctcagattctgcctctgctctgcctcttgggatgactgcttgattaatgagctcccattcataaagctttctgatgaggaatacgcgccatggctgtaagtggtaagtcatatcattgtttggattggcactgagacatgcaggcaaaagctttacccctgtggctagggaaatggagggataatataatcaaatctgtggattcatgctctgcaagtctgtaggcttatcgtagggggccactttgagtagaagtcagttggattcctggctgaatgttatgtgttccagttccctatgtttattaagtattttcaagattatatcttaacctaatcctttccaagcctttggaattcattctagttagctcacagatggatgaaacacagaaaaagttaaaagaaaatgcttgtggattggttttccctgaa

SEQ ID NO: 8437 - DNA, 534 bp, Homo sapiens
  MAP TO CHR19.3; EXPRESSED IN ADULT LIVER, SIGNAL = 0.99; EXPRESSED IN FETAL LIVER, SIGNAL = 1.1; SWISSPROT HIT: Q13360, EVALUE 6.50e+00; EST_HUMAN HIT: BG259372.1, EVALUE 1.00e-36; NT HIT: U37251.1, EVALUE 5.00e-41
tcccagcctgctagtgttgaacatctagcaggcctagactctaatggcttctgtgttctcctctagctctgcctgcttaggactctgcccagccaggaaggaaacctacaggaggaagaatggctgcagggtggctgacaacctggtcacaggtacacaagaaatttctctatttccaaaagcacactgccattcctgaaaagaacacatctcttgcccctgacctgaagcttcacagcccaatctgagctggcttcatcttccgcagctcccaggctgcttcatgtggaagagggaatccctgggaaaggcttctgttcccacatttgttaactttctccagatattcttccatatttttgagtatgaattccatactgtagtgagtgctgtaaagaaagacttttactaggaaaattatttatcatttctcaagtatttcttgcattcctacagtatgccctgtctatactggatctgaataagacgaaaagagtcctcacaacctaactgtgcaaagatcaagccaaccat

SEQ ID NO: 8438 - DNA, 571 bp, Homo sapiens
  MAP TO CHR18.3; EXPRESSED IN ADULT LIVER, SIGNAL = 1.1; EXPRESSED IN BRAIN, SIGNAL = 1.3; EST_HUMAN HIT: BE969022.1, EVALUE 8.00e-01; NT HIT: AJ131835.1, EVALUE 1.40e-01
atgcaaagcatcccataagctgtaggacagactgtaccacaccacactctctgaagttcttccgatgtctaatgcgtatattcattaattcccaatggttttcaaagaaaaatggaaatttctggattggcaaatgtgacggtactttttaggtcataatgagaagactccctacttgggagaaagaatagttacctccagctccctgctcttttttgctttcttagaatcagcttccaagcgtgcagatgctaatgaaaactttgcctctggttgggaagtctgggccgatgatgagcggaggacattttctccaatgatgcttatgctcaccgtgtgcagtgaacaagcctctctgtcgggtttagaactgaaaccacctctggctcgagctaaagaacttggtagagtccagcctagatcactgagtttttactcgaaggccagaccataatagcaaagaagattatgtatggctgaatcttctaatcttatattgctcactttaggaactttcagaggtagataggggactcagggcagggttctggctttgctggcatcctctagg

SEQ ID NO: 8439 - DNA, 564 bp, Homo sapiens
  MAP TO CHR19.3; EXPRESSED IN HELA, SIGNAL = 1.9; EXPRESSED IN FETAL LIVER, SIGNAL = 1.8; EXPRESSED IN BRAIN, SIGNAL = 2.4; EXPRESSED IN ADULT LIVER, SIGNAL = 1.7; NT HIT: gi4758173, EVALUE 2.10e+00; SWISSPROT HIT: P40603, EVALUE 1.40e-02; EST_HUMAN HIT: W00344.1, EVALUE 3.10e+00
acagcgtgatgaatgtagcgttatcatcagtaatgtaattattaacacctgtgctcccaactcactctccttcccaagtcctaggcgttctcctccttagaatgatgatccacaaggcaggggaccggccacctccctcggaagggcctggacacctggggtggaggtggcggataaagagaagccgatcaggcccccccactccacagcctgaatgggaggatctgctggacgtggcggatgagctgcgagagagggcgccccactccagctccagacagaggggtgggaacgtgaccccgacccggggcgggtgagagggcgggctctggggaaagggctctagaaggtgccgggaggcgggaggggggcttcgggagggcgagttagccgggatcgggcttgaggggccctacgaaattcggtttgggggcgtgcccggtcggggcggaccttagtggggggttgggcttcgtgggggcaggacgcagtcccggggcgtctatagagcaggcttttgtggagggctctaagggggcgggccctaagggagctgggctcttt

SEQ ID NO: 8440 - DNA, 571 bp, Homo sapiens
  MAP TO CHR18.3; EXPRESSED IN ADULT LIVER, SIGNAL = 2.1; EXPRESSED IN LUNG, SIGNAL = 1.9; EXPRESSED IN BONE MARROW, SIGNAL = 1.9; EXPRESSED IN FETAL LIVER, SIGNAL = 2.2; SWISSPROT HIT: Q03946, EVALUE 2.40e+00; EST_HUMAN HIT: AA421600.1, EVALUE 2.00e-01; NT HIT: M55107.1, EVALUE 2.20e+00
agccactgatgaaggctttgataatataccaaatcccttctgaaattataaagatttaatgggaacactttattttctccagcaggcttctgctggcaagagaacctgggaaacagaaacagggatgtgatcattgtgtctaaggctttggggcagcccaagctaccaccttccttttctctcttcaaaaacttagagaggtaatgttgtcctgggttttaaataaaggaccacaccaacatacatacatgtacacagttttcaattcaagtacttaaaagtataagaacttgacctcataaaagctctcttcctggtttcctaattttgtcagtttttaaattttttttgtttgtttcaaatactctccatcaactctgtgagaggccatggccctacctactgctaacccagtgatgttgacagaaataaaacatgaaatctcatagctgtggtctactaatgaattcctacttggtaagagtgagactcttgccccctgatatggccttgccagaattaaaaaaaaaaaatgcagagaacctgaagcactgagcttctccaatctggg

SEQ ID NO: 8441 - DNA, 528 bp, Homo sapiens
  MAP TO CHR14.3; EXPRESSED IN FETAL LIVER, SIGNAL = 5.5; EXPRESSED IN ADULT LIVER, SIGNAL = 2.3; SWISSPROT HIT: P25490, EVALUE 1.00e-27; EST_HUMAN HIT: BF741922.1, EVALUE 1.00e-107; NT HIT: Z14077.1, EVALUE 6.00e-84
gttggggaggtggttttgttttaatatgtcagtaaaggctgttaaatggttgaatcctttctaacagtttgcaatgtgaacttctaagctgctttctctgttttaagggctgcacaaagatgttcagggataactcggccatgagaaaacatctgcacacccacggtcccagagtccacgtctgtgcagaatgtggcaaagcttttgttgagagttcaaaactaaaacgacaccaactggttcatactggagagaagccctttcaggtagagccagttccctctcttccccaaactgccttgcctgtctgaacactgcaagtgtaggtggtgtggtgatgaggcaggaggcgccagcccagagactcagggtcttattactccttggtgagaaacaaaacttctcctggggagtcgcttagaagggttgccggggctctggacatccttgtctatactctgtggtactgggtacgcaatgtattggtgttgatggagtacactttatggcaggaggagaacaggattg

SEQ ID NO: 8442 - DNA, 531 bp, Homo sapiens
  MAP TO CHR14.3; EXPRESSED IN ADULT LIVER, SIGNAL = 2.8; SWISSPROT HIT: P27790, EVALUE 2.20e+00; EST_HUMAN HIT: BF035327.1, EVALUE 1.00e-120; NT HIT: AJ271735.1, EVALUE 8.00e-40
ctaggcctcttgtgccaaacagccaagttgtgaatgcaaaggagaagttcttgaaggaaagtataggtgctacttcattgaacacatgaatgataagaaagtgaaatggccttattgttgatatggagaaaattttagtggtctggatagaagatgaaaccagccacagcattctcttaagccaacatctaatccagagcaaagccctcactctcttcaagtctatgaaggatgagagaggtgaggaagctgcaggagaaaagtttgatgctagcagaggttggttcatgaggtttagataaagaagtcatctccctaaaaatgcaagatgaatcagcaggtgctgatgtagaagctgcagcaagttatccagaacgtctagctaagctcattgatgaaggtggctacactaaacagcagattttcagtgtagacaaaaacagccttctgttgcaagaagaagccatctaggactttgatagctagagagaagtcaatgcctgacttcaaagcttcaaagggcagactgac

SEQ ID NO: 8443 - DNA, 521 bp, Homo sapiens
  MAP TO CHR18.3; EXPRESSED IN FETAL LIVER, SIGNAL = 1.7; EXPRESSED IN ADULT LIVER, SIGNAL = 1.5; EXPRESSED IN BRAIN, SIGNAL = 1.3; SWISSPROT HIT: P19273, EVALUE 1.60e+00; EST_HUMAN HIT: BE154850.1, EVALUE 1.80e-01
attgcaatttccatccaaggcaacatgcattttgtcaggctgcggttcagccattaggttgctaattaagttaacaagtgctgtgtgcagcttaatttggcaacaagctatcttgtagagtgttcaataagaaaaacagcatttctgtaatgattctgtttttaagcttggaattaagctaaaaaccacaatggtcctcatgatgggatgtctgatgcatgcattcaaaatgcagaaagtgaggatatactattttgcacattggaaactcacaccttttatttacagatttacttcactgttagctgaaatagggctaattacctgtgtacattttaaattcatcacaattcaaatgaaatgtgtttctctgtcttcttgcagctgtcattttgcccaactgcaaattgacttttagtaatgaatttccattgcagttggctaattgtgggtgtgatttatcctcttgtcctccgttgatctctcttccagattctagaggctaaaaaggaaatgcattg

SEQ ID NO: 8444 - DNA, 562 bp, Homo sapiens
  MAP TO CHR16.3; EXPRESSED IN BONE MARROW, SIGNAL = 1.4; EXPRESSED IN HEART, SIGNAL = 1.8; EXPRESSED IN LUNG, SIGNAL = 1.3; EXPRESSED IN ADULT LIVER, SIGNAL =   2; EXPRESSED IN PLACENTA, SIGNAL = 6.5; SWISSPROT HIT: P33151, EVALUE 4.00e-42; NT HIT: gi15317614, EVALUE 0.00e+00; EST_HUMAN HIT: AA715946.1, EVALUE 1.00e-95
tgcactcagatggctgaaacaagaggcgctgggtgcaaagggcagaaaagcagcccagcgagcacgcaggctggtgcagtcagggagggcttcctggaggagccaggtttccccatctgtgcagatggcaaagcctgactccgaggccttggtgtttccagataacacggccaacatcacagtcaagtatgggcagtttgaccgggagcataccaaggtccacttcctacccgtggtcatctcagacaatgggatgccaagtcgcacgggcaccagcacgctgaccgtggccgtgtgcaagtgcaacgagcagggcgagttcaccttctgcgaggatatggccgcccaggtgggcgtgagcatccaggcagtggtagccatcttactctgcatcctcaccatcacaggtcagtgctgggcagggtggggagaagacacagtgggtggaaggggatggaaggtgttgggaggcggggaggcttcacaggaaaagtagaggccagaggttcaggcccaaccctgcctccaatctgcaatgcagcccttagccagttcatgtgca

SEQ ID NO: 8445 - DNA, 525 bp, Homo sapiens
  MAP TO CHR19.3; EXPRESSED IN ADULT LIVER, SIGNAL = 5.9; EXPRESSED IN BRAIN, SIGNAL = 1.2; EXPRESSED IN PLACENTA, SIGNAL =   2; EXPRESSED IN HEART, SIGNAL = 3.4; SWISSPROT HIT: Q13011, EVALUE 3.00e-06; NT HIT: AF030248.1, EVALUE 1.00e-112; EST_HUMAN HIT: BI760366.1, EVALUE 1.00e-57
agacccctttactgcatcccccggctccatcctgcctcccaccctcaccagtatggccccaggagcaatctctgcctctgacacctgccagcctcaaccccacctcataccttacccactcacaacttcacctcttgacttcctctatgggcaagtcttactttgtcgggttcaactccgactcttccatgaagccctcgaggctcactccaggccccccaacctcaccccactgcccagctctaagcaggagctcgggaggatgactcaccttcacctggaagaaagcatcctgggcacagtaccggatgtcacaggcggtgacaaggtccacacctaggaggtagaggccagggatgctgaatgaccaccagaaccaaccctggctcccgggaggtggggctgcctcttgggacacagtctggcccatgacagagctgaggctggatgccagtggccgcggcatcggagcagcagccccacctggggagcacccgagcaggaggatagccgcagactcacctc

SEQ ID NO: 8446 - DNA, 501 bp, Homo sapiens
  MAP TO CHR19.3; EXPRESSED IN HELA, SIGNAL = 5.7; EXPRESSED IN BONE MARROW, SIGNAL = 2.8; EXPRESSED IN FETAL LIVER, SIGNAL = 2.7; EXPRESSED IN LUNG, SIGNAL = 3.6; EXPRESSED IN ADULT LIVER, SIGNAL = 2.2; NT HIT: L08835.1, EVALUE 0.00e+00; EST_HUMAN HIT: BE792420.1, EVALUE 0.00e+00; SWISSPROT HIT: Q09013, EVALUE 1.00e-59
cccagaaggtaggcactgtccttactccaactttatggagggagcatggggaggttcccgcagccgagcaggggccacaggtacctaccccgcccccgctcaccatggcagtgagcccgtcctccaccaagtcgaagttgcatgtgtcggtggcaccttcgaaatccggtgtaaaggggggcacgctgtcccggagaccatcccagtcgaggccaaagaagaagggatgtgtccggaagtcgcctgctccaccccggcccagccgtgtctccgggggacacagcaaccgctgaatgaagtctcgagcctcctcagggaccccttcgtccaccagcggcagagagaggtgctcctgctcagagggagaggaggcgatagcctgggagcgcctaccgggagaggccaggtctccctgcggccgtgctcaccttgtagtggacgatcttgccataggtctccgccgtggaatccgcgtagaagggcgtctgcccatagaacatt

SEQ ID NO: 8447 - DNA, 507 bp, Homo sapiens
  MAP TO CHR19.3; EXPRESSED IN FETAL LIVER, SIGNAL = 3.6; EXPRESSED IN ADULT LIVER, SIGNAL = 2.6; EXPRESSED IN HELA, SIGNAL = 4.5; EXPRESSED IN LUNG, SIGNAL = 3.7; SWISSPROT HIT: P50895, EVALUE 4.00e-24; NT HIT: gi15301706, EVALUE 1.00e-84; EST_HUMAN HIT: BE816336.1, EVALUE 2.00e-84
aaggcagagtgtttgggatgacagagcaacttcagggctgtagggaggagggcgcagaggcactgatgccagggcccctcctgcccgcccgttcacccagggctctcacaggccacgcgcagctccagcgtcttggagagctgcacgtcatctgccgcgtcgtaatcctccactctgcagccataggtcccgctctggccccgggtcactccctccagggtcaagttcccctcgagattcacattcagcacttcctcctgctcatcctgggagacgggggacgaggaaccaggctcagaagccaccccggttcagcgggctcatgctaggtcagaagccaccaggttagtgtcatgctaagccagaatcaggggtcaggggccatcaagtcaggtggcatgctaagtcctgactctctcaaatcaggggtcagaggtccttttagttcgtgggccaccagatcaggtggctgcctaagccatggggactcccaggtcccacattaga

SEQ ID NO: 8448 - DNA, 504 bp, Homo sapiens
  MAP TO CHR14.3; EXPRESSED IN ADULT LIVER, SIGNAL = 0.93; SWISSPROT HIT: Q16342, EVALUE 3.50e+00; NT HIT: AF113511.1, EVALUE 4.80e-01; EST_HUMAN HIT: BE546137.1, EVALUE 1.80e-01
ggaaaccaagaaaaggaggccagggagctgggagccagggaaaatgggtgatctagtaggtgcctgtttaacattggaagaatagaaaatctaaccatagcttttatttaaacaaatatgttttcccctcaatgcaactcaatcccaggcctgcagcaagtggttcccctgcccagagtgagacagacatgccaagggccctttaaaaccaacctggcctgtggcccagtgtgcttggtgtctgcaaggagcccagggctagcgctggagctgacactgaacaccacaggctcgtagggaaataccaccgagtaatagatttttatccatgctctccactgaatcctttccagattgtagtggggcggctgttggtacaagtcaaacgtggattcagctggcagtgggaagggattcagagatggagaggaagaggccacaggcagggatggggaggagagggggcgggggaaaaacctttagggaaagagagatgggggaagg

SEQ ID NO: 8449 - DNA, 596 bp, Homo sapiens
  MAP TO CHR19.3; EXPRESSED IN BRAIN, SIGNAL = 1.6; EXPRESSED IN ADULT LIVER, SIGNAL = 2.5; EXPRESSED IN PLACENTA, SIGNAL = 1.7; NT HIT: gi15302551, EVALUE 1.00e-75; EST_HUMAN HIT: AI568387.1, EVALUE 0.00e+00; SWISSPROT HIT: P14138, EVALUE 2.60e+00
cctcccaacacccacatatccccagtcagagacagaacaaaggcaaaaatcttttatttcaacttttagggaagccagcagcctcttctccacatctcagaagcacaaggagacaccctgatcaagaaggcaccggcagaagcggcatggccaccattaattgctgaggagacagagcaaagagaatgaggatccaggacccagaagtccagctcccagcccccctccctgggagacagagtccaggccccgccaatgtcccagcttccccaagcccctcccccaggcacctttctcttccggtggaaggctgccttgctctcatgagagttgatctgcagcgggatataagcgtctagatgatacagctgctgggggccccccatcaccaggcggttctccccgatctccagcgacagccccagggctccatcctggagaggtggcggaatcaggtcaccctccccagcaacaggatgatcacctggaccaggcatggtagcctcacacgctgggaaactatatttgaagggtctaatctcccaggaagagacagaagacagcaattacaagtctcaacgaccgagcacttacaa

SEQ ID NO: 8450 - DNA, 507 bp, Homo sapiens
  MAP TO CHR16.3; EXPRESSED IN BONE MARROW, SIGNAL = 1.2; EXPRESSED IN ADULT LIVER, SIGNAL = 1.1; EXPRESSED IN PLACENTA, SIGNAL = 1.2; EST_HUMAN HIT: BI755006.1, EVALUE 1.00e-73; SWISSPROT HIT: P36113, EVALUE 2.70e+00
gtccttggacaatcgacccctcccacagcaccacaaaagccgtctctcagtggggtgacatccaatcaatgatcaggcaggcaacaggtgtcacaagactttatacttgatagatagagtgagggaaaccacccaggaggagggacccctcactccctccctgcctcttccccacctgtctcggagcagggagccgccgactgtttggcaccgttttggagagcaaagtatgcatattgctggacacgtcagggtccatgggcccctacctgcagcaggtgaagacagagctggttttgctgatttgggaacagctgcggaagtgctgtgacaggtaggaggcgagggctgatcaggaagatcaaaggggcagttcctggggcttccctggccaagcacgccccctcttctcagtgccaacaggcctggagtttctgagatgctcttctgagtaacgcgtttgagtaggaaagagcactgtattctgctctgctgtgaaggaaatca

SEQ ID NO: 8451 - DNA, 502 bp, Homo sapiens
  MAP TO CHR19.3; EXPRESSED IN FETAL LIVER, SIGNAL = 1.7; EXPRESSED IN ADULT LIVER, SIGNAL = 2.4; SWISSPROT HIT: P02452, EVALUE 1.80e-01; NT HIT: gi14763360, EVALUE 3.00e-67
tccagcactttaagagaaattggctctcacactgtggaattctctctatcagcctcaaagtccagatttggaaagggagtctcagcgaggggcagcagctggcccaacccggaggcagagcggcaactgaactctagccggaaagagccagggttatgtgcacatgggaggtggggaggacaggggctgtatgtgaccctcacatctgttcctcgcgccccagatggcttctgctgcctgctccatggaccccatcgacagctttgagctcctggatctcctgtttgaccggcaggacggcatcctgagacacgtggagctgggcgagggctggggtcacgtcaaggaccaggtgaggagtccactgcagttgccccgggaccacagagctccaggcgggccaactgaggccccacgaaggtgctagacccgccagagcccagccagagctctgctcagctctacgatgcactaatgggtcacggtgcttgattttagccaa

SEQ ID NO: 8452 - DNA, 511 bp, Homo sapiens
  MAP TO CHR18.3; EXPRESSED IN BRAIN, SIGNAL = 0.99; EXPRESSED IN ADULT LIVER, SIGNAL = 1.3; EXPRESSED IN PLACENTA, SIGNAL = 1.1; SWISSPROT HIT: P42497, EVALUE 1.20e+00; EST_HUMAN HIT: AI031822.1, EVALUE 2.80e+00
taaatccccacttggctttgtctttgtaagaagaaaatacctaattgtgtctcagattcacattaacttggtccatatctaattggaaaaaattttttgttattccacagaatcattgactgtaataatccatagattcaccacatctaggctattaaaacccactctaccaaactcggacagcatgacaattgtagttgattaatactgtggtgccattctgaataagcttccaatcttgtcctagtcaaattcattgcttgctacatggctttcccggttaattctgaattcagcaaagagctccaatgggctgatgttgagcagaggtcagcggctgccagaactgtcatacttactactgtctccatgagccagactggaaaggtacacagagctgagagctcaggtataccctgatcccactatcagatctaactgggctcccaccatcaccaccctattgcagaaagaaatcatgagtgaccactcagctcaaggcttctctgct

SEQ ID NO: 8453 - DNA, 552 bp, Homo sapiens
  MAP TO CHR16.3; EXPRESSED IN BONE MARROW, SIGNAL = 0.64; EXPRESSED IN ADULT LIVER, SIGNAL = 1.1; SWISSPROT HIT: Q15765, EVALUE 3.00e-04; NT HIT: gi15312809, EVALUE 4.00e-08; EST_HUMAN HIT: BG716003.1, EVALUE 5.00e-08
gctgggaaatgtgacaaaaggttaaaattctactagttcataaaatatttgaagctaactttgtttttataaataaaattgtatttacaatttaagttttagttctcatccttgctgttataaaagttattctaagttatgtcagtctttgagggtaaatgtagagtatttaaaatagcttatatttggaaaactgaacagtgtttgttgtcatgattttactttgttcttgaccacattggtcccagagaaagtcaaggtcttcacccacggattcaagattcttgtggcagctgctgaattcttttccaacaatgcttgggcctcatcagcgtcatgtttatgcactaccccagccccaaccacagacatgggcaggaggaacagagctctaccgtgtagcgtcactgccagtaagagtctggctctcccatgaagcattactcttcctctgcatgtatcttagaatttcaaaagccatttggcctccatttctttagattgtggataagatccataaacttgtactggggtcactgttcctccagcctc

SEQ ID NO: 8454 - DNA, 576 bp, Homo sapiens
  MAP TO CHR18.3; EXPRESSED IN HELA, SIGNAL = 1.2; EXPRESSED IN LUNG, SIGNAL = 1.2; EXPRESSED IN BONE MARROW, SIGNAL = 1.3; EXPRESSED IN ADULT LIVER, SIGNAL = 1.4; SWISSPROT HIT: P20471, EVALUE 3.20e+00; NT HIT: AF179268.1, EVALUE 2.20e+00; EST_HUMAN HIT: AW190079.1, EVALUE 8.10e-01
gtcttgccctctgctttgactagactcaggtgccttcctggtatggacaccctaagttcctactttgtttttgccatccccttcccatgacacgacttctgcctcttactcttaaacctaggatgtgaggctccacttcccagatgccacctggccagtcttctatgtgcttctcaccccgaattattccctgccaggtgctgtgcccgccaattgggatccctcccttcctcttgaactcttcctatgtggctctgattccaagagtctagatggtgattactgttgccaaaccccttggataccagattctgctcctcagctatactctcctcttgcatcaacaatgtttcattttctcctacccaggcaggagacttgattcccacttctctctgagagccctgttctgctaaaagggtgggtggtgctctgtgacatcctggaggtggacagttcacagcaggaggttataaccaagttgtcacgacttacctaagggtagcttcccagcctgtgtgcggctacaccctcaggtgaccagggggccctggggcaccagagtcccagaccagt

SEQ ID NO: 8455 - DNA, 582 bp, Homo sapiens
  MAP TO CHR18.3; EXPRESSED IN ADULT LIVER, SIGNAL = 1.4; EXPRESSED IN HELA, SIGNAL = 3.6; EXPRESSED IN LUNG, SIGNAL = 2.7; EXPRESSED IN FETAL LIVER, SIGNAL = 1.8; SWISSPROT HIT: P98195, EVALUE 3.00e-24; NT HIT: gi15304151, EVALUE 9.00e-40; EST_HUMAN HIT: AW362443.1, EVALUE 2.00e-54
gtgcacatagtcacctccccctctgtccccacagcccatgcagtccagctctgtggagtccacacacagcacgtacacgtgtgcacacaggcgcctccccctctgtccccagagccgatacactcaagccaagctgagcatgcacgacaggtccctcaaggtggccgcggtagtcgagagcctggagagggagatggaactgctgtgcctcaccggcgtggaggaccagctgcaggcagacgtgcggcccacgctggagatgctgcgcaacgccgggatcaaggtactgcaggctcacctctgctggcgcgcgctgcttttgctgaagcaaacagtgcttttccttgggcatggtgatttgtgaaactcctgtggggtcatggatgtgagagagctctgtaagcagagctgcccaccagctcccctccttctttagggacatctgcagttggtgcacacacaaatccccacgccacccttactccagactttcctttttacaccttttccctctctggataccccagcctttttaaagaggagtcctggtcccagccctggcgatgtcaaactgccacatgc

SEQ ID NO: 8456 - DNA, 592 bp, Homo sapiens
  MAP TO CHR16.3; EXPRESSED IN ADULT LIVER, SIGNAL = 4.4; EXPRESSED IN HELA, SIGNAL = 3.4; EXPRESSED IN LUNG, SIGNAL =   4; SWISSPROT HIT: Q9Y6Q1, EVALUE 4.40e+00; NT HIT: Z97340.2, EVALUE 3.60e-02; EST_HUMAN HIT: BF839210.1, EVALUE 8.30e-01
ttgcagggttagggaaactgacttgatgtccacagggatgtccaactgatgatgacccaactcactctggctcagctaaaaatcccagctagtctccagcatgaagactgtgtcaccccaaagctaagtagggttactggctctctctttctccctttttagagggtttctgcaacttagtgagtccaaggcactcaaataatcccatctttggtgcaaacttaagagagccagggcttaaggcaagcccctgagatggccctgcttgcagagagacaaaactgggcactgatgtgctaacccactgtgcagtctttatactgtatcgtccagaagtctgtatggcaagtgtgtttatagcatgggtcctgtcattctcaactaaactttttgtcagaattttggagttaaagaactcctttacgtgttgttatatgttgacatctaagttgggaggatcctatgaaagcttaaagggaagattgtggtacccagactgtgaaaagcaggtgagtactaacactcagactgtttcctagtttttctcatctggaagattaacacagtccagagtcccaggcttgtttttgaa

SEQ ID NO: 8457 - DNA, 528 bp, Homo sapiens
  MAP TO CHR18.3; EXPRESSED IN ADULT LIVER, SIGNAL = 1.2; EXPRESSED IN HELA, SIGNAL = 1.2; SWISSPROT HIT: P07204, EVALUE 1.30e+00; NT HIT: AP001519.1, EVALUE 2.00e+00; EST_HUMAN HIT: R88588.1, EVALUE 7.40e-01
aggaaatcccaccaggaaactagagtggctacccagaacgggtggaaattgaaaaggggagatcttttaagagaagaccatagaaataagttcagggagcctttgaacttgaattgctcagctgtctattgtatctatttattttacttaacaaggttccaaactctcagtctcaaggagactggaatataccagtgagtgagctgggcttctctctagagtgccaggcaatgagctagactcacggcttctgcttcccagtttctcctcttcaggagagttcccacaaggccagcaggtgctggccactggtgattcctgacaattccctgcacactggatccgaagtttagattgcttgccttctactgtcaagaccacctttgcctttgccctttgcaacatggaagcaagctcctcctcttttggtgcacaggcccacatgtatctagttgtgctttggtccatgcaagcctttctacatgatactggggaaaggggaggcgtgcatctgcccagactctgatg

SEQ ID NO: 8458 - DNA, 539 bp, Homo sapiens
  MAP TO CHR16.3; EXPRESSED IN HELA, SIGNAL =   1; EXPRESSED IN ADULT LIVER, SIGNAL = 1.3; SWISSPROT HIT: Q01022, EVALUE 7.70e-01; EST_HUMAN HIT: AI654903.1, EVALUE 3.00e-86
ttccttggtctggaatgagctttctatggagattaaaaagatgttaaattgaacagtcttggttaataaatgaagaagcaaagccagaaaccctgtttaaagaactaacaaaaaaggtcatgaatgatctggtggttgttatattttcttgtttacccgaggagaagactatgctcaagcatgtattgaatccagtgatagccagaatgtcatccatactgctagcagccattagtaaggttggaatgtcttcctcaacaccatatccattttcttgcaacaccatcgtgtaaaggacaacaacagcaagagagacagcacctagaacaaaactgaaagaaagaatgaaaattaatttaaaagcatctttttaatcaagtagtgttttataagtacaaatagtttataataaatgtataacaaacattgtttagaagaatttcaaatttgagtgaatgcaatttaatggtgataaaacttttcatgcattgtttagtgctggctaaaattttatacagacgtggtttaaaatgttgggc

SEQ ID NO: 8459 - DNA, 501 bp, Homo sapiens
  MAP TO CHR19.3; EXPRESSED IN PLACENTA, SIGNAL = 1.4; EXPRESSED IN BONE MARROW, SIGNAL = 0.81; EXPRESSED IN ADULT LIVER, SIGNAL = 1.3; SWISSPROT HIT: Q13094, EVALUE 9.10e-01; EST_HUMAN HIT: AA224102.1, EVALUE 2.00e-04
aaaatgagtttgctccctgctcacagtagacaccagaatagattcccgatggggcagacggtgtcagccggggccatcctcccagagtgacctagaggactgggtgaggagggtctctagagcactgagggtgcaggacacagagccaaccgtctgattgttccttccccctccttgacctcggctcacagagaccttgaaccctcagggtcaagcaggcctgcccctttgttctgtgtgccccagggtgcagtggagcctgttccaggtcacgcccggcctggccgtcatcagtctcgtggctctgaagcagccacgtcactcccccagtcccggcacctcccctgcgcctgcacctgggtgagagcccgtccaggcctctctgcccccttcctttgcaatcagcactttgctggtgacatatttagatggttgctgtggtgatgagtgaaggctgaggttgacaacttcagcgatggcacaaaggacagggctgtgttt

SEQ ID NO: 8460 - DNA, 528 bp, Homo sapiens
  MAP TO CHR18.3; EXPRESSED IN ADULT LIVER, SIGNAL = 0.92; EXPRESSED IN HELA, SIGNAL = 1.2; SWISSPROT HIT: Q64446, EVALUE 2.20e+00; EST_HUMAN HIT: AL581127.1, EVALUE 4.70e-02
ctggcataccccttcagaactctcatctggtagctgactccatggaaacacttacctgtggcttaaattaagacatttgaactgggaagcaaatgtttttctttcccttttactctaaccaaaacctgcaatgagtcacgtctcacccactccatgctcacctggcccttctggccacatggagcaaagtcaacaatcaaggcccaccacatgcagcagctgtcaaagcagaagtcctcagtcattgaacagctgagtattatcatagatcctagggttcccacagtgcatatgtaggggaagcagcttcttctcaccaccatggtggggatctgaaaacccagtacacgtgaaaatctcgccttgacccacttccccatccaagggcagagtttgcagttcagaatggtgcagctccctctctccctctcagcccatcaggccctttggtgactcagtaaaccttgccaaaactaggctctctgttctcttctctacttggactgacccaagagtccatcctccctt

SEQ ID NO: 8461 - DNA, 570 bp, Homo sapiens
  MAP TO CHR16.3; EXPRESSED IN BRAIN, SIGNAL = 2.2; EXPRESSED IN ADULT LIVER, SIGNAL = 1.6; SWISSPROT HIT: P49002, EVALUE 1.90e+00
acacaagcacaaactcgctgtcacaaagagagggaaagaccgattttcccagaaatgggtggaggctttcagtttgggaggccaagtcccagggtgtgtaacgtcttgagggtcaatatccagtttcccatgcgttcctttaggtctgaatctctctccctctgcagagctcctgagcccctgacaatgacagacaggccttggaaacggtccctgtgctttagacaaacaaaagcaaaaagaatgaagtgccactgaccctgcatttggcgaatgttcgaggcatccagatgaagcctctttggcaaaataacctgaggtgccacagacctggatcagagctggggcttggcaggtgggaagagtgaggctatgaacatcgggggtccaacaaacatgtgggtaggggttgtggggacaggtggaaggagctgatctaggagctgctgctgagtcagaagcactgagacaaggggctttgacactggtgtgggagagggtgaagacagtttcaggcagctggctgttggggtggaacaggagagagaaggaagttagggctggacacca

SEQ ID NO: 8462 - DNA, 566 bp, Homo sapiens
  MAP TO CHR16.3; EXPRESSED IN ADULT LIVER, SIGNAL =   1; EXPRESSED IN PLACENTA, SIGNAL = 0.93; NT HIT: U18108.1, EVALUE 6.00e-07; SWISSPROT HIT: P26864, EVALUE 4.80e-01; EST_HUMAN HIT: BE538437.1, EVALUE 5.10e-02
ttggagtgtcttgtgtttcctgatataaatatgtcacaaaattattttaaatagaatgagaaataaaacccaaacttactcaaaacaccaattccttggaaattattttgagagctgggagttcatgaagaactccaaattattattccaacacctcattgccattgtcagtctatgagaaaatcagcaccaatcacacatcacaagccaaatcagtaaaccaagagtcttctattgaagatcttaggatctcaggcagatgctgaagacactgtctcagtagcacccagaagatctcagagcttgtccatggggcctgctggatactcacatgggacatccagcggtcacttcatcagagcccccagtgggctgtgctagtgcctgatgaaaccaggatgaggcaaaggcatctgctcagtgtcatagacagtaatggtcccagaaatgatcccaattgtctccatgctaatcaaatgtgggttcactgtgaggagcatgtcctgtgggtgcttgttcttcagtgaaaggacctctgtctacaaagtgtttggaagtggagcagg

SEQ ID NO: 8463 - DNA, 590 bp, Homo sapiens
  MAP TO CHR16.3; EXPRESSED IN ADULT LIVER, SIGNAL = 1.8; EXPRESSED IN PLACENTA, SIGNAL = 2.3; SWISSPROT HIT: P42744, EVALUE 2.00e-07; EST_HUMAN HIT: AA353343.1, EVALUE 5.00e-70; NT HIT: gi16164681, EVALUE 3.00e-70
ttcatttgatttctgacaggatgataaaatgtttatctctaatataatcagactttttctattacatagtttgaaaacagtgacatacacgttttgcagttttatatatttgcctgaatctgcaatcatatcaggaattgtgcctcgaacaggtaaatttccttgaccctctttggccacaaattcctttaaggcacgagctaaaatccaaaatgatggagtctaaaagaataagaaaaaattaacattaagtggcgttttactttgacccaaagttttagcagcaatgtttttacttttgttgttgttacctgtttggtgatatttatgcagcgatcatcattaaatatatcttcaatactgcttgggatctaacaaaggaacatgaaacatttacttacacagtattaagaattcgcccatctttattttcagtgctatttcttcagatatgttctttgaattctcaaattgtaatcaaatacaaacttctgattggtttataattttatttagaatcagtaccatatgaagatttgatggggaaagaatggaagaaagacctctccggcccactgttgctaccattt

SEQ ID NO: 8464 - DNA, 511 bp, Homo sapiens
  MAP TO CHR14.3; EXPRESSED IN ADULT LIVER, SIGNAL = 0.97; EXPRESSED IN PLACENTA, SIGNAL = 1.3; NT HIT: AB004933.1, EVALUE 1.20e-01; EST_HUMAN HIT: AL573793.1, EVALUE 3.00e-12
gcaattgctgagctttttccagtaacagaaaatcaggatggtggtgtgctactaataaaggggtgagaatgagaaccagcaggagcaggtccgtggcaacctaaggtgattatgaaaagagaaactggtcacaaagtaagctgactctggaacttctgatggtgtacaagttagggttaaaatagtgataacaatcagagcaactgtgagtaaaatttcaaatactaggaccactttacattgaagtaaaaagatgttaagggagcattacttatcttttcatttataaaggattccagattgtccagtgcctcacaagtgtattatggagctgaaggtgctgattctgacgctggtgtttcagggcctttccatggccttatcccagtgtgatgtatctagttggaaatctctagtacttaatgtctatgaaggtacatgatggaacagtgaagggggtctttccagactggagttagttgggaatttcgggttccatccttccaagctt

SEQ ID NO: 8465 - DNA, 589 bp, Homo sapiens
  MAP TO CHR14.3; EXPRESSED IN ADULT LIVER, SIGNAL = 2.1; EXPRESSED IN BONE MARROW, SIGNAL = 1.4; SWISSPROT HIT: P51584, EVALUE 3.30e+00; NT HIT: AJ272067.1, EVALUE 5.60e-01
tccctggctctacaaccaaccatgactccccattgtctagttaatgactgtgccctaacttcactttaagggcttgaaggcagagaagaatatcatttgccttgcatgtagtaaggaatcagtaatgtttgttgggagagggtttccgctctcagagtgggtgaactgagtccctaaggaatggaagtgcagtcacctacagcccacatctgggggtttgatccaagctcttctgcctccccagccatagcctggccaggagcggacctggatctggggccctgcatccgcacacaaggctagggttggtttcccttggatccactgggcctgcaaatgcagtgagccctattttgagctccagccttggtccacatcagagtcaagagaggacacttggccattgcccagacaggcagtgaccgcagttataatgtgtactctgatgagttcaggccaggcagcagacgtgacgtcatggtcctcattcatcatggggctgtggccaaaaccttggctcccatggctcaggtgggaagcctgaggccagcagagactacccatgatctggcatcttgggacagagaac

SEQ ID NO: 8466 - DNA, 543 bp, Homo sapiens
  MAP TO CHR14.3; EXPRESSED IN FETAL LIVER, SIGNAL = 1.1; EXPRESSED IN BONE MARROW, SIGNAL = 0.91; EXPRESSED IN ADULT LIVER, SIGNAL =   1; EXPRESSED IN HELA, SIGNAL = 1.1; EST_HUMAN HIT: AI311787.1, EVALUE 1.90e-01; SWISSPROT HIT: Q9Z408, EVALUE 2.30e+00; NT HIT: AJ271369.1, EVALUE 3.30e-02
ccagggctctgagtagcttgtaaaacttgggctttccaattgggactccccctctctcagaatgtatgaggttgggaggcacactctccaccacaggatccctgatcctccactctctccacttctaataccatatcctcccagcagcttccacaataatggacacattttcagctttctcaggtcgggcaacttatcaaagagaactcggtgggctcacgcagagctgcaagtgaatcttagcagcttcctgcacaagtacatcatgcagggacttgtgctccattttcgtggattatgggctccgccagtccctgggaaatgaagttactatccaatatatgcagctctgctgagctgttgaaactttctaaggcaaacagattttcttcttttatttctctccaaagtttattatcattttggggaggatggagatggaacgcacaattcaatgccaccagaatgtatagggctaagtaaatctgcaacgttgttattagctgtaagataaaaaaaaaaagtgatggaaccacatgcatc

SEQ ID NO: 8467 - DNA, 594 bp, Homo sapiens
  MAP TO CHR14.3; EXPRESSED IN HELA, SIGNAL = 1.7; EXPRESSED IN LUNG, SIGNAL = 1.9; EXPRESSED IN FETAL LIVER, SIGNAL = 1.8; EXPRESSED IN BONE MARROW, SIGNAL = 2.5; EXPRESSED IN ADULT LIVER, SIGNAL = 1.3; NT HIT: M65294.1, EVALUE 5.70e-01; EST_HUMAN HIT: BI822317.1, EVALUE 0.00e+00; SWISSPROT HIT: Q9QZZ4, EVALUE 5.10e-01
cgaaggcttggagagcatacgaggcggaatccggatcgagtgagttccttgagccgcttgcgtgggacgcagggagagggcgaataacgccctcaggcgctgaatgcaggggcaaggagccagcgagggtggctggagcaggccttgccagctgttaccaagtctctccacaggcttgggggcttggggcctcctggaaagatccctccgccgcgctgaccagtacggggctcgctcccgcactttgaaggctgccgcggtctttcgtcatttataatcaagcccaagatcaaggttgcaagctgaggtcggggtactgacaacgggaatgaagccataggggaagaggataactgggacgggctggacccatacttgatacccgggaaactcctagagcgtgtggtgctcctgccagcggcagttactggtggagctgaggccaccgctactgtcgtcgttggcgctttgcttctggaacctcccagcaagatggcactcactgtctgttcccttccgattagcacccccagccgcgctccctcctccccgggatacgtattagtcacatactgtggggagaagatgggctat

SEQ ID NO: 8468 - DNA, 591 bp, Homo sapiens
  MAP TO CHR18.3; EXPRESSED IN HELA, SIGNAL = 4.4; EXPRESSED IN LUNG, SIGNAL = 3.7; EXPRESSED IN BONE MARROW, SIGNAL = 1.4; EXPRESSED IN FETAL LIVER, SIGNAL = 3.9; EXPRESSED IN ADULT LIVER, SIGNAL = 2.1; SWISSPROT HIT: P49257, EVALUE 2.00e-34; NT HIT: gi14760780, EVALUE 1.00e-105; EST_HUMAN HIT: BG292562.1, EVALUE 1.00e-105
ccactgtgatggtgatgtcctaattttgctgaatgttggcactttggtcacttacgttatttcaaaaactacatatgtgtaggtgactctgatcatttttatttatttccttttcagcggaggaaatatttgagagtgtaggagatcgagagctaagacaagtctttgaaggacagaatcgtattcatcttgaaatcaagcagctgaaccggcagttagatatgattcttgatgaacagagaagatatgtctcttccttaacagaggaaatctctaaaagaggagcaggaatgcctgggcagcatgggcaggtgggcttgcagaatatgcagatgtgccccatttaccctttgctggaagggaagtaaagaagaagggcaactgtactatgtgctcatagaatgtggattattcagcttgctcgtcattgtttcttcctccagattactcaacaagaactggatactgttgtgaaaactcagcatgagattctgagacaagtaaatgaaatgaagtaagtatggaaaagtagcgtttgtgtgttatgtgattttttttatcctaaatttgtgacttcaggtgtgcaagcac

SEQ ID NO: 8469 - DNA, 563 bp, Homo sapiens
  MAP TO CHR14.3; EXPRESSED IN ADULT LIVER, SIGNAL = 1.2; EXPRESSED IN BONE MARROW, SIGNAL = 1.3; NT HIT: Z99708.1, EVALUE 8.40e+00
tttccctccttccctgtttcattctttctagtacttcctttcttattccttgccaggaagatagttgcatgcgaggccgcatctctacatctgagacagctggttccaagagtggtcctaatagcagcaaaagaactggctacctggccaggggcctgaaactatgggtggaagtgtgagagagggcaaaagtatgatcatcttgaatcacatatatgagtttcagagaacatctacactgaaagagacaataaattcacaacatataatataaatatatgaatatcagaaatattgaacaaacattcccacagagaggatcatccttttccaacttaccttagagcatcgtttagtggatatacgaaaacatagctatcagcacacctgacatttaaacatctgcaagtgttcccaaagggaaataaattccgttatgaaaattatgactgctctcttgttctgctttgggctttagttgttgttatgcttgatgccaatcatccaaaagttttagaggcatgaaatatgcctttctacactcacccatgcacattcacaat

SEQ ID NO: 8470 - DNA, 566 bp, Homo sapiens
  MAP TO CHR18.3; EXPRESSED IN ADULT LIVER, SIGNAL = 1.1; NT HIT: AJ277587.1, EVALUE 1.00e-119; EST_HUMAN HIT: BE928711.1, EVALUE 1.00e-118; SWISSPROT HIT: Q04545, EVALUE 3.20e+00
tgcataaaacgctgccttaccttcatgacatctctatatgaccgaatagctgagatttttctcttttcatcttcatctcccaggccttcttctgcagcctcatagccctcatcattgctaccgtcagcttccaccgtgttggccatgtgatcgataagctgctctaggggagggcttaattccctttcttcattctccttcaaaccatagtccagtgctttataaataataattcccaaagattcaatgacctaggaacatttaaaaaagtggttaatggagatgaatgaagagctttctaggactaattgtgaggcataagatgtttagtatgattttttccctcaaaccaacatacaacacatacacaaaccctttttatattctcttagatttatactttgtgttaaaatttgtatttgccattcatatataaaatattaaccgagttgattttccacatttcccaaaggtatttctgagaacagatatagttatcaaagaatatatcctctcagaactcttatgccaatgtttatctaattagagatgcacagacatcccaa

SEQ ID NO: 8471 - DNA, 565 bp, Homo sapiens
  MAP TO CHR19.3; EXPRESSED IN HELA, SIGNAL =  13; EXPRESSED IN LUNG, SIGNAL =  13; EXPRESSED IN FETAL LIVER, SIGNAL =  27; EXPRESSED IN ADULT LIVER, SIGNAL = 7.5; NT HIT: AF042347.1, EVALUE 3.00e-92; EST_HUMAN HIT: AL579856.1, EVALUE 0.00e+00; SWISSPROT HIT: Q9Y285, EVALUE 6.00e-46
aacctactgcgaacccacaccacatcagccagcgcccgtgcgctctaccgccttgcccagaaggtgcggttggcccaggcgggggccccagtggggagagggtgctgtcaaagggaccttctgacccatacctgggcctggctcggttgtcacccctagaagcccttcactccggtcaagtacttctccatcgaccgcgtattccggaatgagaccctggacgccacgcacctggctgagttccaccagatcgagggcgtggtggcggatcatggtctcaccttgggccacctcatgggcgttctgcgggagttcttcaccaagctgggtgagcaggggggcaggggtgggccatggtggtgaggcagcgggcaggtgtgttgatcaccagcattatcctccaaacccctgctctcctgcccgccccccacttcctgcaggtatcacgcaactccgcttcaagccagcctacaacccatacacagagcccagcatggaggtgttcagctaccaccaaggtcagggtaggccctggtactggggtgggagggaggtctcaggctac

SEQ ID NO: 8472 - DNA, 539 bp, Homo sapiens
  MAP TO CHR16.3; EXPRESSED IN ADULT LIVER, SIGNAL = 3.4; NT HIT: AF088993.1, EVALUE 0.00e+00; EST_HUMAN HIT: AA428798.1, EVALUE 1.00e-122; SWISSPROT HIT: O96000, EVALUE 6.00e-14
tgtcacccctaaaatctgggcatgccaccctgtggcatcccagggactagtgtcccagcagcacacggtgcagatctccacactcccagcatggctcacgtactagtccctcttccactgcatttcggcttcatacatgcacatgatgtcctcctccttgcactcagtgatgtctggcacgcggcggtactgccggtggtagtagtaatacctgttctttgcgtgctgccgctctataaattctgcaaagacaaagccacagactcaaatgcctcatcggtttggacaggcttttagctttcttatttctcataagccctttggaggggagagaggagaacttcctgagtgttccagcgtttagaaaacagcaattcgtctctctaagggatgtggccagccaggcaggcctgtgaaggcctaggctacagctgatggagagctcccgagtaccaggcatcatcctcagagttccacatgcattaccttactctgtcccccacacaagcctacaggcagctgcttctcacagatggcaa

SEQ ID NO: 8473 - DNA, 562 bp, Homo sapiens
  MAP TO CHR19.3; EXPRESSED IN BONE MARROW, SIGNAL = 2.9; EXPRESSED IN FETAL LIVER, SIGNAL = 3.3; EXPRESSED IN ADULT LIVER, SIGNAL = 2.2; EXPRESSED IN HELA, SIGNAL = 2.3; SWISSPROT HIT: P81186, EVALUE 9.20e+00; NT HIT: gi12741394, EVALUE 5.00e-38; EST_HUMAN HIT: AW385510.1, EVALUE 7.00e-29
catccatgtctgggtgtgagcccttcccaggaccatgcccagtggactcttcagaagttcatgtcacagggtcagggtgagacggaatctcagtagagatgagaaggactgagggaaggcacgggtcaatgtgagcaaacgcgtcaggcaggatgcttcagactcagagaagatttgcagctccaaggcattgtctcccacctttctgaaaagagggagacagaatgatccacacagaatctttctttacctgagtaaaagccattcctgactcctttgctctcctcttctgggtttcttcctcatgtgccaggagtctttggaagtcaatgctgaataacaacaacaagtgctgtttattgcttagaaacaacacaccccctcttgtgtgacaagcacacacatacacagggaggagctcgccctgtgcaaagacggtcctctgccgcccactacaccagggtggccccagggacaagaaactcctacaggaaaaccaatacatgagtcttctgacccctttcttcagaactccctcccctcctggagaagctcacacaca

SEQ ID NO: 8474 - DNA, 596 bp, Homo sapiens
  MAP TO CHR18.3; EXPRESSED IN LUNG, SIGNAL = 1.2; EXPRESSED IN ADULT LIVER, SIGNAL = 1.4; EST_HUMAN HIT: AA528732.1, EVALUE 5.40e-02; SWISSPROT HIT: P02462, EVALUE 5.10e-01; NT HIT: U21222.1, EVALUE 5.70e-01
tatgcccacggattgttaggtatgcattataaaatgagcatccacttatgatgtggatacattttcaaccaacaaaattgattcaattactaaagtttgcatcccctttaaagagcttttaatgacaatttcatctaagtctgtacacttgattatttattgggcagacaggaattaaatcttgtgaaaaatctacctgccagactatgggaataagcttacaggatgtaacatgttccatgccccaaagaagccatggtggatgcagaaggagatcactgcagtagggatgctgtaggtgcagtagaaaaggtggtggatggagcacaggggaaagctcccacccagcccggcaggtgagggcctagggggtggtcagggaaggattcttagaagggacaactacgttgaatactaaagaatgggtctgagtggagggtgaggaatacaggtgttctgaggagggtccacagggtgagatgtacatgggaagctctgggcgccatgaccctgtcaagtgtatgacaggttaggcagccagggaaggaggcatgaggcagtggccccagtgtggagcctggatgagccctgttaga

SEQ ID NO: 8475 - DNA, 543 bp, Homo sapiens
  MAP TO CHR18.3; EXPRESSED IN ADULT LIVER, SIGNAL = 1.1; NT HIT: AF085244.1, EVALUE 1.00e-97; EST_HUMAN HIT: BF688900.1, EVALUE 2.00e-97; SWISSPROT HIT: Q9UL36, EVALUE 2.00e-32
cttccatggctctctgatccctccgccccatctgctgggggtcgttaggacctggccaggctccctctggtctccctatggctcctccagccctttgttcagatgacagccaggctgaaagcctaaaagaaaagaggaacattcagtccctcttgttcatacctcagggtagagcccaggcatccactatacttttcttagagacattgacatatgccattttctgtacaggggagcggccgttccattgcacgctttgtgagaaagccttcaaccagaagagtgcgctgcaggtgcacatgaagaagcacacgggggagcggccctacaagtgtgcctactgcgtcatgggcttcacgcagaagagcaacatgaagctgcacatgaagcgggcgcacagctatgctggtgagaatgctgcacccgggagtgcgtgctgttcggtggcctgcgaggcaccctgtgtttcgcatacattgtttcctttagttcacacagtgattttgcattgcacgtggtacagcctcagttgtgtggactgga

SEQ ID NO: 8476 - DNA, 536 bp, Homo sapiens
  MAP TO CHR16.3; EXPRESSED IN ADULT LIVER, SIGNAL = 1.7; EXPRESSED IN LUNG, SIGNAL = 2.1; EXPRESSED IN BONE MARROW, SIGNAL = 1.2; SWISSPROT HIT: Q9JIQ8, EVALUE 3.80e+00; NT HIT: M16844.1, EVALUE 1.30e-01
atagcaatgcttgcccactcaacctcagaataggaacacttcatacatccccactgctgagttcctccacctcttctgcagccttgcagttacagctgagaccactcaggcaaagacacccactccccccagatggaataattcccccagacccctggatcccctgcctttccttgccctcatcccaggagccagaacccttgtgccacccagatggaagctttctcccagacgcgtcctccagagtgcagccacacacggggaagctgacacaatgtcttcaaacatttttaattgccctgtcaaactgacaattatagaactaattattgaggagacaataacagatacactgactgaatcaagcgtcaaccgagtttttatgtaattatgcaatttaatgaattgaaggctacagtaatggactattgctggttaattagggactccctttatgctaataatgccatttatttttgactcgtggtatttattttcagtgtcgaaagcattggacacgtcttcctctgacacca

SEQ ID NO: 8477 - DNA, 510 bp, Homo sapiens
  MAP TO CHR18.3; EXPRESSED IN ADULT LIVER, SIGNAL = 1.4; EXPRESSED IN HELA, SIGNAL = 1.8; EXPRESSED IN BONE MARROW, SIGNAL = 2.5; SWISSPROT HIT: P98161, EVALUE 1.20e+00; NT HIT: AB035344.1, EVALUE 4.80e-01; EST_HUMAN HIT: BI598639.1, EVALUE 7.10e-01
aactagcagcacaccggaacacaccacagtggtgttcatcacggtggtaggggttgagaagggaatgtgatgctcaggtctaagcaccaccagcgaggtcacctctttcttgcaccagctatagccttaagccactgttttgcttgctggtcatggtagtagggctgggtcttcccaaaacacagggatcataacctaagctggagaaaacaccagcaggcaggacgcatgtacctgagacatgggaactccacgttgtcgctctcaggctgcccctcctctctcaccagcactctgtccaggtaccagccgctgccggagcctttgccatcgtgtctgatcctcacccgcctcacattccgcatggtgacagactcgatagtgaactcgtcagccttgtggggggaaaccacaaggccagttagacagtggctaccccaggacccaaacaccaagggaagacataagctcagatatcagaaaatccagagctgatgggttaggcaactc

SEQ ID NO: 8478 - DNA, 538 bp, Homo sapiens
  MAP TO CHR14.3; EXPRESSED IN ADULT LIVER, SIGNAL = 1.5; SWISSPROT HIT: Q01728, EVALUE 1.00e-06; NT HIT: gi15147253, EVALUE 6.00e-53; EST_HUMAN HIT: BG700011.1, EVALUE 2.00e-07
tgttagtgtggaggacagggtactacacctttctgaaaactcatatccaccatgcgggggcccatcatctcaatgaagtaattcttgtttttctcatatgcctcatcatcaattaccttgatgtgaattgttttgctgtggatggaaaaataagtatcataagcaaggagtagagtgtaggacaagtcagccagcagacaaaaacgggaagagaaggaaacagttaaaagattcagaaagatccaagtttgccccaacaccacaggggcacggaggagagtggctgccagtggacccctccagcctcactgggctcctcctgggctttgtgctgcttcatggcatgatcatatttgaagactgaaaagaaagagctcaagcttcacagccgagggctctgagttctaatcctggataggctgtgtaatcttggatacataatttaactgataaacaaacaggatgaatcatgcttacagcatcccagggcagttatgagagcaatgaaataacatacacataaaggctcggccactaa

SEQ ID NO: 8479 - DNA, 568 bp, Homo sapiens
  MAP TO CHR18.3; EXPRESSED IN ADULT LIVER, SIGNAL = 1.1; SWISSPROT HIT: Q62234, EVALUE 4.00e-16; NT HIT: gi14762609, EVALUE 3.00e-58; EST_HUMAN HIT: R57928.1, EVALUE 2.00e-53
aatgatccacttcactgcccatatatggataaaagcaactcagaaaagcaagagttgtggcattcagctcatactggtttgctacctaacaaatccacacacatcacaaggttagagaagcttttgtgttcctacagcagttggaagtaagctaatataaatcccctggtcatgaaaggaatacagaatctagttactgttttggggtaagatagagggtagagagctaatatattacattttacatttataatcgcctacctctgttataagcagggtacatataccatccttaaagtcatgcttttcatccactgatatctccctctcatctttgtaccacacaatatgagtctccttcttaatatttgccacctaggagaaaaaccataattacttttcttaaaataagaaagtgtactcttgtgaagttgaatagttcttaatgcagcaagatataaaagaaaaagcactgaacgtggagtgagaagacacagatttctaaaggaatgaattgaaaactattttaattgagaaaagagtttagaatcaagtggacaccaatgaa

SEQ ID NO: 8480 - DNA, 600 bp, Homo sapiens
  MAP TO CHR18.3; EXPRESSED IN FETAL LIVER, SIGNAL = 0.86; EXPRESSED IN ADULT LIVER, SIGNAL = 0.96; SWISSPROT HIT: P41182, EVALUE 2.60e+00; NT HIT: AB040901.1, EVALUE 0.00e+00; EST_HUMAN HIT: BF795125.1, EVALUE 0.00e+00
cagtagctcttcccgtttgacatgtactaaatagctgaaagatgcatttcaaaatataggatgcatactaacctattaggtttatcaaaatgaactgtctttttacttgatagagaagaaggtggcattccttctctttctctcctggggaatgaatttggggaattctctttaggaatagtggaatcagcttcatctgatattgaaagatggatgtctgtgttttttcccttgtctgaactatttacatctggatgctgtccactgtcctcagagtctttgtggggcaactgatccaaaggaggctgaacagagtcacaaactgctgggatggcaaagtgttcatttttgaggaagtccatttcactgtagaaagagaaattaagagaaatcaccagaggacaactgtatttttgaaaactagcataaatctcataatgggtttaatgttttaaaagcatatttaaaagtattagtagcaaatgattggcaagtaataaatcttttttatgcaatattcactgatgcttcatatacctaaaactgtagctataaactcaagaatgaagcataaaaatggccttaaaaaccctgcttttg

SEQ ID NO: 8481 - DNA, 540 bp, Homo sapiens
  MAP TO CHR18.3; EXPRESSED IN FETAL LIVER, SIGNAL = 1.2; EXPRESSED IN ADULT LIVER, SIGNAL = 1.2; EST_HUMAN HIT: BG574805.1, EVALUE 3.00e+00
tccatggatttaatgcagaacaaaataactttatgcaccttgttagcattagctatgacaacatcacaacagccagctgttgagctaagccaggatgtgtatgattttccacttgcaatttttcaccgaaatggctcaaacaacgtaagcaggattttcattttttggtgaataaaatataaagatgtctcactcataaatatgaagcttcagcaattttcataaaaatggtggtggtgaaaaaaaatggtacatcattgagctatttaccaaccagtagcaatccctagaacctggtgaatagaagccctggttttgtatgtctgtggtgaaactcaacaaggcacagtgattatcacaagctgtgatactctgtactttaacataacctgtagaaagaatggaaactcctacaaacttggcagcctgcatttatcagttgcatgcagagagtaaagtgtctttccatgttcaaatccacatggtagattgttgggtatgaaaccattgggtcctctgccattggtagcccgcataaat

SEQ ID NO: 8482 - DNA, 507 bp, Homo sapiens
  MAP TO CHR16.3; EXPRESSED IN LUNG, SIGNAL = 1.4; EXPRESSED IN ADULT LIVER, SIGNAL = 1.3; EXPRESSED IN HELA, SIGNAL = 1.6; SWISSPROT HIT: Q12769, EVALUE 5.40e-01; NT HIT: gi14777377, EVALUE 1.00e-41; EST_HUMAN HIT: AL529008.1, EVALUE 2.00e-41
ttacaagcccagtcaggtcctctccctgatttcagaggagtcctcatctgacccgactcagagagatgaacctctgttctgcttctttgaactccacagaaaaagagacccacagattccttccttccaataacttgtgtcatttgcatatagagtgcttgctttatttataggaaaaatttctgccgtttctggacatgttccaaaaagagagtgtgcgggtggaggtttgcaaatgcatcatggacgcctttatcaagtgagtgccactgcgtgcagcagaagccttgattcccaatgtccttgtgaaacctgttgataaaaaatcagttcttgcactttgaggccgagtgatgtgtacgtatttcatacagaaaaccacactggaaggaaagccacattaaaagcagcagtctgataaaagtttgtaattcgtgtttaagaagacagagtagcaagtgttatcatgagcctggccagaaaaccacactggaaggaaagccacat

SEQ ID NO: 8483 - DNA, 514 bp, Homo sapiens
  MAP TO CHR16.3; EXPRESSED IN ADULT LIVER, SIGNAL = 1.2; SWISSPROT HIT: Q00111, EVALUE 6.20e+00; NT HIT: U18671.1, EVALUE 1.90e+00; EST_HUMAN HIT: BF380594.1, EVALUE 7.00e-72
gttttcaaatgttgggggtgggggaagagggagtctgtttctcaataaaatccagtcgctaaaatccattttgcatgcagattagagaaagggcattttacctctgcggctgtagttcagataggagctggaagctctgcaaaggaagtctggcagggatgggtgtctgtggatggcccctaatggtccctggtgtcttccactgggttcctgttgtaactcacaagatgacccacaggcttattaagagcccaggtgttggaatcagacagacctgggttcaaattcctgttctatctggaaaatgggaaggcctgtagggagccttcctaattcatttattgccttgagacatgtctacctcatggtaggtgagtctgaaggtcttttatcttctcaacatttcacttcaccaaattctcattaaaacaggcatacactgaggctagaaacatgaggtaaaaattaaacatcaggttttttagtggccacatgcacttgagcactgttggag

SEQ ID NO: 8484 - DNA, 588 bp, Homo sapiens
  MAP TO CHR18.3; EXPRESSED IN FETAL LIVER, SIGNAL = 1.5; EXPRESSED IN ADULT LIVER, SIGNAL = 1.4; SWISSPROT HIT: P98195, EVALUE 2.00e-26; NT HIT: gi7656917, EVALUE 8.00e-31; EST_HUMAN HIT: BF194901.1, EVALUE 7.00e-57
caacccatctccaagaatgcaatagtcttaccccaggtataaaggtaaacacattgtatttttgattttttatagaattcctgggatgtttttcttcacacttttcaggacatccaagccatactgtgcgagctttcagctctttctttcttcgacaaatatttatcagccaaccacagcaactgtatgaaacaaaagatacgtattgtgtatttttttttgctttttaaaaaagttcaaactaattgtacatatttagagtcaatattgattgtttctgtattcaccacacactaatagcacacctaatgctaatttgtggggtttttcttataataggttggttacacaaatttaaatttgacataaaatacaaagtcttatataaatgtaccccaggggaattatctttctgtttagacactcttattggcaaaataaaaccattaatattctgaagcagtcaatgctctatatgtcgagaaaaggtatagctatagctataggttacctactggtaattcccaatacacttttcaatgataaaggtccttggatttcaattaatccaggatgtggctcattctc

SEQ ID NO: 8485 - DNA, 582 bp, Homo sapiens
  MAP TO CHR19.3; EXPRESSED IN ADULT LIVER, SIGNAL = 9.3; EXPRESSED IN HELA, SIGNAL = 0.96; EXPRESSED IN FETAL LIVER, SIGNAL = 2.8; EXPRESSED IN BONE MARROW, SIGNAL =   1; SWISSPROT HIT: gi8039778, EVALUE 2.90e-01; NT HIT: gi14769078, EVALUE 0.00e+00; EST_HUMAN HIT: BG424907.1, EVALUE 0.00e+00
ctgtccatacccttccaagccaggagagccactaggggcgcggagaaccagccctggggacacgtacctgcaggctgtgaaggacctcagggtccacccggctctcaggggctaacgggaggtcggtggacccctcggttccctgacaggcggacccgcacgcgctcaggcgccgctccagcgcgctcagctgactgcgggtgcgctccgcgtgttcgcgcagcccctggccgagctgcaggagtccgtgcgccaggacattcatctcgtcccaggacgcaaagcgcggcgacttggactgcacgggtccgccctgagcgctcagtagcacggcggtggcggcgcagagcatcagggctgccccggccgtcggagcaccgctcatcctcttaggtagcctgggagcggggattcggggactctcggggacgttggggttccaggtgcgaggactggagacgcggaggaccgggggtaagacccgcttggttgcagaagccgctggaaagaatcggatcacagtcgtgtgaggatccgctcagctcggcttctccccgccgcgcccgaggacggtttttataa

SEQ ID NO: 8486 - DNA, 594 bp, Homo sapiens
  MAP TO CHR14.3; EXPRESSED IN ADULT LIVER, SIGNAL = 0.93; EST_HUMAN HIT: T77903.1, EVALUE 8.40e-01; SWISSPROT HIT: Q92355, EVALUE 9.90e+00; NT HIT: U82671.3, EVALUE 2.00e-03
atccaagtttcaatcctgccctactattatgtatctatagaattttggtcaactgtttctatctttgttactgcatttcagaaagagagcagtaacactaaagtctacctcctgaaagtgctagagatgtgaaaaaacatatatatatgagatataagcatttatttaatataactagataatagaagataatatttttctatgctgtgatacttaacatttcttaaatatcaaagtgctgggtaaatgttatccagtggggatggcagcaccttctaatgaattgttcagcatttcaaatccccctggctggtttaagtgtcccttctctcactggctctcagagttacatccacagttttgtttgctgcaccttttgaaatttcaggccaggtttcctggaaacctgagctggagggaactgtggtagttcaccatagaatagatcaagtgaaggcagtaccgaggccacagctgcacgagggggaaaaactgctggctctccaaaatgacctggagagggaaacagttggcttcaggcctccaggacagaggttatagttctaagctttctcatccacctctgggaaggta

SEQ ID NO: 8487 - DNA, 532 bp, Homo sapiens
  MAP TO CHR18.3; EXPRESSED IN FETAL LIVER, SIGNAL =  22; EXPRESSED IN ADULT LIVER, SIGNAL = 2.5e+02; EST_HUMAN HIT: AA011711.1, EVALUE 0.00e+00; SWISSPROT HIT: P02766, EVALUE 2.00e-19; NT HIT: M11844.1, EVALUE 0.00e+00
tctggaggcagaaaccattcttgctttggaaacaattacgtctgtgttatactgagtagggaagctcattaattgtcgacacttacgttcctgataatgggatcagtgtgtaattcttgtttcgctccagatttctaataccacaaagaataaatcctttcactctgatcaattttgttaacttctcacgtgtcttctctacacccagggcaccggtgaatccaagtgtcctctgatggtcaaagttctagatgctgtccgaggcagtcctgccatcaatgtggccgtgcatgtgttcagaaaggctgctgatgacacctgggagccatttgcctctgggtaagttgccaaagaaccctcccacaggacttggttttatcttcccgtttgcccctcacttggtagagagaggctcacatcatctgctaaagaatttacaagtagattgaaaaacgtaggcagaggtcaagtatgccctctgaaggatgccctctttttgttttgcttagctaggaagtgaccaggaacctga

SEQ ID NO: 8488 - DNA, 503 bp, Homo sapiens
  MAP TO CHR19.3; EXPRESSED IN HELA, SIGNAL =  29; EXPRESSED IN LUNG, SIGNAL =  16; EXPRESSED IN BONE MARROW, SIGNAL =  26; EXPRESSED IN ADULT LIVER, SIGNAL =  13; NT HIT: D89870.1, EVALUE 0.00e+00; EST_HUMAN HIT: AL522948.1, EVALUE 0.00e+00; SWISSPROT HIT: P54368, EVALUE 2.00e-26
tgggaaccctgagtttcatcagagccggcgcacagtctcctgcagcccaggcgttgcctgagctcaacacggcctaggcccaagctttagcgctgccgggttcttggagtcctgtggggtgagtcagggttctgaattgggctgcaccccctggacaggatgatcggctgaatgtaacagaggaactaacgtccaacgacaagacgaggattctcaacgtccagtccaggctcacagacgccaaacgcattaactggcgaacagtgctgagtggcggcagcctctacatcgagatcccgggcggcgcgctgcccgaggggagcaaggacaggtgaggggcaaggacaggcagggagtgctcacccaggggagcagggaccaggtgaggggcaaggacaggcggggagtgctcacccaggggagcagggaccaggtgcgggttgctgcccaaggggtgcagggacagatgagggagggcactgccttcaggcagcacatatggg

SEQ ID NO: 8489 - DNA, 575 bp, Homo sapiens
  MAP TO CHR14.3; EXPRESSED IN BONE MARROW, SIGNAL =  33; EXPRESSED IN FETAL LIVER, SIGNAL = 2.6; EXPRESSED IN ADULT LIVER, SIGNAL = 1.1; SWISSPROT HIT: P08311, EVALUE 2.00e-27; NT HIT: J04990.1, EVALUE 0.00e+00; EST_HUMAN HIT: AW467275.1, EVALUE 0.00e+00
tgacgtttaatgaacaaatgaggaattggttatttatactctgtggacgtttattaaggctctggcaacactgtggagctggcctgtgtccccgagaagaagagtcagtcacaggggggtctccatctgatccagcagtttgaagcttctcattgttgtccttatccagggcaggaaacttgagaccctggtgaagacttctggaggaacccctgacgactttccataggagacgatgccgtgggccacattgttacacagcagggggcctccggaatccccctgtaggtagagaggagaagggagactgagacaggcctccctgctcctgcttccctgagctccgggctctcagggaaggcaggggtgggtgggccccttcaattgctgggtgtgtgtgagatggaagatcggtggggtacaggagccaagcctctggatcttttcggtcgctggacttcagctctgccttaattactgtctccagcccaatctgagtcaaggtacctctcccttctccaggagaatgttgcctatgtatgtgttgtgggtcttcctcctattcccccagagac

SEQ ID NO: 8490 - DNA, 598 bp, Homo sapiens
  MAP TO CHR16.3; EXPRESSED IN BONE MARROW, SIGNAL = 2.5; EXPRESSED IN ADULT LIVER, SIGNAL = 2.7; EXPRESSED IN HELA, SIGNAL = 3.4; EXPRESSED IN LUNG, SIGNAL = 4.8; SWISSPROT HIT: P09086, EVALUE 2.00e+00; EST_HUMAN HIT: AW947987.1, EVALUE 2.10e-01
ggatgtttgtggggatcttggctgcccaatgtgggacccctgttccctttaggtgtctaacacatgttctctttctctttgatggccaaggcatggctggccaatgggatgcttctctctccaaaggagcagggagagctggagataccctccttgcaaacagcagcttgaggatccagcgcctggtgcacaggtaaccagcagtggtctctttctccacctcaactatgcctgtgacctcttctgaccctggccacacctgcctgactttccctgctttccgtccatttttttctcagtttgattttacagccaccttggagtcccttttctgttagggttcatgagcattggattctgttttagcacccagaaccttgattggttcagaagaggaagctgggagatgaggccagatggaaacaagaccaaggaaggtctcaattgccagatgaattgtttgtgactttagcctttggtctagtggttcttaagcagggacatgctttaggatcatctgatactttggttagctattaccacaataatgctacataacaagtgacctcccaccccaaccagggcatacaacaacaaa

SEQ ID NO: 8491 - DNA, 518 bp, Homo sapiens
  MAP TO CHR18.3; EXPRESSED IN ADULT LIVER, SIGNAL =   1; SWISSPROT HIT: P23023, EVALUE 2.80e+00; NT HIT: AY058461.1, EVALUE 3.20e-02
aatgtgctgaaagccattccccgcatcgccaaaatagccaaagtgatgcctaacatttataaccaggatgtagattttcattccatagagataaagcttaacataaaaatcccctgggaaagggaacctggtatcttagtagaaaatggctgagctcaaatcctcaatgtgagtgctaacagggaagagtatgagtgtttgaaaagcaggaagagagggcaccgcagagaaagaaaaggaacagcaagcgaccttggaaccaggccgatagatgttttttcaccatttgcataagacgtgctattcccccatcatcccacccactcccacctccatcctcttctagaagctgccacatggctattctaaggggacactgctcaaacttgcagtggagaataatggatgggatggggatttgcaggcgagagccatctagagggaaggtgagggagagcagaaggagaggcctgcaggccagggagtgggtggctgggagagagtggcagggagaactg

SEQ ID NO: 8492 - DNA, 580 bp, Homo sapiens
  MAP TO CHR16.3; EXPRESSED IN LUNG, SIGNAL = 1.2; EXPRESSED IN BONE MARROW, SIGNAL = 0.97; EXPRESSED IN ADULT LIVER, SIGNAL = 1.4; SWISSPROT HIT: P12110, EVALUE 4.30e-02; EST_HUMAN HIT: BI768810.1, EVALUE 0.00e+00; NT HIT: gi13376122, EVALUE 0.00e+00
aatcctcgcagatgagatgcaggaagctgcgggaatgcacaggggatcaggtctgtcctggtgtctaactcttgtttctctccacctccccaggcacgggactgaaccagctggtggtggcccgatggctggagacacccactgccccgcagagcccctggccagagaaggcactttatgggaggccctcagggcgctcctgccgcacagtaaagaagacctgaagttggacctcggggagaaagtggagaggagcgtggtgacattgttgcagcgagccactgagctcttctacgagggcaggagggacgagtgtctgcagagcagcgaggtgatcctggactactcctgggagaagctcaacacgggcacatggcaggacgtagacaaagactggcgccgggtctacgccatcggctgcctcctgaaagccctgtgtctgtgccaggcacctgaggatgccaacactgtggccgcagcctgcgggtctgtgacatgggcctgctgatgggggcagccatcctgggggacatccttcttaaagtcgctgccatcctccagacacacctccctggaaaga

SEQ ID NO: 8493 - DNA, 579 bp, Homo sapiens
  MAP TO CHR16.3; EXPRESSED IN HELA, SIGNAL =  50; EXPRESSED IN FETAL LIVER, SIGNAL = 1.2e+02; EXPRESSED IN LUNG, SIGNAL =  36; EXPRESSED IN BONE MARROW, SIGNAL =  95; EXPRESSED IN ADULT LIVER, SIGNAL =  53; SWISSPROT HIT: P30640, EVALUE 1.00e-04; NT HIT: gi14741509, EVALUE 0.00e+00; EST_HUMAN HIT: BF378085.1, EVALUE 0.00e+00
gagtgcaatggcctgttctcagcttactcaacctccgcctcttgggctcgggtgatgatggttccacctcagcggccctccgcctcttgggttcgggtggtgattccacctcagcggccctccgcctcttgggttcgggtggtgattccatctcagccgctctccacctcttgggtttgggtggtttttctgcctcagcctcctgagtagctaagggaggtgtcttgagattatcatccgctgagggtggagctgagggtggaaggggagtgagcagacactcgggaggtgtcttgagattatcatccgctgagggtggaaggggagtgagcagacactcgggaggtgtcttgaggctcagggagttatcagttatagaatgttgttgagttggaggaggtggctggtggcccatcctgttttttaaagtttcagctgtgaggtagggccagtagggcaatcctgaagaatgacgatgctccgctgccgccattctgacctgtagggccaaaggagggaatgttttcacacatattcatttgatggacaaaattaccgccaccaacacagtctgcacct

SEQ ID NO: 8494 - DNA, 569 bp, Homo sapiens
  MAP TO CHR16.3; EXPRESSED IN HELA, SIGNAL = 3.1; EXPRESSED IN LUNG, SIGNAL =   5; EXPRESSED IN BONE MARROW, SIGNAL = 2.8; EXPRESSED IN ADULT LIVER, SIGNAL = 3.7; SWISSPROT HIT: Q9D952, EVALUE 9.40e+00; NT HIT: AJ310803.1, EVALUE 2.10e+00; EST_HUMAN HIT: AI553767.1, EVALUE 8.00e-01
ctgcccctacaagggactccccaggggcacgaggagctcaggagctccggaaggttctcctgccagcctcctggcgtggacctcctgcgcaccctgacatcgcctgcccgcctcttcacaaggagttggcgccttgtgaagtcatctccgtgagcttcatgaagcaacaccgccaagggcctgagcaaagggcgctctgctccactcgagtgaaagcaaaatgctttcggggttgaatcactgtttttcttgactccctttggagatcggcagagcccacattcggccgtgttcgtggacctgggactggaaacagctgcgctctaattacatgtaaagtgtaccaaaacatcccttttatcacagactggaaatctgttagcatctgcctctcctttgtttcttccacaagatacaagcttgtttctacatttttctcacctgtagcagtgattaaaattcattataaatgaaaggagtgaacagagaaacaagttcctctgtgtaccgttctaaactcaaattagaaacagctgtttgctaattcatgcagtgatgttttgtcgtgc

SEQ ID NO: 8495 - DNA, 600 bp, Homo sapiens
  MAP TO CHR14.3; EXPRESSED IN PLACENTA, SIGNAL = 1.3; EXPRESSED IN ADULT LIVER, SIGNAL = 1.1; SWISSPROT HIT: P10233, EVALUE 4.50e-02; NT HIT: L11910.1, EVALUE 2.30e+00; EST_HUMAN HIT: AW629230.1, EVALUE 2.10e-01
gaaaagcaggctgaccaatctgaaggattttatttctcccccttctctgcagccatcccaaagcagtgctccagccaatgagatccggccattttattggccccaatgcttgtcaatatgaatgggggtactgggggtttcaatggtttctgccagacaatatgggcccaaagcaaatggcaaattcagtgattttgcaaggaatgggaatgtcgtgagaaacgtgcatgaccccacacatgaattctcccaaacatgatggagaagacgaaatatcaggaagctcagggcaggtgacagggcgaccacctggacacctgtcctccctcctcacagccccagcacagagcaagtgctgctggccccggactgtcccccagcagcagaagtcacagtcagcaaaccgccaaggccttccccggactgcactggcttacagaacacacccagttctggtaagatgggcccgccaaggagccagtgctcctggacaacatccctagggggtggcagggccaggaagatgcctgtaggcatggccagagctctgtccttctcggcttctgccctgtggggcacccagaaccccatccagtgttg

SEQ ID NO: 8496 - DNA, 593 bp, Homo sapiens
  MAP TO CHR18.3; EXPRESSED IN ADULT LIVER, SIGNAL = 2.4; EXPRESSED IN HELA, SIGNAL = 4.8; SWISSPROT HIT: Q06136, EVALUE 1.00e-30; NT HIT: gi4503816, EVALUE 1.00e-105; EST_HUMAN HIT: BI488526.1, EVALUE 1.00e-105
tgctgtcatggtcagaatgcaagactagactgaaacagtcttcaaatggtaggtcctgagtcttcaaatgctaggtctcaaatcacatttcatttatatcatcatgtcatcattcattcattcagcaagcctgttgggcttcccagtcacttgagcttgcattgaagaactgaaatccagaaagcagactaaattctccatgtgcacagccttgaggcttttgacctcatgtggcctctttgttccctgcagaggttaatgagcatcaattacctgggcagcgtgtaccccagccgggccgtgatcaccaccatgaaggagcgccgggtgggcaggatcgtgtttgtgtcctcccaggcaggacagttgggattattcggtttcacagcctactctgcatccaagtttgccataaggggattggcagaagctttgcagatggaggtaaaagttgtattcatttttgtatttattcctctccgctcagcaatatacattccgctttagttttatagcttctttacatgtgttgttgtattaaattagagatttttaggtttgacattggtgaaagagaattggctcaaccctga

SEQ ID NO: 8497 - DNA, 501 bp, Homo sapiens
  MAP TO CHR14.3; EXPRESSED IN ADULT LIVER, SIGNAL =   1; SWISSPROT HIT: P10857, EVALUE 1.20e+00; NT HIT: AJ229043.1, EVALUE 1.20e-01; EST_HUMAN HIT: BE798376.1, EVALUE 4.50e-02
gctgtgaaaacagctccatctcaccttcaccaggaatatgagcagctcactgcctagtgaggctcgaatacccattaggaagagccaagccaggcttcttagggtgggttccctggcaacacttcccaaactctcccaccaagctcccaggaggcaggagggagcaaacacatactctgcagaaccggaaacagatggcagcaagcaccacgtgtccttgaagttttctggttttgcttttaaaattggaatttttgcatcttcttctacaatatcaccatcttgttttacaacctaaaaaaagatttcattatgttgactttttttcctccaaaaatatctgagtgtagaaatgaggctctggaaaggtatgccatgtttaaactgtggttttgtatggtccttgacacaccattgggttccctggggttcctgactttgaaaaacccagccacaaagagttaaagagggtgggagccaatctgtttaacctttggaagg

SEQ ID NO: 8498 - DNA, 598 bp, Homo sapiens
  MAP TO CHR14.3; EXPRESSED IN HELA, SIGNAL =   2; EXPRESSED IN FETAL LIVER, SIGNAL = 3.4; EXPRESSED IN ADULT LIVER, SIGNAL = 1.8; SWISSPROT HIT: O60412, EVALUE 8.00e-46; NT HIT: gi16163994, EVALUE 0.00e+00; EST_HUMAN HIT: BG117417.1, EVALUE 0.00e+00
tccaagacacacagagccactgaatctcacaggtgtctgagaattcctcctcctgggactctcagaggatccagaactgcagccggtcctcgctttgctctccctgtccctgtccatgtatctggtcacggtgctgaggaacctgctcagcatcctggctgtcagctctgactcccacctccacacccccatgtacttcttcctctccaacctgtgctgggctgacatcggttacacctcggccacggttcccaagatgattgtggacacgcagtcgcatggcagagtcatctctcatgctggctgcctgacacagatgtctttcttggtcctttttgcatgtatagaagacatgctcctgactgtgatggcctatgactgctttgtagccatctgttgccctctgcactacccagtcatcgtgaatcctcacctctgtgtcttcttcgttttggtgtcctttttccttagcctgttggattcccagctgcacagttggattgtgttacaattcaccatcatcaagaatgtggaaatctctaattttgtctgtgacccctctcaacttctcaaacttgcctgttctgacagcgtcatc

SEQ ID NO: 8499 - DNA, 516 bp, Homo sapiens
  MAP TO CHR18.3; EXPRESSED IN ADULT LIVER, SIGNAL = 0.96; EXPRESSED IN FETAL LIVER, SIGNAL = 1.2; EXPRESSED IN BONE MARROW, SIGNAL =   1; NT HIT: D63671.1, EVALUE 7.70e+00; EST_HUMAN HIT: BG483358.1, EVALUE 2.90e+00; SWISSPROT HIT: Q01977, EVALUE 4.80e+00
tttcaatttgcccttagatgcatccgtaaatttaattatttgttagcttgtgtttgtttttaaattactaactcttgcagatatcggttgttccttacctgtatcaaactaattccctcttcctctgttaacagcatcctgattttccattggggagtaagtcaaccttccttggatagtagcatagggacctttattgtacataagtaacctggacttggacagagtcaatgaatttatccacgaatgggtatctgccttcagtccagtgaaaatcaaccaggtacttctgtacagcccgagggggaatatgtccttttctctgcctgaagttgcccatggtcatgtttgtgattatacggggtaaactgagaataaaataatcacatacaaaagaagaatcaaaaaaatgagatatgatcttgataacctaatttaaactctaagtaattctcataacaggatttagtgaacattctaacccttttccaacaacccatcctgctacatgccttt

SEQ ID NO: 8500 - DNA, 594 bp, Homo sapiens
  MAP TO CHR16.3; EXPRESSED IN FETAL LIVER, SIGNAL = 2.4; EXPRESSED IN ADULT LIVER, SIGNAL = 1.6; NT HIT: gi14779831, EVALUE 2.00e-44; EST_HUMAN HIT: BE266650.1, EVALUE 2.00e-44
gctgattctcctgtgcttcccctacagcagcagacggagtggcagcggtacttacggcagagcttggaggtggtggccaaagtgatggagctcctgcccacgcacgccttctccacactggtaatgtgctgtccgggggagtggagagtgtagcgatttctctgtacacagagcatggctggttgactcccctggatctctctctctctcccctctttcccctctatgtattttaaaacgaataattaccataagtgatgctcaaactgaacaaatattaacatttccacaaaatattaaaccaacttttggaaccttgtttagtcttggatataatagcaatttgactaaagccttaatacctttatcagtagcttgcaagtggccaggccgagtgggagctgttacttatagaagttacattgctgaaaagctggcctttgtaaagctcgctcttggcaaattgctagctttctctgcgtgtgtctatacgtgctggaatctttagttgtaaggattgattcccttccctgtgtggtgcgtgttattcaaagagatttcattaaattcatcacttcttcaaggcaaggcagt

SEQ ID NO: 8501 - DNA, 550 bp, Homo sapiens
  MAP TO CHR14.3; EXPRESSED IN BONE MARROW, SIGNAL = 1.5; EXPRESSED IN FETAL LIVER, SIGNAL = 1.2; EXPRESSED IN ADULT LIVER, SIGNAL = 1.3; SWISSPROT HIT: Q9VU68, EVALUE 3.00e+00; EST_HUMAN HIT: BI712955.1, EVALUE 0.00e+00; NT HIT: Z99115.1, EVALUE 5.20e-01
gataatggcagatcagcaggataatattacctaccacactttagacaaaacatttacgttatataaagaaaagttaatggagcgaagataagtgaaaaggactcaatacacaaataattgtaaatcatgtattgctaggtagtagagcaggggccattggcctctcttctaagcctttgttttttgaactatgtattttacatatttgtttgatgctgttgattagcttggttcttgtaataacctagataattttgttgtatcttgtcaggtgccaaaattgccagcagagctggtcacaatcaacgtatttttgtggcagaattccgaccagattcagatacccagtttgtctcagtgggagtaaaacatgtgaagttctggaccctggcaggaagagctcttcttagcaaaaaagggctactgagcacactggaagatgcccggatgcagaccatgctcgctattgcatttggtgcagtatgtctcttaaaatgcacatagtgtgactttgactactttacattctcttgccttagatcatcagcca

SEQ ID NO: 8502 - DNA, 517 bp, Homo sapiens
  MAP TO CHR14.3; EXPRESSED IN BONE MARROW, SIGNAL = 0.99; EXPRESSED IN ADULT LIVER, SIGNAL = 1.3; SWISSPROT HIT: P44317, EVALUE 2.80e+00; EST_HUMAN HIT: BF800489.1, EVALUE 1.00e-117; NT HIT: gi15300468, EVALUE 1.00e-120
aagcctttcaatgctgactttcttttagctctctctcccacagattcgattgaatagactattgaccattgatacagatttgttggagcaacaggacattgatctaagccctgacttggcagctacttacggcccaacagaagaagctgcccaaaaggttaaacactattatcgcttttggatcctaccccagctgtggattggcattaactttgacagactcacacttttggccctgtttgataggtgagattatagtgtgatattaatgatacgtgtggattttatttttaagatgaagtgtctttaattacccactgaggtttttacctggttatcatgttgggaaatgttttctggttttgtcctctggatataaaacttaaggtaatgggtttctaaacagtgactatcttaaatccattaaaaatgttttggttgcaacttcaatatcttttacaaagaaattagttttgttaatcagtgagactcatacaactgctagtcaaaagccaaa

SEQ ID NO: 8503 - DNA, 587 bp, Homo sapiens
  MAP TO CHR16.3; EXPRESSED IN HELA, SIGNAL = 1.5; EXPRESSED IN LUNG, SIGNAL = 1.2; EXPRESSED IN BONE MARROW, SIGNAL =   1; EXPRESSED IN ADULT LIVER, SIGNAL = 1.2; NT HIT: gi16165171, EVALUE 3.00e-58; SWISSPROT HIT: P55194, EVALUE 2.20e-01; EST_HUMAN HIT: AU142211.1, EVALUE 3.00e-56
tcatccctcatttgcaaaaaccgaaaagatacatttatcaaggaattctcataccttgcactgttctactttatttccagcttcatccatctcttcctttagagtatctatttttgatggaagcccctgaaagttggttcctgaggatttgtgagcttggttccacctgcaaaacaaaggggtcaccagcatctgagaaccagctgtgtatactcaacagctggaggcaggacctggtggagatagatccttccccacaattgattctacctggaaggggtatcattgcccaggatgccaaattctcttgagcttattctctaagaatggaagcaggcaaaaggagactttagcttctcaccatgacaggactctcatagtgctaggagtagtggtctgctttgagcataaccaaccacatcttgtctcacacaaactctactactggagagaaatccatggaacccctttcttgtggtggccaaccatggaatccctgccaccggaggagagcaaggtgctctccttgctctcttgctttgagctgaaatgttccctgtgccactgggaatcagctcctgcttttg

SEQ ID NO: 8504 - DNA, 525 bp, Homo sapiens
  MAP TO CHR18.3; EXPRESSED IN ADULT LIVER, SIGNAL = 1.1; NT HIT: gi14760932, EVALUE 1.00e-118; SWISSPROT HIT: O43323, EVALUE 2.20e+00; EST_HUMAN HIT: BG981321.1, EVALUE 1.90e-01
tagggactgtgtgatgctgccatttcccccaatttgcttggttatgagtgacgtgggatttttaatcattagcatcttggctttgctgggtgtttttggcaggctgactctccagccagccctgcactgtgctgtgtgcatcaggaaaccggctcattctgcaggtgtttcatccataaacaagcatcagccacaggctcctctttcgtttgacggaaaccctttggaatttaactttcagatacaaatacttggaacagttggcagctgaggagcacgagaaggagctgagaagccggagtgtgagccggggcagagccgacctctccttggacctgacctcgccagcagccccagcctgcctggctcctctgagccatagcccctcatcttcagactctcaagaggctctcacggtgtctgcctcctccccaggaacccctcaccatccccaaggtgagtacagggagagtagagggaaaatgaacaggttaacatcagacaggcttcctcagggcagtagtg

SEQ ID NO: 8505 - DNA, 599 bp, Homo sapiens
  MAP TO CHR18.3; EXPRESSED IN ADULT LIVER, SIGNAL = 0.98; EST_HUMAN HIT: BF377516.1, EVALUE 3.00e-59; NT HIT: AF218793.1, EVALUE 1.40e-01; SWISSPROT HIT: P29374, EVALUE 7.70e+00
tgccctttgaggcttaattgtaaataatcggctttcagtgtagctgtagtgattaattcgcctatgtgatgtttagctttcaaatgcctgtaatggcatgaataagcaacattacggctggaaatcaggccaagtatttaaaaagcaacaacaaagagcaaagtactcacgctgtggcacttccagtggatgccctgtgacatcacaccatccgatcgggtggatatcagggctgtctgcctccacccagtagtcatacttatggtcccaaccatcaaaatgaacctgttaaaacgagttttgaatgattagcatttagtaattaggatttcactattcctgtatcaaaatatttgaatacagatgtctgaagctgagattgaaattttattgatcacaccttgcagttgaaataatatttaatatgtgccattctatagccttctaatccagccaacaaaggcaattgtaccaaattttcaaagaaattaaagtggttggtaaacgaaaactttgtcagggattgaccagaatctgaagaagtaaggccaatccattttctcaactaagacacgtactggaatgctgttgaggggata

SEQ ID NO: 8506 - DNA, 500 bp, Homo sapiens
  MAP TO CHR16.3; EXPRESSED IN HELA, SIGNAL = 3.3; EXPRESSED IN LUNG, SIGNAL = 2.3; EXPRESSED IN ADULT LIVER, SIGNAL = 1.1; SWISSPROT HIT: P06213, EVALUE 2.70e+00; EST_HUMAN HIT: BI032099.1, EVALUE 0.00e+00; NT HIT: gi14779959, EVALUE 1.00e-127
aaattcacctgttgccttcgttggactttcctaggccaagcccagcattcggtgcttcattaaacccaccgagacactcgagcggtcccttgagatgaacaagcacaagggcaagaggcgggtgcaaaagagacccaactacaaaaacgttggggaagaagaagatgaggagaaagggcccaccgaggatgcccaagaagacgccgagaaggctaaaggtacagagggtggttcaaaaggcatcaagacgagtggggagagtgaaggtgagtgtccccatgaacgccgccctgtgcctgcgccgccagccagcccgccagcgaggctgccacctgtgccctctccacccagacttctgctccccacagtgtccagccagtgattcgattcctacctcacactggcgtacctcattctatacagccctgccactcggaggctgctgtaggtgtatgtcatatgcaggtccagggcaagtcccgccctcatgggatgggtga

SEQ ID NO: 8507 - DNA, 579 bp, Homo sapiens
  MAP TO CHR16.3; EXPRESSED IN ADULT LIVER, SIGNAL = 5.7; EXPRESSED IN HELA, SIGNAL =  15; EXPRESSED IN BONE MARROW, SIGNAL = 5.7; EXPRESSED IN FETAL LIVER, SIGNAL = 5.3; SWISSPROT HIT: P22086, EVALUE 1.90e+00; EST_HUMAN HIT: BE551260.1, EVALUE 0.00e+00; NT HIT: gi14779831, EVALUE 0.00e+00
tcttcagtgcacactctgggatggaagtagctgttggggtctggtgggtgggtgacctggtgtgttgttggctgcagctatgcccctgccttccaggacctgccctcattcacccagaatgtgcacaggctggtcaacgacctgcgctactacagactctgcaacgacagcctgccccctggcactgtgaagctctaggcctgctactgcctggggacacggacttctgctgctgccacctgcgccagccctaccttccaccacagatgtctcccagatgggccttggtcacactccttggcttctcccaccgcaagcaacgctgcctgcctctgccgctcctccacatcttgccgctgcccagcagagctggcttctgggtccacctgagcactggacggtgctcccagggcgttggagcaggcggaggggtgtgtggccaggtactaggaggcaccaggaaatcccgcggggtggcccatgcagaccaggcgcacgtggctcatggggcagaattgccaaggacagctcacgacagtgccaccttctcaccattccagccaaggagagatgtgacgt

SEQ ID NO: 8508 - DNA, 596 bp, Homo sapiens
  MAP TO CHR14.3; EXPRESSED IN ADULT LIVER, SIGNAL =   1; EXPRESSED IN LUNG, SIGNAL = 1.7; SWISSPROT HIT: Q9R269, EVALUE 6.70e-01; EST_HUMAN HIT: AI939915.1, EVALUE 0.00e+00; NT HIT: gi14748823, EVALUE 0.00e+00
cctctggactctacccctccccagatccccttccttccccaggccctacctctccccgagctccttgtgctccagctccagattccgatgcagtgtctttaggcagctgtgctggcggatgagggcctcgtactcggccgattgccgctcgtgcagcgtgcccaggtgctcgtggtcctgcagcagggcctcgtaggccgctgtaagttgctcctgctgcctctgcaggctttcgttctccgtctccttggccgtgtggtggttctgcagcagcgtgtactgcgcggtgagcgctgcgctctgggaactcagcgtggagttctccacctgccgagagggagaagcgcggcgtggcgcaggccccacagtcagcgaggagggctggggagcaggtcaagtgctcgagcagacacgaaaatagccgggaccctcagggcagaagacccagagggtacccaggatggctgttccagaacttaagcaactgctgtgggaaggggactaaaccgcatagacgggcactcagagggtacttcagtcctgagccactcgccacaaatgtgagctgctggggcagatgatgtcctttccctgga

SEQ ID NO: 8509 - DNA, 562 bp, Homo sapiens
  MAP TO CHR18.3; EXPRESSED IN LUNG, SIGNAL = 1.4; EXPRESSED IN ADULT LIVER, SIGNAL = 0.93; SWISSPROT HIT: Q03707, EVALUE 6.20e-01; EST_HUMAN HIT: BG825220.1, EVALUE 7.90e-01; NT HIT: S44957.1, EVALUE 5.40e-01
tgctcctggaaattctttggcttctgagctccaggctctcctgccgcctctcccaccccaggcctttctgctttccctctgtatactggtggcctcacagccgctcctcagggctgtgcttccaagagtcctgtccttgcactttttctctgtcatatggtacatcttgctgtgagactcccctgttgctttttgcttgtgcaccaacttctaacgtctgcctgaacctttctgcagacagttgcagcacaatcctctctgacaccaaactcaacacgctccaggtcattccatccccttcctgcagaatcctcatcctctttctgattgctgtccctctgaactgtgtccaaatcattcctgctagaaactgggggcagcctagagtcctcccttactctcatgtccagcatctcaacagatacggatcccacagcttctctccagtaaatacaattcaatcagcacccctctggtctgcaccaggcatgagccacgtccccatgaccccctgtcctcatggcctcctgtccccatgacctcctttcctcatgacctcctg

SEQ ID NO: 8510 - DNA, 597 bp, Homo sapiens
  MAP TO CHR14.3; EXPRESSED IN LUNG, SIGNAL = 1.3; EXPRESSED IN FETAL LIVER, SIGNAL = 1.7; EXPRESSED IN ADULT LIVER, SIGNAL = 2.7; SWISSPROT HIT: P71556, EVALUE 1.00e+01; EST_HUMAN HIT: BI913033.1, EVALUE 0.00e+00; NT HIT: gi16162596, EVALUE 9.00e-40
ctcaccttggctggagagaccgagggaggagtgggcagggaacagagggaacagcagtcaaggctgactgctgtgccagggtcctcaccgtccacatcccgaaggccatagcgtcgagcaaggtcacaggatggcagcaccttaccactcaggctcaggatattgggatctgcgggcacacagacaggtggagatggcaggcaggggagtatgcagagtgacaaggtttgggcccagttggacagggcactgctgagagccctggagctcaggatccctggagagctctttctcttgggccttggactttttccacacttcccaggagcctgctcctaaggctctcagacctcaaactgggaatgctgaccccttgggcctcaaaaagcagagaaaagaatgacatgttcctcaaccaactcccgagccagatctgggcactggatgctaccgcactacacatcctccatgccctttcttattaccagctgcccccaaacttcacctgttgccaaagccaccacacatttgccactcaattctgtggtttccgcagatgagaaggctgatttgaactgaaacacaggggcagagaag

SEQ ID NO: 8511 - DNA, 562 bp, Homo sapiens
  MAP TO CHR14.3; EXPRESSED IN HELA, SIGNAL = 1.1; EXPRESSED IN FETAL LIVER, SIGNAL = 1.9; EXPRESSED IN ADULT LIVER, SIGNAL =   1; EST_HUMAN HIT: BG485576.1, EVALUE 8.00e-35; SWISSPROT HIT: P02698, EVALUE 1.40e+00; NT HIT: X61585.1, EVALUE 3.00e-30
gcaacatttcatgatgtgcctatgtgtgtttttaattattgtttgcttaaaatgtcccaagttggagctggttggaaagtcatgagctagtttgacccatgccttataagatttaagtaggcaaatagaaatttattaatatctgaaatggtgaaataacctacaacatctactgactagatgtttttgtaatgtagtcacatctttctcttgatccctcctgtcttccagtttgtcttctttattagccaccaaacccagttatgttcttttattcttttttaagtctcttttcccccttccccatcctctttgtctcacaggaacaacttgatacagagacaagtacaactcaatcagaaactattcagacagcggcttctctgttggcctctcaggtactaagtgcaaaaagcaaggagaattttgtaaatgtccttaagattagtgtggtatattgaattaaagtgagagttcatagaagactattaaaattaatctttctgaaagtaattacttgctagcctataaacgtatttattgtagttttaaggcagggccc

SEQ ID NO: 8512 - DNA, 540 bp, Homo sapiens
  MAP TO CHR14.3; EXPRESSED IN HELA, SIGNAL = 5.4; EXPRESSED IN LUNG, SIGNAL = 3.5; EXPRESSED IN FETAL LIVER, SIGNAL = 1.6; EXPRESSED IN BONE MARROW, SIGNAL = 1.8; EXPRESSED IN ADULT LIVER, SIGNAL = 1.7; EST_HUMAN HIT: BI831422.1, EVALUE 0.00e+00; NT HIT: gi9629818, EVALUE 5.10e-01
acatccgtttgtcggaagtcgctcctcccccttccttcgctttttttccttgtcattggttcctggcactcgggccccacctcctccggctacgcccctcgcggccgcttttcccgcctccgccggggccgagccgctgttcggctgacagttgaggatggccggagccgagggcgccgctgggcggcagtcggagctggagcccgtggtatcgttggtcgacgtccttgaggaggacgaggagctggagaatgaggcgtgcgctgtcctgggcggcagcgactccgagaagtgctcctactctcaggtgggcgcgcggcccgggcctcctctcccccggctcccgccgaacctccccttcccggcccggctgtccctattcccgccttgccgcagtcgtctccccagtggtggtccggggccgccgttagtctgccgcttcctcaccccaagcccacccttcccttttaaccccaacctcctgggcccccttcagcctgtgtccagcaggggcccccctctcccctgtctccaactctg

SEQ ID NO: 8513 - DNA, 512 bp, Homo sapiens
  MAP TO CHR16.3; EXPRESSED IN BONE MARROW, SIGNAL =   2; EXPRESSED IN ADULT LIVER, SIGNAL = 1.2; EXPRESSED IN HELA, SIGNAL =   2; SWISSPROT HIT: O75131, EVALUE 1.00e-06; EST_HUMAN HIT: AL542814.1, EVALUE 1.00e-118; NT HIT: AF031237.1, EVALUE 7.60e+00
tcatgcatttccttgcattcttctttcttcaaacctttgcctatgttatttgacaacccgcctcaatttgccttccatctctccactcacctcttaaaggccaggtggtaatgcctccctatggtggggcagcatagcaggtgtctgtccactctctgaccctcacttctgttcccctagactgccaggaactcctgccaccgccaccggctcccatggcccacatacccagtgggggtgccccagcagcgggggcagcccccatgggcccccagtattgcgtgtgcaaggtggagctgtcagtgagtggccagaacctactggaccgggatgttacctccaagtccgaccccttctgtgtcctctttacagagaacaatggcagatggatcgaggtgaggctcttccgtgtgtctgcggtgggtaagggggtggctaggctgctggggagggggagtctcccaggactgggatccaggatgtctgatggaagtagttggagtgtgggctgg

SEQ ID NO: 8514 - DNA, 520 bp, Homo sapiens
  MAP TO CHR16.3; EXPRESSED IN HELA, SIGNAL =   5; EXPRESSED IN ADULT LIVER, SIGNAL = 1.4; NT HIT: M81598.1, EVALUE 0.00e+00; SWISSPROT HIT: P15559, EVALUE 3.00e-18; EST_HUMAN HIT: BF879801.1, EVALUE 2.00e-59
caggacagaccacccagaagctggctgtcagagcattcagaaccatccacctacccggaagggtcctttgtcatacatggcagcgtaagtgtaagcaaactctcctatgaacactcgctcaaaccagcctttcagaatggcagggactccaaaccactgcagggggaactgtgggacagaagacatcattgaggtaagaccaggggctccccaagcccagaaggtggctcggagtgctgagccgctccccatgatggcactgtgtgggaagcccctcttcacacctttcccattcctcctggggagttagcactttaaggaaagagatcattattgtccttggtcagccaacttgacagtcttctttttccctgaaaatgcaaatattgagtgggtccgagtaaagctagatacacagaagacttgttgatatgaaacttgtttgtatgaaatcacatttggcagcaaagtctaaatagcaaggattgcaaacaaggtttgcttcatgctgttgcttcaa

SEQ ID NO: 8515 - DNA, 521 bp, Homo sapiens
  MAP TO CHR16.3; EXPRESSED IN ADULT LIVER, SIGNAL = 2.3; EXPRESSED IN FETAL LIVER, SIGNAL = 2.3; NT HIT: gi14777228, EVALUE 0.00e+00; SWISSPROT HIT: Q50906, EVALUE 4.30e-01; EST_HUMAN HIT: BG537490.1, EVALUE 0.00e+00
aggccacatgttttcaggagacctcattggaaggacctagccattggagattaactgatggaaatattttaaacctaaatttgtgggagtaaaggagaaaatgtcagtaaagcagcaagcagaatctgctgaggggtggggccctcatagtgttggcacctatagagtctcagccttggagccttctgattgttcaggtcacgctcccgggatcggcgtcggaggcggtcaagatctacctcccgagagcgacggaaattgtcccggtcccggtcccgagatagacatcggcgccaccgcagccgttcccggagccacagccggggacatcgtcgggcttcccgggaccgaagtgcgaaatacaagtaactactctgactccttcggtagctgcaaccaggagtgagcccttctctgtgttcccagggtctgctgagggccgtgtctggtggggatggggctgggctcaccctcaggagtagggctggggagtcgtgaacgggactcaggtgtgggaagag

SEQ ID NO: 8516 - DNA, 570 bp, Homo sapiens
  MAP TO CHR19.3; EXPRESSED IN FETAL LIVER, SIGNAL =   8; EXPRESSED IN ADULT LIVER, SIGNAL = 4.4; EST_HUMAN HIT: AI561224.1, EVALUE 8.00e-78; NT HIT: gi13651410, EVALUE 6.00e-78; SWISSPROT HIT: P35550, EVALUE 2.00e-17
cccaaagccctgttgtagacattagtcctttctcctctttaggccaactgcattgactccacagcctcagccgaggccgtgtttgcctccgaagtgaaaaagatgcaacaggagaacatgaagccgcaggagcagttgacccttgagccatatgaaagagaccatgccgtggtcgtgggagtgtacaggtgagcaggggcccagcaatacaccaagacagacatctctgtcccttgcaccccgagtgccatgatcctggggaccctccttcatcacctatcttcctctcacaggccaccccccaaggtgaagaactgaagttcagcgctgtcaggattgcgagagatgtgtgttgatactgttgcacgtgtgtttttctattaaaagactcatccgtctcccatgtctgctgctcattcctccccttgacctgctgacacagggagcacgcacccttggtcaattttgcggggttgggtaaattctcactcggtcacagagcgcatgctccgtttctagctgcctttgcgcagcggcagcctggatttcggttcttgggtgggattggta

SEQ ID NO: 8517 - DNA, 526 bp, Homo sapiens
  MAP TO CHR16.3; EXPRESSED IN HELA, SIGNAL = 0.97; EXPRESSED IN ADULT LIVER, SIGNAL = 1.1; SWISSPROT HIT: P39881, EVALUE 2.90e-02; NT HIT: gi9629189, EVALUE 1.30e-01
cccaaagccatcagagaaacataacacgttacactggaacgtcaggaatgatagtcgacttcccgtccaaaacgagggacagatggagagagggagccaggcgcggatccttccccaggggcccctgcatgcccagagcaagcatctgcaggcatctccagcagcaaaggacaccgctgttctccccggggagcttcagtgtcatcagagcctgaaggaggaagcaactcggcaccacgtggcccagagcaggctcgtgagctggcctcggtcagcaggtcgcctgggtctctgtctcagtgctcagcagggcgaggacaggacagaacgggccccatcacagactgcgcttagaaggaactcagtaaaacaaagaccattttcttctggaggcaactcaaggaggtaagactgtgagtcaagcgccttggaggataagaagtccaggtaagtagaaggcaggaggaagcttccctaatatcacctgcaaatctgcttccactggggcattctgttccccttttca

SEQ ID NO: 8518 - DNA, 509 bp, Homo sapiens
  MAP TO CHR14.3; EXPRESSED IN ADULT LIVER, SIGNAL = 1.2; EXPRESSED IN HELA, SIGNAL = 1.3; EXPRESSED IN LUNG, SIGNAL = 1.3; EST_HUMAN HIT: AW971153.1, EVALUE 7.10e-01; SWISSPROT HIT: P31695, EVALUE 3.70e-02
tcctagaagcaaaagtgtgtggacagggcgttgccaaattcctcagccagctgccaggtactgctaattccactgcctgaacagctggagaatccatctccatgaccaccactccggcgaaggccgccactgcctgacacctgtatcaccgaggccagcagggccgcctgacagcctgcctcactcctctgatcacttctccacaccacaactaaagggacaatctgatccctgtttaagtcctccaaaagctccttgatgtcctttcgataaggtctaaaaagcagaggcaggctacactgtagagagttggactccctcctcacaggtggattctgggtcttgttcacagttgggtgctagcacagggccagaccctgggtgaccaatgattccagggggtctttatgatacagtgcagtctggtgacatcataatgcaagccccctgcccaggagaggtttttggtccatttgaaggacaatcattggtcaatccagctaggatcc

SEQ ID NO: 8519 - DNA, 596 bp, Homo sapiens
  MAP TO CHR18.3; EXPRESSED IN FETAL LIVER, SIGNAL = 2.9; EXPRESSED IN ADULT LIVER, SIGNAL = 1.9; SWISSPROT HIT: Q09541, EVALUE 7.60e+00; EST_HUMAN HIT: BI596771.1, EVALUE 0.00e+00; NT HIT: gi15306952, EVALUE 0.00e+00
tgtgaatgtcagcccagaaggtgatcagagcctgttaattaaaatggaaagaagacagaagggaaggtagacatcaggttctccctggagacttttcgttttcatttacgctgcggaaactgacgtttttgcctaacaccccatgtaatgtaaacgtataggcttgagtacgtgtccggccgcatgtgtagtgaaccctaaagctttcctaattgtagttagcatcgtccctaagcggaacgattttccgtgaacatgatttgtacttttctacgagccgtacagtatacggagaagctgcacaggtcctcggcaaagcgattgcttttgccatacatcgtgcttaacaaagcgtgcttgaagactgagcccagtttgagatgtgggcttcaatatcaaaagaaaacgctgcgacctagatgtattcttggagtcacccagaaaaccatctggacgcagggaccgagcccccgaaaagcaaaggaggatggcagcaaacaagtgtctgtgcacaggagtcagagagggggaaccgccgtcccaacatcacaaaaaggtaaaaaggagtactttaatgattgggctttcaacagaca

SEQ ID NO: 8520 - DNA, 512 bp, Homo sapiens
  MAP TO CHR16.3; EXPRESSED IN ADULT LIVER, SIGNAL = 1.6; EXPRESSED IN HELA, SIGNAL = 2.8; EXPRESSED IN BONE MARROW, SIGNAL = 0.83; NT HIT: AF212247.1, EVALUE 2.00e-93; EST_HUMAN HIT: BI256698.1, EVALUE 2.00e-93; SWISSPROT HIT: O08581, EVALUE 6.20e+00
aaagtctgatctttttctcttaatccatagtgggttccagtcctacaagatttcagcaataagggcacactctggggctttgtgccatttgtggatgaacagcaaccaactgaaataccaattccaattacccttcatattggagactacaatatggatggctatccagacgctctggtcatactaaagaacacatctggaaggtaaggaaattaaatcaagtgagaaatatttgtaaactatgtgagaaatatttgcaaaccatggtactttgcaactgaatagtacctaaatatgttataatctcttaaataaggaacatggtgagctcagttcctgtttttaaatttggtccctgcacttctcacaactgcttagttgtttttttttttttcacagattcattatctgtaaaacaaaaatgaacatttagtctaaagcaaacagttatatttcactcaataaaacttaatctttaaaagttcaaaagttgttataggcaaatgacccaa

SEQ ID NO: 8521 - DNA, 502 bp, Homo sapiens
  MAP TO CHR16.3; EXPRESSED IN ADULT LIVER, SIGNAL = 1.1; SWISSPROT HIT: O88621, EVALUE 1.60e+00; EST_HUMAN HIT: AA181159.1, EVALUE 0.00e+00; NT HIT: gi14778732, EVALUE 0.00e+00
taaagcacagcttggattggaaatgccacgcacgctaggagggtggcgttagatgagttttgggcaaaggaagagagaaagcatagggtggcattgcattgcagatccctaaagaggaagaaggacccccactctgtaccctgagcctcccctcctgcttctcagctctcctctctgcatcccatatagggctcaccggcagctgttctccccatccgtgtgcagggacgtctcggcccgtcgaagacccaggcgggcaaaggagtggtacaaggtgagtgtcacgtcgctcaggctgtggatgccgtcaggctcatcgtagacattctcccagtaggagcgcaggcccggggtacctgcagggtagttcccgtacaggtaatagtccagctgcccaatgatttcctgattcaccacggcttcaaacttgcgggcaaagaaggtaggccgggctgtctgctgtactcatgggattaaaaatagaaaagccacatcagcgagt

SEQ ID NO: 8522 - DNA, 500 bp, Homo sapiens
  MAP TO CHR16.3; EXPRESSED IN HELA, SIGNAL =   5; EXPRESSED IN FETAL LIVER, SIGNAL = 4.3; EXPRESSED IN LUNG, SIGNAL = 4.7; EXPRESSED IN ADULT LIVER, SIGNAL =   3; SWISSPROT HIT: P56945, EVALUE 8.00e-11; EST_HUMAN HIT: BF688193.1, EVALUE 2.00e-44; NT HIT: AF218451.1, EVALUE 1.00e-44
ggacagaagagtcgaatgcccacaggacaccatcccggccatgcagggagcagcttggaggaaggagcagggcagagccagccccgtgctgagcctatggcagctgtgaggggtctattttctgctctcaccccactctctaattccctaaatgtctccaacaattactcttgaaaactttaaaataaaccaagtgaaaagatgaagatggtcaggaggcaggggggtggcaggccgggcccagctctgagcactgtcagacaacatgagaagctggggacccggggtcggccctgcagggcaagagctgggggctcagggggtcagcgggcaaagctgggccttgctctgctccggggcctcacctgctgcaactccagctggctcttgccctgccgcgtgatgctgcccttttccagcagctccttctgggtcttctcaaactcctccttcccctggagggcagagacaggggctgcgctgaggccagttttctgagc

SEQ ID NO: 8523 - DNA, 598 bp, Homo sapiens
  MAP TO CHR14.3; EXPRESSED IN ADULT LIVER, SIGNAL =   2; SWISSPROT HIT: O60548, EVALUE 5.90e-02; EST_HUMAN HIT: BF973625.1, EVALUE 0.00e+00; NT HIT: gi14754147, EVALUE 0.00e+00
gcataaagtaaaaatattaaaccagggattttctacacaaacataatgtataaagcatgcctaatttatagaaactagatcactcactcattctgctcagaaactcattgattttactctgaagcacccacgaatgacagattcccaggaggggcagagaaggctgagcagcaccacgtggggctggccgcgggttgtgggcatgagcacgcctggagaggccatggggctggtgacaagctctggccagaagaccccaaggtctgatcctggggtctgatccaggcctgcggcactgggtcctaggcagactgtctgcctggtgagacgtggaaggagccagtgtccgcagccgtctcaggacgtcagagagctcggtggcctgtctccagcagcatgctctccagatgcagcctgctgtcgctctccacatagggctggtgcagccacatggacaggtagctcagggtgaggtcgggatccccggtgtgggcaagctccttggccaccgtgcgcttcaggagcagctccttcctgtacatctccaagagcttatgcgaaacctcatctgaaagaaacgtgaatctcccttaatggc

SEQ ID NO: 8524 - DNA, 539 bp, Homo sapiens
  MAP TO CHR19.3; EXPRESSED IN ADULT LIVER, SIGNAL = 1.3; EXPRESSED IN HELA, SIGNAL = 6.9; EXPRESSED IN BONE MARROW, SIGNAL = 1.5; SWISSPROT HIT: P57780, EVALUE 9.00e-10; EST_HUMAN HIT: AA338338.1, EVALUE 1.00e-128; NT HIT: D89980.1, EVALUE 3.00e-39
cagttaatgccatggtccgctggggcccagggtgcagtacctgccggtcgttctccacgtcgtagcccaggctgatgaggcaggccttgaactcctcgggccccagcgccccgccatgatcctgccggggccatccgaaggcaggtgtgcgggaggggcggcgtggagaccaggatgagggatcggggtcacatgcagagggcagggggaagggacacgtaggggagggaaacacagagttagaggcaacatggacaaggagatggccagggacacgtggggtcgggggcggcacgggcccctttcatcctttccccaacctcggaagctcaaaggaaggcagaggcctccccgacctctctgcccacagcaggggtggcagctggatgctacagaactgaggacaagtcccaggactggtggagggtcggggggggggttctccttgcctttgggatttggagtgggacagaggggactgtatcctgtcctgggggcgccaggtgcagagctgaggctgcacacttctcagtccgtca

SEQ ID NO: 8525 - DNA, 598 bp, Homo sapiens
  MAP TO CHR19.3; EXPRESSED IN ADULT LIVER, SIGNAL = 1.8; EST_HUMAN HIT: BI518434.1, EVALUE 0.00e+00; SWISSPROT HIT: P20138, EVALUE 2.00e-33; NT HIT: AF135027.1, EVALUE 0.00e+00
cccatgacctttccctgtggcctttcctggagcctgtgccttacctgtcacattcacagagagccggtgatgtttataattccattttatacttcctttctccatacgaaagaagtatctccccgcatcacttcttctggcatctctgatgctcagggtgcaattcttggtatgtgggtccccaaggaggtggaatcggtcccgagtctcctcccacactgcccgagctgggttgtttgtggccactggagcatcctggtctgtattggccccttcccggaaccagtagccatgaactactgggccagggtaaatccagccatgcgaggggtaggagaaggagcagggcacatggacacacaggccttcctgcaccgtcacggaactctgcatcgtcagcagtttacttgtctgtccttccgccctctccctcccccagagcaggggcagcagcagcagcagcatgtctggggttagaggtgccagggccgcgagggaacgtctgttcctcagggttcttctctcaggaactgcgggctcaagacttagaggaggccctacaggaagacaggggcgaggtcggaacagtgacctcctc

SEQ ID NO: 8526 - DNA, 561 bp, Homo sapiens
  MAP TO CHR16.3; EXPRESSED IN ADULT LIVER, SIGNAL = 1.2; NT HIT: gi14778296, EVALUE 1.00e-117; SWISSPROT HIT: P28465, EVALUE 1.40e+00; EST_HUMAN HIT: BE167597.1, EVALUE 1.00e-104
tcggattcatcctgatttcctttggacaggcattaatgacttgctgtacttttcaaagtcatgttttgtaaaactttttgctgtcgcccaatacatgtagtgtaacattgtagataccatgttagcctattaagtgaaaaacctagcaagtataaataaaattctcattcttagttgatctttaaagtatgatttgtgcatcttcagtgaatgatgaacccacaacagccactgatcccgaagaaccttccgttgttggtgtgacgtccccacctgctgcacccttgagtgtgaccccgaatcccaacacgacttctctccctgccccagccacaccggctgaaggagaggaacccagcacttcgggtacacagcagctcccagcggctgcccaggcccccgacgctctgcctgctgggtgagtagtcttctgtcccataacagatctctcctcctcaaagactgaggctcctttacgggggtggaaacaacgtggttatttattacctagtggctagtagcctctggggaggctgctgtgcattgaagcaagggaggtgt

SEQ ID NO: 8527 - DNA, 523 bp, Homo sapiens
  MAP TO CHR18.3; EXPRESSED IN BONE MARROW, SIGNAL = 0.82; EXPRESSED IN ADULT LIVER, SIGNAL = 0.91; SWISSPROT HIT: P25391, EVALUE 2.00e-33; NT HIT: X58531.1, EVALUE 9.00e-86; EST_HUMAN HIT: BG035905.1, EVALUE 1.00e-58
gcaagctcttgagttcccacaaaggcgtgttcctacctgtacagaacatctgctagtctctggaactcagcggcatggtcctcagctctgtagaccaggtcgactgcgttcctttgggacatgtgcatgaccaggtcatctatgtggtgcctgattttggcagaccataaaagtagcttatcctggtgatcctctaagtgctacatggagaaattaatattgtaaatatatgcacatctacttaataacagatatgtgtgcatatagaaaagatgtgtgaagattctttaaaaactgtactgtggctgtgctgagatgtaatttacctctagagcatcttgtacagcatctgtttgtgcagcagcagcatctatcaatcctcttccttggacaatgagctctgaggtcagattttgttcttcttgaacatgcagctttttatcctgcagcagaaacggcattttaagggtgcttcataaaagcaaccctgcttctgacctttggtgcctaatgctacgtgcag

SEQ ID NO: 8528 - DNA, 547 bp, Homo sapiens
  MAP TO CHR16.3; EXPRESSED IN LUNG, SIGNAL = 1.7; EXPRESSED IN ADULT LIVER, SIGNAL = 1.1; EST_HUMAN HIT: AL580276.1, EVALUE 1.00e-39; SWISSPROT HIT: P51828, EVALUE 9.00e-08; NT HIT: gi4557254, EVALUE 8.00e-40
gccgaagatgccttagactggggctcgggtctgccctctgcctctggcttggctgctggccagctgggccatgctgggccatgctgggtcctcactcgccctctctgggcctcagtgggacccacccattccttcaccatcccacctgaggttctgggaccccactggtgtctacgtccacaccctcctctgggagagttggaggtggtcgctgtgctgatgcagttgtgggtatttgattccaaaagcatgtcccccaaggggcggtcggaggatgactcgtacgatgacgagatgctgtcagccattgaggggctcagctccacgaggtgaggtctgagacctctgtccacccccctctcctctccccctcggataggggtcccctatatgggcaggcccatctcataccccatgcctggtggcccagccttgttccttccccctgcctgctgccacctcctgagggaatggaccccttcccagcccccatctcaccgcagctgcccccgcccacaggccctgctgctccaagtccgatgacttc

SEQ ID NO: 8529 - DNA, 579 bp, Homo sapiens
  MAP TO CHR19.3; EXPRESSED IN BONE MARROW, SIGNAL = 1.4; EXPRESSED IN ADULT LIVER, SIGNAL = 6.2; SWISSPROT HIT: Q61245, EVALUE 1.10e-02; EST_HUMAN HIT: W88721.1, EVALUE 4.00e-52
acccattcatctcatttcgcctcccaggtcagggagaagaagggcagccctcagtagactcggagggaaccttggggagaagaggcctaatacctctccaagaccctccgccctctttcccctctcccaggcgccctgatctggttgtggaagtggcccatcccaaaataatccatgaatctggggcacaaatcctgcgccatgccaatctcctggtaagccccaccccaaccatttacgcagagccctgccccttctgtcttggtctcaccccaccctgaagtggatatccttccctgacctcaaccctcccctccttcatccaccccaggtggggtccccctcagctctaagtgaccagaccacagagcggcagctcttggaggcctcacagcactgggaccacgccgtgtttgtggcccgaggggccctgtggggcgctgaggacatcaggagattggatgcagctgggggcctccgggtgaggcctgctgggctccccaggaaccaggggaggcctgcaaagaccccactccccctaacccgggctcttgcttccagagccttcgtgtcaccatg

SEQ ID NO: 8530 - DNA, 516 bp, Homo sapiens
  MAP TO CHR18.3; EXPRESSED IN BONE MARROW, SIGNAL = 1.5; EXPRESSED IN ADULT LIVER, SIGNAL = 1.1; EXPRESSED IN HELA, SIGNAL = 1.6; SWISSPROT HIT: P25391, EVALUE 2.00e-31; NT HIT: X58531.1, EVALUE 2.00e-86; EST_HUMAN HIT: AI769870.1, EVALUE 2.00e-60
ttttgccttcatgttgggtcattgccattgttgtctttctagggaagcagccaggtcagtgcccatgtaaggaaggttatacaggagaaaaatgtgatcgctgccaacttggctataaggattacccgacctgtgtctcctgtgggtgcaacccagtgggcagtgccagtgatgagccctgcacagggccctgtgtttgtaaggtaagtggggaggtcagagacacccctgagcttcctttgagcttctctggaaaaggagtgttttccattggctccaatgatcagttcttgagcaaagtggtaaggtttaagcagaactccccttgccccttctctccaagccacaccgagttggctgtattatatatgcttggactcacatgggcatctggcttctttttttgtacctctggtaatggtgatatattccagaggcatttctgtgacttcttagaggacaccaaacactgcatacctttatattcccacctcctctgtgggcctcatctctgtt

SEQ ID NO: 8531 - DNA, 578 bp, Homo sapiens
  MAP TO CHR14.3; EXPRESSED IN BONE MARROW, SIGNAL = 1.5; EXPRESSED IN ADULT LIVER, SIGNAL = 2.2; EXPRESSED IN HELA, SIGNAL = 1.1; NT HIT: M11800.1, EVALUE 8.60e+00; EST_HUMAN HIT: AW582621.1, EVALUE 5.20e-02; SWISSPROT HIT: Q62266, EVALUE 1.40e+00
ctggagtgactctgtgctgcctttgaaaagcaggccatgtgatggcgcagagacttctccagctggtcccaattccctccctcagattgttacttttacccaggaagtgaaacaacttactgtttacattttgtatacacacacacacacaaatataaaattttttaatagatcaaatccttactccttcatcaggacctgaaactaaacctgtaagcagcttcttccagagccttcctcttcttccccagtccacacctgcagacctgcccctcacccgtgccacccgcggtttgtacaggaatcagacaagaaggcaagggcccgaattggaagcagatgtttgggacgatgagtgaggttggggtggagacaataggaaggacgtagaccctgctagagctgcttgttgctctgacataccgccaaggctcagaaaaatagagtgactgttcctggttaaatacccagctgttactcgtgccaaactttcctgggcctcaatcctcagagtctctggctctgcttccaaagttctccatatcctcatgccaaccactatcttggccccttcttcc

SEQ ID NO: 8532 - DNA, 551 bp, Homo sapiens
  MAP TO CHR14.3; EXPRESSED IN ADULT LIVER, SIGNAL = 0.97; SWISSPROT HIT: Q13591, EVALUE 1.80e+00; NT HIT: AF179588.1, EVALUE 1.30e-01; EST_HUMAN HIT: BG912213.1, EVALUE 0.00e+00
cgtgaggagcctagaaatgcctggggggacatttttcctccttgtcatgatccaccagctcacgctgttctcatgggtggaaggtgaggggaagatgctaggaccttaccagcacaaggttgtagtgagtcatgggtggagacaaggctgccatggttttatgctcaggaggagtcaagacagagacagagagataaatgacgggagtgtctactacttatcctgctgcttggagctctcacttccgacattgaacatggggaccagcaggcccagcagccacctctttccgaagacctcttgtaagttcttgcgccagggccgggccctcactgccacccccttccgcacctggtggcgggtctgcccgcggaggatcaacagcagctggtggcagcagaagccggcgcaggccaggccgatggcgaaccagaggtagagcatgaggatgacgaacatttcagaacccaggacagctcctgcagggcacggggaggggaaacaccagagccgctttacacccaggccaccggcataactgcgatctaggc

SEQ ID NO: 8533 - DNA, 512 bp, Homo sapiens
  MAP TO CHR19.3; EXPRESSED IN BONE MARROW, SIGNAL = 3.6; EXPRESSED IN ADULT LIVER, SIGNAL = 1.5; NT HIT: AF072845.1, EVALUE 0.00e+00; EST_HUMAN HIT: BI832920.1, EVALUE 7.00e-78; SWISSPROT HIT: Q09472, EVALUE 3.20e-01
gagaaggaaaggtagtgtcctgagaagtaatctccaggctggagagatggaacaggaccacatgggaaggggactcccagagacatggagagtgacaagaaattggaagtggcagcagagacccagccatgagaaggggacgctaacaggcagcccctccagaactccctgtctcacccccttccgcccccaaggacccaggccctgaagcagaatggatctcccagaagggaaggggtgcagggagaagaaccccactttcatcacccgtccctgcagacgtcacccaagcacccatctcacaaacgctctgcctaccatcccctgtaaccactggcttcacctgggagcaaaagcaggaagaggatgtgacccagatggatcatggtggactggggtctggcaggggtctggcagaggactgtggtccagagaagtccagaggaactgtgggggagcagagaagtagcaatagcggatgtcaccctgctggtgtcaaggccatctgcttc

SEQ ID NO: 8534 - DNA, 595 bp, Homo sapiens
  MAP TO CHR19.3; EXPRESSED IN ADULT LIVER, SIGNAL = 1.5; SWISSPROT HIT: Q9TC96, EVALUE 1.10e+00; NT HIT: gi11425973, EVALUE 0.00e+00; EST_HUMAN HIT: BF368912.1, EVALUE 8.00e-66
actcactcacacacttgccggtcctggtgggtcatccacctcccacctaaagtcacttaatctcagcagagttcactctcatcagacaccaccacaccctcacagagggttacactggtccagggtccacagcctacacccacaatcatctcagataccacagcctcagggtttctcttctacacacccacaactctcggtaatgcattcacagtaggaatgctcatattttcaactcagaaaacctcccctgtttctttcttggtttatgtgacttgagattattgaaggctgtgacttttcaactcacgggtagtgatgacattgttctctccttctgggcagctcttcggaattgtgtccagtcttctgtgtgaatctctgagtgggatcatttaaatgctgcaactcagagatgccctttggcttcatgccagattccaagcccctcccagcaagctttccgtgcagcaggagaaagactcaggtgtcagaaagaaactctgtcacaaccatagatgtttgcaggtctgtgtctgtaatgcagcagaaatgacagtgggggaggtaccaggctgtggattgggttaccagg

SEQ ID NO: 8535 - DNA, 505 bp, Homo sapiens
  MAP TO CHR18.3; EXPRESSED IN ADULT LIVER, SIGNAL = 1.6; EXPRESSED IN HELA, SIGNAL = 1.6; SWISSPROT HIT: Q9X7E5, EVALUE 3.50e+00; NT HIT: gi16171488, EVALUE 4.80e-01; EST_HUMAN HIT: AI792949.1, EVALUE 7.10e-01
ctacagcagtgggccagtcacctcaaggctcctgctgagacgtcttccccactggctgacggtgcataatcccaggagacccagttgcaaggactgtcccccaggatctggaccacagcgtgcacccgagcttcacattcctggacaccaagagaggcaaacgcaagttcccctaaagccatggcccctctcctttctccaaggtctgcagtcctcctgggctttggcaggtaacatttctgggtggttctgactactaggctacaaatctccctctggtactactgtgaactgctagggaaaatgatcagttacaacaattcttcctggttccaagaagatgaggtagtgcctactctgatatgtgaatcagtcaatcaatgaaccataatataatttccctgaagagaacaaatttttgttgaaaaatggtgtttatctataagattcaaacacaaaaagagatatttcagtgggggtggtagaggggcagaataaatggttt

SEQ ID NO: 8536 - DNA, 515 bp, Homo sapiens
  MAP TO CHR19.3; EXPRESSED IN ADULT LIVER, SIGNAL = 1.6; SWISSPROT HIT: P43630, EVALUE 2.00e-29; NT HIT: AF001888.1, EVALUE 0.00e+00; EST_HUMAN HIT: BE091490.1, EVALUE 0.00e+00
cagcatttccctctctccaggactctgatgaacaagaccctcaggaggtgacatacacacagttgaatcactgcgttttcacacagagaaaaatcactcgcccttctcagaggcccaagacacccccaacagatatcatcgtgtacacggaacttccaaatgctgagtccagatccaaagttgtctcctgcccatgagcaccacagtcaggccttgagggcgtcttctagggagacaacagccctgtctcaaaaccgggttgccagctcccatgtaccagcagctggaatctgaaggcgtgagtctgcatcttagggcatcgatcttcctcacaccacaaatctgaatgtgcctctctcttgcttacaaatgtctaaggtccccactgcctgctggagaaaaaacacactcctttgcttaacccacagttctccatttcacttgacccctgcccacctctccaacctaactggcttacttcctagtctacttgaggctgcaatcacactgaggaa

SEQ ID NO: 8537 - DNA, 596 bp, Homo sapiens
  MAP TO CHR18.3; EXPRESSED IN BONE MARROW, SIGNAL = 1.7; EXPRESSED IN ADULT LIVER, SIGNAL = 1.6; SWISSPROT HIT: P51379, EVALUE 1.10e+00; NT HIT: Z97335.2, EVALUE 8.90e+00; EST_HUMAN HIT: BF891914.1, EVALUE 8.40e-01
ggctcaagtctcagagggtggaggggctgggaaaggatgggctcagtgggacagctgccaacaaggtgggcaggtggactgggtgagaagcctgactccatatgggctcccaaagccaggaagctgcctgggaaagcgggcactgggcggcaccatgccacaggtcagacaagaacagataacaagaaggacagctcaggagcaccgccaccgtcccgtccccccgcaggacgtggggaggcggagcagggagcgggagccatttgcaggggcagtttcaaagaatctaactcaccaaagcttaaatctgagtttgaaaaacgagagaattcgctagataagtttaactttcctaccgccaagcaaaatcgtgagctcagacataaaagagaatgacatttttctattctggggttttgcacatcttgtaattgtaaaacatacatcaattgtgctgttgttttcaaaacaagtggattgtcataggaataaaagctgaagacttcacttgcggtagacactgttctgtaatcttgtttataaattgttaagtttgtacatataatcatatttcccccacaagaacagcagaagca

SEQ ID NO: 8538 - DNA, 528 bp, Homo sapiens
  MAP TO CHR19.3; EXPRESSED IN ADULT LIVER, SIGNAL = 1.8; SWISSPROT HIT: Q9QZS3, EVALUE 6.50e-02
ttcccctctctccaacacacacccacacatcccacaggcaggtcaccccgcaggcgtccccagcacatagcaaagctcacccgctctctcctgcgtggtcgctcttggattcggtgcaggaatcactggggcttcttgggcgccgggaacctttcatggtgaaaatttccagggttctccaagtcagccactgccagtgtttgtctgtctcctgcaaagatttcttcttggctcccgaatcctttagttcctttgagagagtggtgtcagccccaaagctgctcccgaaggcttgggttgtgtagcgacggggctgtggccagcggcaggtggatgaggctctgacaactgagctcttgggggaatcttgtacactgtcagcagggggtggagccaggggatttgtcagcaggaactgatgtgattggctgttcctggtatgacaacgggaggggccctcatggaggattggggcgtaactcaatccatagatgaccgatcaacagaacctgcctaatcccatcaaga

SEQ ID NO: 8539 - DNA, 507 bp, Homo sapiens
  MAP TO CHR16.3; EXPRESSED IN BONE MARROW, SIGNAL = 1.4; EXPRESSED IN ADULT LIVER, SIGNAL = 1.2; SWISSPROT HIT: Q59801, EVALUE 3.20e-01; NT HIT: gi14775539, EVALUE 1.00e-60; EST_HUMAN HIT: BI755862.1, EVALUE 1.00e-60
tgtggaagatgctggaagtggtaagggccctgaagccaccgccatggtctgtgtgtgttcccatccaaactgcagacagaaccacatcaaacccagccacagcgcggcacagacctggtgtggaagccccactcccgcctctgcccccaaccacaagctcatggctatggaacaaggcaagacccttccatctggtgagagaaagcgggggccctggtgggggtaccagctgggggtcccgaggagttctgagagtcctctgacagggactggggagatgagcaagtttgatgcccctggaggggctggatgtttccagcttccccccgaagccctcgtcctgcccaccactgaagtctgtgtgtctctttctctaccgcagccacggaggatgcaaaggaagagggtctggaagcccagatcagccgcttggcagagctgattgggaggctggagagcaaagtaagccctggcctgaccacggcgtctactccttccaacccctga

SEQ ID NO: 8540 - DNA, 569 bp, Homo sapiens
  MAP TO CHR18.3; EXPRESSED IN ADULT LIVER, SIGNAL =   1; SWISSPROT HIT: P36706, EVALUE 9.40e+00; NT HIT: AF098634.1, EVALUE 1.40e-01
ggggcactctatttccagttcatccttctgaaaaactgacctttttattcatctcatcttgttcacctttaggagggatataggaagtagtcaagtagccttcagctgcaagattcgtttttggtgactcaccaagtgactcttttgccaaagacatctatgttattgacctatctcaaggactacattgtcatcaaagaaatcaatttattggagttagtaaatcgattaaaatgcaaacatccagtaaaaatgtcttcagtatgcagatttttccattaatgatgaataatgaattagttaatacctaaaaggcaactaaaggtggcagaaaaaagtttgatggggtggaaacatgcatgtacagtataaagtgagatctgggaacaagaggatctgagaatgagaagagctgagatgaaagaggaaatgaacaaaaggcccctaagtcagcatttgagcacatgtggtgcctgggagttttgggctgagggtgaaattaagcaagaaagaatagcaaagaaaaatgtgccttttatactttgtctaggggcagatgtgatacagtg

SEQ ID NO: 8541 - DNA, 541 bp, Homo sapiens
  MAP TO CHR16.3; EXPRESSED IN ADULT LIVER, SIGNAL = 0.94; EXPRESSED IN BONE MARROW, SIGNAL =   1; SWISSPROT HIT: Q99547, EVALUE 5.00e-04; NT HIT: gi14779532, EVALUE 3.00e-58; EST_HUMAN HIT: BE047811.1, EVALUE 0.00e+00
ccccaaaggtctgctgttactatcagagatatgtgggctaggttccttcattcaatgtaaaaaaggacaaaatagtggctgggagggggagtagtaaaaatgtataaatccatgtacaacttctataggtttaatattttttagttgtgctactaaatcaataaactgaacagaaacaatttcatgggctttatgtcaccggaatgatgagttaaatttaccaggagtttccttctgaatgccacaagcatcatcagtatcaattttaataaacctactctttctctttaagctctggcaaatccaagtaccagtgctcttcactaatgattttcttttcttcttcttctagttgtttcttggtttctgagtccagtcccctttgcataaactgtgaaaacaaacaaaatcaatgtcagaaacttttcccattttagaactgaggaaaccccaaataattttcttcttctacttgttctccttcatttatctatggaacccatctcaagattgagggttggggcaagtgatcaaacggttt

SEQ ID NO: 8542 - DNA, 542 bp, Homo sapiens
  MAP TO CHR16.3; EXPRESSED IN ADULT LIVER, SIGNAL = 1.1; NT HIT: gi14779172, EVALUE 0.00e+00; SWISSPROT HIT: O14197, EVALUE 5.90e-01; EST_HUMAN HIT: BG340557.1, EVALUE 0.00e+00
acaccctcactttccattcgctctggttgagctgttcatttttccacccagcaattctcacatctaggtaaggccatcagagccctttcagagtgaatgaggatgagaaacagaaacacaaatggaaaacgcaagtgcactggactccattccccttggaatgactttcagatgatgaggtatgtccaccccatcagccacattctgattccctctgctccgcctcgagcaccagttcccactcaccagcactgacattcctggacacgacgggcaaggggtcggtctcctgttcaggtttgatgaggatggagatggcagaggaggctgtgatctccctgaacacgctgctcactccttgcgtggactccttcagcaaggtcacattctgcgttgactcctttaagaggtctgaaacggtgggagcaaacttactctgcccgttcaaatccttgttgtcaatgttaatcgcaaagagtatggagttcggacctgtccaaaaaaagggaaaagtctggagtgcttgctgatgggcagtcata

SEQ ID NO: 8543 - DNA, 503 bp, Homo sapiens
  MAP TO CHR16.3; EXPRESSED IN BONE MARROW, SIGNAL = 1.6; EXPRESSED IN ADULT LIVER, SIGNAL = 1.6; NT HIT: gi16165100, EVALUE 0.00e+00; EST_HUMAN HIT: BI861779.1, EVALUE 1.00e-106
atcatggtggaggagaccacatgagtgatcttctgaccgctggaacggacaccctttgcttggatgttagaattcttctgataaccaaacacataccttaaagaaacgaaacaggcctatcagtaagacagcaagtaagaaaagatgctgactaactaagaattacaaagacacacatacctcaacaaaggattctcaatgagtttcagcttttgtttcaactgttccatctccgaatacaattttaacccttccaccatggagatattttcctgctcggaatcagagttacaatttgacaaactgcttctcagatttaaaaatttcctgtaactctcctcacattgagacaacagattgtggtagtcaacaataagtcctgatggaactcggtcttcaagaatgtcataatgcctgaaagtttaaaagcaaagtgaaatccactgcctttcaggcacattttcctatcattaaaacagcccacttagccctcaaagacccag

SEQ ID NO: 8544 - DNA, 511 bp, Homo sapiens
  MAP TO CHR18.3; EXPRESSED IN ADULT LIVER, SIGNAL = 0.99; SWISSPROT HIT: O08785, EVALUE 4.70e+00; EST_HUMAN HIT: BE903306.1, EVALUE 1.80e-01; NT HIT: Y10259.1, EVALUE 0.00e+00
ctcgtgcttctcagggactcctaacccatgctcttctcaccatagctcaacacatgtgtggctgcaggggcagctgcggtgtttgctgaacttctcttgtctgtccatgacctggtgggaaaatgaggagaggaagaggaaacatccttccttttttattagacagggctcagaattactatcagcttgagtacacatcctgaacattttcagctatctggtccaaggctaggtcatcgataaagctgaacactcacagtatccacacagcagtttaaaaattgggtaatttgataaaagaattaagtcctcatgggaaaagtctgaagcttgttgatcttcctcacacaaatatgtgcagtttggtggtgctttcatttggaattctatatgaagttagaggtagaaaaacgtgagttttctcagtaactatgagccctgaagcttctgttctgattggaatatagcagaagacctagaattgaaaatgtctggaattgcaagttctctg

SEQ ID NO: 8545 - DNA, 559 bp, Homo sapiens
  MAP TO CHR18.3; EXPRESSED IN ADULT LIVER, SIGNAL = 1.3; SWISSPROT HIT: P15976, EVALUE 9.10e+00; NT HIT: AL139076.2, EVALUE 3.40e-02
caaggttgactttgctcgtgtcacatgaaaatatgcaacgcttccttgaaataattctgtgtttgcaatattcactttcaaataaatttcatttcactgtctctgcactgtttgtagcatccctatattattagtgcagtttgaagaccagagacttaaagagcttcacattttctgggactcctttaatgtcagtggagtgaaacccaattagaacttgggtatagggggtggaaagtgtaaatataggtggcatatttgtttcctcctgcaatcccatcaaaacaacagtaaatatacatatttaaagggataaacactcaaagattatataagtagggaagcggaaaacaccgaagatgtcacatttgtttccaggcatatccattttaaaagaaaactcctagcccatgagagcattttaagtaagaagcttcaacatattttgggcagaatgaaggcagctaatgaagcagtcattgacacagcagaggttgaagccccttaaagcgtgggaagtgattgtcctttggagccaggacagagagtggtgggagga

SEQ ID NO: 8546 - DNA, 569 bp, Homo sapiens
  MAP TO CHR16.3; EXPRESSED IN ADULT LIVER, SIGNAL = 2.1; NT HIT: gi14777832, EVALUE 0.00e+00; EST_HUMAN HIT: BI770559.1, EVALUE 0.00e+00; SWISSPROT HIT: P24001, EVALUE 2.00e-44
agtgtcaccgttatttccgcaggtcctctctgatgacatgaagaagctgaaggcccgaatggtaatgctcctccctacttctgctcaggggttgggggcctgggtctcagcgtgtgacactgaggacactgtgggacacctgggaccctggagggacaaggatccggccctttggtgccaactctgcctctcttcacagcaccaggccatagaaagattttatgataaaatgcaaaatgcagaatcaggacgtggacaggtgggtggatttcccctcaggcaccaggtcacatgtccccgcccccaggcactccaccctgtgtggggctcagggtgagaaggatgaagagggacccacaggctccctcaccccttaccgtgggcaaatgcttgcacctgggtggcagtgagtgggcgggtgggggatctggacgcccggggagactgagggaggcatccaagccccagggctccttgaggaaacaacaggggtgccagacgtggcccgggcccctggctgggcccagttcggggtgtgtgggagctgaggactcactgggcttgaggac

SEQ ID NO: 8547 - DNA, 595 bp, Homo sapiens
  MAP TO CHR16.3; EXPRESSED IN ADULT LIVER, SIGNAL =   1; SWISSPROT HIT: O86956, EVALUE 3.40e+00; NT HIT: AF121967.1, EVALUE 3.60e-02
tggctcatgtttctttgctggtactggtgatcacaaaggtgacccagctgcaccactggtgagaatccaactctagaaccatggaaccaattagtcctagagttatttcatgtcagactattagaagtctggtccttgggctttttggtcagatgaatatgcaatgcagggtctgtacatccagcaacttgttgaagtagtaggtgcctatctttggaagtgacagtcgttgccttctggtcactgtactgttctccaaaaagactgtcagaaggaaagatttgctgaactgatgaatactggcttccaaaaagaatcccatccaaatgccagactctcacatctggagctaaaacaataagtgatagaggctataaacttcaaaataaaagattccttgccctcaggcaggaaggcgttataaatctcaccgagaagttgagaagctggttaaactcattatttgctgttcaagactctcctcttgcagttttcatcctttgttaaatttataatctctaaatccttagccaagatccaagccttttgggaggtagcagccggaagatttagaagttattcagtccccaggggt

SEQ ID NO: 8548 - DNA, 571 bp, Homo sapiens
  MAP TO CHR18.3; EXPRESSED IN ADULT LIVER, SIGNAL = 1.6; SWISSPROT HIT: Q9UIV8, EVALUE 1.00e-20; EST_HUMAN HIT: AL603394.1, EVALUE 1.00e-95; NT HIT: AF216854.1, EVALUE 0.00e+00
  unsure 222
  unsure 440
aggtggcgagatggtatttggaaaaggaagagggctttcctgatagacctgaaattgctccttgtcttgaaagtctctgtttcctggtccacaggtcaagaagagcgtatttttaagataatgcaagagggctgacaacccccccccaaaagaatttgtgcataggaaacaaggaagccccctgactgcgcccaacctcctccaactgggaagcggtggctncctcgggtccccaggaggaccatgccaattgcagtcaagatgcccacaggggaaaagaagatgttgccatcatttgttttcttcagctctttgaaaagatcaaacccaagtcgagtgctgacggcgccaagtgaatccatgatgattttagcgagacctagaatagcaagaacaacaatcaaaactgaacatttgaattactctgtgtcaggggaatncctttctgcttctattcctcttcttgcatcgatccggaatacagggatttccacccttttggtgaaaggtcgctgctgcctgcttctcacgtcctctcttggccttctcttgctgggagacatccatcaat

SEQ ID NO: 8549 - DNA, 599 bp, Homo sapiens
  MAP TO CHR18.3; EXPRESSED IN ADULT LIVER, SIGNAL = 1.3; SWISSPROT HIT: P07947, EVALUE 5.00e-24; EST_HUMAN HIT: BG573220.1, EVALUE 0.00e+00; NT HIT: gi4885660, EVALUE 1.00e-79
tggggcagtattttgagaaagatatagtgaaagtatttatttttcacccaggtgcttattccctttctattcgtgattgggatgagataaggggtgacaatgtgaaacactacaaaattaggaaacttgacaatggtggatactatatcacaaccagagcacaatttgatactctgcagaaattggtgaaacactacacaggtatgtgaatatttcaaaggtaaaaattatttcttcatattctagtttatgaggacaaaatccatatcctcatttctcttaagatttaacacacttatttacacataatacatgcccaataaatgtctgttgtattctaaagggaggaacaggtaatacttagtacttgcattgtgctactcagataatgtgctaatagactctcatcatttgggtccttatatcttactggcatagtatttacattggagttcatttcaccacatgtaccttatgaaaataaacctaaaagcaaatatttatgggcacttagtaagtaaaactaaacattgggtaacagaaaaagctatgtcagaaggattaccttcctctgcatgggctggatcgcataagctttc

SEQ ID NO: 8550 - DNA, 587 bp, Homo sapiens
  MAP TO CHR18.3; EXPRESSED IN ADULT LIVER, SIGNAL = 1.6; SWISSPROT HIT: P04881, EVALUE 1.90e+00; EST_HUMAN HIT: BF336960.1, EVALUE 8.30e-01
gggcttgataaacccctttcacaaacagagagaaataaatactcccacaaagcagatcatgaagcatatttttcccagggagctccattattttaaaaacagttcctttttttcatttttactttaagggcctgggcgggcgagctgctgctctctgacagctgtccccagccatcactcacgctcgggagtgagggagccatcgccaaacagcaaatcatcgtcaagtcaattggcctcgacgtgcctccaaaagggagagggatgctcccttggcttccatggaaaatattctccaagcaagctcccttgccccaggctccatcttcttcatctcctttttttttttttttctggttttagcgggaacgccgcgaacacacgtattctccagggtcctcacttggtgctggatttcaccaacagcagcaccacaggggaggtcagaggaccgtcagtcaacaggtgagccagtggaagtataaacattgccacatcctctcttcctcctgccctggagcccagagaggttttatgtccatgtcatttaaggaaaggagcccacgagcagaagagaccgtgtggtt

SEQ ID NO: 8551 - DNA, 524 bp, Homo sapiens
  MAP TO AC008033.8; EXPRESSED IN BONE MARROW, SIGNAL = 2.7; EXPRESSED IN BRAIN, SIGNAL = 4.3; EXPRESSED IN LUNG, SIGNAL = 3.5; EXPRESSED IN FETAL LIVER, SIGNAL = 4.4; NT HIT: gi11434083, EVALUE 0.00e+00; EST_HUMAN HIT: AU119366.1, EVALUE 0.00e+00; EST_HUMAN HIT: AU119366.1, EVALUE 0.00e+00; SWISSPROT HIT: P49719, EVALUE 2.00e-81
tctaatcttcccggatgcagcaaagcaggatccagtgtatccggtctgtttgtagtcatgatcattttaactctgtgcagagtatcaaatccatccatttgattcagtaacttcactgaagtactctgaatctctctgtcagctgaagtaccctcagaaaacggacaaccaccaatagcatctatttcatccataaaaatgatgcatggtttatggttcctgggataattaaacatttctctgatcaaacaagcactttcaccaatgtacttgtctacaatagaactagatacaacctttaagaaattgtagtccagctggctagcaacagcttgtgccaagagtgtttttcccatacctggtggtccgtgtaacaaacagcattttggaggcattattcctacccactgaaataactctgggtttgtaagagctaattctatcacctctcttaattcccagatctgttccgatagccctccaatctcagaataagaaacattccaggggtcctcatgagacat

SEQ ID NO: 8552 - DNA, 579 bp, Homo sapiens
  MAP TO AC004171.1; EXPRESSED IN BONE MARROW, SIGNAL = 0.47; EXPRESSED IN BRAIN, SIGNAL = 0.62; NT HIT: AJ131016.1, EVALUE 2.00e-06; EST_HUMAN HIT: AF074614.1, EVALUE 6.00e-08; EST_HUMAN HIT: AF074614.1, EVALUE 6.00e-08; SWISSPROT HIT: O08789, EVALUE 1.70e-01
catgaccacaaaacagccactaccactcctatctgagcattccatctgtggcctggggatccccctgcccctgcctaccatagccagtgcctcatacaccaccaaggagcccatgggaaggtctactcagcctggcttcacccacccacagaatctgagcacaccgtacaggggcccgagggtcacttagcccagtccatcactggtagctcctcagcacccctcctgggatctgaggtcagccccactcaaccttcccctggcaccacagctgacatccacactcatgtgcctcctgtggatctgggaactgacctgcccaacctgtcacagccattgccaatatcagcatggactacacgggtcccagagggctgtcccaccactgctactgccatcacccacaccacatccactgccaaagggctcaagaattcaacttcatacctgaactactgatgccattcccagaagccaagcaagccacttggaagcacaagaactgtcttgcctaaacccgctaacattggtgccagtgtatgctgccctggggcccaaggacacacatgctcatcccac

SEQ ID NO: 8553 - DNA, 596 bp, Homo sapiens
  MAP TO AC011517.5; EXPRESSED IN LUNG, SIGNAL = 3.9; EXPRESSED IN BONE MARROW, SIGNAL =   4; EXPRESSED IN BRAIN, SIGNAL = 2.5; EXPRESSED IN HEART, SIGNAL = 2.4; EST_HUMAN HIT: BG488791.1, EVALUE 0.00e+00; SWISSPROT HIT: P78329, EVALUE 4.00e-19; NT HIT: gi14765752, EVALUE 0.00e+00; EST_HUMAN HIT: BG488791.1, EVALUE 0.00e+00
aatgagtgagtgggcagaggaatgagtgagcggggagaggaatgagtgagcggggagaggaatgagtgagcggggagaggaatgagtgagcggggagaggaatgagtgagtgggcagaggaatgagtgagtgggcagaggaatgagtgagcggggagaggaatgagtgagtgggcagaggaatgagtgagctgcctccctctcttctctgtgttcccacaccccagccaccctcaaaacccagctccctgagccccattcctgcccctcaggaactccatgcatcctgagaccccagacccgtcctgctgacaaactcaccaggccctggtgtccccaaaaccagttctgtttcgggggttgaggaaaacactggaggcggcggcagttgtcatagaaggtgtaggtccaggccaggacgcgggccaggagccaggagcctccaaccagcagcagaagcagccacggggatgctgccacgggcccgaggcccagccaggacaggctcagctgcggcatcctgcagggcagacgggatggagggtgggatcctgaggcccagggaagggcccaggaagctccaaggacagtggaaag

SEQ ID NO: 8554 - DNA, 548 bp, Homo sapiens
  MAP TO AF045450.1; EXPRESSED IN HEART, SIGNAL = 1.5; EXPRESSED IN HELA, SIGNAL = 1.3; EXPRESSED IN BRAIN, SIGNAL = 0.99; EXPRESSED IN FETAL LIVER, SIGNAL = 1.5; EXPRESSED IN PLACENTA, SIGNAL = 6.6; EXPRESSED IN BONE MARROW, SIGNAL = 1.4; EST_HUMAN HIT: BI087886.1, EVALUE 1.00e-122; EST_HUMAN HIT: BI087886.1, EVALUE 1.00e-122; SWISSPROT HIT: P03384, EVALUE 2.00e-01; NT HIT: AL163280.2, EVALUE 0.00e+00
tcccaatcattgtccctctcactgttctctcaggcaacagatgattggttatttctttatctccgtttttgcctaattagcattttagtgagctctccttactatctggttgggtgtgagctaagttgcaagccccttgtttaaaggtggaagtggtcaccttcccagctaggcttagggattcttagtcagcctaggaaatccagctagtcctgtctgtcagtcctctctctcaacaggaaaacccaagtgctgttggggaggttggcgatgactgctctaactgcttcctgctggcctggggtgtagtaggggttgtgcagttgagatttcctcaggaggggtgccttcgatgtcgttaacattggagcatgggctgtcagggtggtccaggggtccgcggtagatcttagtcatggactgcatctggggctccatttgaagaatgatttgtagttttacagctttaattctggaagagacaaacttaacaaggaggttaaagatacagggattcaaatgtatggcctggggatacttctttggca

SEQ ID NO: 8555 - DNA, 545 bp, Homo sapiens
  MAP TO AC010327.5; EXPRESSED IN FETAL LIVER, SIGNAL = 0.58; EXPRESSED IN BONE MARROW, SIGNAL = 0.52; EXPRESSED IN HEART, SIGNAL = 1.1; EST_HUMAN HIT: BG181576.1, EVALUE 0.00e+00; SWISSPROT HIT: P49455, EVALUE 4.00e-02; NT HIT: AF261887.1, EVALUE 1.30e-01; EST_HUMAN HIT: BG181576.1, EVALUE 0.00e+00
attagcccggtgagtcagtggggtggagggtggggaacatcctggctggggatcaaaatctgggtccctgacagggcgcttcccatctgcaggtacctggtggacgtgcggcaggagcagctgcagggattcaacacccgggtcagggagctagctcaggcagctggatttgctccacagaccggggccaggccttcagagaccttcgcacgtttctgcaagtcccaggaatcagctctgggcaacactgtcccagctgtggaacccggaactccgccccttgacatcctggcccagcctcttgaagccagcaacccagcccttgagggcctgacccagcctctgcagggtgggaccccacactgtgagccctgccagctgccctctgagtctccaggttcactctcagaggttctggctcagcctcagggggccttggctccgcccaactgtgagtcagactccaaaactggagtctgacccaacccctagacaccccttatctccaacttccaaagtcaggttgtaggatgagaacccgctga

SEQ ID NO: 8556 - DNA, 590 bp, Homo sapiens
  MAP TO AC005794.1; EXPRESSED IN LUNG, SIGNAL = 0.46; EXPRESSED IN BRAIN, SIGNAL = 1.8; EXPRESSED IN BONE MARROW, SIGNAL = 2.2; EXPRESSED IN HEART, SIGNAL = 3.7; EXPRESSED IN FETAL LIVER, SIGNAL = 4.4; EST_HUMAN HIT: AV737313.1, EVALUE 2.00e-81; SWISSPROT HIT: P40199, EVALUE 2.00e-35; NT HIT: gi13632099, EVALUE 0.00e+00; EST_HUMAN HIT: AV737313.1, EVALUE 2.00e-81
tgtgtcctgcactaaatgcccaaatctcaacacgggacaaaatgcagagggggatgcaggcacagcccaggcctgacaatctcatgtgtgtgaagcagaactgaccgccagcacccagaggtatgggggaatcactcacggtgtacgtggagctggccagttgcttggtcagagtcgtaactggcatttatggttcgtagggtgtaggatcctgcgtcctccagggtgatgttttggaacagcagggatccattggggtatactgtctctcgaccactgtatgcggcccctgggatatttgcttgaatgtctgttatataaccagcaatgagagggctcccttctgccgttttccccttgtgccaataataggcttgaatagtttctgaaatattgcaggccagtagaagaacatcctttccctctgcagcactggacggcagggcttcaatagtgaactggacagtggtgggcgggtgccagaaggttaaaagtgaggctaggaggtgaagacagcatcagtcaatactgggacctatggagtgggatggaaagataaggccctgggtcctcagcaggtctcctcatcc

SEQ ID NO: 8557 - DNA, 514 bp, Homo sapiens
  MAP TO AC026774.4; EXPRESSED IN FETAL LIVER, SIGNAL = 0.91; EXPRESSED IN BRAIN, SIGNAL = 0.75; EXPRESSED IN BONE MARROW, SIGNAL = 0.56; SWISSPROT HIT: P38806, EVALUE 1.60e+00; NT HIT: D26076.1, EVALUE 2.00e-03
aaatccatggagccattgtcgtgtttgccctcacaccattcttttcaacacaagacagaatactccagtcaatgcatattaaacacatcactagctgcattgaacacaaaacaatttaagtgtaaagtctattactttttgaagcatccaattaaatctgcaacctgtgtttcctgttggccacatccatgtgaaggcagaaattacagactcacaatagcaaccataatcacttctgtggttctcgtctgaccccaattgtggcattccccgcctgcttcaaagattcctcactattctttgagtccttgaagattgcttctgtagttcttgtctcctgctctggtccctgcagcaacatcaccacagtgttgcccagcctgcctctcactgcccagaatgccttggttccagtgttgtggaatctgctgatgctgccctgtgctgttgatgtgccctggagagtttagagaatctgtgaatgtatgaggcctggtgtacgaacatgccaatg

SEQ ID NO: 8558 - DNA, 522 bp, Homo sapiens
  MAP TO AL049779.5; EXPRESSED IN FETAL LIVER, SIGNAL = 2.5; EXPRESSED IN BONE MARROW, SIGNAL = 1.6; EXPRESSED IN PLACENTA, SIGNAL = 1.3; EXPRESSED IN BRAIN, SIGNAL = 2.4; SWISSPROT HIT: P17169, EVALUE 7.30e-01; NT HIT: gi7705790, EVALUE 1.00e-115; EST_HUMAN HIT: BG699072.1, EVALUE 1.00e-116; EST_HUMAN HIT: BG699072.1, EVALUE 1.00e-116
tatagccacggaagcaggtcctctccaggtgatgggctctggaaacagtttccattcctgtggcttttacctgcctctctctgactcatgtctccacattcatttcctctaggcccaccttttagtctccgggccagttcctgggtgaagaggatgttggctagcttgctgtgacagtaggccaggcctgcattgtagaatttctcgccctgcaggttatggaagtggatccttcccaggtgatgtgcgagggaagacacatttactatccttgatggggctgattcctttagtttctctagcagcagatgggttaggaggaagtgacctgttgagaaatactagaattaatgaagttcagggccatgtaggaatgacaggagtcgtggtgagcaggcctcacctatgggaggcagataattcagaaataaggtctttccctccaacttttcattatcaactagaaaacaagtttaatgaaggtttagggaaataacaacagccaaagacatgaggcatcct

SEQ ID NO: 8559 - DNA, 516 bp, Homo sapiens
  MAP TO AL109944.19; EXPRESSED IN FETAL LIVER, SIGNAL = 1.2; EXPRESSED IN BONE MARROW, SIGNAL = 1.3; EXPRESSED IN PLACENTA, SIGNAL = 1.4; SWISSPROT HIT: P82921, EVALUE 2.80e+00; EST_HUMAN HIT: BF309002.1, EVALUE 1.80e-01; EST_HUMAN HIT: BF309002.1, EVALUE 1.80e-01; NT HIT: gi14786239, EVALUE 1.20e-01
attgctggactctgaatgccattggcagactgaacactctagagtcctatcacacataaatcagttctttcttcatatattatgtctgaacagtctacatgagtctctttgacacaagtctctggtacagatgaagaccagagagcttgggagtcactgctgaagagaagagtgaatgagtaaacaaaggtagatgaggcaaagaacataccgaatgtcaggattcagatgggactgctgtatgatattaatgaacacagatatctggagaaaccatgtcaaagctttccaagagagactgtgaacagtacctggggaacaccaaaaagagagatgataaagaagggatgacaagtccctgcaggcctggaccaagtgcaacacagaacaagcaacaagaccaaaagaaagcagtgtgtcttgttaagtttctttgcaaggctttaaatcagctgtggcttcctggcagggtgaggcagggctccaaccattacaggttacccagaagccaccaga

SEQ ID NO: 8560 - DNA, 592 bp, Homo sapiens
  MAP TO AF002991.1; EXPRESSED IN HEART, SIGNAL = 1.8; EXPRESSED IN BRAIN, SIGNAL = 0.99; EXPRESSED IN BONE MARROW, SIGNAL = 0.96; EXPRESSED IN PLACENTA, SIGNAL = 0.87; SWISSPROT HIT: Q90328, EVALUE 1.90e+00; EST_HUMAN HIT: AI635997.1, EVALUE 5.00e-33; EST_HUMAN HIT: AI635997.1, EVALUE 5.00e-33; NT HIT: AL163281.2, EVALUE 1.00e-26
ttccgttggttctgttcctctagataacgctgacatatacactctgtgtgtcttccctttcatcctcatcgcctttgtgaaaggaaaggaaatctcaggacccccaaattactaagccaaagagaaaagtcaaactgggaactttgtcccacagacctgccttccattctctttgtaaataagatgttaccaagatcaaaaagctacatacctccctcaccattggcccacaaggaaattccttgtggagggaggacaagtgacgatccctgtaaattatgcatttagccaaaggctaatcagaaactcaaaagaatgcaaccattggtctcttatctgcctgtaacctggaagactcctcctggcttcgagttattctgactttccagactgaacccacgcacgtctcacacatattgattgatgtctcacgtctccctgaaatgtataaaaccaagctgtgccctgaccatcttgggcacctgtcatcaggacctcctgaggctgtgtcacgggcgcacgtcctcaaccttggcaaagtaaacttgtcaaatgggttgggacctgtctcagatattttgggctcacccct

SEQ ID NO: 8561 - DNA, 528 bp, Homo sapiens
  MAP TO AL031719.10; EXPRESSED IN HEART, SIGNAL = 1.6; EXPRESSED IN HELA, SIGNAL = 0.87; EXPRESSED IN BONE MARROW, SIGNAL = 0.93; EXPRESSED IN PLACENTA, SIGNAL = 1.2; EST_HUMAN HIT: BG332524.1, EVALUE 7.40e-01; NT HIT: gi14774679, EVALUE 0.00e+00; SWISSPROT HIT: Q03293, EVALUE 3.80e-02; EST_HUMAN HIT: BG332524.1, EVALUE 7.40e-01
accgttcccatcaatagcagaggtggcccaggccccacgtgacattcgctctgtcccaggccccgctgagagccccacccagcacatccagaatcttacccttcttgccacctaagaatgacctggcctcgaggtcctccaagtacaggtccctggccccgaggtcctccaagtacaggtccctggccccaaggccctccaagtacaggtccctggccccgaggtcctccaagtacaggtccctggccctgcaggtctgggtgaacttgctccctccaggcacacgggtctctccccttcccagcaatcctgtgatatctgccccccttttgagggcagcattcccgtggcgggggcaggcctggaacacacgggcggggggaggcttgtggttcctatggtcctgggggtacctatggtcctgggggcaactggatggctggggggtgtgaagtccccagggcaggcaatagtcgctcagtaccagcctccaggccccgggggccaccaggcttaaaagcaacaggc

SEQ ID NO: 8562 - DNA, 587 bp, Homo sapiens
  MAP TO AC010320.7; EXPRESSED IN HELA, SIGNAL =   1; EXPRESSED IN BRAIN, SIGNAL = 0.86; EXPRESSED IN BONE MARROW, SIGNAL = 0.87; EXPRESSED IN PLACENTA, SIGNAL = 1.1; EXPRESSED IN HEART, SIGNAL = 1.5; EST_HUMAN HIT: BG913529.1, EVALUE 0.00e+00; NT HIT: AF020092.1, EVALUE 2.00e-03; SWISSPROT HIT: P10266, EVALUE 4.00e-54; EST_HUMAN HIT: BG913529.1, EVALUE 0.00e+00
agctcaaaaatcggagcttgtagctgtaattaaggtactgactgcttttaagatgcctgtcaatgtaatttctaattcttcatatgtagtccattccacacaattaaaaatgctcagttatgatttcaacagatgaacagctaatgactttatttacccagttacaaaccacagttaggaatagaatgcaccctttttcattactcatattagagctcatacaccctttccaggacctttaactgcagggaatcaaatggctgatcgcctagttgctactgcaatatctaatgccagacactttcacaatttaacccatgttaatgcctctggtctaaaacatagatacagcattacctggaaagaagctaaatctattatccagcaatgcgcaacttgccaattggtgcattcctcatcttttacaggaggagttaatcctcgaggattggaacctaattctgtttggcaaatggatgtcatttatgttccttcttttggtaaactggcttatgtgcatgtatgtgtagataccttttctcactttgtttaggctacctgtcaaacgagggactcttctgcctgtg

SEQ ID NO: 8563 - DNA, 504 bp, Homo sapiens
  MAP TO AC008243.6; EXPRESSED IN FETAL LIVER, SIGNAL = 0.96; EXPRESSED IN BONE MARROW, SIGNAL =   1; EXPRESSED IN PLACENTA, SIGNAL = 1.2; EXPRESSED IN HEART, SIGNAL =   4; EST_HUMAN HIT: AU155108.1, EVALUE 1.00e-103; NT HIT: gi13647090, EVALUE 0.00e+00; SWISSPROT HIT: Q59055, EVALUE 3.50e+00; EST_HUMAN HIT: AU155108.1, EVALUE 1.00e-103
tgccacatatttgacttgggtgagtgactagaaactccaagagcgggataaaccaaatttggctagctgaactgtataattttaaaatatttccttttatctcttattctggctttacctgacatgatggcagcatgtgagcaaggacaattccaacatggccctgaaaaagtcagtaagacaaacaagttagctttggtccccacagcttttcctcattctgaaaccacaatcttgccaaataaaaacatgaccttgaatgtaatatagaaaagtctcataatcttagaaagactaaaaaggatgaaaggagagataaaataccccaccgctgcagaaatccacaattctgtcaccaggtttggcctgatttgttaccacatagacaaggttgttcaactgttgctgcttcctcaaagctcgatcactggacattttacctgagaaagacaagaaatgaagaacacaaaacattatatattttgagggaacaagaagacacgc

SEQ ID NO: 8564 - DNA, 561 bp, Homo sapiens
  MAP TO AL121866.13; EXPRESSED IN BRAIN, SIGNAL = 0.78; EXPRESSED IN LUNG, SIGNAL =   1; EXPRESSED IN FETAL LIVER, SIGNAL = 0.79; EXPRESSED IN BONE MARROW, SIGNAL = 0.96; EXPRESSED IN PLACENTA, SIGNAL = 0.76; SWISSPROT HIT: O62621, EVALUE 4.10e+00; EST_HUMAN HIT: AL042165.1, EVALUE 8.00e-07; EST_HUMAN HIT: AL042165.1, EVALUE 8.00e-07; NT HIT: L44140.1, EVALUE 6.00e-04
gagggggaggagaaggtatgctgggaggtgacctggcaataaagggaatagaactaacaattactgaatgcataccatgagtcagccatcttacattcattatgccatttaactggcacaacaaccatttgatacaggtaccatttgttatcattttacacatgaggagatggagactcagaaaggctaagtgacttgcccaagctcatacagctagttaggttgtggagcatggaatctaataacgtgcaactgtgggtgcctgcaaagtttgctcttccaacttactctgtgcctgcttctcatttttcctaatacctgaattctccttgcctctcagattttcatcaggaggtggcttctcaatctggaaatcagggcccatgagggaggaaagctgtagtaaatatgctttggtgagcaactagcttttctatttccaggatatgaacatctcatcagctgaataaacttaaggttatttctgcccacccacccacctacactgtcactattgctacctgacacttcatgataacatcacccttcaggattctccaa

SEQ ID NO: 8565 - DNA, 569 bp, Homo sapiens
  MAP TO AC008727.5; EXPRESSED IN FETAL LIVER, SIGNAL = 0.54; EXPRESSED IN BONE MARROW, SIGNAL = 0.7; EXPRESSED IN PLACENTA, SIGNAL = 0.7; SWISSPROT HIT: Q08462, EVALUE 1.00e-13; EST_HUMAN HIT: R35910.1, EVALUE 6.00e-54; EST_HUMAN HIT: R35910.1, EVALUE 6.00e-54; NT HIT: gi16159207, EVALUE 4.00e-54
cgctaattcgtgttccttggaagtaaatcattatgctgtactttcctccaaggacatgcgctgtatgaaatacaagaagttttcattcctggaaaagcccagggcccaagggtgcatacgcagtggttgaaacaagtcacggcattactgtgaaccagcatttgagaatgtctctataaaatgctcagcttcaggtcagcatccagctgagtaactggacggttgtcattgcttcacagcttctttccaagccaaaattcagtggagttgaaaagattaagaccattggcagcacatacatggcagcaacaggtctgagcgctgtgcccagccaggagcactcccaggtaagacgcgttggccacttaacggcacaggtgagcctcaaccccatccacaaaccaccctgggaccaaaacagccatgaaatgccccaagaactgtatattttgtacaacctaaagctcagggtcaaggtcctatgagagaagatgaaaattccagacttcttagagccagaggatctgttcacagaactccttctgctggccaacaggagaagaaaaacc

SEQ ID NO: 8566 - DNA, 582 bp, Homo sapiens
  MAP TO AC005578.1; EXPRESSED IN BONE MARROW, SIGNAL = 0.99; EXPRESSED IN PLACENTA, SIGNAL = 0.54; EXPRESSED IN HEART, SIGNAL = 0.98; EXPRESSED IN BRAIN, SIGNAL = 1.2; NT HIT: gi5730058, EVALUE 3.60e-02; EST_HUMAN HIT: BI756881.1, EVALUE 1.00e-102; SWISSPROT HIT: Q03017, EVALUE 7.00e-03; EST_HUMAN HIT: BI756881.1, EVALUE 1.00e-102
cctcctcctccctaccagtcaggcgcaacacccctcattatagcagctcagatgtgtcacacagacctgtgccgtctcctactgcagcaaggggctgccgcgaacgatcaggacctgcaaggcaggtgagcatctcccctcccagccagtccaccctatgctgtgtgaccttcggcaagacttaacctaagtaagacgatctagccagcctcctcttcccagcctggcctgggtgctgaggtgggcatgggggcttgggggatgttctcatctcctcagtagccccctcccctggtaggacggccctgatgctggcctgtgagggggccagccccgaaacagtggaggtcctgctgcagggcggagcccagccgggcatcaccgatgcgctggggcaggacgcggctcactatggcgccctggcgggggacaaactcatcctgcaccttctgcaagaggcggcccagcgcccctccccacccagcggtatgcaagccccacctccccaatgcatttgcttcttggcagcttcttgtcactccccttctctttatcgtgaatagtttcaaggtacccccgatt

SEQ ID NO: 8567 - DNA, 563 bp, Homo sapiens
  MAP TO AF131216.1; EXPRESSED IN BRAIN, SIGNAL = 0.61; EXPRESSED IN FETAL LIVER, SIGNAL = 0.38; EXPRESSED IN BONE MARROW, SIGNAL = 0.71; EXPRESSED IN PLACENTA, SIGNAL = 0.4; EST_HUMAN HIT: BF568403.1, EVALUE 7.90e-01; SWISSPROT HIT: P40136, EVALUE 1.40e+00; EST_HUMAN HIT: BF568403.1, EVALUE 7.90e-01; NT HIT: AF071932.1, EVALUE 8.40e+00
tttaaggtcttacgggccacataacatgattgcctttctaaaagaattatttattcatggaagtctgaagcaagagtctcttgaagttcttttttgtccttgataaaatatttacttttcttgttttatcctcctacgagatccctactgtccatgcccacggcctagattggtctctggccttgagccttacagagcatgctgggtcccagggcttgtcctcaatgcaccacacgcagttggctgatgaactaggacctctgtgtcttgaagtgggagtggatggtaggaagggggagatggaaaagcaggggtacaaggctgatgctggcagcaatgaagaccttggtgattcgtggaccatagtggagactgagagggagtggagagacgaagagaaaccagagcatcattcctgatggagccctgtgttacccccaggctcctttagggcatgagagtgccagggctggaccatctccaggctgcacactttttctctgcagctgtgagcagagcccaggctgtctgtccctcagcatcccctaaatctgcgatgcaat

SEQ ID NO: 8568 - DNA, 535 bp, Homo sapiens
  MAP TO AC010339.6; EXPRESSED IN BRAIN, SIGNAL = 0.59; EXPRESSED IN BONE MARROW, SIGNAL = 0.49; EXPRESSED IN PLACENTA, SIGNAL = 0.46; EST_HUMAN HIT: AA305440.1, EVALUE 7.00e-66; EST_HUMAN HIT: AA305440.1, EVALUE 7.00e-66; NT HIT: gi14731249, EVALUE 5.00e-66
acgatttggaatgccttttgatgcacccagtagagatgcacacaggaggccttcacaggctgcagaaactggaatttcaactgagtactttgcttcctttaaccttaattataacaaaagagcagactgctgcaactcctaagtgatacttgatataaagtcccatcaaccttgactaaacagagacctcaaccttcttgtgcatcacacttgtgatgactgccttttcaaaagctttaaattctgcttacttactgaaccacactctgcctcagaccatttcgcaactggtttttgttcatcgtaggattccattcctgcttgtccagatgtgttgacacaaaattatccactttctgcctcaggttttggtaagctggctaaaatgttaaaaagaggaggcaaggtcagaagttatatgcaccaaagttttgaacttagtctctcagaacactgcttttcacagaaacgttattaagtctaaatacacttccactgtgcatgaagatcaccatgcaatgtggcagtcaggaat

SEQ ID NO: 8569 - DNA, 560 bp, Homo sapiens
  MAP TO AC008518.3; EXPRESSED IN BONE MARROW, SIGNAL =   2; EXPRESSED IN PLACENTA, SIGNAL = 4.5; EXPRESSED IN HEART, SIGNAL = 3.9; EXPRESSED IN BRAIN, SIGNAL = 4.1; SWISSPROT HIT: P39188, EVALUE 2.00e-05; EST_HUMAN HIT: H81486.1, EVALUE 4.00e-18; EST_HUMAN HIT: H81486.1, EVALUE 4.00e-18; NT HIT: AL163279.2, EVALUE 4.00e-11
agcccaggtaccagaatgtgaaccaagaagccaccttggaagtggttcctccagcctcagctgttgcaatcctggccattcccagtcgagctactccagccccagccactccagccccagcagaggtcccagatatcgtggaacacagaagagacctccccatcatgccctttctgaattcctaacccacagaatctgtgaacataataaagtgattgatgttttaaactgctaaaatgccgtgggggaggtgggttagtttgttatgaaaccaactcctctctgcttttcccacctcagggcacaaagcttaagcagtttatcagcaggctcaaacaaaaaacaaaacaaaataaaaaacgcagaaagctcttcattaaagaaatcgaactaaggagaactgaggcagatgtcatggatataaaacccacacccacttccacccacgcccagaatgaagactgttatcattttggcctggtatggttggcttacacctgtaatcccaacactctgggagacccaggcaggaggattgctcgagcccagaagttcaagac

SEQ ID NO: 8570 - DNA, 553 bp, Homo sapiens
  MAP TO AC007758.1; EXPRESSED IN BONE MARROW, SIGNAL = 0.46; EXPRESSED IN BRAIN, SIGNAL = 0.63; EXPRESSED IN PLACENTA, SIGNAL = 1.1; EXPRESSED IN HEART, SIGNAL = 1.2; EXPRESSED IN HELA, SIGNAL = 0.8; SWISSPROT HIT: Q14957, EVALUE 1.40e+00; EST_HUMAN HIT: AI374724.1, EVALUE 5.00e-08; EST_HUMAN HIT: AI374724.1, EVALUE 5.00e-08; NT HIT: AL163281.2, EVALUE 9.00e-06
gtaacgcatgcaatgcgaagccctgaattctgggatgagtctccttccacagattgctccttaatgtcctgtccatctgcatctgaaatcccactctcatgatcccatcacatgcatcaatgttggtgagattgcgcataagagtagtgggaatggaacatttaaaaagagcaaccccttgcaaggaaagtattatgggtgaggtaatgggccctgcatgaagaataggatttggatgtgagggggtgagagagagagagtacctgagaaggttccagaaggaagagtaaatgtgctccggaccagagatccaaaggtccctggtggcttctgcatccagcaagcaggccaggaagcctggaacctgaagcccagaatgcggggatgtgtggacagaatgtctgtgttccctgacctcaagttcatacactgtcctcacccgcaatgtgatggtaagaggcagggcctctgggggcgagtgggtcatgaaggtggacccctcatgcatgggattggtgcccttataaaacagaccccagacagctatctcacc

SEQ ID NO: 8571 - DNA, 552 bp, Homo sapiens
  MAP TO AC008282.2; EXPRESSED IN BRAIN, SIGNAL = 2.1; EXPRESSED IN LUNG, SIGNAL = 1.9; EXPRESSED IN HELA, SIGNAL = 1.7; EXPRESSED IN BONE MARROW, SIGNAL = 3.3; EXPRESSED IN PLACENTA, SIGNAL = 1.4; EST_HUMAN HIT: AL046559.1, EVALUE 1.00e-108; SWISSPROT HIT: P28481, EVALUE 1.80e+00; NT HIT: gi15297201, EVALUE 1.00e-108; EST_HUMAN HIT: AL046559.1, EVALUE 1.00e-108
gaaaaataatcattcagacactcccttacctgtctctggggccaggaggctttgagaatggcttcagttctaaagaacacgaggagcttgctgtcctcctcagtcaggtgaaatgattgccccaaaatctgcagcacgtgaatgcggggccgcaccggccaggcgtcatcagcacagaaaggccgcagccactccagcaggtcctcaggtgaaaccagctcctcactgcagggcaaaatccagaggtatctgtaaactcctaagccttttattttcccccttccggtaatcaaatgtggtcactgacctaacacttgtttgttggatgacttcgtttttttcctcttgaaaggaaaaattttggtttttaaatggcttacagcgaactgtattaggtatttaaaacctatgtaaaatgaatgtaattttaaaacagtatcatattaaaatgagttatataaagcagataaacatccttggctagcttatttcaaaatttaataagtagtaaggtttatttctgttaataataccaatagtgcaaggctgcat

SEQ ID NO: 8572 - DNA, 596 bp, Homo sapiens
  MAP TO AC020894.3; EXPRESSED IN HEART, SIGNAL = 1.2; EXPRESSED IN BRAIN, SIGNAL = 1.9; EXPRESSED IN BONE MARROW, SIGNAL = 1.2; EXPRESSED IN PLACENTA, SIGNAL = 1.2; EST_HUMAN HIT: AU128804.1, EVALUE 0.00e+00; NT HIT: gi16171599, EVALUE 0.00e+00; EST_HUMAN HIT: AU128804.1, EVALUE 0.00e+00
taaaacgccccaagtgaaaggcaaccatggatacatatttcccactgcatgtgcagggagaattaaggaacatgctagatggaaacctactctcatatttaaaaacaggtatcaattttcagttttgagtaaaagatacctactgtgcgaaaatctttttcaaacttgtaagcaccacctcctgtagcacatagcaccgtctgcaatgttgagaagtttttatctcttcccatttggataaaagtaggcaggtcctgggttggaaacctgataaagtgcaagttccctcttcggccaaaaagtgttaaatctttcagttcaaggtgtacatcccgaatgccggtggatccatatgccacgttagaagtcaaatatttccgaatactttttaaactctcaacttcttcttgctcttcctctgctgtgatatcaataggttcaaagtacgagagctttactagagttcccccaatgtccatgccaaaccatgggaaagctatgggaggaaaaaaaaaaaaaaaaaaaaaaatatatatatatatatatatccattttagaaacacaaattaaaaaccagttagccacaaacttcattt

SEQ ID NO: 8573 - DNA, 561 bp, Homo sapiens
  MAP TO AC006942.1; EXPRESSED IN BRAIN, SIGNAL = 1.2; EXPRESSED IN HELA, SIGNAL = 1.1; EXPRESSED IN BONE MARROW, SIGNAL = 2.2; EXPRESSED IN PLACENTA, SIGNAL = 0.8; SWISSPROT HIT: P18627, EVALUE 4.10e+00; EST_HUMAN HIT: AI129391.1, EVALUE 0.00e+00; NT HIT: AF289221.1, EVALUE 0.00e+00; EST_HUMAN HIT: AI129391.1, EVALUE 0.00e+00
cagagagacgctaacagccccatgtctgtgtccatcacccactgctaggtagtcaaagaagtggggtgagggcatgcagagtgtgggtggccaggcttcgcagcccatgggtgggactctggggagacagcagcagcagcagccgccgaagccccagctgcaaggccaccagacgcactcctgtgcctggttcctcagtccccaacaccaggtagcaagctctgggcagctgggcctggtagacctcatcttctgtcttctctggtggccctggctctggagaaagaacagggggcactgacatgacaagtagcatgctaacctttgcaagccacaccacatcctgatcccaagttctgaacgcgtggggtctctgaacacaggttttgggagcctcctgccaggggagggcctcggggctctagctggctgtcagcaacttgaagaccacaatgatgtcactcagctcaccctcttcctctttctcagccttggcccccattttcctggagaaactgtgcagctgcaggtgatcctcttagcaatacacatggcgaacac

SEQ ID NO: 8574 - DNA, 594 bp, Homo sapiens
  MAP TO AC018555.4; EXPRESSED IN HEART, SIGNAL =   1; EXPRESSED IN BRAIN, SIGNAL = 1.1; EXPRESSED IN BONE MARROW, SIGNAL = 0.93; NT HIT: AL445563.1, EVALUE 8.90e+00; SWISSPROT HIT: P53550, EVALUE 5.80e+00; EST_HUMAN HIT: BG951846.1, EVALUE 2.10e-01; EST_HUMAN HIT: BG951846.1, EVALUE 2.10e-01
accctgacagcagaaacagcatgtgcagtgatcatcaaaataaaattgaattttgtctaaaatgttgacgtccaagttagaaacatgaatgcatcttcttcctattaaccacaacaagaccagtattcctcagcagaagatgaattatacaattcggatcattgatcatactgagattcgttgtcagcttgacttttaagatttgccaggtattagaagagcttatttatagaaagcagatggctttttgtcatttaactcactgaaatttacttagtatgaggaagggagacatcaagctggctccatgataaaagctctctaaatacattagctccttgagtggactgcagagggacaaatagaacacttcttttaaaacaaattagccttcttttatgttttagaagagataaggccaaagtcctcagcagtgaatgataacattagccgaagcaatttcagaatttgctttatcaaacgccgaattctctctcatcccattgaccatggtgctacttttctcataaggtgtcctcactgctttcctagaatgcatcaagttcaaacaacagtgccttatttcaaacccca

SEQ ID NO: 8575 - DNA, 541 bp, Homo sapiens
  MAP TO AC004171.1; EXPRESSED IN BONE MARROW, SIGNAL = 0.41; EXPRESSED IN PLACENTA, SIGNAL = 0.55; EXPRESSED IN BRAIN, SIGNAL = 0.56; EST_HUMAN HIT: AI909504.1, EVALUE 1.20e-02; NT HIT: gi11526387, EVALUE 0.00e+00; SWISSPROT HIT: P58182, EVALUE 1.00e-102; EST_HUMAN HIT: AI909504.1, EVALUE 1.20e-02
acaggccagctttagcaatggcttaatatcacagagaaaatgatggatacggttggaaccacagaagttcaagcgagaagtcattacggagtgcagcagggcatggaaaaaaccaatgacccagattgtgatggccatctgggtacagagctgagggttcatgatgacagtgtagcgaagtggcttgcagatagccacagagaggtcaaatgccatcacggcgaacaacatggactccgtgctgcccaggaagtggaagaaatgaagctggcttatgcatcccaagaaagaaattgctttgtgtgtagagagaaagttctgcagcatttttggcagtgtcaccgtagagtaacagatatccaggtaggacaggtttcccaggaagaaatacataagggaatggagtctaggatcggagatgacaatcatcagaacggctccattcccagtcacactgatgaagtagatggtgaggaaaaccacgaagagaaaaggctgcagttcttgaatgtctgtcactcccaagaggagaaattcggtg

SEQ ID NO: 8576 - DNA, 538 bp, Homo sapiens
  MAP TO AL109753.9; EXPRESSED IN HEART, SIGNAL = 2.6; EXPRESSED IN BRAIN, SIGNAL = 4.6; EXPRESSED IN PLACENTA, SIGNAL =   2; EXPRESSED IN HELA, SIGNAL = 2.8; EXPRESSED IN BONE MARROW, SIGNAL = 2.2; EST_HUMAN HIT: AA127403.1, EVALUE 1.00e-100; SWISSPROT HIT: Q61687, EVALUE 2.00e-32; EST_HUMAN HIT: AA127403.1, EVALUE 1.00e-100; NT HIT: U97098.1, EVALUE 0.00e+00
ccacgttggtttgttaagccaataatctaaatatgtttacctttggcagcatgggagtatccctcttcttcttcttttctgaattagggtcatctaataagtctggctcaaaagtataaagttcagtaagctcattcatagtaaaatgacgctccacctgctgctgatcaacaactcgaaaagacagtgactgcttagttacttgccgatcataaatcttatcttccatggttccctttgtaaaaagaaggaagaatatacaaaaaaataaaattttgtaagcatgaaacttaatcaaggataaatacggttactggttaatatgaaatggtaaaactttatggtagtatattgccataaagaaaaactcatcagcaattttgcttaattcatgaaagatttcatctgtttagcatagtttaccataataaataaaattacattactgataattattctatattaactgaccaaaatgcattcaagtgttgctttatttatttctgtactctgtaggaggaggacagcaggcagatac

SEQ ID NO: 8577 - DNA, 506 bp, Homo sapiens
  MAP TO AC018757.4; EXPRESSED IN HEART, SIGNAL = 3.4; EXPRESSED IN BRAIN, SIGNAL = 2.1; EXPRESSED IN HELA, SIGNAL = 2.7; EXPRESSED IN BONE MARROW, SIGNAL = 1.6; EXPRESSED IN PLACENTA, SIGNAL = 1.8; EST_HUMAN HIT: BE786159.1, EVALUE 7.10e-01; NT HIT: AE006240.1, EVALUE 1.20e-01; SWISSPROT HIT: Q08258, EVALUE 2.10e+00; EST_HUMAN HIT: BE786159.1, EVALUE 7.10e-01
cagctctgacactgaccagccctgagatcgcccctccctgagactcggcttcctcagttctacaaggaggaaaataacagaacctcccccatgaggctggtgcgaatcaaatacaaagtttgccgaacacttggtgcacagtaacagcacaataaatggtagtcatattatgaaggatatacttttttctgaaggtaaaagccaacatcctcagacaataacagccaagaaggaattcagcttagtacaactaaaataaaaataggacagctgaaactgtttcctgaggatgactatttatgaggccaatttcgctttcccagtgctaatgaatcccccacggcagcctctgtgcagctctgcgtccagagagcagggacttgccttccctggagttcttcgaagcaccgcagacacttccagtgctcaatcagcgtttaataatcacagcaataatcctaataatgaccagggtaaagcgcagggggagaaggagaagatgcacg

SEQ ID NO: 8578 - DNA, 519 bp, Homo sapiens
  MAP TO AC016594.5; EXPRESSED IN BONE MARROW, SIGNAL = 1.5; EXPRESSED IN PLACENTA, SIGNAL = 1.2; EXPRESSED IN HEART, SIGNAL = 1.4; EXPRESSED IN BRAIN, SIGNAL = 1.5; EXPRESSED IN LUNG, SIGNAL =   1; NT HIT: AB020695.1, EVALUE 1.00e-112; EST_HUMAN HIT: AL133748.1, EVALUE 1.00e-112; EST_HUMAN HIT: AL133748.1, EVALUE 1.00e-112; SWISSPROT HIT: Q49421, EVALUE 1.60e+00
aaaaatagctcattgcccccttaccttatctggtgcatctacctcagggggttttgaagattctaccaccagtggaacaagatttgtagagtcttcactggaattaaaaggctgcaattttaattcttcatctaaaacttcactagtggagtcttcctcttctgttataagtgaggtcttaagagaatcgtccattatctcaccattcataggctctaattcagattcctacaccatgaggagagagggaaaaagtaaggacatgattacaaactaacttatttgtcatgcatgacgggtcccttctcagtgcctacctatcctacaccaagactcaaatttacattataggacatgggttaaagaacagtcttactgggggaaggaggaaactcataaggcaatatcagcaaaataaaataatcctgagtaccccgtactcccactgctcttaaggaaagatggggcaggaccaggatgctctgtggacacacagtatgggtcggagattcaatgaaa

SEQ ID NO: 8579 - DNA, 536 bp, Homo sapiens
  MAP TO AL031592.1; EXPRESSED IN HEART, SIGNAL = 1.1; EXPRESSED IN LUNG, SIGNAL = 1.7; EXPRESSED IN BRAIN, SIGNAL = 1.2; EXPRESSED IN BONE MARROW, SIGNAL = 1.5; EXPRESSED IN PLACENTA, SIGNAL = 0.99; SWISSPROT HIT: P19570, EVALUE 8.60e+00; NT HIT: gi4505660, EVALUE 5.10e-01; EST_HUMAN HIT: AI802334.1, EVALUE 4.80e-02; EST_HUMAN HIT: AI802334.1, EVALUE 4.80e-02
agtagcctcgtagcaaccccacagaatgtgagaactgcaagttcttttcaggtcatccagtgggtttggtcttgctgccagctctggctgctgtgcagagaaagataatgaggccgcccctcagctgggctggaaggcattgccttcattgaacagcggagggccgggggttgcacatgctctgtatatttcccagttcctccttttacaaatgagtcaacttacatccaaagttcccttagtgttaactaaaacagaccaaattctcaacgtgtgctggacatagtagcattgcggttactagctccattctgtgaatagagaaacattagcttggaaccttgaaccactcccttgaagtcccccaggtaacaggaggcaaagccacgattcaagcccttgtccatctgatcccgggtacagctctgtccatcaaaccaaagtgtctcaaaatatggcttcttcctactgaggcagcaaaaaaatgttcctccacacaaataaaatactatagaggagtcagtgagaaggagcct

SEQ ID NO: 8580 - DNA, 529 bp, Homo sapiens
  MAP TO AC022517.1; EXPRESSED IN HEART, SIGNAL = 7.7; EXPRESSED IN BRAIN, SIGNAL = 3.4; EXPRESSED IN LUNG, SIGNAL =   8; EXPRESSED IN HELA, SIGNAL = 4.8; EXPRESSED IN FETAL LIVER, SIGNAL = 7.6; EXPRESSED IN BONE MARROW, SIGNAL = 2.4; SWISSPROT HIT: Q9Y5I1, EVALUE 9.70e-01; NT HIT: AL049866.2, EVALUE 7.90e+00
accttcccagcaacaaacacccaagccaagcccaggtggtttcctgggagactctgcagagaccccagtgctgagagcaaaccagctcaggggaccccctcccacaactcccaggtccatgtcagtttcctggagacggggtttgggaaacaccgcccagtgcagtagcgagtgaccccggtggaagctttacttcaacaattagccttgccaaaagtaaggtggaccgaggcgccatccgtcatgggctaattgttcttgctacactctgggtcctcttggctggcacatggccacgctgcacagatgcacagaatgatggaggcaacgtgaccagcacagctgatgttcactgcgccgagggctccaggtgggccgggcccaggccgacaccggttcctcctcaaaccccctctgacaagctcggcatcctaaccttcgcttgggctgagccttctgctgacagcccttccctgccctgtcctgtaaagctctttaaagtttcctcccagtccacacaggctgctta

SEQ ID NO: 8581 - DNA, 570 bp, Homo sapiens
  MAP TO AC022073.13; EXPRESSED IN BONE MARROW, SIGNAL = 0.91; EXPRESSED IN PLACENTA, SIGNAL = 0.69; EXPRESSED IN BRAIN, SIGNAL = 0.69; EXPRESSED IN FETAL LIVER, SIGNAL = 0.7; EXPRESSED IN HELA, SIGNAL = 0.64; EST_HUMAN HIT: AW958203.1, EVALUE 0.00e+00; SWISSPROT HIT: Q19264, EVALUE 1.00e-11; NT HIT: gi15305555, EVALUE 9.00e-80; EST_HUMAN HIT: AW958203.1, EVALUE 0.00e+00
aaccctcactagtgtctgtttggaagtagtgacattcttccaaaaatcttggaaaagttgttttgtagtgtgaatgagcatgagtcactgatctaagccctttcactggatgaagtgaaaagattttttttcaacaaaagagggagagagagaatcaagactctgataaacatagtactatttttaaaagaaatccaataacaataaagattgttctattctctgccttcccatttagatagggtttaaaccagcaggaggcatccgcagtgcaaaggattcccttgcttggctctctcttgtaaaggaggagcttggagatgagtggctgaagccagaactctttcgaataggtgccagtactctgctctcggacattgagaggcaggtgagtaatcatctctgtctttggaataaattaacaagtgttttttgagaaaggaattgaaaagtcaaattgagaactggagataaaaactcatctgattgacctcatcctacccaatcctctaccttttcttccaagcaaaccgccatcagaagtgagtagggtggagattctgctgaagc

SEQ ID NO: 8582 - DNA, 521 bp, Homo sapiens
  MAP TO AC000395.1; EXPRESSED IN BRAIN, SIGNAL = 0.81; EXPRESSED IN BONE MARROW, SIGNAL = 0.52; EXPRESSED IN PLACENTA, SIGNAL = 0.67; EST_HUMAN HIT: BG326520.1, EVALUE 6.00e-57; SWISSPROT HIT: Q12967, EVALUE 2.00e-15; NT HIT: gi14734843, EVALUE 2.00e-56; EST_HUMAN HIT: BG326520.1, EVALUE 6.00e-57
tcctttgggatcagaactgggggccctcaagtgaaaaagtcctgggagggatccccagctgcgtctcccagtggagaccccgagcgcactcaccccgagccagcgctgccccttgttgcctccgtggtgcagctgcaccttgcgcagggagatggagtagatgactccgttgatcagctcctcaccgatctcctgcgtggagctctgtgaagacaacgcccggcagccgggcgcggggacgtcaagggcctgcctggccaccgtgcaggggatgcacctgtgtaacctgtttcccagatagggcacagactggcggctgcacagacctacagcctggggtggaatgagatcacagctcgagagccactgtcccggcactccacttccccaacccggccagccacgacctgggacgtgattatgatgagtccaccaggcttccaatcccctagtaactggcttctgctcctgcccaggacagacccaccctcaagccatccccttccacacaggggactgtt

SEQ ID NO: 8583 - DNA, 539 bp, Homo sapiens
  MAP TO AC006131.1; EXPRESSED IN BONE MARROW, SIGNAL = 0.49; EXPRESSED IN FETAL LIVER, SIGNAL = 0.38; EXPRESSED IN BRAIN, SIGNAL = 0.66; EST_HUMAN HIT: BF174069.1, EVALUE 1.20e-02; NT HIT: gi16194902, EVALUE 8.00e-03; SWISSPROT HIT: O10336, EVALUE 6.60e+00; EST_HUMAN HIT: BF174069.1, EVALUE 1.20e-02
atggcaggcatttgtttttctttcaatctttatattcttgctgaatatacgtgtggagagagttgtgaatttttatctctgacctttgtaggcacaaaatcatcccattatcatatacctgtcagaagacaggagagaatcagaccgtattctttgccttttatgtatcaaaaaaagaaagagaaagttattagcgtttttccaatccagggattcaaaaaaaccagctacttctcggccaagctccctgaagcagaggttgctctctgctggcctcgtcacctgctcctggcccagcccagccaagcagcaggactcacagctctggcccatcccctatctctgggcttcctcagagagggtgtcctacagtggtcagcatgcccgcgtggggacaggagcagcttctctgaacacatgtccccagtttctcaatgcccctgcagagatggaaccttccaggtgaaagctctctttcccctcagagtgatactaagtagcaatttaaaaacaccatgacaagcccagagaaagagcag

SEQ ID NO: 8584 - DNA, 568 bp, Homo sapiens
  MAP TO AL049861.18; EXPRESSED IN LUNG, SIGNAL = 0.62; EXPRESSED IN BONE MARROW, SIGNAL = 1.8; EXPRESSED IN PLACENTA, SIGNAL = 0.74; SWISSPROT HIT: P38292, EVALUE 6.20e-01
accctgcaataatgcaatccgtaaacccacagaggcaaagacaagcataatctaggctgattctcacctcatcctctgctgattctgtctctctttcacgatgtctgtagtcgtctgttaaagggcccataggcaatgtagggtgggagggagggtgctgcgtaaactgaggaactgagaaatcaatccagataggaaggcaacataaacttttgaccaggtggtcacaggaaggtagaagtaatggaaagtatgcaggtctaggaaacaaacaaaaacaaatatgtttgtatatacactatatgtcgaagttttggtcagtggcattaattcagctgcataattacaagaaaatcacttatctgtgtctcgaattttgacaaccaaaaaatggagataatctgcaaagctgacagaactaaatttgggagccacatagaacaaagtttaaaccttggatcctctgcttgctgactgtagaagcctggacaaatcgcactacattagaactgatatttcctcctgaaattcagggaaataattttcatctcaacagggctgtagcaag

SEQ ID NO: 8585 - DNA, 574 bp, Homo sapiens
  MAP TO AC006165.1; EXPRESSED IN HEART, SIGNAL =  14; EXPRESSED IN FETAL LIVER, SIGNAL =  13; EXPRESSED IN BRAIN, SIGNAL =  12; EXPRESSED IN BONE MARROW, SIGNAL = 4.6; EXPRESSED IN PLACENTA, SIGNAL =  13; EST_HUMAN HIT: BF760466.1, EVALUE 0.00e+00; SWISSPROT HIT: P05218, EVALUE 2.00e-16; EST_HUMAN HIT: BF760466.1, EVALUE 0.00e+00; NT HIT: gi16174629, EVALUE 1.00e-57
agtcacagctctctgcctccttccgtaccacatccaggacagaatcaaccagctcggcgccctctgtgtagtggcctttggcccagttgttacctgccccagactgacctggaatgcagtcaggagaaaagctcaattaacagggtatggaagatacatgatgtttccatctttcaacttttcaaataattccctcggatgtatcttctttctccttcactgtgatatattctccccctactgccccataatttaccagcaatagtaggcactacctctaccctccgttagatttcagaacacatttctgtattagcactccaatacaacaatcatctcctaacttttgctgtgtccttgcacccaaataagttgaacacgatggtatatcatctgctaatatcatctgtataactcaccaaatacaaagttgtctggtctaaagatctggccaaaaggacctgagcgaacagagtccatggtcccaggttctagatccaccaggatggcacgaggaacatatttgccacctacagagaataaagttaagagctgtgaaatctggcagaaggga

SEQ ID NO: 8586 - DNA, 578 bp, Homo sapiens
  MAP TO AC005570.1; EXPRESSED IN LUNG, SIGNAL = 1.2; EXPRESSED IN BRAIN, SIGNAL = 0.45; EXPRESSED IN BONE MARROW, SIGNAL = 0.77; EXPRESSED IN PLACENTA, SIGNAL = 0.39; NT HIT: AL163302.2, EVALUE 2.00e-13; EST_HUMAN HIT: BG565868.1, EVALUE 6.00e-17; SWISSPROT HIT: P03291, EVALUE 1.90e+00; EST_HUMAN HIT: BG565868.1, EVALUE 6.00e-17
cctgccacagagagtaagcctgcacccagtgacccaggccttgcctcaatttgtacgccaggctctgagcctaggaccccagccccacagctactccaagcacctgcaaacgaaagccagtgccactgcattgtcttgtgagccatatcaagcttgacactaaaaggtcccctttggctgcatgtccccattgtggggaaaataagaataggaggatcccaaaagcccttgacatcaaggacattaacaaccactgccacaaatctgtacagcctgggcctcaaggcacccacagttattgctgatgctcaacacagctgaagagctgcaccgagaccatatcactgcacccatctggaaacacagccaccacaccctttccaaccagcacactaagacccaactgcaggtaaaagtctatctctatgaaagccactctagaaactttggaagaggcgattgttccaccaggtgtacagacatcggtgcaaggacacaagaaacatgaagcagcaagaaaatctggcatcaaaggaacataattgtctagtaacagagcccagtggaaaaggaaatca

SEQ ID NO: 8587 - DNA, 505 bp, Homo sapiens
  MAP TO AC003004.1; EXPRESSED IN BONE MARROW, SIGNAL = 0.43; EXPRESSED IN HEART, SIGNAL = 1.3; EXPRESSED IN HELA, SIGNAL = 0.71; EST_HUMAN HIT: BG982802.1, EVALUE 9.00e-19; NT HIT: Y08833.1, EVALUE 0.00e+00; EST_HUMAN HIT: BG982802.1, EVALUE 9.00e-19; SWISSPROT HIT: P49641, EVALUE 4.00e-37
caccatccacgttgtcaaacggcagctcctccgacacagtgagcatctgccaggtgaactgcagctcagtaccccagtcgtggccactgtacgtccctgccagctctgactcttacctgcagctctggcttctgaccccggccccccaaagcaaactggcagtcctgcggggagatggagaagaagctgggccggggctccggtggcaccacccaggagccattgaccgtgtagtagggcagcatggcgggcgggccctctgcgttggctgtcagctccagcacggagtccttgatatggctgataatctcatggttctcctccaaaagctgctccagctgctcaatgcggttctgcagcacagaaatttggctctgccaaaaaaccagaaagcaatcacacacagctccttatgccacagggagggtctctgcttggggtctaccagctgaggcctgagtacaattcttccctcatcagtcaaagccagaccatgagcctagag

SEQ ID NO: 8588 - DNA, 577 bp, Homo sapiens
  MAP TO AC009145.4; EXPRESSED IN BRAIN, SIGNAL = 0.83; EXPRESSED IN HELA, SIGNAL = 1.1; EXPRESSED IN BONE MARROW, SIGNAL = 0.63; EXPRESSED IN PLACENTA, SIGNAL = 1.2; NT HIT: U49397.1, EVALUE 3.50e-02; SWISSPROT HIT: Q9ZCQ3, EVALUE 1.40e+00
aaattccacaacgttgcctcgggacaatgccacgggtccaacatgtcactccaagtgagagaaaggaaactacctgaagagaatcctaaactttctgacattttagaacattcataagtgaattctgtctctaaatgcttacatctccaagttatcagctgtgataaaaactgaatttaataaaagtagtgttaacttaaggctaacacatgaattttcttttgataagccttgccaagattgtcaagctcctcagctcgttctccatgtgataccatcattttcttctaaaaggaagcatggtgatttctataaggtctatcgaggaaatagagagcatgggtatggcatgcataataaaaccgccacattaccagcagggaagcactggacgttgcatgtgcctgctacagagatccataacattccaagaatttccttctggaagcgtgagaatattcatattaatgaaaccggaattagctggcagatggagggctacgactaacccttggcagtttatggtaataaaacatcacaatagcctcctctcagttgtcttttcctccaccttgga

SEQ ID NO: 8589 - DNA, 588 bp, Homo sapiens
  MAP TO AC010629.5; EXPRESSED IN BRAIN, SIGNAL = 1.2; EXPRESSED IN BONE MARROW, SIGNAL = 1.8; EXPRESSED IN PLACENTA, SIGNAL = 1.4; EXPRESSED IN HEART, SIGNAL = 1.1; NT HIT: AB031008.1, EVALUE 1.40e-01; EST_HUMAN HIT: AW294407.1, EVALUE 8.30e-01; SWISSPROT HIT: P45804, EVALUE 3.30e+00; EST_HUMAN HIT: AW294407.1, EVALUE 8.30e-01
tgccatattggccttctttcacctgctttcttacctccctcctccaagttccatccacaaatcctgtcaacccgccccagaaatatctcaaacagttcaaaacataattcaagcactgaatttaattccctttcaaaattagctccaggtgaccaaagaaaatccatatggatgctggaaaattggaaaggttgaaaacgacatttaaatgatattcaaggatttcccacatggaaagcaagaccagccagaataggagtctctggcccacaaccgccaaatgcaaggggaaacccacatgggaacaagtagcagggagcctcagcaaagccacccagcacttcctggcttgggaagtgtgagggatgtcagtctgttttgactatttcacctcctcacctccttctttgagggaactgtgcctattccactggtgtaattgcacaatgggttcttcttgtcctctgcacaaataaacccgttcactgagacagcatcattgcagcaaagaaagagtttaacacaagcctgaccaagcagaaggacagaagttttttattactcaaatcagcctccctgagaactcac

SEQ ID NO: 8590 - DNA, 594 bp, Homo sapiens
  MAP TO AC002077.1; EXPRESSED IN BONE MARROW, SIGNAL = 0.46; EXPRESSED IN PLACENTA, SIGNAL = 1.3; EXPRESSED IN HEART, SIGNAL = 1.5; EXPRESSED IN BRAIN, SIGNAL = 1.5; EXPRESSED IN HELA, SIGNAL = 1.2; NT HIT: gi13649019, EVALUE 2.00e-87; EST_HUMAN HIT: AA424234.1, EVALUE 0.00e+00; SWISSPROT HIT: P04258, EVALUE 6.70e-01; EST_HUMAN HIT: AA424234.1, EVALUE 0.00e+00
cacatccattctccccaaaccagctcagggcatccccacccccactcccagccacagacacctactccttgagctcagtatagatgggcagcacctcggggtggcagacgaaggcgaaggccatgatggggatggtgtatgctgtctggggaaacacggggctgtgtcaaggcagtctgccactctcattgggcccccgccttgccctgacctgtcagaacctgtgagttgagcgtgaagtagctgggagtgcagaaggctgaagcctcaggctcgacctgcagctgcaccttctccttcacgatctccacgtggctgaagttgcctgtggtgttgttgaagttggggggcagtgggcagggcacgtggaactttttgtagatgacctggagtggggagggatgagggtgtcagagactcccaggctggactgcctgggaagtcaccatgaagccacatctagatcaggactggtggagctgccttctggcccaggcttcccagagacacctgccccctcctgatgacagggaactcccccaggagacccgctgcccgctttctcagccaacatggagggtgactcactgcaat

SEQ ID NO: 8591 - DNA, 533 bp, Homo sapiens
  MAP TO AC010077.1; EXPRESSED IN BONE MARROW, SIGNAL = 0.87; EXPRESSED IN BRAIN, SIGNAL = 0.48; EXPRESSED IN HELA, SIGNAL = 0.56; EST_HUMAN HIT: AW504614.1, EVALUE 3.00e-62; SWISSPROT HIT: P26358, EVALUE 4.00e-19; EST_HUMAN HIT: AW504614.1, EVALUE 3.00e-62; NT HIT: AF202564.1, EVALUE 0.00e+00
gacttggcctacagctgctcctggcacaaagtctcacaccctaactttaagaggcagcagcaactccagctgactattgcttcataagtatgttttttatttatacatatatataagtatatatgtatactatatatatatgctatatatttttttttaatagaggcaggctcttgctatgttgtccaggctcgtctcaaactcccgggctcaagtgatcctctggcctcagacccccaaagtgctaggattacagatgtgagccaccctgcctggctgtttttaaagtgtgccccaaacataatcccggactattccttaccttcaagagatgggtcatcatcatagattggttttgctgaaccagaaaagaagagttcgatattcttctcgatgaggccggtgtcgatgggacacaggtgaccgtgcttacagtacacactagacaggaaacaaagcacatgcttaccagctaagccgtgaaggcgggtcttcgtgcagacttcagatcaggcacgaggcaatgagagaat

SEQ ID NO: 8592 - DNA, 576 bp, Homo sapiens
  MAP TO AC008243.6; EXPRESSED IN BRAIN, SIGNAL = 0.73; EXPRESSED IN LUNG, SIGNAL = 0.87; EXPRESSED IN BONE MARROW, SIGNAL = 0.8; NT HIT: AE006884.1, EVALUE 8.60e+00; EST_HUMAN HIT: BF376224.1, EVALUE 2.00e-01; SWISSPROT HIT: Q90678, EVALUE 9.50e+00; EST_HUMAN HIT: BF376224.1, EVALUE 2.00e-01
tgtctcctggatagccttgcttctaaatttcagtaaaaactggatccaggggaaaaatcagggacaaacataaaggagttcttctcttccttatacaatttacaaacaatatttggcattgtggaaagaagaaatgagccaaaaattaagtcattgcaactttatatcaaacaagttttgtgtcctggcttatacccatgttggtgtcttatgtagaacactgaatttctcacctttttggaaaattgaactttgaggtgttctgaatgaaaccataacagcaagggcatgtgacgaaggaagcccgtgttttgatacagtgctcaatcaccatgtctgttgccactccacaagcatgcaatgctacctacaaaataaaaccaggccttagcactaagttccctcttaactcacagtgcaatttttatgccttttaaatagttctcatttggccataccaaaggaccacttagctacacatatcaattaattatgaaaactaagcaagtttgaaaggttgcaaatggaatattgcaaataaagcataagattcattcaacggaaaatttgatgcaa

SEQ ID NO: 8593 - DNA, 593 bp, Homo sapiens
  MAP TO AL121821.5; EXPRESSED IN HELA, SIGNAL = 1.1; EXPRESSED IN BRAIN, SIGNAL = 1.1; EXPRESSED IN BONE MARROW, SIGNAL = 1.1; EXPRESSED IN PLACENTA, SIGNAL = 0.9; NT HIT: M96761.1, EVALUE 2.20e+00; EST_HUMAN HIT: AI633640.1, EVALUE 0.00e+00; SWISSPROT HIT: Q04592, EVALUE 1.50e+00; EST_HUMAN HIT: AI633640.1, EVALUE 0.00e+00
tcagtgtgtcccctccctacctcagtctggacaccataaaaaagaaaacaagttattcagcccagcgatgcaaggtcttcgggtttctcattcaacattttatactttgatccctgaggtaacggaaaatcctcatcgcctagactttcattggttcctatcagctcagctggaaagggtggcaagtgggacaatcctgaagaaaaaagagtcacccccacgtcctaaagtacttggaagtgctcgctgggatctgcctgtactccaggttggtgcaactccaccgccctccagtgaagtcccagaagcgatcaagtttaaagtgaaagggggatggaagcattttttctccctatgccttcggagtctgtggcttcagtttgctgcaggttctctccgtggacttctcagaaacctcaactttccacttcgagggacagaaagctacaaggaaaacgctgatggttttggtggagattctcctggacttcagtggtgtcctctggtacatctgtccgcggtgtccctttggtttatttctgtggtcttcctgcgcagtccctcagcggctcggagtttggccttccagctct

SEQ ID NO: 8594 - DNA, 572 bp, Homo sapiens
  MAP TO AC010485.4; EXPRESSED IN BONE MARROW, SIGNAL = 1.9; EXPRESSED IN PLACENTA, SIGNAL = 1.1; SWISSPROT HIT: P57058, EVALUE 1.60e-01; EST_HUMAN HIT: AA078157.1, EVALUE 2.00e-01; NT HIT: AB040943.1, EVALUE 8.50e+00; EST_HUMAN HIT: AA078157.1, EVALUE 2.00e-01
atgaacaggagacacccaggcttggctgacctccaagagaagggaagcaggagtcactgatttctccttctaactgtctcatgtgcctactggctggcccaatccctatcccaaacgccctccctgcccccaccatctataagcattccgtgcggcctccagagcccctgaaccccagctccaagcagcagagatgccccaggaagaaggtcaggctcctccgcctgacactccaccacatcccaattgcaccccaacatagacgccaccccgtgctccagacactcaaagtccccctccctcccacagacctcaagctggagggtgcctttgatggtcactctgctgccctgccaagcatgtgcccactccaaactcctctacatccttcaaggctggcttgcatggccccttctctgacctctccacccccagacacagccaggccctcttctctgctgtccctgtccctgggcatttatacctccattactgtccttgtcacactgatgtttagtgaggctcagttgtctctgcgtataggtcttgcctgttcagttgcttttggaggc

SEQ ID NO: 8595 - DNA, 600 bp, Homo sapiens
  MAP TO AC016543.5; EXPRESSED IN HEART, SIGNAL = 4.7; EXPRESSED IN BRAIN, SIGNAL = 3.9; EXPRESSED IN LUNG, SIGNAL =   3; EXPRESSED IN FETAL LIVER, SIGNAL = 4.7; EXPRESSED IN BONE MARROW, SIGNAL = 3.5; EXPRESSED IN PLACENTA, SIGNAL = 3.7; NT HIT: AF343664.1, EVALUE 2.30e+00; SWISSPROT HIT: P45815, EVALUE 8.80e-01; EST_HUMAN HIT: BF792020.1, EVALUE 8.40e-01
gtgggagggtaagagaagggaaggggcttggcagccagtattttatggtatttaggaaaaagcaattgggtacccgtttggccaccacacaccagtaactccagtgtcaaattggatcacattctgggaaaggggtcactcgagaacttgtcttcccagggcccaggagagaacaaggagaagtgggaggttcccagccctagaataaataaataatcgagtcaatctcaggtttaactccctttgaccttatgtccccaacactgctaccaggcagtcccagggccagcaggttctctctgtgtgccagttccccattcccgtccctctgcagggagctgggaggttccgtgaatcccaatgccggctggcccagctggaaacagctgtgcacagcagaaagatgcacagcacactccaggcactgacctatgcaaacacaagcagaattatagccgcccataaacaaattagcatcctttaaaaggtgaaaagctccataaaatgtctgggttttgtttacggctccgcggtggggtggcagggagctgtattaaatcaccgaggtgcccatgtagcgcgggctctcttttctcctct

SEQ ID NO: 8596 - DNA, 549 bp, Homo sapiens
  MAP TO AC016572.4; EXPRESSED IN FETAL LIVER, SIGNAL = 1.9; EXPRESSED IN LUNG, SIGNAL = 1.1; EXPRESSED IN HELA, SIGNAL = 1.2; EXPRESSED IN BONE MARROW, SIGNAL = 1.2; EXPRESSED IN PLACENTA, SIGNAL = 1.5; NT HIT: AL163284.2, EVALUE 4.00e-17; SWISSPROT HIT: P53770, EVALUE 1.00e+00; EST_HUMAN HIT: BF926439.1, EVALUE 1.00e-24
gaagtgcctgcttctgcttcctaccctctccctgctcctggtgtccactccagtgcaaagcaaagttgtagccgagtccgggcactgttgtgcccagccaggtatgcatgtgctggaggcagtgctgacatgacagcttctgcctcctcagctccttctggactttgagcaccagtgagcacaggagggaggacgatggctgagggcagctctgcacaggtctgcaggtccaactcagcatgaacagcccaggtaccatggatggcatgttgatggtggaagggaaacaggttcctgggtggaaaggggcaggtccctaactaccttcaagccagggatgacctgaagcctgggggctgggctgccagttccgggtggagtccactgcctggagtcagaatttatggtgctttttcccagccacccatggccatccatgaaccaatcagcatgcactcccttccttctgggcccataaaaacccctagactcagacagacatcaggactatgaagtgagaagcaggaaggagctacccacttgttggga

SEQ ID NO: 8597 - DNA, 587 bp, Homo sapiens
  MAP TO AL121896.10; EXPRESSED IN FETAL LIVER, SIGNAL = 0.85; EXPRESSED IN BONE MARROW, SIGNAL = 0.91; SWISSPROT HIT: P42087, EVALUE 3.30e+00; NT HIT: gi14786693, EVALUE 1.00e-106; EST_HUMAN HIT: AW850810.1, EVALUE 1.00e-106
ccatttgtgtttcggaatatgttcagtagttaactgaaacacagtttttacattaaatgataagaccattttcctggattagaataaaaagtaacatagcaggacttacctttgctagtttgtaccagagttcatagagatagcagaaaactctggcatggatcttgggtgactggatgttattcacatctccgaggatccccaagacccttcgccataacacagcagcagagtctgggtgccaaccagtgaggctccccccggcgattatactacagtcatctgtgaggcactcgctgctatctatgcagaaaaacatgtctgttaaccctgtaaacaatcttgatttcatcataccttttttctttaaggcaaattaccttaggtattcaaagtaaaataattaaggcaaaaaatgtgaaacagctgagaatttaaaaggagagaaaagcaggatcaaggaagaaaggtcaaatgattttgattcttcaaactaaaagagcaacaagctaagacatgacataacagttcctggagaccctgtgatgggttttatagatcaggggagaggaagagggagacccttg

SEQ ID NO: 8598 - DNA, 555 bp, Homo sapiens
  MAP TO AL117187.3; EXPRESSED IN LUNG, SIGNAL = 0.66; EXPRESSED IN BONE MARROW, SIGNAL = 0.85; EXPRESSED IN PLACENTA, SIGNAL = 0.79; SWISSPROT HIT: Q15319, EVALUE 2.30e+00; EST_HUMAN HIT: BF368054.1, EVALUE 7.80e-01; NT HIT: AB001896.1, EVALUE 3.40e-02
cgactttctctaccaagcgggaaatgaggcctcctttaacccccaagttctggtctcatggcttcagtcctgagtccaaatctctcagggaagaggctcagcataggtcctgcgtcctctaagtcagtccaactgggactgggaggaccagggtgctgagatgcggcagagacaaggcctaggacttggaagtcttactagaacatggtagctccgcaccccgcatagccacgtggctggggtgtgagagcaaagaggcaggctgcaagacaagggagtttgaacacgttgtcgttgaaagaattaaaccaggtgtgtgcctgagcacctttagcccactgcctggcttcagaaatgcaagcttgcgtgccgtcccacccaggcccttaaataatacaagttaattgaaagagtttaatttgaattaatgagattctgttaaaatattgttaacagttaagtagataattattctatgaacaaaacaaatggctcctgcagggtctatgtcaatgaatagacaccttcatttacagttgggatccttcaactcca

SEQ ID NO: 8599 - DNA, 540 bp, Homo sapiens
  MAP TO AC016601.5; EXPRESSED IN BRAIN, SIGNAL = 1.9; EXPRESSED IN LUNG, SIGNAL = 1.5; EXPRESSED IN HELA, SIGNAL = 1.6; EXPRESSED IN BONE MARROW, SIGNAL = 1.8; EXPRESSED IN PLACENTA, SIGNAL = 2.1; EST_HUMAN HIT: AW975197.1, EVALUE 7.60e-01; NT HIT: AF324890.1, EVALUE 2.00e-03
catcccaatcttctccatgcttttttttttctcagcaaagttcatgtaaaccagtaggtcatagtaaatcctaaaatgtattcccacagtgagatacttggaacattttccttctggattttattaaacataatgttctaagcattatgagtgctctaaggtatttcttgaataataacccaaactgcagagtgaaagtaagtggcaattaaaatcccgagacagacgggaacactgagactaagaaataacagcatctgttcctgacgatggctggactgctgatctagcttggggtcagcaaacttggcctgagggccaaatccagcccactccctgttttcatatggcctgcaagagccaagaatggttttcacagttttaaatggttgggggaaaaaaatcaaaacaatattagcatattaagaacataaaaattagatgaaatacaaatttcaatgtccataaagtttcactgaaacacagcaagattcatttgtttatatattgtctattgcagctgggtatgggagagctgag

SEQ ID NO: 8600 - DNA, 539 bp, Homo sapiens
  MAP TO AC000077.2; EXPRESSED IN PLACENTA, SIGNAL = 0.43; EXPRESSED IN FETAL LIVER, SIGNAL = 0.62; EXPRESSED IN HELA, SIGNAL = 0.67; EXPRESSED IN BONE MARROW, SIGNAL = 0.49; EST_HUMAN HIT: BI046380.1, EVALUE 2.00e-35; SWISSPROT HIT: P11369, EVALUE 3.00e-08; NT HIT: AL163246.2, EVALUE 7.00e-28
tctgtgcccattaaactccccatgtcttcttctcccagcccctggcaaccacgattctactttctgtctctgggaatttgacgactcttataattggagtcatgcaacttttgtgtctggttggttttactcagcagaatgtcgtttcatccatattgtggcctgtgtcagaagttccttcctgtcaaaggcggaatgatactccatggcaggtttacaccacattttgtttttccactcatccgtggagagacactgggtgggtccctccttttggctgttgagaatgatgctgctgtgaatgaagtggttagaagggggctttcagacgtgtgaaaggtgtctttgggaattttaatttcagctcccacaaatgagtaaaatttgtctttctgtgcctggcttatttcacttaacataatgatctccaattccatccatgctgttgcaaatgataggatctcactcttttttcatggcttcgtagtactccacggtgtatttgtaccacattggcttcacccattcgtctgttgatg

SEQ ID NO: 8601 - DNA, 513 bp, Homo sapiens
  MAP TO AC012082.6; EXPRESSED IN BONE MARROW, SIGNAL = 1.2; EXPRESSED IN PLACENTA, SIGNAL = 2.1; NT HIT: AL163303.2, EVALUE 3.00e-42; EST_HUMAN HIT: AW840840.1, EVALUE 2.00e-47; SWISSPROT HIT: P31467, EVALUE 1.60e+00
cccacacaagttcaaaacccagcaggacagtcattaaatattaaatagaaagctccaaaataatctttgtctccatgtcccacatccagggcacacttgtgcaaggggtgtgtttccaaagccttggacagctctgcctctgtggctttccagggttcagtccccacagctgctctcaagggctagtgttcagggcctgcagcttttctaggttcatggtgcaagctgccggtagatctaccattctggagtatggaggatagtggccctcttatcacagctcccttaggcagtgtcccaatggggactctctgtggaggctcccaccccacatttccccaccatgctgccctagtagaggttctccatgagggccctacccctgcagcagctttctgactggacattccagcttttccatacatagtatagtaatctaggctgaggcttccaagactcaactattggactctgcacacatgcaggcttatcaccatgtgaaagctgcaaaga

SEQ ID NO: 8602 - DNA, 554 bp, Homo sapiens
  MAP TO AC010613.5; EXPRESSED IN FETAL LIVER, SIGNAL = 0.63; EXPRESSED IN BONE MARROW, SIGNAL =   1; EXPRESSED IN BRAIN, SIGNAL = 0.68; EST_HUMAN HIT: AI611134.1, EVALUE 7.80e-01; SWISSPROT HIT: Q9ZD15, EVALUE 1.80e+00
ttgctattcaacggatgctggagagaacaagtttaaacgcaattagatgactttctaacggtggtatcacaggcactgggtcatcaaggtagaagtggtaaagcaattctgcaaaaggaccaggtttctaacagccatgttgattgggaggtttgcagactagagaaagggaaccctcgccactgctagccagtccacacacttagaatgggctctgtcgtgtggagtcaaaatctgccagaccaaatgttgtactcacttgtctgtgttttggcctcttgggccatagaaaatgcagtacctttccaaatatgtttgtttagaagtttgatgatgaaatccaagtctaagtttttccttctcagagcctccaaccattccttactggaaaggctttccatatcctcaaccacctgaacatgctctataaatatgacactattattcctattacctgcgtgtaaagtccaatcactcaaggtaaagtggggtcagtcaccaaatctctttataatttctgtaataaatagatttggttccctcagttaaaggcc

SEQ ID NO: 8603 - DNA, 517 bp, Homo sapiens
  MAP TO AC010219.4; EXPRESSED IN BONE MARROW, SIGNAL = 1.1; EXPRESSED IN BRAIN, SIGNAL = 1.1; EXPRESSED IN PLACENTA, SIGNAL = 1.1; EXPRESSED IN HEART, SIGNAL = 1.5; EXPRESSED IN FETAL LIVER, SIGNAL = 1.1; EXPRESSED IN HELA, SIGNAL =   1; EST_HUMAN HIT: AL137953.1, EVALUE 1.80e-01; SWISSPROT HIT: O59925, EVALUE 2.10e+00; NT HIT: U93037.1, EVALUE 3.00e-05
caggcttcaggctcactttctccagtgctttgtagcagtccttcctatgacacatggaacaagaagccagtgctgatcgcgcacgtgccaggtgccaggccctgtgctatgccgcaacttatacagtcatattttggggccagcacgatacaaccagaagcaccctggaggcgggcagacctggttccagtctctgaacaggcacttcctaccggtgtgaccacatggcaatcatttacctctgggaacctcagtttcctcatctgtaaattggaatttgatggcaccagtttcccaggagtgctgtggtgactgtaaccaacgccgtacttgtaatgcaccgagtaccaggcctgcaaggagcaggttctcgagataagttattttctcatgatattgaattctccttatatcctagctcagatataaggagaaaatgccaccatccagacccagagatgtcaaaaaacgtaatctatccaattgccttggataacctccagggacaggaaactca

SEQ ID NO: 8604 - DNA, 576 bp, Homo sapiens
  MAP TO AC010209.13; EXPRESSED IN HELA, SIGNAL = 1.2; EXPRESSED IN BRAIN, SIGNAL = 1.1; EXPRESSED IN LUNG, SIGNAL = 1.5; EXPRESSED IN FETAL LIVER, SIGNAL = 1.4; EXPRESSED IN BONE MARROW, SIGNAL = 1.1; EST_HUMAN HIT: AA633940.1, EVALUE 8.00e-38; SWISSPROT HIT: P30415, EVALUE 5.50e+00; NT HIT: AL163208.2, EVALUE 4.00e-39
actgcatggaatggaaaaggtaggatcagaggccaatttactgtcattcttccgcctcaggactcctcatttacatgtgtcccttctaaataagtactcattttatacctaaatttgtaacttattatttttcttaaagctgcccccaaattgtacaagcttctggatccaccaagccaggattcagccctcagcaggacagagagagtaccctggtcgtggagctagaaggcttccaggaggtgtgttcaaaatgagatttaagcaagagaagaatttttactacacacagaagcggaaggccaggggaaaggtgggcaaagaaattaggctatgagaagaccggggttggggtggtttaaaacatccccatgtgatatgggttggctgtgtccccacccaaatctcatcttgaattgtagttctcacaatccccactttatgggagggacccagtgggaggcaatggaatcatgggggtgcttaccctcatgctgttttcatgatggtgagtgagttctcacgagatatgatggtttcataaagggctttccccccttttgcttggcacttctc

SEQ ID NO: 8605 - DNA, 596 bp, Homo sapiens
  MAP TO AL118557.2; EXPRESSED IN LUNG, SIGNAL = 1.7; EXPRESSED IN BONE MARROW, SIGNAL = 1.8; EXPRESSED IN PLACENTA, SIGNAL = 1.8; EXPRESSED IN HEART, SIGNAL = 1.8; EXPRESSED IN BRAIN, SIGNAL = 1.4; EXPRESSED IN FETAL LIVER, SIGNAL = 1.7; NT HIT: gi16159560, EVALUE 1.00e-113; SWISSPROT HIT: P10267, EVALUE 4.00e-06; EST_HUMAN HIT: BE064394.1, EVALUE 0.00e+00
aacacagccacctacttggggacagatcaagaagctgtcacagatggcagaagaaaacctgaggaaagcgggacaaccagtcacaatgagtaatttaatggtagctatgatactggtgatcaccattgctatgagtattccttcaacaaggactgacacagagaacaatcatacttattgggcacatttgtcaatcttggctggcaataatgcctggatgtaatcactctatgacacagttacacatgctttctgatatcagcatttatcataatgaatctgctcctacaattaaggcaaactgccctcaaaaacctatttgtaaacaggattggacctggccagaaaaaatgaatgtacttgttaaggaagattgcattgcagaacaggcagaggtgctgcgcaatgattcctatggaatcattattgattggccccctaaggggatgtttagcttgaattgcacctctcagtcggcatgccacagccacaccgtgttcagctggtctgaacaaaatggtcagatggtagaaatggtaagaagtatggcaagagttcctattatctggaaacatggcagtacagtggcacctcaa

SEQ ID NO: 8606 - DNA, 560 bp, Homo sapiens
  MAP TO AF015725.1; EXPRESSED IN HELA, SIGNAL = 0.5; EXPRESSED IN FETAL LIVER, SIGNAL = 1.3; EXPRESSED IN BONE MARROW, SIGNAL = 1.3; EXPRESSED IN PLACENTA, SIGNAL = 1.1; EXPRESSED IN HEART, SIGNAL = 1.1; SWISSPROT HIT: Q14296, EVALUE 2.40e+00; NT HIT: AL163268.2, EVALUE 0.00e+00
gttgagggacacatggaagcagggctgttggcagtcatctggggaaagataatttgggtctgagctgcgacagtggttgtgaagctagaacaagctggacttgagggacatttccgaggtggcaatgaaagaaacgatctgccaacgcttatacgtatgggaatagatataatgggacatgagagagctagggaggatcagcaagaggcaggtaaagaaatgatagaaattaaggtttctggcattggcgctcttggtaagtggtgactccattaacagagtctagaaatacacaggagacacaaaatggaaaggaaaaataacatgtcctggtttagaaacttgagtttgatttgtttgtaggatacccagggattataggctagttgtattatattaggcttttagtaatattaagggagatacgattagactcaagtagatccaagtctattatgataagctgtttcataatagacttgtagtgtttgccaaaaattcatcttactctttggcattttatggatcatcttggtgtaacaccgctccagaaagagact

SEQ ID NO: 8607 - DNA, 569 bp, Homo sapiens
  MAP TO AC006181.1; EXPRESSED IN PLACENTA, SIGNAL = 2.1; EXPRESSED IN HEART, SIGNAL = 1.5; EXPRESSED IN BRAIN, SIGNAL = 2.1; EXPRESSED IN BONE MARROW, SIGNAL = 1.4; EST_HUMAN HIT: AL044364.1, EVALUE 0.00e+00; SWISSPROT HIT: P03851, EVALUE 1.00e-15; NT HIT: AB027254.1, EVALUE 0.00e+00
  unsure 260
  unsure 267
  unsure 269
  unsure 270
  unsure 311
  unsure 337
  unsure 343
  unsure 351
  unsure 352
  unsure 460
  unsure 531
  unsure 544
gcttcctcgctcactgactcgctgcgctcggtcgttcggctgcggcgagcggtatcagctcactcaaaggcggtaatacggttatccacagaatcaggggataacgcaggaaagaacatgtgagcaaaaggccagcaaaaggccaggaaccgtaaaaaggccgcgttgctggcgtttttccataggctccgcccccctgacgagcatcacaaaaatcgacgctcaagtcagaggtggcgaaacccgacatgactataaanataccangnntttccccctggaagctccctcgtgcgctctcctgttccgancctgccgcttaccggatacctgtccngccttnctcccttnnggataacgtggcctttctcatagctcacgctgtaggtatctcagttcggtgtaggtcgttcgctccaagctgggctgtgtgcacgaaccccccgttcagcccgaccgnctgcgccttatccggtaactatcgtcttgagtcccacccggtaagacacgacttatcgccactggcagcanccactggtaacangattagcagagcgaggtatgtaggc

SEQ ID NO: 8608 - DNA, 505 bp, Homo sapiens
  MAP TO AL118558.2; EXPRESSED IN BONE MARROW, SIGNAL = 1.5; EXPRESSED IN PLACENTA, SIGNAL = 2.6; EXPRESSED IN BRAIN, SIGNAL =   2; EXPRESSED IN FETAL LIVER, SIGNAL = 1.7; EXPRESSED IN LUNG, SIGNAL = 1.9; EST_HUMAN HIT: AW962199.1, EVALUE 1.00e-122; SWISSPROT HIT: Q9JHU4, EVALUE 4.00e-55; NT HIT: gi15300984, EVALUE 1.00e-122
cttccttgcttttgtcctgcatgtgtttagaaatatcattcgtcttttacagtgacgccataagggagaagatgaagaaaaattacatgtccaatccaagttacaattatgaaattgtgaatcgggcttccctggcttgcggccctatggtgaaatgggcaattgcacaggtgattaacacagccaggagctcccgtgtgaaaggtgacctcttttcctgtcacttaaataacagttatcaattggttcttcccagcttaactatgcagacatgttaaagagagtggagcccctacgcaatgagctgcagaagctggaagatgacgccaaggacaaccagcagaaggccaacgaggtggagcagatgatccgagacctggaagccagcatcgcccgctacaaggaggaatacgccgtcctgatctcagaggcccaggccatcaaggcagacctggcagctgtcgaggcaaaagtaagattatcatcattgatcctcagcctttcc

SEQ ID NO: 8609 - DNA, 573 bp, Homo sapiens
  MAP TO AC010379.4; EXPRESSED IN BONE MARROW, SIGNAL = 1.1; EXPRESSED IN PLACENTA, SIGNAL = 0.69; EXPRESSED IN BRAIN, SIGNAL =   1; EXPRESSED IN FETAL LIVER, SIGNAL = 0.76; EXPRESSED IN LUNG, SIGNAL = 0.51; NT HIT: AL163206.2, EVALUE 5.00e-29; EST_HUMAN HIT: AI733767.1, EVALUE 9.00e-13; SWISSPROT HIT: O42410, EVALUE 9.40e+00
tatgctttttggccacttccctccaacattataacaatggagaaatggccagtgcagtaggaatgagggagaaagaagatctgggtaaaggacaagtaaggcaaggggatttcttccagagtaagaatactgtcagcaggagagaggcagagcaagatggcagaatagaaagctccactgatcatccccacagcaaggacaccaagttaacaactatctatgtgaaaaatcaccttcataagaaccaaaaatcaggtgagccctcctagtacctggttttaagttcacatcattgaaagaggcactgaaatggtagaaaaaacagtcctaaatcactgataccactccctcctcgctcccactcagcagtgacagggtggttcagagaacatctctggacattaatggagggggagcaaagcaattgtgaggcactgaagttaatgcagccctgttagagcagaaaggaaaactggtccaaactcagctgatgcccacccatggggggagcatttaaagcagccctagccggaggggaattgtggatcacagtggtcagaattccatttccca

SEQ ID NO: 8610 - DNA, 522 bp, Homo sapiens
  MAP TO AF205588.1; EXPRESSED IN BONE MARROW, SIGNAL = 0.79; EXPRESSED IN LUNG, SIGNAL = 0.9; EXPRESSED IN HELA, SIGNAL = 0.51; NT HIT: AB058702.1, EVALUE 4.00e-11; EST_HUMAN HIT: BF765676.1, EVALUE 8.00e-10; SWISSPROT HIT: O67178, EVALUE 3.70e+00
aaccccagcagttcaacatcaaagacatcaaagtggtttatgtgcccccagacagtgtctctaattcggcctctagatgaggagggcataaggaactttaaggttcattacaatggtactccatggaaggatggttaatgctatggaagagaaccctgatagaacaccatgaaagactggaaggatgacaccactggcactgaagatggggtgactgttacagaaaaagccatagaagccattgaccccaaaacaataaattccttctggagaaaactatatccggatgttgtatatgacttcacagaatttatgacagagccaatcaaggaaatcataaaagagattgtggatatggcaaaaagaaaaaaaaaaaaaaaggtggtggaagcaggagagtaaagatttcaatacatggatcttggagaaattcaagatctcatagacttcacaacagaggaattaacagatgacttgacagagatgagcacttccaaagcccgaccatgaggcgtaagacgt

SEQ ID NO: 8611 - DNA, 597 bp, Homo sapiens
  MAP TO AJ012008.1; EXPRESSED IN BRAIN, SIGNAL = 2.5; EXPRESSED IN BONE MARROW, SIGNAL = 2.5; EXPRESSED IN PLACENTA, SIGNAL = 4.4; EXPRESSED IN HEART, SIGNAL = 2.6; NT HIT: AJ012008.1, EVALUE 0.00e+00; EST_HUMAN HIT: BG740000.1, EVALUE 0.00e+00; SWISSPROT HIT: O95867, EVALUE 1.00e-31
tgatagaaccaggactgggggagtggtgggtaaggatgtgcagaaggaagatcagactaagaaaagagaaggggagggccagggacagagttgggaaggaaggaagcctaggtgggtggatggggtggggaggtggacacaggcatgccaggtgcccatcctggccgattccctgcccattcccacccctaggtaagatgtgggttttctccaatctgcgctgtggcacaccagaagagccctgtcaggaggccttcaaccaaaccaaccgtaagctgggtctgacatataacaccacctgctgcaacaaggacaactgcaacagcgcaggaccccggcccactccagccctgggccttgtcttccttacctccttggctggccttggcctctggctgctgcactgagactcattccattggctgcccctcctcccacctgccttggcctgagcctctctccctgtgtctctgtatcccctggctttacagaatcgtctctccctagctcccatttctttaattaaacactgttccgagtggtctcctcatccgtccttcccacctcacacccttcactctcctttttctgggtccc

SEQ ID NO: 8612 - DNA, 574 bp, Homo sapiens
  MAP TO AC002991.1; EXPRESSED IN BONE MARROW, SIGNAL = 0.53; EXPRESSED IN PLACENTA, SIGNAL = 0.94; EXPRESSED IN HEART, SIGNAL = 1.2; EXPRESSED IN FETAL LIVER, SIGNAL = 1.1; NT HIT: gi14778141, EVALUE 2.00e-74; EST_HUMAN HIT: AI983885.1, EVALUE 1.00e-104; SWISSPROT HIT: P34492, EVALUE 7.30e-02
tcatagcatcacagcttggcaaggaagggaaactgccctgtctccccacctcccaagctgcagcggccatttggcctcattcgcaggccctgacacacacctggtgtgcatgtttgcacacatgtgtatacaactctgctctgagcccatagggagggagaagccagaagccccagtctaggtgttggggcagctgcaaagcagcattgcagcagggaaattggggggcaggagggggtctgtcggagggaggcaccttgagcttgtatgtcctcagctcatagatgttgggacccattctgggctgtggctcattccagaagctgaactcgaggagcagctggtttctcctggacagcagcatctggctccgctcccttcggaactccaggtactcctgtgggcatggtggtaaaggcatggctaccaggaagtgcgctccatcctgacagtgtgcctcatggggtagcagagtagtccccagaacagggctgggctgcatcccacatccagagaggtgtgctgagtggacactaacataccttattgtttttgagcttgttcatgcagtcca

SEQ ID NO: 8613 - DNA, 520 bp, Homo sapiens
  MAP TO AC004189.1; EXPRESSED IN BONE MARROW, SIGNAL = 0.51; EXPRESSED IN PLACENTA, SIGNAL = 0.84; SWISSPROT HIT: O13863, EVALUE 2.10e+00; EST_HUMAN HIT: BG201564.1, EVALUE 0.00e+00; NT HIT: gi5453845, EVALUE 0.00e+00
caaatttctcttacatgggagctcacctgtgtaattacctgacatcatctgacagttagcacagagagtagcaccttccgccaatttctacttcaaagatatcggactgaatatgacattaaagatcaagctgcaaaaggggatgaagttactccaaaacaatttcatgcatttgtaccctttctgggagagctttatcataacctggagatcagaggaacaaatggacaggttacaagggcagatattcttcaggttggtcttcaggagttgccgaatgcccgaatgccctcttttctaatcccatggatgacagcttaatttgtgcaataaaattgctgaagttgacagggtcagttttggaagatgcttggaaggaaaaggaaggactgatatggaagaaattattcaggaaattgaaaatgttgttatagatgcaagctgtggcagagacatgaaacagatgctcttgaagcttgtagaactccagtgcagtaattggggtagagtccatgcaact

SEQ ID NO: 8614 - DNA, 552 bp, Homo sapiens
  MAP TO AC016603.5; EXPRESSED IN BRAIN, SIGNAL = 1.2; EXPRESSED IN HELA, SIGNAL = 1.2; EXPRESSED IN BONE MARROW, SIGNAL = 0.93; EST_HUMAN HIT: BG390300.1, EVALUE 1.00e-61; SWISSPROT HIT: O75791, EVALUE 5.20e+00; NT HIT: AB033051.1, EVALUE 1.00e-114
tcatgcccaaaatactaaatcctatgttacatgatcacaaagtcaaataaaaattaccaagtttaacgccttataaacgtaacataaaaataaaactttaaatggtaataactacgttaatattctgtatggatttactaataattaagtaacctataaaaatacataaaaagcttagtcccatatttcaaatagtcttgattattcttacctcttgttttgccagttcatggccttgtctaggagaacaatggggctgtgtatatggaggctggtgggccactttcagcatcaagtaatcaattagttgttctctagagggatgccttgccacagatgcctgaggggggtgatgtatttgactataatttgcctgaggcctgagaggctggcccatctgtccattactcaaaggcatctaagaaaaacatgaagtatcttaaaatgaccaataataatgtcttatttcaaatatttggatttcttcttggagcattacaaaagcactagagttttcacattctaattaagtcaaacaataccatgccactt

SEQ ID NO: 8615 - DNA, 600 bp, Homo sapiens
  MAP TO AC016627.5; EXPRESSED IN LUNG, SIGNAL = 3.6; EXPRESSED IN BRAIN, SIGNAL = 2.2; EXPRESSED IN BONE MARROW, SIGNAL =   2; EXPRESSED IN PLACENTA, SIGNAL = 2.3; SWISSPROT HIT: O15063, EVALUE 8.00e-29; EST_HUMAN HIT: BF373925.1, EVALUE 5.00e-61; NT HIT: gi7662075, EVALUE 1.00e-103
cagcctcttctcactggtcccccatcttagaagctttcctgcagcactaccgttcagagacagggccctcccttcctctggctcccgcatatctccatcctggccccttagccctgtttttgtaagcctattctcccaggaggctgtgagtagaggttgtcatcctagtgcctggcacatgcctggcacaaagtgggcattcacaaagatgttcactgttaaatgaatgaacaagccaatgataacagtttaaaatgtacatttctaaatgaaatggctgttttgagaatcaacaggcaaaggccctctggagcctctcctatttgaacacaggcaccaatctccccaaagccagggttacctcagcagccccccgccaggaccgcacagcttcctctacttcaggtgtgtggcccatgccagataagccgccgccactgccgctgttctttttttctggcacgatgacctcagcaaagcaagagtgagccaccggctggaccttctgtaacgcatgagtcaaaaactggaaatggacttgcaccacagtcaggaaacatcgccccaacacctgtgaaaacaagacagccagggatgttt

SEQ ID NO: 8616 - DNA, 574 bp, Homo sapiens
  MAP TO AC000068.2; EXPRESSED IN HELA, SIGNAL = 1.8; EXPRESSED IN BONE MARROW, SIGNAL = 0.97; EXPRESSED IN PLACENTA, SIGNAL = 1.2; NT HIT: gi14777006, EVALUE 0.00e+00; EST_HUMAN HIT: AA527682.1, EVALUE 0.00e+00; SWISSPROT HIT: P11414, EVALUE 1.10e+00
accttggttccaagcatcagttgcagctgcagccacattcaacattccatttcttaatttgtcccaaacttgttttatctcctaagtcctgtctgtgtctggcaatgggaatacttgtgtcagttgcagtcacagacttacatgccagtgagattggtaacccttagcttctttgcagagagcggcctcaggtggagctcacctttgaggagactgagaggagagctctgcttctgaagaagtggtccttgtacaagcagcaagagcgtaagatggagagggacaccatcagggctatgctagaagcccagcaggaagctctggaggaactgcaactggaatccccgaagctccatgctgaggccatcaagcgggatcctaacctgttcccctttgagaaggaagggccacattacacaccaccgatccctaactaccaaccccctgaaggcaggtacaatgacatcaccaaggtgtacacacaagtggagtttaagagatagacttgcaggctgctatccttaacatgctgcccctgagagtaggaatgaccagggttcaagtctgctttcca

SEQ ID NO: 8617 - DNA, 587 bp, Homo sapiens
  MAP TO AF207953.2; EXPRESSED IN FETAL LIVER, SIGNAL = 1.1; EXPRESSED IN BONE MARROW, SIGNAL = 0.55; SWISSPROT HIT: Q14541, EVALUE 5.00e-37; NT HIT: AF133502.1, EVALUE 0.00e+00; EST_HUMAN HIT: AW864523.1, EVALUE 4.00e-49
ggccaatcgtgttctagatgagctggttagaccatttcaagaaatccagattgatgacaatgagtatgcttgtttaaaggcaattgtattttttgatccaggttggttttcaaaattccactagagaattaatataataaaaattgaactacttttcaatattagaatatttattgtctcacactgtaattaggttaaatctgtacactgcctctcttattcctttgttagatgcaaaagggctaagcgatccagtaaaaattaagaacatgaggttccaagtgcagatcggtttggaggactacatcaatgatcggcagtatgactcccgggggaggtttggagagttgcttctgctcctgcccacactgcagagcatcacgtggcaaatgattgagcaaatacagtttgttaaactttttgggatggttaaaattgacaatctacttcaggaaatgctattaggtggtgagtacattgaataatttctactttattgattagaatcacactaaatataagtttgacctactgatttttttgtccatatttaattcatctactgaagttgctgtgatgctcctgaa

SEQ ID NO: 8618 - DNA, 544 bp, Homo sapiens
  MAP TO AC016940.7; EXPRESSED IN HEART, SIGNAL =   1; EXPRESSED IN BRAIN, SIGNAL = 0.87; EXPRESSED IN HELA, SIGNAL = 0.78; EXPRESSED IN LUNG, SIGNAL = 0.91; EXPRESSED IN BONE MARROW, SIGNAL = 0.63; EST_HUMAN HIT: BE733495.1, EVALUE 1.00e-113; NT HIT: U75667.1, EVALUE 8.10e+00
atgtgacaggcaaggcctacacagcaagtcttggcctgtggctggcctcataccttggggccccaccatcaagagctcagcactattcttgattgctgcatagctacaaagaagctgcagcgagtcagcactgagaccgctttccacagggccactggtcctcataccatagtcagctgtgctctgcttgggtcgcctgaccatgatgattttattcataatgcagcaacgcagaggggccatctcaggggcttttggagcatggaagagaagaccaaccattttcctcaaagtggcttgcaggtggcaggtgactcataaagaatgtctgaatggttgctgaaagttgcagagctcatctttggggactgagcaggcttagccagaggaggctggatttcccaccatgactcttcttgactagacttaagtcagtgccctgaatattccctccaggggacaagaggagcttgatgtcttagactcgaaatcccagtgtacattctgtgacttaaaacaaaggacaatggtcgctaatggtcct

SEQ ID NO: 8619 - DNA, 600 bp, Homo sapiens
  MAP TO AC005276.1; EXPRESSED IN BRAIN, SIGNAL = 3.8; EXPRESSED IN LUNG, SIGNAL = 4.5; EXPRESSED IN FETAL LIVER, SIGNAL = 4.3; EXPRESSED IN BONE MARROW, SIGNAL = 2.3; NT HIT: AF289204.1, EVALUE 0.00e+00; SWISSPROT HIT: P03356, EVALUE 8.00e-27; EST_HUMAN HIT: BG766864.1, EVALUE 0.00e+00
ttcactggatgggtagaggcctttcccacagggtctgagaaggacaccatggtaatttcttcccttctgtcagacataattcctcggtttagccttcccacctctatacagtctgataatggaccagcctttactagtcaaatcacgcaagcagtttctcaggctcttggtattcagtggaaccttcatatcccttacagtcctcagtcttcaggaaaggtagaacggactaatggtcctttaaaaacacacctcaccaagctcagccaccaatttaaaaaggactagacaatacttttaccactttcccttctcagaattcaggcctgtcctcagaatgctacaaggtacagtccatttgagctcctgtttagatgctcctttttattaggccccagtctcattccagacaccataccaacttagactgtgccccaaaaaacttgtcatccctactatcttctgtctagtcatactcctattcaccattctcaactacttatacatgcgctgctcttgtttacactgccggtttacactgtttttccaagccatcacagctgatacctcctggtgctatccccaaactgccactcttaa

SEQ ID NO: 8620 - DNA, 508 bp, Homo sapiens
  MAP TO AC005791.1; EXPRESSED IN BRAIN, SIGNAL = 2.5; EXPRESSED IN BONE MARROW, SIGNAL = 3.2; EXPRESSED IN HEART, SIGNAL = 2.8; EXPRESSED IN FETAL LIVER, SIGNAL = 1.7; NT HIT: AF106544.1, EVALUE 0.00e+00; SWISSPROT HIT: P11465, EVALUE 6.00e-68; EST_HUMAN HIT: BI054022.1, EVALUE 0.00e+00
cagcatgggacataatgcagagagggacacaggcacagtctaggcctgacaatcctgtgtgtgtgaagtagaaatgacccctgtcccccaacacccagggatcatgtggaatcacttacggtataaggtgaaggtgaaatatccagttactcctctagtcccatcacctcgctttatgatgtgtaaggtgtaggatcctgcgtcctcccgggtgacattctggatcagcagggatgcattggaatatgctgtttctcgtccactatatgcaggcccatatataattatttgaccgtctactacatatgatgtaatgtaatggtagaggtccctgatttgccctttgtaccagatgtagccagtaagattctggggcaaattgtggacaagtagaagaacatccttcccctcggaaacttttggtggctgggcttcaatcgtgacttgggcagtggtgggcaggttccagaagtttaaaagtgatgctaggaggtggagagagcatcag

SEQ ID NO: 8621 - DNA, 572 bp, Homo sapiens
  MAP TO AL022339.1; EXPRESSED IN PLACENTA, SIGNAL = 9.4; EXPRESSED IN FETAL LIVER, SIGNAL =   5; EXPRESSED IN BONE MARROW, SIGNAL = 3.5; EST_HUMAN HIT: AI239531.1, EVALUE 3.00e-03; SWISSPROT HIT: Q9XYD3, EVALUE 4.20e+00; NT HIT: U47654.1, EVALUE 2.00e-03
gggtctgctgctcttgtttcagggtcctggtgtggctcccctacccgcttcgagccctcaagggcagggcccacacctgactcagttctgagcccccagcccaggccctggccgaaggtgctatagttccagcttatggaaggcctagtgtgaggggccacaagttgccactgagtgaggggagcactggtgggcctgagcctggggtccacagaactggccatgaggggcaaggtgacctgcagagtgcctaggaggacacatgacccccgcatcagggcaggcgagtgctctccgtggcaggagtcagtggccacacaggaacagtttcctgcactcacgggtatgtgaccaaggcgtgtttgccgtgagagcagaacaagagttgacatttgccaaagattccttccagaaggctgtgcaatgaggaagcattcccggggctactgtgggctgatgagctgggctgtgtccacaggagcgatagccccactgggcagcagtgaggatggcctagagtggtataaggcccagagaggttaatgactcacccagggtcacacagcttctga

SEQ ID NO: 8622 - DNA, 507 bp, Homo sapiens
  MAP TO AL121784.2; EXPRESSED IN BRAIN, SIGNAL = 0.68; EXPRESSED IN FETAL LIVER, SIGNAL = 0.97; EXPRESSED IN HELA, SIGNAL = 0.78; EXPRESSED IN BONE MARROW, SIGNAL = 1.1; EXPRESSED IN PLACENTA, SIGNAL = 0.76; EST_HUMAN HIT: BF091229.1, EVALUE 2.00e-87; NT HIT: gi16191240, EVALUE 4.00e-88; SWISSPROT HIT: P55174, EVALUE 5.40e-01
ctcccatcaccctctctcagcgacctgtactatcgcccccaaagctcttattactctttagaatcatctgatgtgtttatttgtcagggctcattctctatctcccagtcctagaatgggagctctgtggagcagggtcattgcagctataaccccagtgctcagaacactgcctggcacactgtaaatgtttgttgaatgactgaatgaaaggtcataggctgagcaccacctcccctccctgccctggtgccctatggactgactgcagagaagaagagcttctggcctggtcaggctccaagccaggtcgctcaccctgggtagccggccggactgggcggccatccgagtgctcaccagcaatgacggcaaagtcagcctccacgtcgcaggcgatgacatccccgtgccgtatgtgcctcctcacagcctccttgactttacccatcccaagctcgttgcctccatcaccgactcctgaagggaaggggagctgagtcagtg

SEQ ID NO: 8623 - DNA, 501 bp, Homo sapiens
  MAP TO AF004877.1; EXPRESSED IN BONE MARROW, SIGNAL = 0.86; EXPRESSED IN PLACENTA, SIGNAL = 0.75; EXPRESSED IN BRAIN, SIGNAL = 0.65; EST_HUMAN HIT: AW024045.1, EVALUE 0.00e+00; NT HIT: AF004877.1, EVALUE 0.00e+00
ttgattcccttggctacagtgatgtcttctcttggaagggaagaagttacattaatattgaccatcctagattaaaacctttctggctgccttagaaagtacccacccaattttccaaaataggcggggctactgaataagactaggtttataaaatattcataagaaatatagagtaaataatccaatagaagtttgagttttaggatcagcttctatgaagcagaagatttcactgagctagagaatcttttcactcctttggaattatttgcaaaagcacttattgttaacacattcttagctcatgagttgaatttgaggcataagtacaggtacgtattgctatgtatttttgttctgtaggtacatatttttatttgacatgttggtaaaattttaaattgtagtttgaaatattaaactgagataatagtaaatgcataatgtaatgaattgtgaaggtatatttgtatactacaccaaaatggaagctgtttt

SEQ ID NO: 8624 - DNA, 587 bp, Homo sapiens
  MAP TO AF196972.1; EXPRESSED IN BRAIN, SIGNAL = 1.8; EXPRESSED IN BONE MARROW, SIGNAL = 1.9; EXPRESSED IN PLACENTA, SIGNAL =   2; SWISSPROT HIT: P27732, EVALUE 2.20e-01; NT HIT: gi14759560, EVALUE 8.00e-68; EST_HUMAN HIT: AA531103.1, EVALUE 1.00e-67
agacgcatgggaaggttatgaagtctgtcttcttgcagggacccccagctctcacaagtgtgtgttcctttcactgcctttattcttcatatctctctcttcttttcttcagggaaagagtatgccaagggagacagccgatacatcctgtaagtgtttgcctctgtcaatggagactggcattggttttcggggggtggtgagttggggagcactaatgggctaacctgtaggaagagcacaccgataccagtgtcccctcatgctttctcctgcaggggtgacaacttcacagtgtgcatggaaaccatcacagcttgcctgtggggaccactcagcctgtgggtggtgatcgcctttctccgccagcatcccctccgcttcattctacagcttgtggtctctgtgggtaaggaaagggcactagaggggcactgggcactagaggggttgatgggggatccacagacacagatgtatccctgtgggtgggatctctcaacggtgcccttccaggggtaagtcagactgaatgacaaaccccctgaggctctggaaaggtcatgcccttctctgagcctgcactc

SEQ ID NO: 8625 - DNA, 547 bp, Homo sapiens
  MAP TO AF241731.1; EXPRESSED IN BONE MARROW, SIGNAL = 1.4; EXPRESSED IN PLACENTA, SIGNAL = 0.93; EXPRESSED IN BRAIN, SIGNAL = 1.3; EXPRESSED IN LUNG, SIGNAL =   1; EST_HUMAN HIT: BG534909.1, EVALUE 4.90e-02; SWISSPROT HIT: P28023, EVALUE 8.80e+00
cacctggacatcacagcatctgccacaggaggctgaaaatacaaatatacctgagaaaagtaacagatggttttcaatggataccaagaagtaaatgactgatccagagcccttttggataaggatcatggaagtggatttgagactgaaatgaacaagaccaagatcagggaagagaagaagaggatgtgcaatgtcaaggaaggagaatctggattcggactgcagagacctgccctggggcttcctgctgtggaattctgctagcagcacaggaatggagtttagttgtccaggacctggaactgcaccttacctctgagagacgttgggtagaagttctctatttcggctctcccacttggcaaatgaggactggtgatgccaatctcatctagggacttcagtctttagggggaaaaagatataacacaacatctatatttgcagcaagggacacacagataaaaacaaactttgttaatacgaaataagatataaatcattatcagaatcacagaagctgggatgggcaagttcaatccac

SEQ ID NO: 8626 - DNA, 577 bp, Homo sapiens
  MAP TO AC020728.4; EXPRESSED IN LUNG, SIGNAL = 1.7; EXPRESSED IN BRAIN, SIGNAL = 1.1; EXPRESSED IN BONE MARROW, SIGNAL =   1; SWISSPROT HIT: P09914, EVALUE 1.10e+00; NT HIT: gi14721272, EVALUE 0.00e+00; EST_HUMAN HIT: BE503853.1, EVALUE 0.00e+00
tgaatgacttgcagaataatgctctgaatactggaatttaggaatgagtacttcaccttctcctggtataagagccatccatgagtttgcaaatctcgatttactgaggatgggtgtacttgtgctttgccttgggccgtctccacaatgcaagccaatttttctgtaacatccactgactttgtatagattatcttccccacattgtcatacagtccagccaccagtacagctttaagaagggcaatttcttggaatgagagggtctgtgaggctctgtttccttcccagctggtagaagttgtggaagatgaaaatcctgctgccttaaccaactttattaactcctgctttacatcctagattggtttatgttaaaaacacaaataatcaaattgattagaggaatttccaaataacattgtagtttatattactgcttcctataaaaattgacaggatgctaatgattatttggctaacgatagcccaaattaccttagggaaaaaaaaaagatactggaaagtcaagaattagaatcagctattctcctcacccaaagacttcaggtgcctc

SEQ ID NO: 8627 - DNA, 562 bp, Homo sapiens
  MAP TO AL121896.10; EXPRESSED IN HELA, SIGNAL = 0.44; EXPRESSED IN BONE MARROW, SIGNAL = 0.53; EXPRESSED IN PLACENTA, SIGNAL = 0.6; NT HIT: gi14786693, EVALUE 0.00e+00; SWISSPROT HIT: P94287, EVALUE 1.80e+00; EST_HUMAN HIT: BF894761.1, EVALUE 0.00e+00
gtccaaatgtgtcacgatgccagctcgaaatcagaaatgaaggatttcttccattgggtgctaagcagccttccaaaggtccatataaaaccttaccatcccaagagtacttccctgagatatccctcacaattactctcacatcagagagagagcccactggtgatccccctaccggtccttctgtgggtgtctgaaggtaggagatgagggtgctatcattaaatacaaacagctgcaggtttggacttctgaacacctcaaaggacagctcggagccttccacatgggcattgtcatggttctcgctgacaaggctgtgcagtatggcagggcccccactgagggggtagtgccccaggtggttcaccaggtgggccatcaccattcgagcagtcaaagggatcaactccaaacttcttctcttcttctctgtaaacagcggtaaagaaacataaagagtcagtggtgaatgaagattaaaactcaacaccttttttttgggtggggggcagggggcagttccaatatggtagattacaggcttttagtgtgcctcagc

SEQ ID NO: 8628 - DNA, 503 bp, Homo sapiens
  MAP TO AC027329.3; EXPRESSED IN BONE MARROW, SIGNAL = 1.2; EXPRESSED IN PLACENTA, SIGNAL = 2.6; EXPRESSED IN FETAL LIVER, SIGNAL =   3; EXPRESSED IN BRAIN, SIGNAL = 2.1; SWISSPROT HIT: Q9UMN6, EVALUE 1.60e+00; EST_HUMAN HIT: AW194146.1, EVALUE 1.10e-02; NT HIT: AE005362.1, EVALUE 4.80e-01
tatgatgggacatggagtgggggtgggagaatgggggaggcttgggctggacatacaggaggacagggtgggaggctggtggcaactggaggcagctccggtggcagcctttccagcactggtgaacctcatgcattcagcctattgcctaccctgatctagggactgagcgattctgggtggaaaggtttaaagattcttggactcacctgtctgccctgagctgggccagtgggaaggggagatgcctaactcgacttctccaagggtggctggtgggacctgagatagcacactacatgccccatgtctctggactgggtccccagccagggctttgtagtgaggggtggaagtagggtggaggacgtctactctctctggcaagtatacctgtggcttggactgctccagggattggttctgtgttttggggagttctctcttcttgcttccaaccttcctgagtttgatatgcattttccctttctggtcagctcaga

SEQ ID NO: 8629 - DNA, 526 bp, Homo sapiens
  MAP TO AF045449.1; EXPRESSED IN FETAL LIVER, SIGNAL = 4.4; EXPRESSED IN BRAIN, SIGNAL =   3; EXPRESSED IN HELA, SIGNAL = 4.7; EXPRESSED IN BONE MARROW, SIGNAL = 2.9; EXPRESSED IN PLACENTA, SIGNAL = 3.3; NT HIT: AL163281.2, EVALUE 0.00e+00; SWISSPROT HIT: Q10084, EVALUE 2.80e+00; EST_HUMAN HIT: BE962637.2, EVALUE 7.40e-01
gactttctctctggaggcccctttcttgcaaggagcagaaatagagtctccctaattcacaggaagcacaatgactattcagattcctctcccaccaccttcacttcagaggggacacattccttccagggactgacatggcggcttctcagtctcagcaggggagagacgggttttccttggcctcggtaggcattggcctcctctgcagtgagtgttgtcccattggcacttattggttccactggccagtccaccctacccaaggacagtgtcccctcctccattgtctgctgccatatttgattcctctctactctattatgggtcagcaggggcgggggcccactgtgagccttcctcatgcccttggcctcagccttctgagcagacacctgttcctacttgtcttggtgcccagggtagcaggaggcaaagtgcactcaggaccccttaactctaagattgtcaaacaacgacaatccccttggggccagtcattgggtgggttcatggttccttctga

SEQ ID NO: 8630 - DNA, 562 bp, Homo sapiens
  MAP TO AC005328.1; EXPRESSED IN BONE MARROW, SIGNAL = 0.79; SWISSPROT HIT: Q03368, EVALUE 3.00e-06; EST_HUMAN HIT: BG764548.1, EVALUE 0.00e+00; NT HIT: gi4501976, EVALUE 0.00e+00
gacctttgggtcaaaagcaggcgaccccagaggaggccacgtcagccccgccctgtccaccaagtgcccctcacgtggtgcccatcaggccctggcccaggacaggagcccctgaagccacattcaaggactcggcccccagcgcggggcagggcacagacccaggtgggggagtcccttgctggtttgggggcgagaaggggacttcttgccaaagagaatgggaagagtcacagtaaaaaaggatggtcagataattcaacgcaacaaatgacctcggatgtctacacggcggacaacatagagttaaattaacactcaggcttgggtacagtacacacgactgaggagaggcgagacacgtcagggctgcggtccctgggtacgtgctccgcggggtggtgcggggctcgcaggcagctctcaacacttggccagcgtcgccttcatctcttctaacaagttgctcagtagcgtggagtcactgcacttcccgtcgactgagacagagttctcaccctgtgtaaggaaaaaagatggatattttaaaagtgtgtgcagg

SEQ ID NO: 8631 - DNA, 516 bp, Homo sapiens
  MAP TO AC006181.1; EXPRESSED IN HEART, SIGNAL = 1.4; EXPRESSED IN BRAIN, SIGNAL = 1.8; EXPRESSED IN BONE MARROW, SIGNAL = 1.8; NT HIT: U07977.1, EVALUE 3.10e-02; EST_HUMAN HIT: BF767564.1, EVALUE 7.20e-01; SWISSPROT HIT: P14723, EVALUE 5.50e-01
caggttccagcaggagagacgagagcagacggagggagaaggtgcaggagggctcgtcacaaaggaaccaacgtgcttcctgctagaagggcccacacatgccggcaccatggctcagcatcccgaaccagagcaggacggacccacggagattccagggagggcggggggagaggatcacacagaaccaggcactgggagggagctggtcgcggtgatggcactgccctcagcaggcgccgggattcggtactcccattgcaaggtcaggggtcagcacacaataagacgttttcagatacgcaaagactcaaaatgctgcttcccatctagagagtctttctccagaagctactgtagaatttgttctatcaaaacaagggagtagatgctgagagaggaaggtaagagttccagaagaaagggagctgacccagaagcccccggccgccccctactgtgagaggagcctggcggggtctccacagggagaccaggtcagtctgaggacttggc

SEQ ID NO: 8632 - DNA, 541 bp, Homo sapiens
  MAP TO AC004151.1; EXPRESSED IN BONE MARROW, SIGNAL = 1.9; EXPRESSED IN PLACENTA, SIGNAL = 1.1; SWISSPROT HIT: P22681, EVALUE 3.00e+00; EST_HUMAN HIT: BE548854.1, EVALUE 1.00e-104; NT HIT: gi14765643, EVALUE 1.00e-105
ggaagctatggccacctaccgcacctgcgtggccgacgcgaagacgcagaagcaggagctggaggataccaaggtgacggcgctgcggcagatccaggaggtcatccggcagagcgaccaaaccatcaagtcggtgcgtggggtgctccggccgcccgggcggggatggtggaccgggcggcctcctcctgacccctccgctctccggtgccgcccgcaggccacgatctcctactaccagatgatgcatatgcagacggcgccgctgcccgtgcacttccagatgctgtgtgagagcagcaagctgtatgacccaggccagcagtacgcctcccacgtgcgccagctgcagcgggaccaggagcccgatgtgcactacgactttgagccccacgtctccgccaacgcctggtaccgccacccagctgccctgtccccggcgcacaaggccctgcctgggagccgggcttccctctgtcgggggcatgaagatgaagctgtcttgccccccatcacctcccctccttttcccggtttcttc

SEQ ID NO: 8633 - DNA, 501 bp, Homo sapiens
  MAP TO AL109825.23; EXPRESSED IN HELA, SIGNAL = 0.81; EXPRESSED IN BONE MARROW, SIGNAL = 0.74; EXPRESSED IN PLACENTA, SIGNAL = 0.84; SWISSPROT HIT: P54673, EVALUE 7.00e-01; NT HIT: X03936.1, EVALUE 3.00e-02
caaacaaacaaacaaacaaaaaccaatgtgtaagtgaacagagagaacaagaagtttaaggaaaattaaaaacataaaggacaaagtgagagaagagaatatctgtaaaatacatgaatacacacacacagtagatgtttcatggttgtttatcccccacctctcgctggaacacagactggtgccccacttcgtgcttgggatgtccttcctctgtttcttggctgagtcgaacttgtgctgcttcctttctccttaaatatcctttcctctggacaggatgttcctgaaggaggccacaaggcagaacatctcggctaactttagtttgctattttcagcctgaatttgtgcctgggcaaatcagtccacggacagagtatcctccccagttggatatttcttgcatgagcatcagaattttgtgggacacaaggcttagtttcactaagctctgagcctcaaaacctggtatgcatctgggttagagagcctcatcca

SEQ ID NO: 8634 - DNA, 562 bp, Homo sapiens
  MAP TO AF178030.1; EXPRESSED IN PLACENTA, SIGNAL = 1.8; EXPRESSED IN HEART, SIGNAL = 1.5; EXPRESSED IN BRAIN, SIGNAL = 1.1; EXPRESSED IN LUNG, SIGNAL = 1.3; EXPRESSED IN FETAL LIVER, SIGNAL =   2; EXPRESSED IN BONE MARROW, SIGNAL = 1.2; EST_HUMAN HIT: AL521707.1, EVALUE 1.00e-125; SWISSPROT HIT: Q9V4U7, EVALUE 1.40e+00; NT HIT: AJ271736.1, EVALUE 4.00e-85
gcaacaatgaagcttcccacatcaactgactcttctttcatgaatgatttgtttgtagcatgcaatgccacttgatagcattttacccacgctagaacttctttcaaaattggagtcaatcatctccaactttaatgctgctttatcaactaagttgatggaatattctaaatcttttgtcattttgacaatgttcacagcatttccaccaggaatagcttccatctcaagaaaccactttctttgcttatctttaagaaaaagcaacacctcatccattccagttttatcaggagattgcagcaattcagtcatatcttcaggctccacttctaattctagttctcttgctatttctaccacatctgcacttacttcctccactaaagtcttgaagccttccaagtcatccatgagagctggaatcaacttcttccaaacttctgctaatgttgatgttttgacatcctcccatgaatcatgaatgttcttaatggtatctcaaatgatgtatcctttccagaaggttttcaactcactttgtccagatccaccagaggaa

SEQ ID NO: 8635 - DNA, 506 bp, Homo sapiens
  MAP TO AC004189.1; EXPRESSED IN BONE MARROW, SIGNAL =   1; EXPRESSED IN PLACENTA, SIGNAL = 0.9; EXPRESSED IN BRAIN, SIGNAL = 0.78; EST_HUMAN HIT: AI248753.1, EVALUE 0.00e+00; SWISSPROT HIT: P19474, EVALUE 4.00e-26; NT HIT: Y07829.2, EVALUE 0.00e+00
ccttgaggaagccatagcagcaggaccagcatggcctctgctgcctctgtgaccagcctggcagatgaagtcaactgccccatctgtcagggtaccctgagggagccggtcactatcgactgcggccacaacttctgccgggcctgccttacccgctactgtgagataccaggcccagacctggaggagtcccctacttgcccactctgcaaagaacccttccgtcctgggagcttccggcccaactggcagctggctaacgtggtggagaacattgagcgcctccagctggtgtccacactgggtttgggagaggaggatgtctgccaagagcacggagagaagatctacttcttctgtgaggatgatgagatgcagttgtgcgtggtgtgccgggaggctggggagcacgctacccacaccatgcgcttcctggaggatgcagcggctccctatagggtaggaaaggggaactgggggatcccagggtggactggactggacta

SEQ ID NO: 8636 - DNA, 504 bp, Homo sapiens
  MAP TO AC011537.6; EXPRESSED IN BONE MARROW, SIGNAL = 2.1; EST_HUMAN HIT: BG230432.1, EVALUE 1.00e-82; SWISSPROT HIT: P78329, EVALUE 5.00e-30; NT HIT: gi14767688, EVALUE 1.00e-103
gggtacctaggtgcatggagacagctctcagagataggatgcagggagggaatagagtctagagagtcaatctcaggacagatacccatcatgtatctctaggaccatctgtttctagatactcagtttcctgatgggaggtagctcctggctgctggtgggaggtgttcctgggctttgcatatgttacattgttgcctccctttctgcccttggcctgcaggaggcccagtgaatatattgctaccatcttggagctcagtgcccttgtagaaaaaagaaaccagcatatcctccagcacatggactttctgtattacctctcccatgacgggtggcgcttccgcagggcctgccgcctggtgcacgacttcacagatgccgtcatccaggagcggcgccatacccttcccactcagggtattgtgatttcctcaagaacaaagccaagtcctagactttggatttcattgatgtgcttctgctgagcaaggtgggtttctc

SEQ ID NO: 8637 - DNA, 500 bp, Homo sapiens
  MAP TO AC003963.1; EXPRESSED IN BONE MARROW, SIGNAL = 0.8; EXPRESSED IN PLACENTA, SIGNAL = 0.83; EXPRESSED IN HEART, SIGNAL = 0.92; EXPRESSED IN HELA, SIGNAL = 0.86; SWISSPROT HIT: Q99558, EVALUE 9.00e-31; NT HIT: gi4505396, EVALUE 9.00e-89; EST_HUMAN HIT: BG822015.1, EVALUE 1.00e-88
tgtctcatcccccttctcaggggactacatccctggcacagagacccacatggctccggaggtggtgctgggcaggagctgcgacgccaaggtggatgtctggagcagctgctgtatgatgctgcacatgctcaacggctgccacccctggactcagttcttccgagggccgctctgcctcaaggtcggtgacggcacccagcatggccaacagggggagctgcagggccctggggcccaggctgcaggctggaggggctgctctgcggtggcagatggagcaaggggaggcctggtcatccatgtgggatcctaattcaaatacttgccacccaaatctgggggtacaaggggagatccagctgcggaggctcaccaagttcatggcaggtgagaactctcttctgtccataccctgggccccatccacctgcctcctaacgggccgggcctggaggctgtgggcgtcttgctgcctggctctggcctgttttactggc

SEQ ID NO: 8638 - DNA, 598 bp, Homo sapiens
  MAP TO AC005263.1; EXPRESSED IN FETAL LIVER, SIGNAL =   2; EXPRESSED IN LUNG, SIGNAL = 3.8; EXPRESSED IN BONE MARROW, SIGNAL = 2.6; EXPRESSED IN PLACENTA, SIGNAL = 4.6; SWISSPROT HIT: P73203, EVALUE 3.40e+00; NT HIT: gi14765802, EVALUE 6.00e-78; EST_HUMAN HIT: BG397575.1, EVALUE 0.00e+00
acacagtgaaaccctgacccaaaaaccaaaaaccaaaacaaaacagatccaggcatggccaagcgattcatggctgggcagggccagtcccgtcccgctgcacgctgaccaccgtgccctgcgctcacgcctgcaagccactcagctggaacctggcctcctcggatatgccgaactgttccagggggtcctgtggggaggacgggtggccatgagccagggctggaggactgcctctgccacctgcagccccaccccggccctctgcagccctgcacacaccttgcccgtcaccttccggatttcgttcctgtagaagatgaggcttctccgcatgaactcgtagctggggaaaagggtggcacggggtcaaatgcccgctctgcatggctgctgtgcccaccccagcagtgcccaccaccgcctggccccacctggcccgacgcagagcctccatccactcctgacactgctcctcgctgctgcactcaaagtgatacttcctctcagggtcctcaatgaagcctggggatggaacacctgtggtcggtcctacccacagccacaagcagcttcctcttgccattgcccataaact

SEQ ID NO: 8639 - DNA, 502 bp, Homo sapiens
  MAP TO AC011718.2; EXPRESSED IN BONE MARROW, SIGNAL = 0.63; EXPRESSED IN PLACENTA, SIGNAL = 0.59; EXPRESSED IN BRAIN, SIGNAL = 0.49; SWISSPROT HIT: P13983, EVALUE 2.90e-02; NT HIT: AF027201.1, EVALUE 4.80e-01
tcaaaggcaagggaagtcacttctgttgtggggccctgggaggagcctccaggctggaaaggcttaaggtggaggtctccgataggggcagcgtacacagtggactggctgcaaaaggccgtgctcagcattcagacagcatcacacactccgcttttctctaccagggaggcaggtggggaaggatagcgatgggaaggcaggcggagctcagaatgtggaaggggatccagtaaggcttggaagtttgcacctgatctggtgggtggtgaggagcccttgaaggggcaaggaggcgaggagcactcagctgtgttcttacactgatctgccactggggttagagacaaacgtggtgggaatggaaagccacgcacagtcactagcgcctctggggggagaatggatgtggctggtgagagaacaggggggcccagggagagtccggcaccaacctgggcgggggagcccagtgggtgtgagcacccccactttagagatg

SEQ ID NO: 8640 - DNA, 583 bp, Homo sapiens
  MAP TO AC026743.3; EXPRESSED IN BONE MARROW, SIGNAL = 0.56; EXPRESSED IN PLACENTA, SIGNAL = 1.8; EXPRESSED IN HEART, SIGNAL = 2.8; EXPRESSED IN BRAIN, SIGNAL = 1.7; EXPRESSED IN FETAL LIVER, SIGNAL = 2.6; EST_HUMAN HIT: AA570399.1, EVALUE 5.00e-05; NT HIT: AJ009794.1, EVALUE 1.40e-01; SWISSPROT HIT: P08547, EVALUE 3.00e-04
ggtaacatggtcagatgggcttggagctgacatctgaagccgtgtgggcgtggtctaccctgaatctgcagagggagcactccaggtagagtcagggacaagtgttccatcagggtgttctacaagttcaaggaccagaaggagacagtgttgtgggagcagaaggagaacctgggacaaaaccagatgatgaggccggacgggaggtgggcctggtccccatgctaagtgggatgggaagtcctgccaatgaagtcacacagtgtcaggtatttgggatttgccttgtttcacacaaaattatgtctatgagctccatccaggttgttgcacttaatagcgggtcattcatttttattgctatcttgctccattgtgtgacaccatcacagttgatcaattctactgtttgatttacatttgggtggttttcagttttgcctactatgaataatactgcaatgaacattccttcgtttgtcttatgttgcacatacattttcactagtttgcatttgagatctaggagtggactctcattatcactgggcatttgtgatagtcactcctatgagcagcatgg

SEQ ID NO: 8641 - DNA, 513 bp, Homo sapiens
  MAP TO AC016940.7; EXPRESSED IN BONE MARROW, SIGNAL = 1.1; EXPRESSED IN PLACENTA, SIGNAL = 1.1; EXPRESSED IN HEART, SIGNAL = 1.7; SWISSPROT HIT: P13083, EVALUE 1.20e+00; NT HIT: gi11067410, EVALUE 4.90e-01
gtccagaggagaagcacagggataccgtggtggtttgctggcccaggcaaaggctccccattctgccttccaacaggaaatggcccctgcttcctttagcagaaagcttgctccatgagggatgataaaccacccactcccagggctaccctgggtgacaggaggtccactggggccttgggactgtcctccctccctcttctctctcagtaactgtaatttgcctacctgagggaagactccctgaggaggtggctccttctgggctctggaaggccataggggttgctgcaagtccaagcagaactacagctactacctctgtggtcccttcagttgcctccctgcaatctcctcctccagttctccaagcccctaaatctagccccgtatttaatcaaatccctgtctagactccagacccacccacctcccagggagatctcagatgtgtatccaagttaggctaaagttgcctgaaacaaagggttctgtcaggaagcaggagattgc

SEQ ID NO: 8642 - DNA, 529 bp, Homo sapiens
  MAP TO AC034211.3; EXPRESSED IN BRAIN, SIGNAL =   1; EXPRESSED IN HELA, SIGNAL = 0.81; EXPRESSED IN BONE MARROW, SIGNAL = 0.99; EXPRESSED IN PLACENTA, SIGNAL = 1.5; SWISSPROT HIT: O13890, EVALUE 1.10e-01; EST_HUMAN HIT: AA398779.1, EVALUE 9.00e-90; NT HIT: AF055281.1, EVALUE 0.00e+00
acaacataaagagggctccgtatttttataccacaagcaaactgtgtacacaccgtccttgaacatcattccaatctctcagaagcctttcattttctttctgcaggtgctcatttttggcttgattttctgcaatggtgtccaagcaataacaaataagttctctaatgacttcagctgggttttcaactttctctaggttgaaggaaccaagtctgaactaaaatgaaagaaaaacatggttaatttggggaaaatatcaagattgagaagcctggttttaagcatacacaatttcttctgagaataaaaaagtgtaagaaggatttaaatacaatgcatttacaagatatacaaacagtgagcaaaaaaactgggcttctacctaaagtttcttacttgatcatataaatcaacatatagcccaagaataatttttgtaagtggtaagtcactcttccatctcctagcagaaaagaaagcaacataaatactgtataagcttactaccatctgtttgctaaagcct

SEQ ID NO: 8643 - DNA, 565 bp, Homo sapiens
  MAP TO AB014085.1; EXPRESSED IN FETAL LIVER, SIGNAL = 4.7; EXPRESSED IN BONE MARROW, SIGNAL = 0.44; EXPRESSED IN HEART, SIGNAL = 1.4; SWISSPROT HIT: Q63699, EVALUE 5.40e+00; EST_HUMAN HIT: BI009160.1, EVALUE 5.10e-02; NT HIT: gi15925705, EVALUE 8.40e+00
agtggctcacaggagctgtctagaatagcctgactatagcaattcctagttaagccagaagtttgaaatgagttcaaagtgtagggataaaattccagtgagaggcagaaaactggaaagttaatgcttttccatgttaatcaatcaagtccataaattgtttatatgtgtagctttctctcttaatttgaataatttcttagagatgagtatcactgtgaagtgtggggtggctatgaaagtataagattgcttctagcaactcacacagtcactcatggatgctcggcccaagaccctgatagccacggttccactccaagggaaaagaggccatctgaggagcaaatagaactctatcacaagatgagtgcaggaaacaccccaaacacagtccctaaggtcgatgcagaaacagcgtaagaagaaagtgtccagatatccagaatcctatgaggtagggattcagaactctcaaaggccaccctcttacatctgtcaataggtcaaggtttctgtggatgtgtgtggctgtggctgacagggaccccagtgatccctatga

SEQ ID NO: 8644 - DNA, 545 bp, Homo sapiens
  MAP TO AC005271.1; EXPRESSED IN FETAL LIVER, SIGNAL = 0.49; EXPRESSED IN BONE MARROW, SIGNAL = 0.88; EXPRESSED IN PLACENTA, SIGNAL = 0.53; SWISSPROT HIT: P34413, EVALUE 1.00e-04; NT HIT: gi14749514, EVALUE 6.00e-50; EST_HUMAN HIT: BG208775.1, EVALUE 9.00e-50
atggcaacttgaaatgcctctgtgtttactcacctagaaaaccactgctagtctgaatgtgtatttctaaattatcaaaatgagtaaaggccatatatttcagggagctgcactaaagtaaacagaaaaatcttcctctaagctgccagattttccttttccttcaaactgagataacagcacataaagagtctgatataagaggagcactccttatgaaaaatgtatgggccaaaaccttaggaaacagaactagaaatcacatcttacctctttttccataaagtcaaactccgctgcacaggtatacaataaagtatcaaaatccttataactaaagaattttgatgttagtaagttgccaatatgagcctggtaagaaataaagttaccattatattaagccatacactgcaataatatattttaatttcaatagtatctgaaaatagttttcattacattatagagcccactgttcccacaccaagcctgcttttgttaaagaaggaaatgctatatcctccaccttcacagttcccttc

SEQ ID NO: 8645 - DNA, 577 bp, Homo sapiens
  MAP TO AC044786.2; EXPRESSED IN FETAL LIVER, SIGNAL = 8.6; EXPRESSED IN HELA, SIGNAL = 6.6; EXPRESSED IN BONE MARROW, SIGNAL = 3.5; EXPRESSED IN HEART, SIGNAL = 5.2; EXPRESSED IN LUNG, SIGNAL = 3.7; EST_HUMAN HIT: BE263672.1, EVALUE 1.00e-30; SWISSPROT HIT: P18128, EVALUE 4.90e-01; NT HIT: AL163218.2, EVALUE 2.00e-47
aaaacccattttctggggagaaattcaagcctgatgcagaaatttgcataaataatgaggagccaaatagtaatgccaagacaatggggaaaatgtctccagggcatgtcagaggtcttcaagtcagcccctcccatcacaggcccagaggcctaggaggaaaaaatggtgtcatgggctgggcccagggccttgctgtttgtgcagtcttgggacttggtgtcctgtgtctcagttgtggctaaaagtggccaacatacagctcagaccgttgcttcagagggtgcaagccccaagccttggcagcttacacatggtgttgggtctgtgggagcacagaattcaagaactgaggtttgggaacctccatctagatttcagaggctttatggaaatgctggaatgtccaggcagaggtgtgctgcaggggtggagccttcatggagaaactctgttagggcagtgtggaatggaaatatggggtgggagcccccacacagtgtacccactggggcagtgcctagtggagctgtgaggagaaggccactgtcctccagccccaagaatggtagatcca

SEQ ID NO: 8646 - DNA, 549 bp, Homo sapiens
  MAP TO AC007096.3; EXPRESSED IN HEART, SIGNAL = 1.4; EXPRESSED IN FETAL LIVER, SIGNAL = 0.37; EXPRESSED IN BONE MARROW, SIGNAL = 0.44; EXPRESSED IN PLACENTA, SIGNAL = 0.71; SWISSPROT HIT: P42660, EVALUE 5.00e-04; NT HIT: AJ297065.1, EVALUE 0.00e+00; EST_HUMAN HIT: BI760195.1, EVALUE 4.00e-95
actcccgcagaaaacatttgtttcctgcccataaataggaacaccatgcaggtttgcttatttttagaaaaacaaaaatcttatttttagaaaaaatctatgagatttttttttaaagacctgtagctcggtaggctaacatttctaccctcaaacggcaagccaggtcttgaacactggtgttctttctgttgggcacctacctgagctgggaagaaccagaagaagaggttgctgttgtaagtcttattcacggtgaggaagccggcataactcttcatgttcagtcctgggaaagggccgaccaaactcaattctcttcctagtgggggaaaaaaaatttacccaaggattacagaaaacaataacaacaaaaatgtgagccatctatctcagtctggatgaaatggagtgattagataagctaaaagggaactggtatgacaggtagttccttcagcaaattccagcctgcccctggccaatcccacatagtccacgttcacaatttagccaaggatatgtgaaagttttaagcctttggggagg

SEQ ID NO: 8647 - DNA, 580 bp, Homo sapiens
  MAP TO AC004180.1; EXPRESSED IN BONE MARROW, SIGNAL = 0.41; EST_HUMAN HIT: R85021.1, EVALUE 1.00e-05; SWISSPROT HIT: P22607, EVALUE 1.00e-23; NT HIT: L25647.1, EVALUE 0.00e+00
tgagacaatctgctggcatcatgtcagatacagtgagatgactggaggtgggaagaagctggggtgtgttgattacacagagtacacatggcctctgtagtaagctggagcctttggccacccaaaggtggatttgtgcatgagctgaggacaggtttctaatgtgccagatgaggtgagtaggagattatgcacttgtgtcttcagcctgtcctccacgtctttgtcatctcctgaggatggagcatctgtcatgtgcacaatgagtggcaccgctcatgctgggtgagtcgctgcagctgcaggcccccagggtcctcgtgagaggcagtcagcacctgcagctgctgcggctccaccaggatgcattttgaggacaccagctctgcaccatccttgacccagacagtgggccccatgggaccacctccaggcagggagcaactcagccctgcagtgtcccggagaccaaagaaccactgctcctgatggtttcaagacctcagcgggaggctgcagcaggccttgagtgagggaggatcagctcccagagcctgggtcctgccagacaacactcaaa

SEQ ID NO: 8648 - DNA, 561 bp, Homo sapiens
  MAP TO AC016955.12; EXPRESSED IN FETAL LIVER, SIGNAL = 2.4; EXPRESSED IN LUNG, SIGNAL = 1.9; EXPRESSED IN BRAIN, SIGNAL = 1.9; EXPRESSED IN BONE MARROW, SIGNAL = 1.5; EXPRESSED IN PLACENTA, SIGNAL = 2.3; EST_HUMAN HIT: BF983020.1, EVALUE 1.00e-119; SWISSPROT HIT: P25059, EVALUE 1.00e-13; NT HIT: gi14861872, EVALUE 0.00e+00
tgacttcaaaaggccattccacaattctatcaatccagctgcttcagtatgatggggaacatggtaagaccagtgaattccatgagcatgagcccactgctgcacgtctttagctgtaaagtgagtgccttggtcagatgcaatgctgtgtggaataccatgactgtggataaggcattctgtgagtccacagatggtagtcttgctagaagcattgtgttcaggatcggcaaacccatatccagagtaagtgtctattccagtgaggaaaaacctcttccctttccatgatggaagtggtccaatataattaatctgacaccaggtagcaggctgatcaccctgaggagtggtgtcatatcgagggttcagtgttggtctctgctgctggcaaattgggcactcagcagtggctgtagccaggtcagccttggtgagtggaaattcacattgctgagcccatgtgtaacctccatctctgccaccgtggccacattgttcatgggcccattgggcgatgataggggtggctggggaaagaggtggctgagtggtatccac

SEQ ID NO: 8649 - DNA, 534 bp, Homo sapiens
  MAP TO AC013737.4; EXPRESSED IN FETAL LIVER, SIGNAL = 0.4; EXPRESSED IN BONE MARROW, SIGNAL = 0.51; EST_HUMAN HIT: AA921811.1, EVALUE 3.00e-25; NT HIT: Y16736.1, EVALUE 3.00e-21
gggtcttcctttctttcatcttcaaataagcatttattaagtagctacactatatttattttattttataattttaacttttatttcagattcagggggtacatacgcaagtttattacctgggtatattgcatgatgttgaggtttggggtatgattgattctgtcacccagatactgagtatagtacacaatagttaatttttcaattgtctcttctccctctctccctccatagtagtccccagtgtcttttgttgccatcagcagctaccgtattaaacatctactatatgccatgaactatagatacagatgccacagatacagaaataaactagttacagttttgccctgaaatcaaatgctttaaaacacattcattttattaatgtgacaagtaccataccaatatattaaaaaatttaccatagcagtttgaaacgttttttctctctttaccaaatacacagcagaagctatttacacatagaataaacattccggtgaattcccagtccccaggctatcatgt

SEQ ID NO: 8650 - DNA, 537 bp, Homo sapiens
  MAP TO AC000094.3; EXPRESSED IN BONE MARROW, SIGNAL = 0.72; EXPRESSED IN PLACENTA, SIGNAL =  12; EXPRESSED IN HEART, SIGNAL = 1.4; EXPRESSED IN LUNG, SIGNAL =   2; EXPRESSED IN FETAL LIVER, SIGNAL = 4.7; SWISSPROT HIT: P05783, EVALUE 2.00e-64; EST_HUMAN HIT: AI478751.1, EVALUE 0.00e+00; NT HIT: gi4557887, EVALUE 0.00e+00
ggacaggtactgatcccagcagattgaggagagcaccacagtggtcatcacgcagtccaccgagatcagagctgctgagataacactcacagagctgagatgtccagtccagtccttggagattggcctggacttgatgagaaatctgaagatcagcttggagaacagcctaagggaggtggaggcctgctataccacgcagatggagcagctcaacagggtcctactgtacctggagtcggagctggcacagacctgggcagagggacagcgccaggcccaggagtacgaggcctggaacatccaggtcaatctggaggctgagatcaccacctaccaccgcctgctggaagatggggaggacttcaatcttggtgaggccctagacagcagcaactccatgcaaaccatccaaaagaccaccacctgcaggatagtggacggcaaagtggtgtttgagaccaacgacaccaaagttctgaggaattgagccagcagaagcagggtaccctttggggagcaggaggccagtaaaaa

SEQ ID NO: 8651 - DNA, 589 bp, Homo sapiens
  MAP TO AL118558.2; EXPRESSED IN HEART, SIGNAL = 1.5; EXPRESSED IN LUNG, SIGNAL = 3.1; EXPRESSED IN HELA, SIGNAL = 2.4; EXPRESSED IN BONE MARROW, SIGNAL = 0.71; SWISSPROT HIT: Q9JHU4, EVALUE 1.00e-77; EST_HUMAN HIT: BE082192.1, EVALUE 1.00e-119; NT HIT: gi15300984, EVALUE 1.00e-119
cgttgcattacgtgttaccgggggaccagtaagtcagcactgtgctgtttcccaggtgcctggtctctttgaaggagacgagtatgccaccttgatgacgcagtgcaaagagggggcacagaaggaaggcctgatgctggactcgcacgaggagctctacaagtggttcactagccaggttatccgcaacctccacgtcgtgttcaccatgaacccgtcctcggagggactcaaggaccgggcagctacatcaccagcacttttcaacaggtacgtgggcctttacttggctctgggtcaggaaagtcggtgtccttccaagggacaaagcctgcccctcatagctgtcctgaaacatgggcctctttctcaggtgtgtgttgaattggtttggagactggtccaccgaagcactgtatcaggttggcaaagaattcacaagtaagatggatctggagaagccaaattacatcgtgcctgattacatgccagttgtgtatgataagctgccgcagccaccatcccatcgggaagccattgtgaacagctgtgtgtttgttcatcagactcttcaccaggtgggttcagt

SEQ ID NO: 8652 - DNA, 500 bp, Homo sapiens
  MAP TO AL049869.5; EXPRESSED IN LUNG, SIGNAL =   3; EXPRESSED IN FETAL LIVER, SIGNAL = 1.4; EXPRESSED IN BONE MARROW, SIGNAL = 2.5; EXPRESSED IN BRAIN, SIGNAL = 1.8; EXPRESSED IN PLACENTA, SIGNAL = 1.4; NT HIT: Z99114.1, EVALUE 4.70e-01; SWISSPROT HIT: P43601, EVALUE 2.10e+00; EST_HUMAN HIT: BG655800.1, EVALUE 1.00e-105
aaaatcagttactcactcctccaaactagaactatttggagtctagcaccactttctagcaattgtttttctggtctagatgggtgtacctcaagattctctagaaaggaaactaggaggggagcagggcagaagtaagaaaatgggggctgtcatcatggctcgattccctggcagaggcatggtgcctgggcccctgccccttccagccccacctgggatgccacctcaaggcactcatgcttctcttgccaagccacttacaccggcatgggcacagagtccagagttcccacatgcttttgcatctcggctgggaatctgacgtctacttgatgatactttttctcaaagacgttttgagctttttctctgagagatggcagcagagtagacatgactggagaacgcatgttgatagcttttttaattgctgggcgttttgccatcattctcctgtcggggaggaaggtgacatttaggtcatatcaccctgtttt

SEQ ID NO: 8653 - DNA, 578 bp, Homo sapiens
  MAP TO AC004172.1; EXPRESSED IN HELA, SIGNAL = 0.75; EXPRESSED IN BONE MARROW, SIGNAL = 0.44; EST_HUMAN HIT: AI681250.1, EVALUE 2.00e-26; NT HIT: AF055066.1, EVALUE 0.00e+00; SWISSPROT HIT: O94819, EVALUE 3.20e+00
ggggtctcaggaagagaaggactgtgtgtgacttggcccagacctggaaggacatggagacagggccagggcctctctttggggaggcctctcactgtgtcagggctggtcaggcttgagaggaggaggaaagggcactgagtttcctcctgggtcttgttccttagtcctgggtcctttcactcactgcacaatggatggtggacacagggcaggtgctgatgttgatggagtcacgggaggggactggcaggggctggaaaagtgcgatgggagggagaaaaaagtggggacgtcatcttccgtcagagaaagggtaaatctgatttgggagtgactgaggagggagaactcctcagggaataaaaagcagcactctgcacccaggggagcatttattggtttctctcttttttccagagcgcgtgagcctgcaaggcctgggtcaacacctggttgggacaggagaccaccagggcagtgcacagctgagatctcagtctctggtgtcagctcctgggttcgctggctccactgagggcaactagactctgcagccaggcgatctggattcaact

SEQ ID NO: 8654 - DNA, 511 bp, Homo sapiens
  MAP TO AC002484.1; EXPRESSED IN BONE MARROW, SIGNAL = 0.57; EXPRESSED IN PLACENTA, SIGNAL = 0.72; NT HIT: gi16169967, EVALUE 1.00e-04; SWISSPROT HIT: Q9WVS8, EVALUE 3.60e+00; EST_HUMAN HIT: AA207137.1, EVALUE 2.00e-04
ctcagcgagaagggaagttggaactcgtaactttgggtgatagtaatagtaatactgattcagtgttggccatgtcttggaattgctcttggattaaattttaatgtgttaatacaagcaaccctttcaaggagggaccattgcacagatggggaaactgaagcacaaggaggttaaatatctcctctgggatcacacgccggatttgtggcagggccttaaatcaaattcagatgacctggctgacagcttgccctctgactctctctgtaggcagtgatgcttccggaagcttccatgtggcgctcagcacttttctgtttgggtgtatcattgggtaaggggagggaggagggtagaaagagggccccctccaccaggaatacagaggagggagccccacttggacatatggaaataggagatgacctggaagagagacaccacagtacccagggccatgcattttgggccaggcaggaagtagtcccgaggttctgggaagagggag

SEQ ID NO: 8655 - DNA, 576 bp, Homo sapiens
  MAP TO AC010205.5; EXPRESSED IN FETAL LIVER, SIGNAL = 1.5; EXPRESSED IN BONE MARROW, SIGNAL = 0.64; EXPRESSED IN PLACENTA, SIGNAL = 1.3; SWISSPROT HIT: Q61982, EVALUE 1.70e-01; EST_HUMAN HIT: AI633523.1, EVALUE 0.00e+00
gaatccctcttcttcctccgatctacaggaaacagtggagggagtcgctatattgcaggaggtggaggtactgggagtattggagttggacagccctggcagtttggtggaggaataaacagtgtctcttactgtaatcagggatgtgcgaattcctggctcgctgataagttctgtgaccaagcatgcaatgtcttgtcctgtgggtttgatgctggcgactgtgggcaaggtatgtttactgccaaacaaataagaatgggagcataaaacatccttgacaggtagagagagttttgaatggcttttgttatttaaaataatgattctctgtgtatccctttaccagccttgcattcaaactagttatgaaagtaagagaacaacataaatcactgaagaggatcttttcctgttattgttgcagtctggtgttttgttttgttttgttttgtttggaccaagcagatttaccttagctgaaaatatgtggtgaagttttaatttggaaacaaaaaaggatatcaataattcattaaataaagatggttcaaacactggattttgttgatagcg

SEQ ID NO: 8656 - DNA, 507 bp, Homo sapiens
  MAP TO AC006274.1; EXPRESSED IN BONE MARROW, SIGNAL = 0.58; EXPRESSED IN PLACENTA, SIGNAL = 1.1; EXPRESSED IN BRAIN, SIGNAL = 0.67; SWISSPROT HIT: P34545, EVALUE 4.80e-02
aaagaatgtttagtttttcacctcaccatagatgctgcatgactgagattgcagaaccacagaacgggcgtgggtgggcttccaccggggcaccccctcctcctgcaggatccgcactgcccgggcatttccctgggggtggggaggcctcttgctgtcccagggttccctgggggaaacccctggtgtcctggggaggccccaccaggttgatcgtgagcttgagctcagggcaaggagcactgctcagcgagtccactgtggttgtggtcacacgatggtgtgagctctcatctgtcaaaggagtttaacaagagcacccaccagggtgagttcaatctgtccatcgaacgcaacaggcccaggccccggaggcttttagggcccatgaaaatgtctgtcttccttcctccctccctccttccctccctctctccctcccttcctcccttccttcttttctttctctctttctctctctttctttctcttctttcccttccctcc

SEQ ID NO: 8657 - DNA, 563 bp, Homo sapiens
  MAP TO AL118521.15; EXPRESSED IN FETAL LIVER, SIGNAL = 7.9; EXPRESSED IN BONE MARROW, SIGNAL = 8.8; EXPRESSED IN PLACENTA, SIGNAL =  10; EXPRESSED IN HEART, SIGNAL = 6.3; EXPRESSED IN BRAIN, SIGNAL =   7; SWISSPROT HIT: P72097, EVALUE 8.10e-01; EST_HUMAN HIT: AI816354.1, EVALUE 2.00e-01; NT HIT: gi14734645, EVALUE 1.40e-01
caagagcagcgtgatttttgtaaacttagggctggtcactgcatctgaagcattccagtcctataaaagggtggaatctgtactagaaggaagacttgcttcaccaaaatatgtgctcctgtatattgcttctcatattgcttctcagatagagctagaggggaaagaagcctaggttcagtggatctgaagagaagtttcaattctcaacagcctcctttcggcagtaagaagccttgatatcctcatggaagtatttgtatttttttcctcttacaatctcctgtgagtatgactacagacaattggccaaagatggccaaagatgagtacaggtcctttgaaggcatggcttggctttccagagctgctgtccttcctggataccacactggggaagtgacagtgatctccatctcttcccccaagaccaggcattaagcagttatgacagagattccctgcccaggtattttttgttcaagaacaaaacgcctttctgagcagaacagaaaatgagaaagtccaacacccagctacagagctggaaggaagcacatagc

SEQ ID NO: 8658 - DNA, 600 bp, Homo sapiens
  MAP TO AC004188.1; EXPRESSED IN BONE MARROW, SIGNAL = 0.54; EXPRESSED IN PLACENTA, SIGNAL = 0.57; EXPRESSED IN HELA, SIGNAL = 0.69; EXPRESSED IN FETAL LIVER, SIGNAL = 0.56; EXPRESSED IN BRAIN, SIGNAL = 0.9; SWISSPROT HIT: P14373, EVALUE 1.00e-29; EST_HUMAN HIT: AL558211.1, EVALUE 0.00e+00; NT HIT: gi15304529, EVALUE 0.00e+00
tgcagctctgagaatacaaagtgagtagtaggagcttacgatctctacctagggagtatctcatcctctgccgcttctccctttttacccacactgacatcgtgtgtctgcttccccaccttgtactcctgtgtagcatcgtccagtggcacaacggtgtgggcccggtgggtgtgggaaattgcacatatcaagcatacagcctcctggtcctcataacagaaaaggctgagggcctcatggtgttgggggcagaggctctcatcccggatcttccgcttgacggcctggagctgcttggcaatttccaccatactgcctagttgccgattaggtcggagactgcggtagcgggatgtctttcgacagacaggacaagggaagtccctctctaggtcctcccaccagcgggtgatgcaagctttgcagaagttgtgcccacactcaatgatgacaggttccttcagatactccaggcacacagagcagctcgcctccacctgtaagttctccaaagccgcagctgtagaggctgcagaggccccagcctctaacagacttgtctctgccataatttaacttgggagtggggaagaggac

SEQ ID NO: 8659 - DNA, 586 bp, Homo sapiens
  MAP TO AC009086.5; EXPRESSED IN BONE MARROW, SIGNAL = 0.78; EXPRESSED IN PLACENTA, SIGNAL = 1.5; EXPRESSED IN FETAL LIVER, SIGNAL = 2.3; SWISSPROT HIT: P28591, EVALUE 8.50e-01; NT HIT: AF110520.1, EVALUE 8.70e+00
ttttcagctgaggggatgagcccagagatcagcatcaggaccagagctcagtccgcggtgcacttcctcccctgtcccgggcatcattcctcccctgtggtttgcctagaaaattttgacttaccccatggggaagaaatgctccagaaccttccccaggaggaaaacagcccttgggtaaagggtccttcacagccagctcttttctttcccaccaagaggtgggaccacctggtgtgggaggtggaggctggctgggaaaacaacccctccccaggtttcctctggctgtggagccgcgcggaggaagaggatggggcgtcagagctctcagaaccgtggccttgtgaagtttctgagcaggcaaatggggcggcggggggtgatctggtcccagccccaggaggccgccccgaagccagcatcaaggcgaaggccacgtacagatcaaacggctccttgaaccgcgaggaagggctcgccccagctccatctggaccagcccgcaccattgttaacacaggttgaagcctcatccgtccgcacatctgaggcttgcgttgactccttctgccctggaattctt

SEQ ID NO: 8660 - DNA, 591 bp, Homo sapiens
  MAP TO AC018359.7; EXPRESSED IN PLACENTA, SIGNAL = 0.55; EXPRESSED IN BRAIN, SIGNAL = 0.64; EXPRESSED IN BONE MARROW, SIGNAL = 0.86; NT HIT: AF003529.1, EVALUE 1.00e-60; SWISSPROT HIT: P56883, EVALUE 2.20e-01; EST_HUMAN HIT: BE733905.1, EVALUE 2.00e-41
tctttcccaagaccatcctggcccaccacacccccatcctgtgcctataaaaaccctgagaccctagcaggcaggcacacaagcagctggacgtggagaggaactcaccggtgcaggagcagaccaacagacagcggcaggccggcaggccatcaaccggcggattgatgcggagtttggccagggcagtcgaaggagagcccaggccactaagtggtccgacttcagaaaggaaaactaccttcccattccatctcccttctggctcctccatctgctgagagttacttctaatcaataaaaccttgcactcattctccaagcccatgtgtgatccaattcttccagtacaccaaggcaagaaaccccaggatacagaaagccctctgtcattgtgataaggcaaagggtctaattgagctgactaacacaagctgcctacggatggaaaaactaaaagagcacactgtaacacatgcccactggggcttcaggaactgtaaacatatacccccagatgctgccgtcgagtcggagctccacaacctgcctatctgcctgctccccctggggatttgagtagcgaggcac

SEQ ID NO: 8661 - DNA, 539 bp, Homo sapiens
  MAP TO AL118559.4; EXPRESSED IN PLACENTA, SIGNAL = 3.6; EXPRESSED IN HEART, SIGNAL = 3.8; EXPRESSED IN BRAIN, SIGNAL = 3.6; EXPRESSED IN FETAL LIVER, SIGNAL = 3.5; EXPRESSED IN BONE MARROW, SIGNAL = 4.7; NT HIT: gi10518346, EVALUE 2.00e-06; SWISSPROT HIT: P33790, EVALUE 6.60e+00; EST_HUMAN HIT: AA393627.1, EVALUE 3.00e-09
attccgggtacctgacacagagtcatgcacctcattcaaacccttttctactgagaaatacgctgtggtcagtgaggccagtgactcgcccaaaggtggcacagcagtacctgtggttagccttgaacccagctctccacctctccctggctgtgcacacagtccaccccctgctccccccactcaccagccacaccatgatgtaggagaacacagcgatccacagcgtggcggtgatgaaggtgaccatgaagaacttctcccagcggggcttgctgcagttgggaatggtgacgcacaggaggaagatgaggggccaggtgaacacccacttgaccttgtcccctctggcctctgcagggtgaaggggcagagtgagaaaggagggggagagaaagacactgggtaacacacctgccagtctacctgtcgatttagtcttcaagctaaataagagaatgccaccgatgtgactctaggcaactgaccttgcagaatcacagaactccataatgtcaccctggaagtggcaagacaat

SEQ ID NO: 8662 - DNA, 554 bp, Homo sapiens
  MAP TO AC004755.1; EXPRESSED IN BRAIN, SIGNAL = 0.61; EXPRESSED IN BONE MARROW, SIGNAL = 0.97; EXPRESSED IN PLACENTA, SIGNAL = 0.55; SWISSPROT HIT: O60423, EVALUE 8.00e-72; NT HIT: gi15294794, EVALUE 3.00e-18; EST_HUMAN HIT: AW444739.1, EVALUE 1.00e-109
cttgaagatcgaggacccagctgggagctcaggtgtcggggccgcaccatagacgcggccgctgatgcagcacttgttgaaggtcaagatgttctgcgtgagcgtgcccgtcttgtccgagaagatgtattccacctggcccaggtggtcgttgaggctggtgctgcgggccttggcaggcacgtcctgcggcttgtagtacatctgcacgtcccagtcgatgaagacgctgttccccaggtagatgaactcggacctgcagaggcactcagggtcacggtcagccccgcctgctgtgtgccatccccatgcctccccgttccgcgtttgcaccggggacgcagccggcggagactcacaggatgaacatggacatcgggatggtgacgctgagcaggatgaggaagctccagaagacgaagaaggactctgcggccacgctgctcccatgcacccccgagaggtagtagtggtggtctttgaattctttgactgagaaaccgaagccgaaggccaacaccaggcagacaagcaccacggagatgaagatctgg

SEQ ID NO: 8663 - DNA, 553 bp, Homo sapiens
  MAP TO AC024568.2; EXPRESSED IN BONE MARROW, SIGNAL = 0.46; EST_HUMAN HIT: AL529056.1, EVALUE 0.00e+00; SWISSPROT HIT: P47063, EVALUE 3.00e+00; NT HIT: gi15295132, EVALUE 0.00e+00
agaaaacgccacatggattcaagagttgagacaactgacagtaaaatatatgctctttggttagcaaagcaaaaagggggaaagtattgcatacatgatagatacacactagcattctaaagcaggagacaagaatgtcaagagtgtattctacccccactgccagatggaagggctattattataaatgaaaggcagcagtagtggatgccaggcacttttgttgtgtgccagattctaaagtccagatgtaagcaggttacccctgagacaggacaggcttcagttcccgcagcagaacagagccaatcacagttttctcagtgtttatgataagctgggctgtagagccttccttcagttccactgtgactagcatcaatgacccactgtgcacagttttagctgcaaacctggaagagaaaaaagagagaccttttatcataagatggggagggtaaaggagatagcatacattcaaataggattaaaataactcttttttgtcaaatgaaataatttgctgcaggctccctattgccaaaaacccaaa

SEQ ID NO: 8664 - DNA, 544 bp, Homo sapiens
  MAP TO AC010316.5; EXPRESSED IN BONE MARROW, SIGNAL = 1.7; EXPRESSED IN LUNG, SIGNAL = 3.7; SWISSPROT HIT: Q63191, EVALUE 1.70e+00; NT HIT: gi15296472, EVALUE 0.00e+00; EST_HUMAN HIT: BG256597.1, EVALUE 0.00e+00
tgtgcactttatgcctctcgccttttgataatagttgttcagtgaaggaagtcagctgccagaatattaagaagggtctccctttatgtcagtacaactgttagggcggccttcccatttactttaggtttcaagaggattcaccggaagcacatgccccggtctagtcccatttgaaacagttctgctttactgagaccctaggccggtctccttgctgaccctagcgctgctgcctaggtgccatttcctttcctcctcagtcaaatacaggctgcacattttgtcacttaatgccagtacaatctgtgttactcctaaggacttttgggattttgatgagacctgcgagggagaagacactgagaagccagtgatctgcaagcatttgctcttgtttccacatcacctctgggatatttcagctgttgtttccaaatggcaaatcatcaactaaaagcacttgtttcaagttttgttctgcactcccacgactgaagttgtagattgagctgaataaccatgggaagtgaccaagcaaaga

SEQ ID NO: 8665 - DNA, 589 bp, Homo sapiens
  MAP TO AL050328.24; EXPRESSED IN BRAIN, SIGNAL = 5.7; EXPRESSED IN LUNG, SIGNAL = 1.2; EXPRESSED IN HELA, SIGNAL = 0.82; EXPRESSED IN BONE MARROW, SIGNAL = 0.86; EXPRESSED IN PLACENTA, SIGNAL = 0.65; EST_HUMAN HIT: BG708461.1, EVALUE 0.00e+00; SWISSPROT HIT: Q16653, EVALUE 7.00e-68; NT HIT: Z48051.1, EVALUE 0.00e+00
tcctccctggctctagaatgtcatttaaaagtcgagtgtcttcttccttccctgttttgaagcagcccttctcatgacaggcttgcttgccaaggttccctctgaccttaaatctcttccttttggtgtcttggacagggcagttcagagtgataggaccaagacaccctatccgggctctggtcggggatgaagtggaattgccatgtcgcatatctcctgggaagaacgctacaggcatggaggtggggtggtaccgcccccccttctctagggtggttcatctctacagaaatggcaaggaccaagatggagaccaggcacctgaatatcggggccggacagagctgctgaaagatgctattggtgagggaaaggtgactctcaggatccggaatgtaaggttctcagatgaaggaggtttcacctgcttcttccgagatcattcttaccaagaggaggcagcaatggaattgaaagtagaaggtgagtagtgccatataatattaggtattaactgttgggtggccaagaacaattattctctcaactgagatgagatccctcaacccaaacatctcagtcctgg

SEQ ID NO: 8666 - DNA, 592 bp, Homo sapiens
  MAP TO AC019209.3; EXPRESSED IN FETAL LIVER, SIGNAL = 1.3; EXPRESSED IN BRAIN, SIGNAL = 1.7; EXPRESSED IN LUNG, SIGNAL = 1.2; EXPRESSED IN BONE MARROW, SIGNAL = 2.1; EST_HUMAN HIT: BE868814.1, EVALUE 5.30e-02; NT HIT: gi14861873, EVALUE 5.70e-01
ctctcaccctgatgttcgtgcagctggtccttcatgtcattcagatctcagcttaggtatcacccccccaccaaagaggctttctctgatatcccaaactgaagtgattagcagtcacaacattttattatattttaatttaattataataattataataataattaacttattataatttaaatataatgttatattttaattctccaaaaatacttcttatctgatatttttctacatacagtagtttgcttagtcttttttctcattataagaaaacaatgttcatcttgtttacctctttatctccagcatctagaagagagatacatgcaaaatatttaataaatatttgctgaatcaaattattctttcttctcttcttagacttctcatctccttccacttgctcttcattagaagtgttataagaaatgagcacaaagttatcaccatgattgcaggctttttctatttctagaaccttcagaacatagttcctagagaaccacaaaggtcagtggtgtaagggcacaaagagagaaatgggacagacatgttatcagctcacagagaggttgatgggtccatg

SEQ ID NO: 8667 - DNA, 555 bp, Homo sapiens
  MAP TO AC013417.4; EXPRESSED IN BONE MARROW, SIGNAL = 1.4; EXPRESSED IN PLACENTA, SIGNAL = 2.1; EXPRESSED IN HEART, SIGNAL = 1.5; EXPRESSED IN LUNG, SIGNAL = 1.7; EXPRESSED IN FETAL LIVER, SIGNAL = 1.3; EXPRESSED IN BRAIN, SIGNAL = 1.5; EST_HUMAN HIT: AI911352.1, EVALUE 7.00e-26; SWISSPROT HIT: Q9EXD5, EVALUE 4.00e+00; NT HIT: AF111168.2, EVALUE 9.00e-06
tggactaggtctttgccctgaggtcattaatggtttcatgtagaatgacaatactaaaacaataattacatgtgtaaggaaataaatgaggccgggtacagaggctcatgcctgtaatccagcagtgagccatgatcgtaccactgcatactccagcctggatgacagagtaaaactctgtctcaaaataaatacataaataaaaaataataaaatactttaaaaaaagaaataaatgaataaacacagggagtacagcaatattcagtggtcaggggtgtggactctattcacccctttactttcatgtggtgtaggtgaaaacaccatttctgatgtttcctccatgtagagggatatctatcagacattctacctggcgtctgctgctccatcatcactgcatccatcatcaccagaggagtctcctctccttctgtgggtgagttctggagaagacctgggcacactgagctcagccacttccccttcctggtatgggtcttccctcatgacttcaccaccaccttaatcacctcctaaaggcctcacctt

SEQ ID NO: 8668 - DNA, 544 bp, Homo sapiens
  MAP TO AC007559.3; EXPRESSED IN HELA, SIGNAL = 1.8; EXPRESSED IN BRAIN, SIGNAL = 1.7; EXPRESSED IN BONE MARROW, SIGNAL = 1.7; EXPRESSED IN PLACENTA, SIGNAL = 0.79; EXPRESSED IN HEART, SIGNAL = 1.2; EST_HUMAN HIT: BI489131.1, EVALUE 7.60e-01; SWISSPROT HIT: Q57994, EVALUE 1.00e+00
aaaacacgggaacacggtagtaacaactaagtgttgcagagaggccattttcaactgattttgaacgactgggccttttgtccaaaagatatcttataagaaccccaaaatattcaacagaaataaccagagctgctctgacgcggtggacaagggtgtccagaatgtcaaggagctctgtggtggaatgaaggatgatcctagggccagtgcactgaccatggtaacgctacagagaggacctgcaatcctcacccaagaagtcatcactgcaacccagcttcctgaggcagtgtctaaatgtaagtcaacagctcgtaatcttaccctctgcagccagagggaacctagttctaacatcaagagttggaaccccggacatcaaaaaggtactacccctggtctagcctcttctttgtctcaggatctgaccactgacgtttccatcttgcagtgtgactgcttcccctaacatattttcaccctaatcttaacatgtgtttaaaaataccaacaccccctcaccctgctccttcctcttttc

SEQ ID NO: 8669 - DNA, 598 bp, Homo sapiens
  MAP TO AJ250235.1; EXPRESSED IN BRAIN, SIGNAL = 0.82; EXPRESSED IN BONE MARROW, SIGNAL =   2; SWISSPROT HIT: P22830, EVALUE 3.00e-22; NT HIT: AJ250235.1, EVALUE 0.00e+00; EST_HUMAN HIT: AL531082.1, EVALUE 3.00e-99
gaacagcttgtggagcacagctgggtattcctcagagagggtatagctttagctccttattctacaacaagagagctggctattgtcaatgacctcaagcttctgttttaaaggcttaatcttgttaggctctctaaaattttgctttttttcttttttattgagtagaaaacatttctcaggttgctaagctggaataaaatccacttacctgtatgttaaatgatttagtaagctggaataaaatccacttacctgtatgttaaatgatttagtaagctggcaccattcatcgccaaacgccgaacccccaagattcaagagcagtaccgcaggattggaggcggatcccccatcaagatatggacttccaagcagggagagggcatggtgaagctgctggatgaattgtcccccaacacaggtatggtgtttcttcattaacatgtaactagattagttctttcgaagtagttatgaaattcaaaagagtagtagatgctaaatgcttcatatgtactggcaactcaatttgtggtgtttctacataatacatggtcacttaatttaggtctccaggcgttatcccttgaccttt

SEQ ID NO: 8670 - DNA, 590 bp, Homo sapiens
  MAP TO AC004186.1; EXPRESSED IN BONE MARROW, SIGNAL = 0.76; EXPRESSED IN LUNG, SIGNAL = 1.5; EXPRESSED IN HELA, SIGNAL = 1.9; EST_HUMAN HIT: BF001890.1, EVALUE 1.00e-117; SWISSPROT HIT: P30008, EVALUE 3.90e-01; NT HIT: gi14761275, EVALUE 1.00e-128
cagaggtgtcagcccttctccccttcctgccccctgcagaagaagctccaggaccagaggcagtacattgtggctgagtttgagcagggtcatcagttcctgagggagcgggaggaacacctgctggaacagctggcgaagctggagcaggagctcacggagggcagggagaagttcaagagccggggcgtcggggagcttgcccggctggccctggtcatctccgaactggagggcaaggcgcagcagccagctgcagagctcatgcaggtgagaggccgtccctgggcagggcgccagggaccaggacggtgggtcccagccctgccattcacttgcaggaccttagaagacttgggggctcagttttgtcatctgaaacatggagatgataatccttactgctgccaattagtctgtagattgcatgagcataaaatgaaataactggcatgctgtcacttcaaaaaataaactttttacacaaaactgttcaaaaaactaaatggtatagtagaaaatggaagggaagattattaatatcatttaccatcctccatcctcatcactgccatcacaagccctcttaa

SEQ ID NO: 8671 - DNA, 500 bp, Homo sapiens
  MAP TO AC036102.3; EXPRESSED IN BRAIN, SIGNAL = 1.2; EXPRESSED IN BONE MARROW, SIGNAL = 0.97; SWISSPROT HIT: Q15647, EVALUE 5.00e-18; EST_HUMAN HIT: AU139457.1, EVALUE 1.00e-64; NT HIT: AF212227.1, EVALUE 7.00e-65
aaacacactgatcgtcccaagaggggaaaattgagtctaacctgtttagaagtagagatataatcaagaatagaattaatggatttttcagaataatttcttgtgactgcactccgaatataggtcaatagctgcttatatctattcatcatttctggaaagtttgtctgtgagaaaagaaaaatgaattatcagatgcaaatttaggtactaaaatatgtacacatgattaaggttatagaatacactactacataatgaaatgtagttcatatagttcctgatatagttttgtaaaagaggaactatgtatgacaggaacattgtaattatcttaaatttgaaatgactagattactcaaaccaaatgtataaagttaccttatgaaacaagtacaactgctaaattttccaaatttcagaaattgtcattgcacaacatatttaaatcataaaacctactacaatattcataagccaaaacatacaaataaaatcca

SEQ ID NO: 8672 - DNA, 512 bp, Homo sapiens
  MAP TO AC026730.3; EXPRESSED IN BONE MARROW, SIGNAL = 1.2; EXPRESSED IN PLACENTA, SIGNAL = 0.51; EXPRESSED IN LUNG, SIGNAL = 0.89; EXPRESSED IN FETAL LIVER, SIGNAL = 0.37; EXPRESSED IN HELA, SIGNAL = 0.54; EXPRESSED IN BRAIN, SIGNAL = 0.43; NT HIT: AJ312125.1, EVALUE 1.20e-01
tgggaactgagcaaggaatcatgaatttttattgaagtgaccaccttcatcttcctgctcctctatttctgccattttcttatcgtagatagtaattggtactttgttgcctatatcttttgcccctaggaacagcatactcaattaaccatttctaccactatctgtgacagggtcatgcaccttagctatctttctgaccttggcatttgttacatagttgtgccctcaggacttctactgtgtgataatttccccctcacttctattattttggagcccaaaatccctacagatattaataatttcagcattgttactgcctttcctaccgttgactccagtcatacatagaagagtcaccactgaacttttagtgatgctggtgtcctccttgataccctaggtgaagagtgtatacactctgagttttcctttgaaacattatctacactctcctaattctcccacactcctgtaattatttcaacccgcatttcctcttccttcag

SEQ ID NO: 8673 - DNA, 597 bp, Homo sapiens
  MAP TO AC007759.1; EXPRESSED IN BONE MARROW, SIGNAL = 2.1; EXPRESSED IN PLACENTA, SIGNAL = 1.4; EXPRESSED IN HEART, SIGNAL = 1.1; EXPRESSED IN LUNG, SIGNAL = 2.7; SWISSPROT HIT: P39194, EVALUE 1.00e-26; EST_HUMAN HIT: BI548229.1, EVALUE 1.00e-42; NT HIT: AF312032.1, EVALUE 1.00e-35
tggggaaaactttgagatgccagagatcaacaaagggccagagactggatcatgatatagttcttcagaattaaggctcagctgggcatggtggctcatgcctataatcccagtactctgggaggccaaggagggcagatcacacgaagccaggagttcaagatcagcctgggcaacatagtaagattccatctctactaaaaacagaaaaattagctgggtgtggtggtgtgtgcccatagtcccagctatttgggaggctggggcatgagaatcacttgaacctgggagatggagtttgcagtgagctgagatcatgccactggactccagtctggatgacagagcaagacaaagaaaaagaagaagaagaagaagaggaagaagagaagaagaaggaggaggaggaggaggagaaaaataaagcttaggctggggaagtgccttagctgtctacactagaaattagactatccggaaaactgaacatttattcttcccttctgtagatgctacatggatgaagcccatgacttgaagaatgagcctaggactatagtcttgcaccctccaggaagccttcattcctgctttcag

SEQ ID NO: 8674 - DNA, 596 bp, Homo sapiens
  MAP TO AC004177.2; EXPRESSED IN BRAIN, SIGNAL = 0.72; EXPRESSED IN BONE MARROW, SIGNAL = 0.42; EXPRESSED IN PLACENTA, SIGNAL = 0.46; EST_HUMAN HIT: N79066.1, EVALUE 5.40e-02; SWISSPROT HIT: P35410, EVALUE 5.00e-26; NT HIT: AB001523.1, EVALUE 2.20e+00
accaacctttgtctttgcagggtgtgcccaggcagccaaggcagcccaccatggcccagtttctctcagtgttctctgggaagctggattgggacaacaggacagagaccccaggacaagtgaacatgagtcatacgggaggcgagtggttggtgggcaaacaggtggttttcatcctgacagtgctggtggccttctgtgggctggtgggcaatggtgtggtgtgctggcttttctgcttccaggtcaggagcagcccctacatgacctatgtccttaacctggccgctgctgatatggtcaacctctcctgtgtaactgtgatcctgttggagaaaatcctcatgctgtatcaccaggtgacattgcaggtggccatgtttctggagcctgtgtcctatttctctgacacagtgagtctctgtctcctggtggccatgaatattgagagctttctgtgtgtcctctgtcccacctggtgctgccaccgcccaaagcacacctctgctgtgatgagcatcctgagctgggccctggccctttctttgcatgtggttagccaggtttgtgagtaatgggagaagggcctggcatgt

SEQ ID NO: 8675 - DNA, 577 bp, Homo sapiens
  MAP TO AC008775.5; EXPRESSED IN BONE MARROW, SIGNAL = 0.46; EXPRESSED IN PLACENTA, SIGNAL = 0.64; SWISSPROT HIT: Q28820, EVALUE 2.20e-01; NT HIT: Y07603.1, EVALUE 8.60e+00; EST_HUMAN HIT: BG480862.1, EVALUE 5.20e-02
gaaagcttttcatgccttgcttgttttccgggtacctactaaaaaagagctccactgaaatgaagcagagaaccaagaaagaggaaagcatgaaatccagaaaatgggaaatagaacagagagagaaatgaagggaataagggaagacccctgacaacagtcctgcatcaggcttagagaacaactagtgtagtttggaacaactaggtaggatgcacgaggaagcgaaggtcttctgcactgcacagcttggtcacagtggggctagggtctgccactcgcatcatagcctgtatgaacgcacactcaggaatcatgcacaagatcccttttacatacagttagtctgggaggactccacatcaggtgtctcctgattttaaaaaaatgaagttgatataatatctaatacagtttaccacgtggaaaaaagtactcaaaggtgtttcagttctatggaagagtgtgaaataaattagtgataattagagagaaaaatagcttcgttattatgaaaagtgacgcaattttcaactctaagaaaaacaaaataaatgtgcgataatggaaaggtgag

SEQ ID NO: 8676 - DNA, 574 bp, Homo sapiens
  MAP TO AC004191.1; EXPRESSED IN BONE MARROW, SIGNAL =  11; EXPRESSED IN PLACENTA, SIGNAL = 7.8; EXPRESSED IN FETAL LIVER, SIGNAL =  13; EXPRESSED IN LUNG, SIGNAL =  11; SWISSPROT HIT: P13750, EVALUE 3.00e-35; NT HIT: M63870.1, EVALUE 0.00e+00; EST_HUMAN HIT: AL549160.1, EVALUE 1.00e-118
tcagaccggagactcagacccgggacctgggctgtccgtgggggatggggagggatcgtgacctgcgccccgggccagggtcactcaccggcctcgctctggttgtaatagcggagcagggtccgcaggttcactcggtaaatctgcgcgtggcccttggcgttccgtgtctcctggtcccaatactccagcccctcctgctccacccacggcgcccgccgctccatcctcggactcacggagtcgctgtcgaaccgcacgaactctgtgtcgtccacgtagcccacggcgatgaaccggggctccccgcggccgggctgggacactgcggtgctgaaatacctcaaggagtgggagcctggaggcgaggagaggctgagacccgcccgaccctcctcccggcgcggctccccgggccgggcgggccactcgcttctccccgcagaggccctttccctcccgaccccgcactcaccggcccaggtctcggtcagggccagggcccccaagagcagcaggaggagggttcggggagccatgacccccatccctggcgtttggggagaatctgagt

SEQ ID NO: 8677 - DNA, 533 bp, Homo sapiens
  MAP TO AL096754.1; EXPRESSED IN FETAL LIVER, SIGNAL = 0.94; EXPRESSED IN BRAIN, SIGNAL = 0.78; EXPRESSED IN BONE MARROW, SIGNAL = 0.8; SWISSPROT HIT: P95514, EVALUE 6.50e+00; NT HIT: AE008686.1, EVALUE 7.90e+00
gcttttccatgatctctgggagaatgtttccttacatcaagaccaacatcacctccccttcctctctctagtcccttttccaaaaacttcccatccactgccatggcataattggctctatctacctgcttagatgaaggttctgactgttccagggatgcacctaaagggtgggaacagggacaggggtgtgtcacttggcctcggcactgggctgagcatcctgagccctccctgctagacaggcacacagtttcaccttgtttatattcagtctagctaactcaaggcaaatctcagaaagtgaagtggagatcctaattaaaaggtagccttgagctgccaataaaattatgcataaaggaaacgtttaaaaacacagttgtgacttccttgagacagattttcatttgagatcttccttctgaaattcaagtgtgggggtaaataaaaataaagtcagctcttcaccactgccgttccctctctctctgaagcctagaaaaccatcttcacaggcaaaacattgcact

SEQ ID NO: 8678 - DNA, 538 bp, Homo sapiens
  MAP TO AC010238.4; EXPRESSED IN FETAL LIVER, SIGNAL = 0.52; EXPRESSED IN BRAIN, SIGNAL = 1.2; EXPRESSED IN HELA, SIGNAL = 0.75; EXPRESSED IN BONE MARROW, SIGNAL = 1.1; EXPRESSED IN PLACENTA, SIGNAL = 0.94; EXPRESSED IN HEART, SIGNAL = 1.5; EST_HUMAN HIT: BE152986.1, EVALUE 0.00e+00; SWISSPROT HIT: Q59146, EVALUE 1.70e+00
aggtggtggtctcaggaatgagtggggaccagttctgtgtcctccagccacatcctagagggaacctaccttccctctcccaacaggagcccaagaagctggtcaacagtgcttccttggcagagtctcctgcccaggcgtctgggcagatgtgtggccacaggctctgccaagcagggggaatgccatttggaagaagtgggtacgtgcaaaaaattcccttctgaagttcctctggaagtctcaggatatgcttcacaggaagcgtcagcacaattttctaatcaagttgaagtctgtggcccgtagttagaaacaataaatgaaatgcaatttgagcccacactttgcctgagtttccatttctggaagtgggtgtggatgagaagctggcctttctgagggaagaacttgatccttgaccctgaccattcagcccccagcctcaccatcagcttgcaggggtgggaccctaggactgtattttgggtaatcattgcaaatcctgattttgatctggcaggtcaaagtccacact

SEQ ID NO: 8679 - DNA, 592 bp, Homo sapiens
  MAP TO AC005570.1; EXPRESSED IN BONE MARROW, SIGNAL = 0.46; EXPRESSED IN PLACENTA, SIGNAL = 0.39; EXPRESSED IN FETAL LIVER, SIGNAL = 0.4; EXPRESSED IN LUNG, SIGNAL = 0.39; NT HIT: AF058301.1, EVALUE 9.00e-03; SWISSPROT HIT: Q9JHJ7, EVALUE 4.00e-23; EST_HUMAN HIT: AW450670.1, EVALUE 1.00e-110
ggcagtgagagcagaaaagcaagtgaggagagaatgagagcaggaggggcgcaggttgcagccccagaccaaggagggggctgctgtgcttgtgtagcgggaacaggggtagagggtaatgctcaccccgcacccccatcaccccacccggtctatccccagcctcactgccactggggctgattaacccccagccggtcacccagcagtccggccggtgcacgaagttgaaggtggaagactcgatgcaaatgggctggatgtacgcattgtaggtgacagaagaggccagtctcagcagggcaatgtcattgcgtaaaaccccaagtgcgtcagggttcacaatgatgtcctgcactttgtaacgactgctgtaggccccgcaggttccaaggagttggcctggaagtcagctcgcccagctggaccgtccactcggagggatagtagtgcctagcagaaaaggagagagggcggggagccttggaatagggggctggccgcctgagcacgctggaggcccagtccctgaggccaagctgctgggtggctactgtttgctcatcctggaggccattagcaagtctgaggc

SEQ ID NO: 8680 - DNA, 599 bp, Homo sapiens
  MAP TO AC004789.1; EXPRESSED IN BONE MARROW, SIGNAL = 0.88; EXPRESSED IN PLACENTA, SIGNAL =   1; EST_HUMAN HIT: BG767631.1, EVALUE 5.00e-76; NT HIT: gi13648926, EVALUE 4.00e-76; SWISSPROT HIT: P57737, EVALUE 3.00e-26
atgatgagcccctgtctgtcctctgcagctggtgaggacgccaggatccgactgtggcgggtacccgcagagggcctggaagaggtgctcaccacgccagagactgtgctcacaggtcaggcaggctcaggaatggggctggggtggccagtgtctcccaagggctcctgatcacccctgccttcctccaggccacacggagaagatctgctccctgcgcttccacccactggcagccaatgtgctggcctcgtcctcctatgacctcactgttcgcatctgggaccttcaggctggagctgatcggctgaagctgcagggccaccaagaccaggtaggacggctgcagaggtggggccagcagtgtggagaggcggggccagcagtgtggagaggtggggccagcagtgaggagtggcggggccagcagtgaggagaggcaggaccagcagcgaggaggggtggggccagcagtgaggagaggggggccagtggtgaggaggggcagggccagcggtgaggaggggccgggctagcattgaggagaaggggggccagcagtgaggagaggggggccagcagtgaggagaggcaagacc

SEQ ID NO: 8681 - DNA, 532 bp, Homo sapiens
  MAP TO AC008546.5; EXPRESSED IN BRAIN, SIGNAL = 1.1; EXPRESSED IN BONE MARROW, SIGNAL = 0.66; EXPRESSED IN PLACENTA, SIGNAL = 1.5; SWISSPROT HIT: P75028, EVALUE 2.90e+00; NT HIT: M95739.1, EVALUE 5.10e-01; EST_HUMAN HIT: BG573328.1, EVALUE 0.00e+00
aaccacagaagccacactccactcccaaatggtttttccaggtctgagacctgtcacttacagttccaggtccggacccactggcttcacttctctcccgtggaacatactcttccagggcataagctgtgcttggaatgtttgctgaatgctcctttttgcttgtaggacttgctgtctccttgtcatcttctagaggccaggtgatcttcaagaaactctgggaaatgtcgggaaggaactttgtatttacaccagatctgcccaaccacagctctttgagccagttggtgtgcttttcgctcacaagtgctatctcagaagttttctctttcagcgtctgctcagagggatggcaccagccgcacttgaaacccacatgtgtgagaaagcaaatgaccacagaaacattcaatgtgacctttaagataatgttacgtctttgccttaagagcttcatcttatcttgatgttgacttggagtcacatcactgaccctttactcatgatgacgtatgtctttccgcaatcc

SEQ ID NO: 8682 - DNA, 576 bp, Homo sapiens
  MAP TO AC005567.1; EXPRESSED IN HELA, SIGNAL = 0.57; EXPRESSED IN FETAL LIVER, SIGNAL = 0.64; EXPRESSED IN BONE MARROW, SIGNAL = 0.68; SWISSPROT HIT: O15360, EVALUE 2.00e-15; NT HIT: Z83075.1, EVALUE 0.00e+00; EST_HUMAN HIT: T99040.1, EVALUE 8.00e-75
cccctcctccttgagatagggagaattctctccaagcaggtgctggccactgtgaggggagagacgccacggtgtgagctgtcacagctccatgtgttacctttgcagtgggaagtgagggggctgcggtggccaccggctgggaggaaggtgaggggtcatctgtcgcacattggtttgcttggatattgaagggagcggatgcttttatttcagctctttgtgatgctgagtgcagaggagttggttggccatttgcaagaagttctggaaacgcaggaggttcactggcagagagtgctctcctttgtgtctgccctggttgtctgctttccagaagcgcagcagctgcttgaaggtgagcttttacgcgagcccggtggtgctggtcaagagtgtgtgtaggggggtgtcagcagagtcccagctgactgtgggtgagcctctcagtgaagcccttccctacctgcccggaacctgcagtgcctcctgtcgatggaacattctttgtcagacgcttccataagcactgactgctgctctgagaggccagagtgtccactgctgcttcattca

SEQ ID NO: 8683 - DNA, 515 bp, Homo sapiens
  MAP TO AC007782.20; EXPRESSED IN BRAIN, SIGNAL = 0.85; EXPRESSED IN BONE MARROW, SIGNAL = 0.95; SWISSPROT HIT: P24499, EVALUE 4.80e+00; NT HIT: gi13648598, EVALUE 2.00e-77; EST_HUMAN HIT: AV762517.1, EVALUE 1.00e-94
acagtgtgcattgcttgaccattagggagttcttatttagtatattgaaagtcatttgaagtttaaagctaaaagctatataccttctaagatctccaaaacagtttacaaaatagttggttgagaaggctattatgatagaaataatattttgctaaggatggataatatgcattaagagctataagaaaaacacctgagtgtgatcattgtggttttccttctcagatgaattttctagacgaaaacgttctaaatcagaagacatggacaatgtacagtctaaacgtcgtcgatatatggaagaagaatatgaggcagaatttcaagtaaagattacagccaaaggagacattaaccagaaacttcaaaaggtattgtgtcaattataagttataaaccatattgaataaatagcaccactatcttcttctaggtttctgacattattctgtattttattgacataatgtggtttatcatagaaagaaagaacttgaagaaagtggttgagc

SEQ ID NO: 8684 - DNA, 523 bp, Homo sapiens
  MAP TO AC016965.10; EXPRESSED IN HEART, SIGNAL = 3.6; EXPRESSED IN FETAL LIVER, SIGNAL = 2.3; EXPRESSED IN BONE MARROW, SIGNAL = 0.91; EXPRESSED IN PLACENTA, SIGNAL = 0.93; SWISSPROT HIT: P18939, EVALUE 4.80e+00; NT HIT: AL163249.2, EVALUE 8.00e-03; EST_HUMAN HIT: AI038280.1, EVALUE 8.00e-04
tcttggtgttgcttcattgcaactgccatttgccattgatcattgtttttttcttcctttggggagattaagaggaagaggacacagtctgagtgatcttcattttaaaaaaaatctctttggctgcagtatgcaaaaggagttaaactgaggaaaactggaagccttggagtagggttattgccattctgctattctgagatttggtgaatcaaccccctttcccccccagatctgtgccttttgcaattttgaagacgtatgtcagggctcaccccacctctgtctagcaagaagcaactttatctgcctcgaatgcattaccattttggttgatggcctctgaacgttttccatcacagtcttctgcctctcctccatattctttgctaaataacatgttgggaatggtctccttgtcttccacatcaaataatttaactgaaacaccatcataattacaacttaatttctctcattcaaacagaggtgatgcatcttctccccaaaataaaagcctcct

SEQ ID NO: 8685 - DNA, 578 bp, Homo sapiens
  MAP TO AL118558.2; EXPRESSED IN LUNG, SIGNAL = 2.6; EXPRESSED IN FETAL LIVER, SIGNAL = 2.1; EXPRESSED IN BONE MARROW, SIGNAL = 1.5; EST_HUMAN HIT: BF751935.1, EVALUE 0.00e+00; NT HIT: gi14754250, EVALUE 0.00e+00; SWISSPROT HIT: Q9JHU4, EVALUE 2.00e-41
acccgtgtttctgattctcgccttgttgatttaactcatcctggaacaagctgaccatggaccttggcttcgtcttttcattttattccatttcatagaaggactttatccttttagttccatgtgttagcaaagagtgcagattaacctgaccaattacttccttgttctgaaagttcaagtttgtgttcaggtaaacaaacctcgtgaggaggcaccttggttgcagccggactcacacttccatctccgtgtgtaggtgtccatcagcggagaatggtctccgtggcaggccaaggtgcctcagattgaagtggagacgcacaaggtggcagcccctgatgtcgtcgtgccaacgctggacacagtccgccacgaagccctcttgtacacttggctggccgaacacaagcccctggtcttgtgtggccctcctgggtctggcaagaccatgacactcttcagcgccctccgggccttgcctgacatggaggtaaagaggccaggaggtgggcagcagaccttttggtgctgagcatggggttggtcttacagtgtggttttgtgtcttccctcca

SEQ ID NO: 8686 - DNA, 520 bp, Homo sapiens
  MAP TO AC004211.1; EXPRESSED IN HELA, SIGNAL = 0.59; EXPRESSED IN BONE MARROW, SIGNAL = 0.51; SWISSPROT HIT: Q9Z1Q9, EVALUE 3.00e-20; EST_HUMAN HIT: BI829652.1, EVALUE 2.00e-63; NT HIT: gi15304389, EVALUE 1.00e-63
ggctcagctcatgtctcctcactccccgttccttccacagttgtttctccaccacagcctgcagttggattcagggcaaatgaacagagtcaggttgctttgggggaagaaattgcttttgcccaagaaaaggaacaggtaacaaaagacatacttgtgtagcaattcctgcatgatctgaaccagggacccacagcacttgatccccacgcatccggtgcctgcaacaaaaatgccctcctgtgagcccctgagcttaaatgtttatcctcactcattcctgcccttcctatttcccttccaagaactcaagcagcccccactcccctctcaccagcgcacgagggcatcctgtatggccaccgtgagtgcgtggccaatgtgcagggagccagtgacattgggaggtgggatacacatggaaaaggtctcccctgtagcttggggcagccgggcctagaggaagaaaaaaagtcaaaggggcaagagagaattggattggggaaagagcaccctctac

SEQ ID NO: 8687 - DNA, 590 bp, Homo sapiens
  MAP TO AC004180.1; EXPRESSED IN BONE MARROW, SIGNAL = 2.5; EXPRESSED IN PLACENTA, SIGNAL =   3; EXPRESSED IN BRAIN, SIGNAL = 3.1; SWISSPROT HIT: P70387, EVALUE 7.00e-05; NT HIT: X92841.1, EVALUE 0.00e+00; EST_HUMAN HIT: BG110125.1, EVALUE 0.00e+00
cttcctctcctgcctgacacccaccacaggctcaggattctgtcggagggtcctctacttgccctgattacaacactggatggtccagtccctgacccactgtctttatccagtggctctaacaatagaggaaaatcaggacacgatgtgccaacaggaaatgccttcatccatagcacagggagggtttccctggacacatcttggaggtgaggcaactctagcagaattggagggagaggagagcccctggccagcgtccgtacctcttctcctcaggactacgctggattctagatatcgccgtagttcctgcaggcagtctgcatgcatagcgtgatagtgtgtcttggtcttcatggcatcttccttcaagaaattcctgacgttcatggccaaggtctgagctctggaggactggggcactgtccattcctcagtctccacgttttgggagaggaagagctccccatcgtagtagaaatgctgggagctcctggtgctgttgtcttcatggatctcacagaccctaatctcctggagggaatgcaagcctgcccccacccagcagtgacttctccattcccgaa

SEQ ID NO: 8688 - DNA, 591 bp, Homo sapiens
  MAP TO AC018427.3; EXPRESSED IN BRAIN, SIGNAL = 1.2; EXPRESSED IN HELA, SIGNAL = 1.1; EXPRESSED IN BONE MARROW, SIGNAL = 1.1; EXPRESSED IN PLACENTA, SIGNAL = 1.1; NT HIT: U24695.1, EVALUE 1.40e-01; EST_HUMAN HIT: BF986408.1, EVALUE 3.30e+00; SWISSPROT HIT: P31695, EVALUE 2.60e+00
taacatcgggatctccaagcatctgacagctgagtcacagaaattttaatatttccttcacactaacatcttctgcttgcaagggttgccataggatgggggctctcacatccaatatgcaatcgaaaagcgcagaagcttcctgtttttatacaatgtgattcactgagcattccaagttcattgctggccagattacaaccagcaacggtgccatcaggatgaggcacaggtgcacttgggactctcaggtcactctacagtcagcccagatgcaaactgtttacctgccccaggttacgactcccctgtaaaccctgcaccttctcagttgacctctgagcaccaccaggtaagcctggacctgggattccagcttcattgagatggagaacagtttcgaaaaacttctcagaatggagttatgagtgatatgggggttaggaaataggaaaagttattctgacgatgccttgcaggttggctgaatgagagagtaaagggaaactgaggccattatggatgaaagttgttttccattgcacctttgtcagggcaaaaatgagactttgcatctttgcaatgtcatgc

SEQ ID NO: 8689 - DNA, 525 bp, Homo sapiens
  MAP TO AC022424.3; EXPRESSED IN BONE MARROW, SIGNAL = 0.81; EXPRESSED IN PLACENTA, SIGNAL = 1.1; EXPRESSED IN HEART, SIGNAL = 1.6; EXPRESSED IN FETAL LIVER, SIGNAL = 2.7; SWISSPROT HIT: O15072, EVALUE 2.00e-08; NT HIT: AJ296304.1, EVALUE 5.00e-01; EST_HUMAN HIT: BE740751.1, EVALUE 7.40e-01
tatgcgaaatcgagggaaagtcctggttacgctctcctttccaccatcaccaacctcgcctccctacctggggcttgcgctgtactcaccaagccttggcaggttgaaagggccactgaggagtttctgtgtgatcgcaaagagccttgatagaaacagaagtcctctggcggtaaagtctgcacagacttagtgcctgtctttcccaacgtctgcacaataaagccaggagccactaggctgctggaagtcctcagatccatgtggaagtcgtgcctggagcctttcagccgaaggtgaagagactcaacctcggacacgggcactgctcttctccgccgctgatggtgcatgatttcatgggacacgtaatcgcccctgtggtcaacctcgtaggcagagaccaggtcatattctgaaatcaaaagagtgagcagaggctgagtcatttcggaattccgagaagaatcaggaagtcttaagatataatattattttaccacatgacctttccacccagtcaaa

SEQ ID NO: 8690 - DNA, 581 bp, Homo sapiens
  MAP TO AC013737.4; EXPRESSED IN BRAIN, SIGNAL = 1.6; EXPRESSED IN LUNG, SIGNAL = 2.1; EXPRESSED IN BONE MARROW, SIGNAL = 0.97; EXPRESSED IN PLACENTA, SIGNAL = 1.3; EXPRESSED IN HEART, SIGNAL = 1.3; SWISSPROT HIT: P10264, EVALUE 1.00e-07; NT HIT: AB008681.1, EVALUE 0.00e+00; EST_HUMAN HIT: AA668227.1, EVALUE 0.00e+00
agaaaatcctgccttcctcgagcagctatgggaggccttaaggaaatacactccactgtcaactgactcactagagggtctattgatcctaaaagataagtttattacccgatcagccacagatatcaaaagaaagctccaaaagtgagccctaggccctgaataaaatctggaggcattattaaacctggcaaccttggtgttctataatagggaccaagaggaaccggcccaaaaggaaaagcgagatcagagaaagactgcagccttagtcatggccctcagacaaacctaccttgctggttcagagaggacagaaaatggagcaggccaatcacccagtggggcttgttaccagtgtggcttgcaaggacaccttaaaaaaggttgtccaatgagaaacaagctgccccctcatccatgtccactgtgcagaggcaatcactggaaggcacactgccccagagggcaaaggttctctgggccagaagcccccaaccagatgatccaacaacaggactgagggtgcctggggcaagtgccagctcatgtcatcaccctcactgaaccccaggtacgtt

SEQ ID NO: 8691 - DNA, 569 bp, Homo sapiens
  MAP TO AC025761.3; EXPRESSED IN HEART, SIGNAL = 3.3; EXPRESSED IN FETAL LIVER, SIGNAL =   3; EXPRESSED IN BONE MARROW, SIGNAL = 2.5; EXPRESSED IN BRAIN, SIGNAL = 2.3; EXPRESSED IN PLACENTA, SIGNAL = 2.6; SWISSPROT HIT: Q9PMS2, EVALUE 5.50e+00; EST_HUMAN HIT: AW378374.1, EVALUE 8.00e-01; NT HIT: U78045.1, EVALUE 9.00e-03
tgctgtgagaattggtctggatactattaggtagttgttggcaagctgattcatagagatgatgctcacctggcttaatagcattcttgcttgtagcagccatagagatgaggagaagtgggctgattggaggtagaacagacttaccagtggatagaatgtggcaggtaagggcaagggccaatacaaagatgattgatggggttctggttggagcaactgagtgtgttgtactgagaagggaagactcaaattgaggagcagggtgtagaatcaggaatttcttttagcataatatatttgaaattatgctgattgtatatgagagtctggagtacagaggaagtctgtaccggatatttaaatttgggagttatcagcacagagactatttaaacccacaggaattgatgaaatcactgagagagaatagaaaaatgagaaggttgagagttgatcattctctgacatctagaggttgagtaaagtaagaagtagaaaaaagagacaagaatgaattgtccctgaggtgaaggagtctaagagataggagtgttttaaggagggca

SEQ ID NO: 8692 - DNA, 520 bp, Homo sapiens
  MAP TO AC003005.1; EXPRESSED IN HELA, SIGNAL = 0.78; EXPRESSED IN BONE MARROW, SIGNAL = 0.44; EXPRESSED IN PLACENTA, SIGNAL = 0.7; SWISSPROT HIT: Q13360, EVALUE 3.00e-10; NT HIT: gi13375967, EVALUE 1.00e-66; EST_HUMAN HIT: BE266260.1, EVALUE 3.00e-68
gaggagagagtgggcatcagtggttctggggcagggtctctcttctgagatggggattaaggaagagggtgagcaggggtggatgtttagggggatgcctaaattccccagtaaggagaccgcagataaactcaactctgtccatcttagcagggctatgtgacctttgaggacgtggctgtctacttctcccaggaggaatggagattgcttgatgacgctcagaggctcctctaccgcaatgtgatgctggagaactttacacttctggcctctctgggtaaggttctcacaccccaccccagcatcctgagctggacttggcttttcctccttttcctagggagaggtctgttcttcccaaagctgaactgtgggcactcattccttctccagtatcctgaagtagctattgtaataggcctgggctgtgtatactaccaccttctctccctgagctgccccacagctgtgcaggaaagggtttgggggtcaggagtcttgcagtcagcttgatgga

SEQ ID NO: 8693 - DNA, 575 bp, Homo sapiens
  MAP TO AC005862.1; EXPRESSED IN BONE MARROW, SIGNAL = 0.72; EXPRESSED IN PLACENTA, SIGNAL = 1.3; EXPRESSED IN HEART, SIGNAL = 1.4; EXPRESSED IN FETAL LIVER, SIGNAL = 0.74; SWISSPROT HIT: P80295, EVALUE 4.20e+00; NT HIT: gi15299754, EVALUE 3.00e-12; EST_HUMAN HIT: BF869492.1, EVALUE 1.00e-05
tgaagtggatgaaaaaggggagctctctgatggtgtcagtgctgatgatgataaatgattcaacaccgcacataggctccctaaaaccggaacccttctatcatctcttgactcccactgataaaaagcaaatgaacttttgtttctaattattctggaatgtcaattgtggcagaaaaaattagtttagctttaaaagtcaattccaaacaaatgtaccatgcaaatgtcaaggactgatcctgaaatatggagtttccaagaggccaagggaataagtgagcaagaaagaactgaagcattgtcactcatcatggccagcagtacaaattctagcaccaggaaccaaactctgcttcctggtgtggagatgaaaagggagagttccctggtccatccatcacaggacatgggacaggggtatggctctctgttcagcttcctcaagctcaaactccttataggagggggagcatgcagaagggtaggtgcaggagccagggcaagtgcattgaactccggccccacagtagtgtctggggtgggtgcctgtgactcctgaagccccagtgtta

SEQ ID NO: 8694 - DNA, 535 bp, Homo sapiens
  MAP TO AF235097.1; EXPRESSED IN LUNG, SIGNAL = 1.5; EXPRESSED IN BRAIN, SIGNAL = 2.2; EXPRESSED IN FETAL LIVER, SIGNAL = 1.5; EXPRESSED IN BONE MARROW, SIGNAL = 2.1; EXPRESSED IN PLACENTA, SIGNAL = 1.3; SWISSPROT HIT: O60840, EVALUE 1.00e-09; NT HIT: AJ006216.1, EVALUE 0.00e+00
gacagagccatgaaagagccagtgtcagagatgatgaagttggtggagaaatgaagccaatgaagtcatcagaaaagatggagccaaagcaggagccagtgaacatgacggagccaatggatgggggatgtagaggcaatgaaagagataacagaaataacaggagaggcatttcaggagatggtggagccagtagataggttacaaaatggaatgagaaagccagtagagggggacttttgctgaacccaacagggactcagaagagatagagctagaatgaggactgagtctccaggagtagggaggatgtgcgtgggagccacccacccacgtgaaagggaaccccgggatagaggtgagggaaggtgtatagggcgagagtggattagtggaaaggccagttctcacattgacttcagtgacggcaatatccactatgctgcccaccacaataagagcgtcaaacgtgttccaggcatcagtgaagtaatgctgcaagtaggagaaaagcagtgccctgtcttctcaaagc

SEQ ID NO: 8695 - DNA, 586 bp, Homo sapiens
  MAP TO AC006182.1; EXPRESSED IN BRAIN, SIGNAL = 1.4; EXPRESSED IN BONE MARROW, SIGNAL = 1.1; EXPRESSED IN PLACENTA, SIGNAL = 1.5; SWISSPROT HIT: P08775, EVALUE 2.90e-01; EST_HUMAN HIT: AV729098.1, EVALUE 2.10e-01; NT HIT: AJ003122.1, EVALUE 9.00e-03
gatctgaggctgaggattgcggctcaagcagtttggaggtgacactagaaggcatcagtaaggtgacacagggcagggaagacaaggctgccaacggcagtgtcaacgagcttcatctcgcagggactggcacctggctgcaggctgttccctgggggcagggatgctggggcattcatgcaccccttttccctccctccaggccatccccagacatagccggagggagctgtccaaaaagcctgtgtttcctactgtgcttagggtgactgcctggggtttcctggtgcccttctcctggggaggcctgggctccaacctcccactgagggagccactggttggtgctgcaggaaccagaggaaagagcctggcagccgcagggaaggtcaggaagtccccaccaccacccaccccagcttggggacccgagctgaggccctttgtcactagctgagtttctgtaacgagtgtggagacaggactgtgattcactcaaggcctgaggtcggcgccaacaaaggttatcaggaaggcctgcagggaggaggccaggctcatgtgtcccttgttccagaagagccag

SEQ ID NO: 8696 - DNA, 596 bp, Homo sapiens
  MAP TO AC020923.4; EXPRESSED IN LUNG, SIGNAL = 2.2; EXPRESSED IN BRAIN, SIGNAL = 1.4; EXPRESSED IN BONE MARROW, SIGNAL = 2.1; EXPRESSED IN PLACENTA, SIGNAL = 1.8; SWISSPROT HIT: P20810, EVALUE 1.00e-15; NT HIT: M86253.1, EVALUE 0.00e+00; EST_HUMAN HIT: AA767700.1, EVALUE 4.00e-58
aattttgggggaaggatttgcactatttcaaattttgtacctaaagtgaaattgtcacatgtacatcacactaattgaaatttacataatttagaaccacagacagcacaactgttatgaacaatttttattctatagagaaaagtatcagtattatgtttaagactaccatcttgttaacaatgtctttatatgtgtgtgggcacctgtgtgtgtactttcagccaaaaagcctacccaagcaggcatcagatacaggaagtaacgatgctcacaataaaaaagcagtttccagatcagctgaacagcagccatcagagaaatcaacagaaccaaaggtaaatgaagcagattgataggaaaaccttaacatcaactggataataagatacggttcccctgttcacactgaggtgtgtagttcaatctatggggctgtgctgaatatattttgtattatagtgatttggtattattattttgttggtttttcaaatagacttgtaggaacttggatgcatggatggcttgagaagggcatcagattggtctaggggatgcgctgtccgtccttctcctactgcccagcaataacc

SEQ ID NO: 8697 - DNA, 548 bp, Homo sapiens
  MAP TO AC008806.4; EXPRESSED IN BONE MARROW, SIGNAL = 0.75; EXPRESSED IN PLACENTA, SIGNAL = 1.4; EXPRESSED IN HEART, SIGNAL = 2.1; EXPRESSED IN FETAL LIVER, SIGNAL = 2.6; EST_HUMAN HIT: BE960634.1, EVALUE 4.00e-67; SWISSPROT HIT: P52738, EVALUE 4.00e-15; NT HIT: gi11427700, EVALUE 6.00e-13
cagaggaagcaaaaacaccccagaggaagatttttaaattatgggggagaaacatccttaccaagccataccaagttcctgtagttctccaacatgacatctctgtataaatccttctgagatggcttcagccattcccactcttcttgggaaaagtctagcgccacatctctgaaggtcaccaacccctgaaataaaaaaattcttgttcaccaggtgcccagacacctatatggtcctagcaaaaaagatgaatttggccagagttcaaagctctaagtgatgcgaggaaaataattattggagaacaattacatgctgaggtttgtcaaatactttaagagaagagaaatattagaaacagactcaccatttgaaaattttacatttttataaaaaagacatatatacacaaaattagcttataacaagaaacagcaaagactaagttgtatgttacatatgctaagtataaagaaaatcttatatgggggattcctttatattccccaaattgagacatcaggtggggcagaataggagaaagg

SEQ ID NO: 8698 - DNA, 559 bp, Homo sapiens
  MAP TO AC008428.4; EXPRESSED IN BONE MARROW, SIGNAL = 1.1; EXPRESSED IN PLACENTA, SIGNAL = 4.3; EXPRESSED IN HEART, SIGNAL = 3.7; EXPRESSED IN FETAL LIVER, SIGNAL = 6.9; NT HIT: AL163249.2, EVALUE 0.00e+00; EST_HUMAN HIT: BE882039.1, EVALUE 0.00e+00; SWISSPROT HIT: P33976, EVALUE 4.00e+00
cagctgctgtgcttgacttctccccgggccttagctgcctctccgcggggcagggcttgggacctgcagcctgccatgcctgagcctccccccaacctgtgggctcctgcgcagcccgagcctccccaacaagtgccaccccctgcttcacggcacccagtcccatcgaccacccaagggctgaggagtgtgggcgcatggcatgggactggcaggcagctccacctgcagcccccatgcaggatccactgggtgaagccagctgggctcctgagtctggtggggacttcgagaatctttatgtctagctaagggattgtaaatacaccaatcggcactctgtatctagctcaaggtttgtaaacacaccaggtcagcaccccgtgtctagctcaggctttgtgaatgcaccaatcgacactctgtagctagctactctggtggggacttggagaacctttgtgtccacactctgtatctagctaatctagtggggatgtggagaacttttgtgtctagctcagggattgtaaatgcaccaatcagcaccctgtcaaaa

SEQ ID NO: 8699 - DNA, 528 bp, Homo sapiens
  MAP TO AC005788.1; EXPRESSED IN PLACENTA, SIGNAL = 1.5; EXPRESSED IN HEART, SIGNAL = 2.2; EXPRESSED IN BONE MARROW, SIGNAL = 3.7; NT HIT: gi14765215, EVALUE 0.00e+00; EST_HUMAN HIT: AL134734.1, EVALUE 0.00e+00; SWISSPROT HIT: P23468, EVALUE 2.00e-53
cttctagtccccattgctcgaggcgggcctgattttcggctctttgggcctcctccccaccccgcccacagcagcctccaccccgctggcaccttgaactcgagttccatgccagtgacgtgttcgccaggctccacctgggccagcttctggatgtaggcatagaggctgcgtgcgggcacttctgtgttgccacagcccacggcctccagcagggcctcgtggatgaagctgtactggtcctccgtctgcaccatgtagttgcgctgggacctcatgagcgtcacgtggccatagacatcgactgtcttctctggcttgatccgctcaagcatggcgtcgatgacgataaagcagcctgtgcggcccacaccggcactgcagggacagccacgtggcgttcaggggctgctgggctgcggggaccggggggaagcggatggggcagagtggggtggacgtacctgcagtgaaccacgatggggccggcatctggcgggttgcaggtcttgactctccgcaggaaag

SEQ ID NO: 8700 - DNA, 568 bp, Homo sapiens
  MAP TO AC011605.3; EXPRESSED IN HEART, SIGNAL = 1.4; EXPRESSED IN BRAIN, SIGNAL = 1.5; EXPRESSED IN FETAL LIVER, SIGNAL = 1.7; EXPRESSED IN BONE MARROW, SIGNAL =   1
aaacacaaaccacccagctctaaagtcccagctggcacttctgttacccataagtgctctcttctgtttatgtttcttacacccacatgtatatatgtttgcagttggaacccttcacccttgtctcttaaaaattccttgagcaacaaggcaactgcgaatgagattttgctccatttcttgtagcacgaacaaggccaacactgcaggcagacagctggtgagagaacacatggtccagaatcttctcctcctcctcttccatctaaatttgcttgtcttgtgttccattcccttgaggctcaactctctgctctcattgatgccacccagtctgatgaaccagcatttcccaaagatgtgtgttttacaagctgttagcaagagtcccatgaaaagatgggttccatggttaaaagcataggaagtcagaacttatcaaaaccttttatgcccaggactttccatgttattgttcattataaatatattagatgggatagcaaagtacagatttttaaaaaatgtttaaatattttcatatttttccccgagtgtcctacagaaa

SEQ ID NO: 8701 - DNA, 562 bp, Homo sapiens
  MAP TO AC004493.1; EXPRESSED IN BONE MARROW, SIGNAL = 3.7; EXPRESSED IN FETAL LIVER, SIGNAL = 7.5; NT HIT: gi16165294, EVALUE 6.00e-53; SWISSPROT HIT: P40602, EVALUE 3.50e-02; EST_HUMAN HIT: BG740043.1, EVALUE 0.00e+00
tcaggcaagacagcactcacctccgctcgccagggggtggcttcttggggcttgcaggtttgggcaaggcctgagggccaggcttagcaggggaaggggaggaagacgacgaggaggaggaagatgaggaggaagaagaagaagaggaagaggaggaggaagaagaggaggaggaggaggaggaggaagatgaagaggaggagctggaactggaactgctagagcgcctcttccgtttggctggggttggctccggaggacgtccctctcgaacagcctcctttggggctggggtggggctggggaccctgtgggaggagaggagtgtcacaaggagacaagctgccccagccccaaccctaccttccttggcctggaggaacggcagtggggggaggggtgcctgagaaaggcgctgggagctctccgagccacgtgagccagcaattctctggagagcagtggtgcgagctgacccaacctctgctaacagaagcaacaggctggggcccgcagcataagggatcaaggttaaacctcaagaatgtccctgatggaggaa

SEQ ID NO: 8702 - DNA, 530 bp, Homo sapiens
  MAP TO AC004497.1; EXPRESSED IN BONE MARROW, SIGNAL = 0.53; EXPRESSED IN PLACENTA, SIGNAL = 1.3; SWISSPROT HIT: P20592, EVALUE 6.00e-45; EST_HUMAN HIT: AL551630.1, EVALUE 0.00e+00; NT HIT: AL163285.2, EVALUE 0.00e+00
tgcaaatttcagagagcacggctcctgccccgccgggaactcaccaagaagtaggcattcaggtggatgcctatttcagtaaaggaggaaaccgaagactcattactgggaaaatgagagttcaacttcatattctgtgaaggcgtccccagagggttaaaaatctcttctcggactttcttcagaacaacactgtaaatctgatcttgacaaaaaaccatctgctccattctgaactgaagttggatcatgttttctgcctttgctgtgtgtttcacttttatgtcttcaatcgtgctctggttagataaaaaagacaaacacattacttctttttcttctttcctgttggcttaaacaaatttggaagtactattatgttgaactcagaaataaaacgaatccatagtcaaagaagtcctgagacttgaaatgatgatttttagaaagtcccacttcgccctttctgtccttatgaacccggtttcctcactccccacttgcgacataccttctctcctgccctttct

SEQ ID NO: 8703 - DNA, 592 bp, Homo sapiens
  MAP TO AC000402.1; EXPRESSED IN HELA, SIGNAL = 1.8; EXPRESSED IN BONE MARROW, SIGNAL = 0.97; NT HIT: AF161886.1, EVALUE 5.70e-01; EST_HUMAN HIT: BF360200.1, EVALUE 2.10e-01; SWISSPROT HIT: P47974, EVALUE 7.00e-03
gcctagacggtggttagctgtcctggaggacgccgtgtctgggagagacgagcctcaggctccaaacaggaacccctcgttctaggctgggccctgcctggaagttgctgggtgggcttgtgaagctcttgcatcttcccagctgggttttaggtttcccatctcaaaattggagaatttggaccagatggctgctaagctgcttccatgaaggacgggaaattccccccaacagcccctgacccccgactgattcctgtagagtttcctggtggggagcagctgccgcctgatgcagctgcctcatgcagcttgcccagccctgggacacagggcttccgtgctggcattaggaacagtgggcagtcagtgttcaggggacctgaggctattggtccaggcgtttcccagggcagtgccgctcctgtcttgggtgctgattgctttcacaggcagcgtctgcccggagcactgtgcagagacagctgcagaggccagtgtcttcagcaggggcatggtgaccagctagtgactccaccgtgagcacagtgggactgggagtgtggcaggacgccctttgccatctgtatgt

SEQ ID NO: 8704 - DNA, 572 bp, Homo sapiens
  MAP TO AC004494.1; EXPRESSED IN BONE MARROW, SIGNAL = 2.2; EXPRESSED IN HEART, SIGNAL = 1.2; EXPRESSED IN BRAIN, SIGNAL = 0.46; EST_HUMAN HIT: BE148231.1, EVALUE 0.00e+00; NT HIT: gi14778027, EVALUE 3.00e-36
tctacgaagcccagccttacttccactcttgagcaggcgcttctcttcctccttgagcttgttctgtatcaggcagagagtgtttttagcttcctgtggaagaggaaatacagactcaggagagatggcccttttctggactgttctattcttcttcaccactgtgtaaggactgctaagtttgtgctacagaacaaaaaaagagctaaactcaaggaaggggaagagaattaacactgcctgagcaactccagggtcctgaaacttactgccctttctctctgcggttgcctcgtggcctggtggacaggggcgcccagagtgaagcagctgccccaccccatgcttctccgattgcatttccctgcctctgaggagaactaaatgcccatcacgcatgcctgtatgacctggggacacagaacagacacatctaattttagggcagagacaggcctcctgctttcaaaggaagaaagtatagattttatcatttatctttcctgccctgccttcagattccagctcaaaagatgctaaatggtgggacaggtaaggatgggaacaggggt

SEQ ID NO: 8705 - DNA, 565 bp, Homo sapiens
  MAP TO AL121919.19; EXPRESSED IN FETAL LIVER, SIGNAL = 1.1; EXPRESSED IN BRAIN, SIGNAL = 0.69; EXPRESSED IN BONE MARROW, SIGNAL = 0.88; EXPRESSED IN HELA, SIGNAL = 0.88; SWISSPROT HIT: O83823, EVALUE 2.40e+00; EST_HUMAN HIT: BF975891.1, EVALUE 7.90e-01; NT HIT: M90058.1, EVALUE 5.40e-01
tgaaccaatcagatcctccctcaacacagttgagtgatgggtagtagagagtcagtagttggcagggggaatagggtggaagctatgaaggagcagagccatgaaggagtgaggcatgaaggaatcagtagactcccatggaaagagtaactgattcctcatggtgggaagcacttgagctgggagccgtacttcctttggtctgccagcagcctgggaaggatgggaaactagccaatgggcactggagctgtcctaggtcctgaacagccttctttcctccgtgaaaggcctgaatctggtttgtgttctcttcttccccaataccccctacccccacatttaaggtagtgtttccaaagcttgggattcgtagccgtggaagagcacaagatgacgttagggtgcgcagaacctgggattaaataacaacacatcacagaatcagcaagctaccccctttccagtgatctcagcggaataggttgttaacacctggtccttcctaatcccttttaacaaagagaggtggccttggctttacagcatttgatgaggaatgcct

SEQ ID NO: 8706 - DNA, 600 bp, Homo sapiens
  MAP TO AL109617.2; EXPRESSED IN BONE MARROW, SIGNAL = 1.8; EXPRESSED IN PLACENTA, SIGNAL = 1.6; EXPRESSED IN HEART, SIGNAL = 1.9; EXPRESSED IN BRAIN, SIGNAL = 1.3; SWISSPROT HIT: P08548, EVALUE 2.00e-45; EST_HUMAN HIT: AA904860.1, EVALUE 5.00e-33; NT HIT: gi14861872, EVALUE 1.00e-17
aggacctgatggcttcactgctgaattttagcaaacatttaaatgaaaactaataccaaccctactcaaactattttgaaaaataaaggaggagggagtacttccaaaatcaagctatgaggccagtattattctgataccaaaaccaaacaaagacatatcaaaaaaaaaaaaaaaaaaaaccccaaaacaacaacaaaaaaactaaaggccaatattcctcatgaacactgacgcaaaaatcctccacaaaatactagcaaactgaattcaacaacacagtaaaaagactagtcattatgactaagtggaattcatcctagggatgcaaggatgattccatatccacaaataaatcaatgtgatacagtgtatcaacagaatgaaggaaaataaccatatgattatttcaactgacactaaaaaagcatttgatattattcagtatccttttatcataaaaaccttcaaaaacctgggtatagaaggaacatacctcaacaatataaaggccatgtacaacagacacagctcatatcatactgaatgagggaaaacagaaagcctttgctctaatatccggaatatgacaaggatgcc

SEQ ID NO: 8707 - DNA, 584 bp, Homo sapiens
  MAP TO AC010252.3; EXPRESSED IN FETAL LIVER, SIGNAL = 0.61; EXPRESSED IN BRAIN, SIGNAL = 0.86; EXPRESSED IN BONE MARROW, SIGNAL =   1; EXPRESSED IN PLACENTA, SIGNAL = 0.71; EXPRESSED IN HEART, SIGNAL = 1.1; NT HIT: AB047034.1, EVALUE 3.60e-02; SWISSPROT HIT: P04073, EVALUE 4.30e+00; EST_HUMAN HIT: BI090703.1, EVALUE 3.20e+00
ggagagtgtgcttcctctggaatccttgacagctgaccatttttgggtggaatttgtgtgcctcctctgggacagagaacacagttcctcctggaaatccctttcactggtttccctgacttctgccggtgcctgctttatacaacccttctcatttctctccaggggatgtgtggcagacagcccatctcccggtgggtcaagagataagctggagtcaaaccctgattgatgactacagaaagaatcagttgggttgtggcttctgttctgtattaaagatcacaggacttattgatctaaagctggcaggctctctgcaggccagcaatgagttgagccagttgccaaagcagcaagaagaatgactgttgtctaggctattagagcttgaatgaaaagagtgtatttcatcttgcacagtggcattaatcgttactttgttattctggggaaaaccaggcctttaggaagtgatttggtggtagtgtccttatagtctggtgtttgaacttctcatgggggctgttttttggcactgatatagttatctatgagcttgtcctgttgtgtggtgctagcgt

SEQ ID NO: 8708 - DNA, 567 bp, Homo sapiens
  MAP TO AC010336.5; EXPRESSED IN HELA, SIGNAL = 0.83; EXPRESSED IN BRAIN, SIGNAL = 0.86; EXPRESSED IN LUNG, SIGNAL = 1.2; EXPRESSED IN BONE MARROW, SIGNAL = 0.86; EXPRESSED IN PLACENTA, SIGNAL = 0.55; SWISSPROT HIT: O43615, EVALUE 4.00e-43; NT HIT: gi14757909, EVALUE 2.00e-80; EST_HUMAN HIT: AL041911.1, EVALUE 3.00e-80
taccacaggagcacagaaggcctctgccggcctcggggaaccagatccgcccttctctccggcaggaattcattcctcctgccccgccccccggccgccagggccggtgccaacgccccctctctgtgtctgtctcagtagagccttcacgaagtcagtaaaagtgatctcggccggaaaatcaaggagggcgtggaggaagcagccaagacggccaagcagtcggccgagtcggtatccaaaggcggggagaagctgggcaggacagcggccttcagagccctctcccaggtgagcccagtcctgggctagggcatgcagcctggggcggccgaacccagacacccaccccagccccgctgtgcctccctcgcagggggtggagtccgtgaagaaggaaattgacgacagcgtcctgggacagaccgggccctaccggaggccccagcgactccggaagagaacggagtttgcgggagataagttcaaggaggagaaagtgtttgagccaaacgagtaggtaccagcccgtggccctcgctgcccccattttgggcagctttcact

SEQ ID NO: 8709 - DNA, 561 bp, Homo sapiens
  MAP TO AC000094.3; EXPRESSED IN BRAIN, SIGNAL = 0.54; EXPRESSED IN BONE MARROW, SIGNAL = 0.62; EST_HUMAN HIT: BG324557.1, EVALUE 1.00e-36; SWISSPROT HIT: P53675, EVALUE 2.00e-32; NT HIT: gi4502902, EVALUE 1.00e-114
ctattgaggagcacttcgccatgagcttagtgacacttgttcaatatttaaggtaacaaagcagttaaaatgaggtaagattcctttctaacaatcccatcgggtttacctttcagagctatcaccttagaggctggattcatgatggcactctctgcagagataggccgtcggatcggagccattgggtcactcatgtcaatgatcgtgacctgtgcctgctcaccaactttctctcggatacatatgaacttgtcagattccatggtcagtgtgctgaatccaatgttagctggattaattccaaggttttggagctaaacagaaaaaaagcatttgattaaatttttttcctctgaaatggactgactgtagccaaaggcaaaagaggagaagttaaataaaatttagaaaaaagttaacattaggtaaacacttgaaggaaacattagcttgcttttctacgcctgtaatagatccacccaagcctgtgaatcaactctccttgagagattaccagcccacagtggagataagacatgtgcaggatgacactaggca

SEQ ID NO: 8710 - DNA, 572 bp, Homo sapiens
  MAP TO AC016656.5; EXPRESSED IN BONE MARROW, SIGNAL = 0.44; EXPRESSED IN PLACENTA, SIGNAL = 0.88; NT HIT: AF009516.1, EVALUE 1.40e-01; EST_HUMAN HIT: AA999778.1, EVALUE 8.00e-01; SWISSPROT HIT: P24215, EVALUE 1.10e+00
agagcctgggctgatgtatgtgtccctcagggttggtgcactccccaagaactttctgtctgaatgcttccttctgctctccctaggctgaacctggaaagccagaaacaagctttctgctcagggattgccttccccacctttctggcatacttcggagtttctgttcatcctgatgcccctgggaatttgaccttaacaagcaatgaagtctctctccttccccttctatctgttgggacttccctcacaccagatcctccttgttccctgcttcagcctcacagcatgctctcggtagaggagaggctaccagaagagaaggaggaggaggaggaaggggaggaggatgtggattaagagaaacaggaggaggagaaagaggagtggaagaaggagaaggaaaagaggaagcgcaagaaggggaaggagggaggggcagagggggaggaacaccaagaggaaaattcttcagtaggcatttcaaaaattgcttccttgtttcatcacaatgatggaaactttcctaattgggagagagaagttggtaaggaagaagtgcaagagccctg

SEQ ID NO: 8711 - DNA, 592 bp, Homo sapiens
  MAP TO AC008806.4; EXPRESSED IN BRAIN, SIGNAL = 0.5; EXPRESSED IN BONE MARROW, SIGNAL = 0.67; SWISSPROT HIT: Q06730, EVALUE 7.00e-13; NT HIT: U56732.1, EVALUE 4.00e-05; EST_HUMAN HIT: T70791.1, EVALUE 2.00e-72
tgcttccatctaagccttgctttcattttttcctgcctttggtatcttgtgagatctcaaaccacttaacttggttaaagttttatttttatgtttctttcacactcaatataaattggtacctaaaatctcccctttaactcatggtagatattaaagacatgtgcttgctaatcagtgaatgaacataaatgacaggatgctgctaatatgatgggcttttttaataacctctgattaatatcagaacaaggttcaatatattttgtttacaatcacccaagatggatgacttcagattgagtgggagtgtgttgttacagggaacagtaacattcaaagatgtggctatcgacttcactcaggaggagtggaagagattggatcctgctcagagaaaactgtaccggaatgtgatgctagaaaactataacaacttaatcacagtaggtaagagtaatttactatataattcaaactctggaaagaaagtaccttttttttcctcccagtgtttctgaaatacatggaccttttaaatattagagtgagcttggccttgggatgcttttgctcatgtgaatgtccatgc

SEQ ID NO: 8712 - DNA, 516 bp, Homo sapiens
  MAP TO AL049747.1; EXPRESSED IN BONE MARROW, SIGNAL = 4.6; EXPRESSED IN PLACENTA, SIGNAL = 4.8; EXPRESSED IN HEART, SIGNAL =  42; EXPRESSED IN BRAIN, SIGNAL = 4.4; EST_HUMAN HIT: BG987077.1, EVALUE 1.00e-125; SWISSPROT HIT: P02149, EVALUE 2.00e-38; NT HIT: M14602.1, EVALUE 0.00e+00
tcaacaatcccaggaggaaggcaaagtgggtggcagtcccctttacaaatgagaaacctggggcacagagaagagtggcataggtcatcccacaagttagtggctgagcttggactcgaacccagatcccattgccccacccgaggccttccccgcatcctcccacctgcccaggctctgctcctacctccaggtacttcacggggatcttgtgcttggtggcatgcgactgtgccaggggcttaatctctgcctcatgatgccccttcttcttaaggatgccacccagggcggtgagcacggtggcaccatgcttctttaagtcctcagacgccttcatctcgtcctctgacttcaggtgcttgaacttgtcaaacttctccagagtctctgggtgacccttaaagagcctgtgggcacagggaaggctggagtcggcatgggaggtgcggtgtgaggtctgggggcagccagactagagttcaagtttagctccctgtcttcccagctgtgtga

SEQ ID NO: 8713 - DNA, 567 bp, Homo sapiens
  MAP TO AF134576.1; EXPRESSED IN FETAL LIVER, SIGNAL = 1.4; EXPRESSED IN HELA, SIGNAL = 1.4; EXPRESSED IN BONE MARROW, SIGNAL = 0.83; EXPRESSED IN PLACENTA, SIGNAL = 0.92; NT HIT: U10690.1, EVALUE 0.00e+00; EST_HUMAN HIT: BG575302.1, EVALUE 2.00e-16; SWISSPROT HIT: Q10038, EVALUE 1.10e+00
cttgccaggagaaaggtgagggccctgtgtgagcacagaggggaccattcaccccaagagggtggagacctcacagattccagcctaccctcctgttagcactgggggcctgaggctgtgcttgcagtctgcaccctgagggcccatgcattcctcttccaggagctccaggaaacagacactgaggccttggtctgaggccgtgccctcaggtcacagagcagaggagatgcagacgtctagtgccagcagtgaacgtttgccttgaatgcacactaatggcccccatcgccccagaacatatgggactccagagcacctggcctcaccctctctactgtcagtcctgcagaatcagcctctgcttgcttgtgtaccctgaggtgccctctcactttttccttcaggttctcaggggacaggctgaccaggatcaccaggaagctccagaggatccccaggaggccctagaggagcaccaaaggagaagatctgtaagtaagcctttgttagagcctccaaggttcagtttttagctgaggcttctcacatgctccctctctctcc

SEQ ID NO: 8714 - DNA, 524 bp, Homo sapiens
  MAP TO AF254983.1; EXPRESSED IN FETAL LIVER, SIGNAL = 0.95; EXPRESSED IN LUNG, SIGNAL =   1; EXPRESSED IN BONE MARROW, SIGNAL = 0.81; EXPRESSED IN PLACENTA, SIGNAL = 0.95; EST_HUMAN HIT: AI138404.1, EVALUE 0.00e+00; NT HIT: AL163201.2, EVALUE 0.00e+00; SWISSPROT HIT: P55200, EVALUE 9.00e-04
gttggtagcacacgaagcactaaattgagtaatgtagattttattatttctaacgaatcctttgtttaatattttgcaggttccatttgtttacttgtgatgtacagagttttttataccttcccagcttatatttgaatattccttttcaaggttttataaagagatttctctcctttacccctttcagcgatgtgcattttgtaagcactttggagccactatcaaatgctgtgaagagaaatgtacccagatgtatcattatccttgtgctgcaggagccgacacctttcaggatttcagtcacatcttcctgctttgtccagaacacattgaccaagctcctgaaagatgtaagtttactacgcatagacttttaaacttcaaccaatgtgtttactgaaaataacaaatgttgtaaattccctgagtgttattctacttgtattaaaaggtaataatacataatctttaaaatctgagggatcattgccagagattgttgcggagggaaatgttatcaa

SEQ ID NO: 8715 - DNA, 559 bp, Homo sapiens
  MAP TO AF176815.1; EXPRESSED IN HEART, SIGNAL = 2.5; EXPRESSED IN FETAL LIVER, SIGNAL = 3.2; EXPRESSED IN BRAIN, SIGNAL = 2.1; EXPRESSED IN BONE MARROW, SIGNAL = 2.7; EXPRESSED IN PLACENTA, SIGNAL =   3; NT HIT: AF176815.1, EVALUE 0.00e+00; SWISSPROT HIT: P55201, EVALUE 5.00e-74; EST_HUMAN HIT: AL134968.1, EVALUE 0.00e+00
cctgccgaaaggtctacaagagttacagtggtattgagtaccacctgtaccactatgaccacgacaacccaccacccccacaacaaactccactccgcaagcacaagaaaaaggggcgccagtcacgcccagccaacaagcagtcacccagcccctcagaggtctcacagtcaccaggccgtgaggtgatgagctatgcacaggcccagcgcatggtggaggtggacttgcatggccgcgtccaccgcatcagcatctttgacaacctggatgtggtgtcagaggatgaggaagcccccgaggaggcccctgagaatggcagcaacaaggagaacactgagacaccagctgctactcccaagtcaggcaaacataagaacaaggagaagcgcaaggactccaaccatcaccaccaccacaatgtttctgcgagcaccactcccaagctgccagaggtggtctatcgggagctggaacaggacacccctgatgccccaccccggccaacttcctattaccggtaaggccacctctaccttgcagctctggaaaactggtc

SEQ ID NO: 8716 - DNA, 594 bp, Homo sapiens
  MAP TO AD000091.1; EXPRESSED IN BONE MARROW, SIGNAL = 3.1; EXPRESSED IN PLACENTA, SIGNAL = 1.9; EXPRESSED IN HEART, SIGNAL = 2.1; EXPRESSED IN LUNG, SIGNAL = 2.9; EXPRESSED IN HELA, SIGNAL = 1.9; EXPRESSED IN FETAL LIVER, SIGNAL =   2; EXPRESSED IN BRAIN, SIGNAL = 2.1; NT HIT: AB002461.1, EVALUE 1.00e-41; SWISSPROT HIT: P78329, EVALUE 2.00e-22; EST_HUMAN HIT: AV645396.1, EVALUE 6.00e-51
aagggggtgtgtgttctcagacttccccactcctacgtctgctggtctgggggctggagtctaagccaggctcggaggatatgcaagcccacatgggggtcccaggcacagagtccctctctctgcccctcaatcggatctgggtggggttgggagtcccagacgaggttcccggcgcgatggggccgggatgggggtcctgggcacagtcagagtccccaccccctcccccgggaactgcatcggccagacgttcgccatggctgagatgaaggtggtcctggcgctcactctgctgcgcttccgcgtcctgccggaccacgcggagccccgcaggaagttggagctgatcgtgcgcgcggaggatggactttggctacgggtggagcccctgagcgcggatctgcagtgacccaccactgtcaggtctcagagccacccgcgccctcctcaggcacctttgcagattccggggaatcaacctgtgcctgagtcccacagacagccagcagggggcgtcggagaactgcagggatccagggcctggcgaggggaaggcggagtatttctgagccaagaccctgacagcctctc

SEQ ID NO: 8717 - DNA, 529 bp, Homo sapiens
  MAP TO AC010379.4; EXPRESSED IN BRAIN, SIGNAL = 0.82; EXPRESSED IN LUNG, SIGNAL = 0.65; EXPRESSED IN BONE MARROW, SIGNAL = 0.99; EXPRESSED IN PLACENTA, SIGNAL = 0.87; EST_HUMAN HIT: BF971469.1, EVALUE 0.00e+00; NT HIT: AL163246.2, EVALUE 1.00e-130; SWISSPROT HIT: P25059, EVALUE 2.00e-04
tcttccatcaatgaaagggcagaggtttgtcctcactggaatagacacttattccagatatgggtttgcctatccagcacacaatgtttctgccaaaactaccattagtggacttacagaatgccttatccaccatcatagtattccacacagcattgcctctgaccaagacactcactttacggctaaagaatttgcggcagtgggctcatgctcatggaattcactggtgttgccatgttcctcatcatcctgaagcagctggattaatagaacagtggaatggccttttggagtcacaattacaatgccagctaggtgacaatactttgcagggctggggcagagttctcctgaaggccgtgtatgctctgaatcagcgtccaatatatggtactctttctcccatagccaggattcacgggtccaggaatcaaggggtggaagtggaagtggcatcactcaccatcacccctagtgatccactagcaaaattttgcttcctgtttctgtgacattgcgttctgct

SEQ ID NO: 8718 - DNA, 583 bp, Homo sapiens
  MAP TO AC012000.3; EXPRESSED IN HEART, SIGNAL =   1; EXPRESSED IN FETAL LIVER, SIGNAL = 0.53; EXPRESSED IN BONE MARROW, SIGNAL = 0.93; EXPRESSED IN PLACENTA, SIGNAL = 0.81; NT HIT: AB051466.1, EVALUE 1.00e-109; SWISSPROT HIT: Q10361, EVALUE 5.60e+00; EST_HUMAN HIT: AA227306.1, EVALUE 5.30e-02
gtcacggcaccttactttgcagcaatgtgtcactcgatgtaaacataaatattcaaggataagaaaggctgtgcttctcttcctcatgagaatgatctattgaagggtggtcatgtgttatttggctgatacttaacatcctaacacctctagtgggtcactgggtcataccgcggtcattctggcagacggccttcagaatacgatgtcccaggccacattttccatgatcagggaaacagatcccttctgatgccagccatcggtagcacattggatcctcacaaggaacagactccaccaaatgagggcaatgccctgcaggccctgtagattccatgaggacatggcgctgcctcgttctaaatcctaaaaagagagagaaaagaattttcagagaattccactcttttccaggaaaggaaaagaagcagctgggtgagagatgaaaagttttattcaagtactcatcgctctaagcacgtattatcttgatgtgttttattctatgtgaagtgagaggatgagatgtagaaaaaaaagagaatgggaaagaataaaagcaggaaatctgtcttccaag

SEQ ID NO: 8719 - DNA, 570 bp, Homo sapiens
  MAP TO AC018766.2; EXPRESSED IN LUNG, SIGNAL = 0.98; EXPRESSED IN HELA, SIGNAL = 1.3; EXPRESSED IN BONE MARROW, SIGNAL = 1.2; EXPRESSED IN PLACENTA, SIGNAL = 0.9; EST_HUMAN HIT: BF857987.1, EVALUE 0.00e+00; NT HIT: X52311.1, EVALUE 2.10e+00; SWISSPROT HIT: P23800, EVALUE 1.90e+00
atagactggccagagttccgaagcacaactacagacagcgtcatgacagggggacttggcaggacaccttgatccaaggcgacagcatttggcaaggacacggaagttgggtcgttgcatccatcatcaggagttgacttgttctgagcaactgaacagaacacaccgcgatgctctcgacacttccgctcctggacttcagtcacgagtgagttgatggtgacttgacctgagagatttcacagaagctctgtgacttggttgtggaagaaatctgaactgttcaagttaaccaacttggttcattttaaatcaggcaaaagccacagtgggttcccctgagaaggttagtcaaagacttctggtcaaggttatgaccgttctgaacactgaatatttctccgcaaggatgtccacaaacagctacttgaatgtatgatggtgtatgcttggtcctggggaatccaccggcaaggaaaaaaaacctttactctttcctgtgctgcagtcggctttcagaaatgaaagaggtggcccggactgtattcacctacgtcctggggttgaaga

SEQ ID NO: 8720 - DNA, 585 bp, Homo sapiens
  MAP TO AC005174.1; EXPRESSED IN HEART, SIGNAL = 4.6; EXPRESSED IN BRAIN, SIGNAL = 2.6; EXPRESSED IN FETAL LIVER, SIGNAL = 2.1; EXPRESSED IN HELA, SIGNAL = 4.2; EXPRESSED IN BONE MARROW, SIGNAL = 2.9; EXPRESSED IN PLACENTA, SIGNAL =   2; NT HIT: gi7661953, EVALUE 1.00e-118; SWISSPROT HIT: P11824, EVALUE 7.40e+00; EST_HUMAN HIT: AL548223.1, EVALUE 3.00e-93
gctgctgtttcttgtagcccaataatgagatgcagatgaactggggaggaagagagttttttttttaagtatataaaaacatttattcattagaaaacaaggagactggcaaacatatattccaaagtgaaagcagctcaatgcagttcagttaggctaatttaagagaaaggccttgcattttaaagatcgtgtatgtattttttttttttttcaaaaaaggagacaggcaaatattctacaaggggaacagaattagaattctaggtcaccctacaagttaccctgcacagggaggaaaggaacaggcaagatgacttctcaggatctgtgcctgcgagctgatgctctgagaatgggggttattttcttgggtgtcctgtcttctgtcatctaggctaaaaaatcttcctcacttgactcatcacttgagaagacaacttttggtttcttttcggaagctcgctgctgggtgttcggatgccgatgggtagtacgacggggctctggtgtgacgaagtcattgtctgaggctgcagaagccagaggctggtgcctacaaacagtggatggtttcttggctgt

SEQ ID NO: 8721 - DNA, 512 bp, Homo sapiens
  MAP TO AC011311.11; EXPRESSED IN LUNG, SIGNAL = 1.2; EXPRESSED IN HELA, SIGNAL = 2.4; EXPRESSED IN BRAIN, SIGNAL = 1.5; EXPRESSED IN BONE MARROW, SIGNAL = 0.73; EXPRESSED IN HEART, SIGNAL = 2.4; SWISSPROT HIT: P80665, EVALUE 4.80e+00; EST_HUMAN HIT: AI201312.1, EVALUE 8.00e-07; NT HIT: gi14729768, EVALUE 2.00e-06
gggagaggatgaaggaggacagagctcactgttttcatcatgactcaaatgtttttccagaataaatgctcctagactgctgcgagcctttggttacttttcagagttctgaatacgtgattttgaccatttttgctaggcttcatgttgcctttatggaggagagaattttcagaggtccttactctgttaatttcactgatgtcactaaagttacagttttaactcttatgggtatctatcttttcaggcaatgtcagtttagtaaaagggacaggatgttagcaaaggaaggcattaccagcaataagaagtgatagctgccacgggaagcaaatgcagaaacagcagcctgggctgttccatgcaggggtaagtggtggctgtatatgaattgctcttgagtatactcatatttaacccaggttatatttgtttgctagggctggggtattttcttacagttctgggggctcgaaatccatgatcaaggtgtctgtggggttggtttc

SEQ ID NO: 8722 - DNA, 503 bp, Homo sapiens
  MAP TO AC012083.6; EXPRESSED IN HEART, SIGNAL = 1.3; EXPRESSED IN BRAIN, SIGNAL = 1.3; EXPRESSED IN HELA, SIGNAL = 1.5; EXPRESSED IN BONE MARROW, SIGNAL = 1.2; EXPRESSED IN PLACENTA, SIGNAL = 1.3; NT HIT: AL163280.2, EVALUE 9.00e-12; SWISSPROT HIT: Q02224, EVALUE 8.00e+00; EST_HUMAN HIT: BE881784.1, EVALUE 3.00e-06
tccactgctcagaggaaacctctttctacttctagttattttttctgtgatttacatttttattaataggcaatatgcttatatttcttcatttatcaagtttagataatatcattattttgttaaatcaataatcaatgtttattgtattattgtgttgagggtccccaacataatcagtgtttgcagtattattgtgttgatggtccccaacatcacgtctaggtttgatgattcattagaattcacaggactcagtatatagttgtacttatgtgtcttagtctgttttgtgtttctataacaaaatatagaagactaggtaattagtaatgagcagaaatttattggcttatgattctggagattggaaagtccaggatcaaagggctggcatcttctgagggtcttcatgctgtgtcatcccatggcagaaggtggaaggacaagagagcttgtgagagagagtgagagagcgggagagagagtgcacgtaagagggg

SEQ ID NO: 8723 - DNA, 586 bp, Homo sapiens
  MAP TO AC008626.5; EXPRESSED IN PLACENTA, SIGNAL = 0.59; EXPRESSED IN HEART, SIGNAL = 0.94; EXPRESSED IN BONE MARROW, SIGNAL = 0.69; NT HIT: gi4508026, EVALUE 0.00e+00; SWISSPROT HIT: Q03923, EVALUE 2.00e-81; EST_HUMAN HIT: AI566486.1, EVALUE 1.00e-128
catttgtaggttttccctccagtatgaattgttttatgttgagtaaggtgtgaggactggttaaaggctttgccacattcttcacatttgtagggtttctctccagaatgaattatcttatgtttagtaaggtttgaggactaaatgctttaccacactcttcacatttgtagggtttctttccagtatgaattatcctatgtttagtaaggcgtgagaaatggctaaaagctttgccacgttcttcacatttgtagggtttctctccagtatgaattgatttatgtttagtaaggtgtgaggattgcttaaaagctttgccacattcttcacatttgtacggtttctccccagtatgaattatcttatgtttcataagggtcgagaaattgttaaaacctttgccacattcttcacatttgtacggtttctccccagtatgaattatcttatgtttcataagggttgaggaattgttaaaagctttgccacattcttcacatttgtagggtttctttccagtataattatctcatgttttctaagggctgagaaaatgcttaaaagctttgccacattcttcaca

SEQ ID NO: 8724 - DNA, 588 bp, Homo sapiens
  MAP TO AC010596.5; EXPRESSED IN BONE MARROW, SIGNAL = 1.1; EXPRESSED IN PLACENTA, SIGNAL = 0.77; EXPRESSED IN BRAIN, SIGNAL = 0.79; EXPRESSED IN FETAL LIVER, SIGNAL = 0.63; NT HIT: AL163278.2, EVALUE 4.00e-08; SWISSPROT HIT: P11369, EVALUE 3.00e-03; EST_HUMAN HIT: AI765544.1, EVALUE 2.00e-07
ggacaaaaggtggaagcaactcaagtgactactgatggatgaatggataaacaaaatatggtctatacaatacacacaatggaatattacccagcctttaaaaagaaggacatactgacacatgctacaacatgggtgaaccttgaccacactgtgctaagtacaatgagctatcactaaaggacaaatattgtatgattccacttacgtggtgtatctggatagccaaattcacagcgacagaaaatagaatggtagttgccaagggttacaggaaaggaaagaatggggaggtaacgtttaatgagtatagagtttcttctgttggagaagatgaaaaagttctggaggtagatgatggtgattgttgcaataacaacttgcatgtgcttaatgccaaaggactgtatacttaaagattgctaaaatggtaaattttatgttttatacatattttaccacaataaaattttaaaaaccaattatcataacaggttcatttttttctttatcttgtcagatagataaatagatagatagagagacattaaaaatgtttccagagacagggatcagttcgctgaatgt

SEQ ID NO: 8725 - DNA, 576 bp, Homo sapiens
  MAP TO AC012152.12; EXPRESSED IN HELA, SIGNAL = 1.2; EXPRESSED IN BRAIN, SIGNAL = 1.3; EXPRESSED IN BONE MARROW, SIGNAL = 0.95; EXPRESSED IN PLACENTA, SIGNAL = 1.2; NT HIT: AJ401311.1, EVALUE 1.40e-01; EST_HUMAN HIT: AI457282.1, EVALUE 2.00e-04; SWISSPROT HIT: P57296, EVALUE 4.20e+00
ggtgcagttttgggagagtgcatctttgtatgaagtctagtggctttatgttattgaaaaataagatatggttttattgttattatatagaagattacacattggtaggcagatctataaggatactatgtgttcaagagtttggactgtgctggaaagcattaggtgcctctcatttccacacttgctctcagtaccttgctctgtcttgccatgtcagaggtctgtaaactacatttcccagatgcccttgccagctggtttactgctctgttctgtcaatgatctgcaggaaaagaactccacttttctatgattcctactttcagtctggcagtggtgctgtagcaaggatatggcggtgacgttattaacagcaatagcagtagtggtgatggaaaccctggtggcagtagtgatgatgacagcactctggtggcaggaatggtggcaatcaagaaagcagcagcagccagtgaatgcaggcttctggattctttcttagtcacccaagtctccaagagagctgacttagtgttacagtgacttgggctctgggtagcaccatcctattgc

SEQ ID NO: 8726 - DNA, 584 bp, Homo sapiens
  MAP TO AC000072.2; EXPRESSED IN HEART, SIGNAL = 0.93; EXPRESSED IN BRAIN, SIGNAL = 0.99; EXPRESSED IN FETAL LIVER, SIGNAL = 0.5; EXPRESSED IN BONE MARROW, SIGNAL = 0.89; EXPRESSED IN PLACENTA, SIGNAL = 0.86; NT HIT: L77569.1, EVALUE 0.00e+00; SWISSPROT HIT: P53675, EVALUE 1.00e-44; EST_HUMAN HIT: AL042937.1, EVALUE 4.00e-89
actcattccactcccacctgcccattcccctgcacccagaatagggcctggcagaggctggcaggagccagcgctctgtatcccctcttaccttggtaatgatgtccttgaactgaccctccttccaggcctcagtggggtggctcatcatggtgagcacagcattgtcatactcctcgtacttgtcatagaggaacaccagctcagcccacaggtgtgcctgctctgcagccctcagcacctggacaaggaggtcagggtcggcttgtgctgcacgtggccacggctgccagactgcaaggagtacacggtacctttgggatgttgacacgggaccagaaaagctccagatgctccagcatcttctgtggcttgaatttggagtagaggatggccagctcagtgaacatgcccatgtgggcccgctccaggcccagggccgcttccaacagcaagatcagctcctcaaagtagccacgatcctagcagaccaacagccacgcgtggggcagagtgattgcatgcctcctgcagccaccctccagcccatgcccacgccgcagggactgtgcttgtgactggga

SEQ ID NO: 8727 - DNA, 531 bp, Homo sapiens
  MAP TO AC011452.5; EXPRESSED IN BONE MARROW, SIGNAL = 1.2; EXPRESSED IN PLACENTA, SIGNAL = 0.97; EXPRESSED IN HEART, SIGNAL =   1; EXPRESSED IN BRAIN, SIGNAL = 0.44; EXPRESSED IN FETAL LIVER, SIGNAL = 1.5; NT HIT: AY029277.1, EVALUE 0.00e+00; SWISSPROT HIT: O15075, EVALUE 1.00e-02; EST_HUMAN HIT: BF663289.1, EVALUE 1.00e-103
attcaaatggagcacgaaggagagttcacctgccacgctcagcaccctctgggctcccagcacgtctctctcagcctctccgtgcactgtgagtgggggaaaggggacacctgggtcccaggaaggggcccctgctgagtcctgtcctccctccccacagaccctccacagctgctgggcccctcctgctcctgggaggctgagggtctgcactgcagctgctcctcccaggccagcccggccccctctctgcgctggtggcttggggaggagctgctggaggggaacagcagtcagggctccttcgaggtcacccccagctcagccgggccctgggccaacagctccctgagcctccatggagggctcagctccggcctcaggctccgctgtaaggcctggaacgtccacggggcccagagtggctctgtcttccagctgctaccaggtgaggggactgtggggggctgaggttcagggagaaaggagacaggatcctagaaagatgaaggttcaaggttgtggggagag

SEQ ID NO: 8728 - DNA, 588 bp, Homo sapiens
  MAP TO AC008705.4; EXPRESSED IN FETAL LIVER, SIGNAL = 0.58; EXPRESSED IN HELA, SIGNAL = 0.51; EXPRESSED IN BRAIN, SIGNAL = 0.71; EXPRESSED IN BONE MARROW, SIGNAL = 0.59; EXPRESSED IN PLACENTA, SIGNAL = 0.63; SWISSPROT HIT: P25823, EVALUE 1.50e-02; NT HIT: gi7657414, EVALUE 6.00e-78; EST_HUMAN HIT: BF363040.1, EVALUE 3.00e-62
actctgagacacccagtggctctgtgtggtgactcaggggtaaggtgacactgagtgtgactgtgagctggcgatggggacttaccgggtctccagtggcacgttgctgtttagcacccagctgtcctgaagctgaacggactctggtgtggtggccaggtcattgggcgctggggccggggcgtggatctgactccgccgattggtcagtgagttcctgttgagggagttggcggacgagtggtgatgggacagcgtgtggttgtgagggggtgggagagggggcctcagagtcgactggctgtggtggttcggagggcctgaaaaaaaaaggagaaatgactgttagcgtctgcaaattccagtctcaggcactctgcaaaccactggaggagagtttcaaaccaaagtctctaagctgacaattgctgaaagctgcaagctagagcgacagataagactgcggcaggcatcccagagtcagttacaaataaataatgggctttgatttgcatttatccacacgcatcaaatgaagaataatgagaaactaatttagcaaaaccaggtggataagggctgaccaga

SEQ ID NO: 8729 - DNA, 572 bp, Homo sapiens
  MAP TO AC009145.4; EXPRESSED IN BONE MARROW, SIGNAL = 0.64; EXPRESSED IN BRAIN, SIGNAL = 0.9; EXPRESSED IN FETAL LIVER, SIGNAL = 1.7; EST_HUMAN HIT: AA903833.1, EVALUE 5.10e-02; SWISSPROT HIT: O77638, EVALUE 1.90e+00; NT HIT: AL163278.2, EVALUE 2.20e+00
tcactgagaaaggcatgcagcccataagcagagggtgaggtctcagctctgtcgccttctaaatcacaacataattggagccctgtttgtcttcaacctgaacactgatcatgtagaaggagcggtattggttactgtcctctccctctgccacctcctgccaatgcaagccagtgctgaggaatgtctggtccagggtaaccaaaaagaaggcgcacatactcttcatgtctaggaaataagagcctacggatttgggggaatccacacaacacctgctggagacgttttgttagtgacctccaggagcacaccacaaagaataacgcctttacttggaaagaacctcaaaggcagtgaaaagtcaaccaccgtaggaaagaatgttccagatttcaaatgatcagaatagctggctgtttaagaggtggtgccacttttacagttaactatataacatatggaaagcaggaggggaattttctggggaaatgagtcaaatttgtgtttcctctttagtattaaaatgatagctttacgtatttcatagatgtgccaatagcagagttgca

SEQ ID NO: 8730 - DNA, 540 bp, Homo sapiens
  MAP TO AL031713.6; EXPRESSED IN BONE MARROW, SIGNAL = 5.6; EXPRESSED IN PLACENTA, SIGNAL = 7.9; EXPRESSED IN HEART, SIGNAL =   7; EXPRESSED IN BRAIN, SIGNAL =   5; EXPRESSED IN LUNG, SIGNAL = 7.6; EXPRESSED IN FETAL LIVER, SIGNAL = 7.1; EST_HUMAN HIT: BI040410.1, EVALUE 6.00e-51; SWISSPROT HIT: P02995, EVALUE 3.90e+00; NT HIT: AL163209.2, EVALUE 3.00e-05
tcacccccatttatctccagaactcttctcaaaaccacaaactgaaactctgtccccattaaacgactccctattcccacccccagccccggcacctgcccttctactttctgtctctatgaatttgagtcctctaggtgcctcgcgcaattcgaatcagacagcatttgtccttttgtgactgattatttcactcggcgcactgcctttgaggctcatccacggagcacgtgccagaatttcctccctgtctgaggttggccactgtccccgtgcatgcgtggaccacatttggtttttccattcatcatcagcagacacctgggcggtgtccacagtctgagtccactcctgctgctgtcatagaataccccaccccttaataccatcacagtgaccatcagcttcagcataggaattctgggggcacattccgaccacagcacctaccttatggctacagtgagtaacgctgctgtgaacatgggtgtacatctcacaatcccacatgggttttgttggtggtggttgtgtgtgtgt

SEQ ID NO: 8731 - DNA, 591 bp, Homo sapiens
  MAP TO AC022150.5; EXPRESSED IN LUNG, SIGNAL = 0.85; EXPRESSED IN FETAL LIVER, SIGNAL = 1.6; EXPRESSED IN BONE MARROW, SIGNAL = 0.51; EXPRESSED IN PLACENTA, SIGNAL = 1.6; EXPRESSED IN HEART, SIGNAL =   2; NT HIT: gi12741314, EVALUE 5.00e-23; EST_HUMAN HIT: AW949157.1, EVALUE 6.00e-42; SWISSPROT HIT: O60810, EVALUE 1.10e+00
aggccctagggaagtctctgaagctgagcacagggtggactctccctcctgagtgaatggagaatagaaagggagaggatttctgttctgttctgtgggccgtcagcatgaaattgtacgttccgcccaggcagggctttgcattttacattcttgtttgcatccccgttccagacaattccagggctttcgaatcgtgcttcagccttcctgaccgctctcgcctccaaagcccgaaaaatagagtcgctgggagcgaggctgagagacgcacaggtcccgccccggccccgccctctgccggttctaaagggcaaggtctctccgcctggggccccgcctctacctcgatcaggccccgcccaccttctcgttggctccacccaggcctggctttagtcctgtgcgcacacatccgcgcagaccaggaagcggatcccgtggagtgaaggtcgcaccgcggcggtgagttttgctctgtgttgtattaagtctgcactccccatatccccggcacttccgtacctgggacgtggggtcaccacagacctgtaaattctcgcccatcttccttcaaccagagcaaatgca

SEQ ID NO: 8732 - DNA, 589 bp, Homo sapiens
  MAP TO AC010451.5; EXPRESSED IN BONE MARROW, SIGNAL = 0.9; EXPRESSED IN PLACENTA, SIGNAL = 0.46; EST_HUMAN HIT: AW889906.1, EVALUE 8.30e-01; NT HIT: gi14748953, EVALUE 5.60e-01; SWISSPROT HIT: P98167, EVALUE 1.90e+00
ttttgtctttggcataagttagaggtcaaaattcattttttcaatgtagatatcagattcacctagcgctacctatggagattctaagacttatcccactgattatcagtggtttcttcatcacaaaccaggtcaccatgtggtaggttggttgcagaaagatcctaataagtctccccatatctactccttcagttctataatttttacttctctccaactctgccttggactcagccatgtgacttacattaaccaattggatgcgaagaaaatcacatcaacgtacactaaatttccatgtgcctttttgcataattgggcttgctgggttttggctctctgcatttaccgtgatgacatgtgtggagggactgaggaatgtgagagtcccgtggatgagagcccagttgtctcagccattgcaactgaaaccatcataaactggtcacagccactgaccccaaacatgtcaggcagcccagcctccatcagcagaggcactcaccagacctgcagctgaccacaggtgagacctgcagttgaccacagatgcccaggtgagaatagtaaaactgcccagctgacc

SEQ ID NO: 8733 - DNA, 511 bp, Homo sapiens
  MAP TO AC002114.1; EXPRESSED IN BONE MARROW, SIGNAL = 0.39; SWISSPROT HIT: P46244, EVALUE 8.20e-02; EST_HUMAN HIT: AI986278.1, EVALUE 1.20e-02; NT HIT: gi13357558, EVALUE 7.60e+00
ttcagtgtgcttgccacttccttctttttgacagatatccaggttgcggtgacagttgcatacagtatcttaatttcaggaagagatggaattttccaaaattgactaacagtgaggagtgggaggttgctccaattaagcactcggtcctctctattgtattaaatttaaatgataaaaatattgtaactggtaatttggaaactgtttttaagtatagaaatgtctttgtctaaaactcttgtaaatcattaataagaaattaaaacatcccacttgagtacctttatctaatcccatttttccttcaagctcctcaggcttctgccaacaaagctttccattgcattgcttatttctattttgccaccattttttttcgcttgacctcccttattaattcagtaaagactgtaggccatcttccagggtatgtgctagaactacagtttaaaagatgagtaagcatagtacctcccttcaagaagcttgtggtccaatggagaatgct

SEQ ID NO: 8734 - DNA, 575 bp, Homo sapiens
  MAP TO AL031903.1; EXPRESSED IN HEART, SIGNAL =   1; EXPRESSED IN BRAIN, SIGNAL = 0.63; EXPRESSED IN FETAL LIVER, SIGNAL = 5.1; EXPRESSED IN LUNG, SIGNAL = 4.3; EXPRESSED IN BONE MARROW, SIGNAL = 1.1; EXPRESSED IN PLACENTA, SIGNAL =  13; SWISSPROT HIT: P05783, EVALUE 1.00e-71; EST_HUMAN HIT: BE621836.1, EVALUE 0.00e+00; NT HIT: gi4557887, EVALUE 0.00e+00
ctgctggctcaatgtctcagaactttggtttcattggtttcggacaccactttgtggtccactatcctgcgggtggtggtcttttggatggtttgcatgaagttgctgctgtacagggcatcaccaagattgaagtccttccttcttcccccaggtagtggtaggtggtgatctcagcctccagcttgaccttgatgttcagcagggcctcgtactcctgggcctggtgctgcccctctgcccgtgtctgtgctagctcagactccaggtgcagcaggaccccactgagttgcttcatctgcatggtgtagtgggcctctgcttccctcaggctgttctccaagctggccttcagatttctcatcgagtccaggttaatctccaaggactggactgtatgtctcagctctgtgagtatcatctcagcaactccgatctcagcagcctgcttggtgaccactgtggtgctctcctcaatctgctgggaccagtacatgtccagctcttctgggttcttctgagccagcttgtcgtattgggcccaggtgtctgtctggtcttgcagaggtcctgag

SEQ ID NO: 8735 - DNA, 524 bp, Homo sapiens
  MAP TO AC010328.4; EXPRESSED IN LUNG, SIGNAL = 1.6; EXPRESSED IN BRAIN, SIGNAL = 0.94; EXPRESSED IN BONE MARROW, SIGNAL = 0.89; EXPRESSED IN HEART, SIGNAL = 0.95; NT HIT: U78045.1, EVALUE 5.00e-01; SWISSPROT HIT: Q10586, EVALUE 3.80e-02; EST_HUMAN HIT: BF367069.1, EVALUE 1.20e-02
ctcactgaggcctgaaaagccccgcagaccctgtgtcctcagccagtgccgaggcgtccccaccgccttactccagctcccgggtcttccgcgctctacacatcaccggggcccggtggccatcctgggcaggggctttgccttccagcaggtgatgcgctcgcagtcaggggtcctggattcccttcaggaagggtggcgagaagttcagaagctaagtgggccatgaaggaggcactccctaaacagcgggggaattttgcaggggactgtgagtggagagacaaggggacaatggcagcctccctcatgagatctggggcctctctttttcttggacatcctccgccagctcaatccggccaatcttcacctgcctttaaactggattccatggtgtccccaaattgggggcaattccttccagcatggccaacttctagaatctagacttgaggcccactgtcctgcagatagcagtttgtgtccattcctgccgcatcgcttgtgtccagaggcctttc

SEQ ID NO: 8736 - DNA, 593 bp, Homo sapiens
  MAP TO AC008762.5; EXPRESSED IN BRAIN, SIGNAL = 0.51; EXPRESSED IN LUNG, SIGNAL = 0.96; EXPRESSED IN BONE MARROW, SIGNAL = 1.3; EXPRESSED IN PLACENTA, SIGNAL = 0.9; NT HIT: gi14141151, EVALUE 1.00e-103; SWISSPROT HIT: P52272, EVALUE 1.00e-07; EST_HUMAN HIT: AL046033.1, EVALUE 0.00e+00
accccagacacaacaagaggaaggtgtcagtgcacttctgctcgtacagtcttactctgcaccaaaactgcataaaataaaccaacggagaatgcagactcggttactgcttgtggaaacacctgcgaaactcaggaatcacagccccaacgagaccacggtcaagcctgtgacttaggaatgcagacaaagcccgcctataaggctgatttttaaagaaatcaagaacaaaacccttctttacatttttcttctcaaatgtgagaattacttttataacatattgacaaggtcatttcataaagttctgattttctactttagacgatggttctgtttacttacatttgctacaaatactgtgcttccaagtcttccagcctgtaatgcatggataatctcatttgggatgttgggattatttaggatactgggtgggatagtaatcattcctgggccacctggtcccatacccatcccaccagtcgtagccatcaccttttgcattgctctcctggcatgttcaccatcaggatcctaaaacaagcacaaaaggtgttacgtttaactgacccagtacaacgcaaaccatg

SEQ ID NO: 8737 - DNA, 503 bp, Homo sapiens
  MAP TO AC011891.2; EXPRESSED IN BONE MARROW, SIGNAL = 2.2; EXPRESSED IN PLACENTA, SIGNAL = 1.8; EXPRESSED IN HEART, SIGNAL = 1.6; EXPRESSED IN FETAL LIVER, SIGNAL = 1.5; NT HIT: AF272746.1, EVALUE 2.00e-03; EST_HUMAN HIT: AW405882.1, EVALUE 4.00e-27
tgcactgtcgaaaagtcagctccgaaattgctgcaatgataagtttgctgaactgcatctctgcccaatgccacttcctcgcaaagacaacccacagtgtagtccactgctgcctcctttggcctctgttggtaagaaaatggctaagaaaatcgctgctgctcctccacctccacctcctcctccatcagaacggcgaggcaaacgcgcagaacagaaaggggctgtggggcagcggccagattggattttctctccgcagccccaaagggatgtttctaatgacccaaggaaaattagtggtggtcctggaactgttcatctaagtctactagtcatcaaatgcaaaatgcttttcattggatgattctgactaaattttgtctttgatcaataagttcacaaatatttattgaacacctaataggcagtagacacaattctgtgtgcttggggataaaatggtgagcaaaatacactgtccctgcccttgtggaatattg

SEQ ID NO: 8738 - DNA, 579 bp, Homo sapiens
  MAP TO AC003980.1; EXPRESSED IN BONE MARROW, SIGNAL = 0.61; SWISSPROT HIT: P08547, EVALUE 1.00e-12; NT HIT: AJ271735.1, EVALUE 1.00e-26; EST_HUMAN HIT: BG176786.1, EVALUE 2.00e-14
gtgaatccatctggtcctgggtttgttctgggagtggagggtggatttcttactactgatcaaatctctctacttattatgcatctgttaaggatatctatttcttccagttcagtcttagggggttatatgtttccagaaatgtatccatttcctctaggttttctaccttgtgggcatacggatgttcatagcagtctctgatgatttattgtatttctgtgatatcagttgtaatgtctcctttttcatttctgattgtacttacatgaatcttcattctttccttggttattctagctggaagtctgttgattttgtttaccttttcagagaataaacttttaattatgttgatgctttttattcctttgctcaatttcatttagttctgctctgatctttttcttttcttctgcaagctcgaagtaggtttgttcttgtttttctagttccttgaggtgcaacattagtttgtgaatttgtggtctttttatcctttttatgtaggcatttaacactacaaaattccttttaatgctgcttttgctgtatcccagaggtttggggaccattgta

SEQ ID NO: 8739 - DNA, 589 bp, Homo sapiens
  MAP TO AC010389.6; EXPRESSED IN BONE MARROW, SIGNAL =   1; EXPRESSED IN PLACENTA, SIGNAL = 0.85; EXPRESSED IN BRAIN, SIGNAL =   2; NT HIT: gi13642475, EVALUE 0.00e+00; SWISSPROT HIT: Q08211, EVALUE 4.00e-10
aacgtgtttacccagcaacgtcttcagaaataaaatgacagtaatagtacctggaatgctctgagaagtgccatatggtcactgaaagctcctgcagtaaaacgtttcctacaaagcatagctgcacgtttttgagaggcctgagtaggtagtacaaaaggatctcgataagctagtgtgcaagcaattgtaaggatggggtccagacactttaaaacaacagcacacaagaccattttaccaagatgtggttctactggcaagtcagccaaatgatacccaagttcagtcagatcttcccatgtatccattgcatctattgtctaagtaaaaggagacagaacagactttgatgtgagcaaactgtttaatcaaaacacataattaaaaacccctaaatgagaaataagaatatagattttcttttgctactacatctcataaaaatatatttcgtttctattatactatataaaagaactatatctactgtttcatacatgacaatattatttaaagtacatgatcatttaagataattgtttaaaagtacaaaattagtttatctggacacatgcaggaggacaaa

SEQ ID NO: 8740 - DNA, 547 bp, Homo sapiens
  MAP TO AF004877.1; EXPRESSED IN BONE MARROW, SIGNAL = 1.1; EXPRESSED IN PLACENTA, SIGNAL = 2.6; EXPRESSED IN HEART, SIGNAL = 1.5; EXPRESSED IN BRAIN, SIGNAL = 0.93; EXPRESSED IN FETAL LIVER, SIGNAL = 2.1; EXPRESSED IN LUNG, SIGNAL = 2.7; EST_HUMAN HIT: AU117263.1, EVALUE 0.00e+00; SWISSPROT HIT: Q01149, EVALUE 5.00e-03; NT HIT: AF004877.1, EVALUE 0.00e+00
tccatgctttctatctgggctaagagacttatccttgaaaaatgtttgtgggtaaacattttttactctctgcttcccattgtcctatcctcttctccatgcctgccatccttaagaggactgaagcaggttatagaggaatcgcagctgtgcactcccactaccctcatctcttcagtcaccatgtcattaacagcatctctctctgctatattctccctcctttcaatagcccagccttctttgtgtttcaaagcaggcaagaagcctgtctagctagctgtttaaattggaattcttctagagtttgattcttcattttcttctttctccactaaaattgatttcacatgtgtttgactcaagggtgaacctggtgtggttggtgctgtgggcactgctggtccatctggtcctagtggactcccaggagagaggggtgctgctggcatacctggaggcaagggagaaaaggtacgtgttgacccctattacatattgttgatgaactctagtaaagaaggctgcacaaggatgcccaagtttt

SEQ ID NO: 8741 - DNA, 562 bp, Homo sapiens
  MAP TO AC016830.5; EXPRESSED IN FETAL LIVER, SIGNAL = 0.64; EXPRESSED IN BONE MARROW, SIGNAL = 0.46; EXPRESSED IN PLACENTA, SIGNAL = 0.71; EXPRESSED IN HEART, SIGNAL = 0.93; SWISSPROT HIT: P10637, EVALUE 9.30e-02; EST_HUMAN HIT: BE185067.1, EVALUE 7.90e-01
cgctgtcacctctcaatgtggctgataaggtagacttgggtggggtaggggcagcccaacaacccgttcaaagagcttgaggcacgttcctcttctgctctcaccgcttttccttctccctggtgctgcagagcatcccacagtttgtgtgcactgcctccccacactccctcctcatctcactctgcctggctcatgtctccaccatcccctcttgtggctcctcaggaggctgcccctgacctccatcttccccagggcagtagggaatcaccccatgtcgcctcccctggcctcttgcatgtcttgacacagagcagcaccctctctcaaagcgcttcttctccaggccttccaggcccacagccgacccataagctcctctctcaatggctacagcctccgcctcctgtactgcctcctcctcctgttctctaattgtcctgggtctttccaccacttctgtctccacattgtggtcctaggctcctccaccccagggctttaagaaccacacacatgctaatgactctcacctttgaccttctgctgatcttccagc

SEQ ID NO: 8742 - DNA, 515 bp, Homo sapiens
  MAP TO AC006930.1; EXPRESSED IN HEART, SIGNAL = 3.4; EXPRESSED IN FETAL LIVER, SIGNAL = 2.5; EXPRESSED IN BRAIN, SIGNAL =   4; EXPRESSED IN LUNG, SIGNAL = 4.7; EXPRESSED IN BONE MARROW, SIGNAL = 4.6; EXPRESSED IN PLACENTA, SIGNAL = 3.8; EST_HUMAN HIT: AW732958.1, EVALUE 8.00e-50; SWISSPROT HIT: P06333, EVALUE 9.40e-01
gagcgggcagaattcagtaggtgctgaatagttgcacgtggaatgcgtgaatgtgcatggaatggaggctatgaagcaggaggtggggcagggaggcctcttgcccagatccaaacccctgtccctgtttctcccgtcagtccccggaggccagctccctgcacatcctggagagacaggtaggtgggaaggtggggaggagccggtcctcctgctgcccagcctttcctcccagaggcagctgagcctccactgctgctcccaggtgcaagagctacagcagttgctggtggagagacaagaggagaaggagagcctgggacgggaggtggagagtttgcagagccggctgtccctgctggaggtaggagcagtgatgagtcagggctgggctggggctgggtcggggaacttctctcctacagcagcgacaagacagtcacaccagtgcatgcacagcctcacacacgtgcaaacacacgcaccagacacatgcacccacaaacccacagtct

SEQ ID NO: 8743 - DNA, 524 bp, Homo sapiens
  MAP TO AC008901.4; EXPRESSED IN BRAIN, SIGNAL = 0.68; EXPRESSED IN LUNG, SIGNAL = 0.8; EXPRESSED IN BONE MARROW, SIGNAL = 0.58; EST_HUMAN HIT: BG219760.1, EVALUE 0.00e+00; SWISSPROT HIT: P19883, EVALUE 2.00e-41; NT HIT: M19480.1, EVALUE 0.00e+00
aagtgccttttgaaagctggatgcttcagtgtcatgatttccttggtaacttcaagtgctcactccctaaggactagaaggtacctattcatgtgtgtttccttctttgttccagagacttgtcgggatgttttctgtccaggcagctccacatgtgtggtggaccagaccaataatgcctactgtgtgacctgtaatcggatttgcccagagcctgcttcctctgagcaatatctctgtgggaatgatggagtcacctactccagtgcctgccacctgagaaaggctacctgcctgctgggcagatctattggattagcctatgagggaaagtgtatcagtaggtattctggattgaggaaggaaaaagagaaaacaggctagttctattattaaactgtggggttaactaataagtaaagcccaaggcgtccccaaacaccatagggagaaatacgctgcaatttggggaaagtgttgtgaccacagtattcctcatggaaaccattgtcttctggaggcat

SEQ ID NO: 8744 - DNA, 595 bp, Homo sapiens
  MAP TO AC003968.1; EXPRESSED IN PLACENTA, SIGNAL =  11; EXPRESSED IN FETAL LIVER, SIGNAL = 9.8; EXPRESSED IN BRAIN, SIGNAL = 8.3; EXPRESSED IN LUNG, SIGNAL = 4.3; EXPRESSED IN BONE MARROW, SIGNAL = 3.9; SWISSPROT HIT: P54259, EVALUE 5.80e+00; NT HIT: gi11497452, EVALUE 2.20e+00
agaaattgggggtttggttcttagccatgcctgtggtgtggtattgtgattgcagaagatgaaagactcattcaaactgcaaatgaggcattctgattctttatatgtgttcttacatatatgtttctagatttttatttctcttattttctctatatatgttttctagggatgctaaaggaaccaaacagatacccaatccttctaatgatgagatgtcacagccattcccaatgccgtatcttcccacctgtgcttcatcccatgccaccaccagtaataattggaatcatcatggtaatgattccagtccccttctaaataaggtcattcttgtactcctcaaatatatgagcaatatagtctcaaaatcctatgttaagtgtatatttcattgacgctgtttcttgaagtctgtcaggtgtccaaaaggtatctaaattatatactcaaataagaataattcaaaacatggattaacatggaaactatttacaaagatatgtataggacagagggaaaacagaaaaggtacagaaacccaggctagtgaaagtgcaaatttaataatcctaggtccaagtggatgagaagg

SEQ ID NO: 8745 - DNA, 554 bp, Homo sapiens
  MAP TO AC004509.1; EXPRESSED IN HEART, SIGNAL = 2.2; EXPRESSED IN FETAL LIVER, SIGNAL = 1.3; EXPRESSED IN BONE MARROW, SIGNAL = 0.96; EXPRESSED IN PLACENTA, SIGNAL = 1.6; NT HIT: gi14778081, EVALUE 0.00e+00; EST_HUMAN HIT: BE932404.1, EVALUE 0.00e+00; SWISSPROT HIT: Q92793, EVALUE 3.00e-24
aaatcattcgtgggcttctcccttttacttacctctcgtttttgtctgtctgtctgtttgtcgttatagccatcctggggtctccagctagtggaattcaaaacacaattggttctgttggcacagggcaacagaatgccacttctttaagtaacccaaatcccatagaccccagctccatgcagcgagcctatgctgctctcggactcccctacatgaaccagccccagacgcagctgcagcctcaggttcctggccagcaaccagcacagcctcaaacccaccagcagatgaggactctcaaccccctgggtaggtgaaggaactctcaacttcgttcttacttgtccacatgcagcaaagggaatggagtgatggaacccaaggcagttttcagtttgttttgtgttttttactacggtggttgaaataaaaaatctcccaggaaaaagctgaagtatctgatgcaaggaaaatgttacatgcttataaaaagagcagcatttgcaaatgaagcaatgtttttgttgcttgctgtgccacttctgtctgga

SEQ ID NO: 8746 - DNA, 516 bp, Homo sapiens
  MAP TO AC016639.5; EXPRESSED IN BRAIN, SIGNAL = 1.2; EXPRESSED IN FETAL LIVER, SIGNAL = 2.4; EXPRESSED IN BONE MARROW, SIGNAL = 1.1; EXPRESSED IN PLACENTA, SIGNAL = 1.6; EXPRESSED IN HEART, SIGNAL = 2.5; EST_HUMAN HIT: AL556911.1, EVALUE 4.60e-02; SWISSPROT HIT: Q64060, EVALUE 3.00e-23; NT HIT: gi9507236, EVALUE 1.00e-81
gtttggacatgtggggaaagacttacagtcttcccagaccctgtttgagcgcaagccatcaaatctcgtcctgcaagtatgataggaatactgtatttttgcacaggagtaagcttagtataaccagctttagcaatgttgttattcagtgtctgacagagattagcttcttcaaaagtctgaaaatttaaaaaaaagcagtgattacattctatatatcatatgcagatcatttataagcatatttcattcgagctactttccaagttctgttaattctactttatatactaaagtgactttagtaacatgcctccactcagaagtaaatattcaaagcctgtatattataatatgatttgacagaatcatgaagtattctccacaaatggtggctttaaaaacatttttcctgcccccttaaaacctatgagatatgaagaattctgctcagtaatggcttgttctaagtataattatcaataggagacagagggctccccctctcagaaaaat

SEQ ID NO: 8747 - DNA, 563 bp, Homo sapiens
  MAP TO AC004143.1; EXPRESSED IN HEART, SIGNAL = 1.5; EXPRESSED IN BRAIN, SIGNAL = 1.5; EXPRESSED IN BONE MARROW, SIGNAL = 1.5; EST_HUMAN HIT: BI907137.1, EVALUE 4.00e-58; SWISSPROT HIT: P26675, EVALUE 7.00e+00
aacacccaccatctctcaggatctcgccgtatcttaccacctccccttacccccccaggaccgagtctcctgccattccgagcaggcctggtatgggtaatggtgtgaaggaaggcccggtgcgattgcatgaggatgctgaggctgtcctgtcctcgtccgtctcatcaaaggcaagtaccccggcctcctgggatgggtgttctcctggggccccagcctccccaccccccctcccaggctccctgcctcctcctcccagcctctgcaccccctccaaacaggctcagggattcctctgctgtgctccatgcagcccatcacaaatcaccctgtacctaggatgtgcatgttggtaccccttcctacctgggctgagggtggagtggtggagcctctctgctcccacggccccaaatactccatcatgggatggaggacgccagccaccctctattccaccaaaagccccacttgtgatgtgaatccaaccagcccagccacctggtaagaggccaaaacctaacccagttccagcgtggggtgggaagcctgaggtatca

SEQ ID NO: 8748 - DNA, 525 bp, Homo sapiens
  MAP TO AC004391.1; EXPRESSED IN BONE MARROW, SIGNAL = 0.53; EXPRESSED IN PLACENTA, SIGNAL = 0.53; EST_HUMAN HIT: AI277520.1, EVALUE 4.70e-02; SWISSPROT HIT: Q9VPH7, EVALUE 6.40e+00
cgtggattgaagatggtgacatgttttcaaagacctgattcttttgaaggaggaaagagattcaaaaattttttttaaagcctaaaggtagaaatgagcaagtaacagtgcatctaatgtattatacttctctagaacctggggtagttggagagaaacaacaaaatcagcctatacttgaatggactccaaagagacattatgtgctcaatgtccagccaggtcctactgagaataagaagacaaagggcaaaccaagtttagggatttttgatgaaatagtatgggagtttggtgagggaggactgaattcgagagagcttgttgaaggagtctggtaaagtgagaaatagaaatagaaatagtatgggagtttggctcaaccacaaggagatatattgaacaatatggaaataacatctttggagatttaaatcacctgagatggttttatgtcatggcaactgcaactgaactgagaatggaaggaaggcatgatgggattgggccaacaattttctagga

SEQ ID NO: 8749 - DNA, 519 bp, Homo sapiens
  MAP TO AF205588.1; EXPRESSED IN BONE MARROW, SIGNAL = 0.65; EXPRESSED IN PLACENTA, SIGNAL = 0.75; EXPRESSED IN FETAL LIVER, SIGNAL = 0.57; NT HIT: AJ245588.1, EVALUE 0.00e+00; SWISSPROT HIT: Q06730, EVALUE 1.00e-30; EST_HUMAN HIT: AL568291.1, EVALUE 1.20e-02
gcatacacccacttccttccataaaaataccttgtaaatgtgacttatgtggtatgagtttgcaatacatttcagatttatttaatagtaagaaaaactatttaagaaagatgcctcatgacctcagtgcatatggaaaactattcctcaatagtaaccatgaaaaaactcatatggaagagaaaccttatgagtttattcaaaatggaaaatgtctcagtcataaggaggacttcatttcatatctgagaattcaaaatttagagcaatcttttgaatataaggaatgtgaaaaggatttctatggaaaggcagttttcattacatataagcaagcttacacaggagcgagtccttgtgtacacaatgaatgtaataaagtgttctgtaataattcaactctcatggtccataaaatgtcagaaaaaagagaaaacttttatgagtttaatgaatatgaaaaaacctttgagaagtcccctttcttgaaacataaagttcatttggaggtgaaacact

SEQ ID NO: 8750 - DNA, 587 bp, Homo sapiens
  MAP TO AC008563.4; EXPRESSED IN HEART, SIGNAL = 1.3; EXPRESSED IN FETAL LIVER, SIGNAL = 1.1; EXPRESSED IN BONE MARROW, SIGNAL = 0.88; EXPRESSED IN PLACENTA, SIGNAL = 1.3; SWISSPROT HIT: P12684, EVALUE 4.30e+00; EST_HUMAN HIT: AW959481.1, EVALUE 0.00e+00; NT HIT: AF276423.1, EVALUE 0.00e+00
gccttgcacacagttcagtcatgtatatgaaatccaaaaataaacctacaatctatacaaaaacaacacaggtttgtttttgtagccttgattgctatgtttaaaaacctaacaagttttatatggtatgaattcaacagtctcctttatattctgtacagtggttctttccctctaaccacaagttccattatttcattaatgtacaaatttgaacataattttttgagttcttctttatatataaaaatagtcaaaatattaatttcccctgtaagtatcttccaataaatcttgctgtcttccccgctttttttgtccacagtgcttatgaggaaacttctcgtacaatgatgagttcaactgtattctggaaagtttttagcaaggacactgcttgtccatgttcaatatttataaaactgtagccattagcctagaagaggaaaaatgcttttaggaaaaacattttatagttatttatttgcatttctgccaagtagttcacaaacttggaagaaaataagaatcactttggcaacttaaaataacatacagattcacaggccctacccaaaccaaggaat

SEQ ID NO: 8751 - DNA, 501 bp, Homo sapiens
  MAP TO AC022073.13; EXPRESSED IN HEART, SIGNAL = 3.8; EXPRESSED IN PLACENTA, SIGNAL = 4.3; EXPRESSED IN LUNG, SIGNAL = 7.1; EXPRESSED IN FETAL LIVER, SIGNAL = 4.1; EXPRESSED IN BRAIN, SIGNAL = 4.4; EXPRESSED IN BONE MARROW, SIGNAL = 5.3; NT HIT: AL163249.2, EVALUE 1.00e-124; SWISSPROT HIT: Q02817, EVALUE 4.00e-03; EST_HUMAN HIT: BG773035.1, EVALUE 0.00e+00
actctttgggtccacattgcctttatgagctgtaacactcaccacgaaggtctgcagcttcactcctgaagccagcgagaccacgaacccaccgggaggaacaaacaactccagacacgccaccttaagagctgtaacactcaccgcgaaggtccgcagcttcactcctgagccagcgagaccacgaacccaccagaaggaaggaactccgaacacatccgaacatcagaaggaacaaactccagacacgccgcctttaagaactgtaacagtcaccgcgagggtccgcagcttcattcttgaagtcagtgagaccaggaacccaccaattccggacacagcatcaggcaagttttcaagcccctcttaccctccacctggaaacaaactcagggctgttgcggggacatggtggaagtgagacctgcctttcactttgcatgggagctgggtgaggcctgtgactgctagctttcccccacttccctgacaacctgcatt

SEQ ID NO: 8752 - DNA, 535 bp, Homo sapiens
  MAP TO AC016630.5; EXPRESSED IN LUNG, SIGNAL = 1.8; EXPRESSED IN BONE MARROW, SIGNAL =   3; EXPRESSED IN PLACENTA, SIGNAL = 2.5; EXPRESSED IN HEART, SIGNAL = 3.5; NT HIT: AJ277113.1, EVALUE 0.00e+00; SWISSPROT HIT: O14177, EVALUE 2.00e-03; EST_HUMAN HIT: BF127821.1, EVALUE 1.00e-98
gagggaaaaggaaccctcaggagtgagcctggggcctttcttttaccatttacagatcaagagaagtgaggaggaccttacaaaggagcccagggagttggtggcccaagaggcagaggagggttaggtcagaaggagggagggaccagtgaccattgggttagccagagtctctggaaacttcaagtggaattgcaaattgggctggtggggagggacaaccaactaatggggtgtcaagaagtgtaggataatctcattcctgtgtccttgatacccttgtctactctgcaggatgctgttcgcatcatggcaaaagacttggtgcgcacccggcgctatgtgcgcaagtttgtattgatgcgggccaacatccaggctgtgtccctcaagatccagacactcaagtccaacaactcgatggcacaagccatgaagggtgtcaccaaggccatgggcaccatgaacagacaggtgcgcttttcccaatcccccttcccactcccacgacccatggggatcacactcacactcc

SEQ ID NO: 8753 - DNA, 578 bp, Homo sapiens
  MAP TO AC010168.6; EXPRESSED IN BONE MARROW, SIGNAL = 7.1; EXPRESSED IN FETAL LIVER, SIGNAL = 7.6; SWISSPROT HIT: P02263, EVALUE 2.00e-59; EST_HUMAN HIT: BE731542.1, EVALUE 0.00e+00; NT HIT: gi14754397, EVALUE 0.00e+00
ccatgacatccagcacattcaaaagcattgcgggacgaccatgaaaagggcctttgctgggggagccagctccctgagggcggcgtcagggtcatttgctcttcgtcttctgactctccgtcttcttgggcagcagcacggcctggatgttgggcaggacgccgccctgagcgatggtcactttgcccagcagcttgtttaactcctcgtcgttgcggatggcgagctgcaggtggcggggaattatcctggtcttcttgttgtcacgcgcggcgttgccagccagctccaggatctccgccgtaaggtactccaacaccgccgccaggtacaccggcgccccggcgcccactcgctccgcgtagttccctttgcgcagcagtctgtgcactcggcccaccgggaactgcaggcccgcgcgggaggagcgggatttggcctttgctcgcactttgccgccctgtttcccgcgaccggacatgatcacctctcgcctacaactccagagacggagacaaaccgctctcggcgtccggtaccggaatgcaacgtaccgcacccgaactgcctctacaaac

SEQ ID NO: 8754 - DNA, 556 bp, Homo sapiens
  MAP TO AL121928.13; EXPRESSED IN BRAIN, SIGNAL = 0.98; EXPRESSED IN LUNG, SIGNAL = 2.2; EXPRESSED IN BONE MARROW, SIGNAL = 1.2; EXPRESSED IN PLACENTA, SIGNAL = 1.1; EXPRESSED IN FETAL LIVER, SIGNAL = 1.2; EST_HUMAN HIT: AL120943.1, EVALUE 2.00e-93; NT HIT: gi14746304, EVALUE 2.00e-93; SWISSPROT HIT: Q00653, EVALUE 1.00e-27
gaggtagtcagaactgcggctgtctccccaggtgaagaccttgctgctaaatgctgctcagaacaccatggagccacccctgaccccgcccagcccagcaggtgagaagcatcaggcatccccagcccgactcctctgactcctcacagaggtctcttctccttcaggacctctgaaggaggcctccctttctctaccctcagccccgtccatcacccctcatggtcctgtctgtcgcttaccttgggagaaaggcagtgttcaggtgtccatgtccccacccaactctggaggtaaatgacatgtctgtatgtgtgtccccctaagggccgggactgtcacttggtgatacagctctgcagaacctggagcagctgctagacgggccagaagcccagggcagctgggcagagctggcagagcgtctggggctgcgcagcctggtagacacgtaccgacagacaacctcacccagtggcagcctcctgcgcagctacgaggtgggttggcctgtgccctgccccctccccagcctcctttcccgatctgagtccag

SEQ ID NO: 8755 - DNA, 553 bp, Homo sapiens
  MAP TO AC010389.6; EXPRESSED IN FETAL LIVER, SIGNAL = 0.84; EXPRESSED IN LUNG, SIGNAL = 1.3; EXPRESSED IN BONE MARROW, SIGNAL =   1; EXPRESSED IN PLACENTA, SIGNAL = 0.78; EST_HUMAN HIT: AW857917.1, EVALUE 1.00e-55; NT HIT: AJ278581.1, EVALUE 7.00e-93; SWISSPROT HIT: Q10731, EVALUE 3.00e+00
ctggatatcccttcccttcctcagggtgtggacctcaacctcatttttagggcataacatctttattggacacaggtaaagtcccaatactaacaggagactgcttaggactctaaaatgttttcaagagtgcatcagtaagggccactaaatctgatttttctcagtcctctttgtggtctaggaggacaggcaagggtgcaggtttttgagaatccattggtaagcgccactaaatctgaccttctgggtcctccttgtgatctgggaggaaaactagtgtttctgctgctccatcagtgagcgcaactattccaatcagcaacgtccagggactgctgcaggttcttgggcaggggttatttctgctgatgcattgttgggcacaactattctgatcagcagggtccagggaccgttgtgggttcttgggcaagaggtgtttctgctgctgcgtcggtgagtacaactattccaatcagcagggtccagggaccattgtgggttcttgggcagggggagaaacaaacaaaccaaaaccacaggcagtttt

SEQ ID NO: 8756 - DNA, 600 bp, Homo sapiens
  MAP TO AC004826.3; EXPRESSED IN BONE MARROW, SIGNAL = 1.1; EXPRESSED IN FETAL LIVER, SIGNAL = 0.61; SWISSPROT HIT: Q9H1J5, EVALUE 1.00e-107; EST_HUMAN HIT: AI741277.1, EVALUE 1.40e-02; NT HIT: gi14781158, EVALUE 0.00e+00
ccattctcttttgtgttctctctatgaaggcagtgagagccaccatgaaaaggacatgcaaatgtcatggcatctctgggagctgcagcatacagacatgctggctgcagctggctgaattccgggagatgggagactacctaaaggccaagtatgaccaggcgctgaaaattgaaatggataagcggcagctgagagctgggaacagcgccgagggccactgggtgcccgctgaggccttccttcctagcgcagaggcggaactgatctttttagaggaatcaccagattactgtacctgcaattccagcctgggcatctatggcacagagggtcgtgagtgcctacagaacagccacaacacatccaggtgggagcgacgtagctgtgggcgcctgtgcactgagtgtgggctgcaggtggaagagaggaaaactgaggtcataagcagctgtaactgcaaattccagtggtgctgtacggtcaagtgtgaccagtgtaggcatgtggtgagcaagtattactgcgcacgctccccaggcagtgcccagtccctgggtaagggcagtgcctgataataccccacacaagttcacttga

SEQ ID NO: 8757 - DNA, 511 bp, Homo sapiens
  MAP TO AC007793.1; EXPRESSED IN HEART, SIGNAL =   2; EXPRESSED IN LUNG, SIGNAL = 7.5; EXPRESSED IN BONE MARROW, SIGNAL = 2.8; SWISSPROT HIT: Q03350, EVALUE 4.60e-02; EST_HUMAN HIT: AL532400.1, EVALUE 0.00e+00; NT HIT: AF114156.1, EVALUE 0.00e+00
ggccttagctgctttcctgcggggcagggctcgggacctgcagcccgccatgcctgagcctcccacccactccatgggctcctgtgcggcccgagcctccccgacgagcaccaccccctgctccacggcgcccagtcccatcgaccacccaagggctgaggaatgcgagcgcacggcgcaggactggcaggcagcttcacctgcagccccggtgcgggatccactaggtgaagccagctgggctcctgagtctggtggggacgtggagagtctttatatctagctcagggactgtaaatacaccaatcagcaccctgtgtttagttcaaggtttgtgagtgcaccaatccacactctgtatctagctgctctggtgaggacgtggagagtctttatatctagctcagggattgtaaatacaccaatcagcaccctgtgtttagctcaaggtttgtgagtgcaccagtcgacactctgtatctagctgctctggtgaggacgtggagaacat

SEQ ID NO: 8758 - DNA, 563 bp, Homo sapiens
  MAP TO AC004858.2; EXPRESSED IN BONE MARROW, SIGNAL =   1; EXPRESSED IN HELA, SIGNAL = 0.95; EXPRESSED IN FETAL LIVER, SIGNAL = 0.59; NT HIT: AF109907.1, EVALUE 0.00e+00; SWISSPROT HIT: P49768, EVALUE 5.00e-35; EST_HUMAN HIT: AL553513.1, EVALUE 0.00e+00
aggccttcaaggtgatgatgacatgctgtaaagaaaagccacactggctttgagaataataaaacaaaactcatacgtacagctgcccatccttccgggtataaaagctgactgacttaatggtagccacgaccaccaccatgcagagagtcacagggacaaagagcatgatcacatgcttggcgccatatttcaatgtcagctcctcatcttcttcctcatcttgctccaccacctgccgggagttaccctggggtcgtccattagataatggctcagggtggccaaggctccgtctgtcgttgtgctcctgccgttctctattgtcattctataagcacaagaaaaacattttcagtaaatcagattctcagcagaatcaaggtaacggttagacctgggattaacaacagacccgtcactatgagttctaaaaacctgaagcaagaaaaaacaatgtacaggaagtatgcagtttaaaagtctagattatctatcattgttcactgaaggcattcaggtcctctcttttacctgggtcttggcttgctccattctctctg

SEQ ID NO: 8759 - DNA, 548 bp, Homo sapiens
  MAP TO AC010336.5; EXPRESSED IN FETAL LIVER, SIGNAL = 0.5; EXPRESSED IN BONE MARROW, SIGNAL = 0.5; SWISSPROT HIT: P32886, EVALUE 4.00e+00; EST_HUMAN HIT: AI751672.1, EVALUE 0.00e+00; NT HIT: AJ276505.2, EVALUE 1.30e-01
acatgctgctgtgagaggtgttattctcatggctgagttacccagcattctcagcctggctcaaattccaaagctggcctgccttccttgaggtttctggcttgaagacaaggctggggaagcttctctggacggaatggagctgaattttaaaatccagctctagaaatcccatcatacagtcggtcctgctcttgatggggcgggctatatgggcggtggggttgggtgaactgctccttagcctggaaggaaaacagggaaggttggaggagacatgggactctggtcccagtaatgaggacaagaaaagaaaggggaaaccggagaagtggacatttctggtcgagcaggaaaagtgagtggcagggcaaccactaagacaaagtgatggaaggaagtggggagggcgggagagtctggagggaaagattcgctcaggaggctgagagaagaggaggaagaaagacccagactgcagtgagtttgcagtcagtccctatcacgtccagaaaagcccagagataagggatggaaaagaattgggt

SEQ ID NO: 8760 - DNA, 585 bp, Homo sapiens
  MAP TO AL049764.4; EXPRESSED IN BONE MARROW, SIGNAL = 4.1; EXPRESSED IN PLACENTA, SIGNAL = 4.3; EXPRESSED IN HEART, SIGNAL =   3; EXPRESSED IN BRAIN, SIGNAL = 3.9; EXPRESSED IN FETAL LIVER, SIGNAL = 4.4; EXPRESSED IN LUNG, SIGNAL = 4.1; SWISSPROT HIT: O43808, EVALUE 8.00e-21; EST_HUMAN HIT: AI884829.1, EVALUE 0.00e+00; NT HIT: gi14779117, EVALUE 0.00e+00
tcctagaacctgggggagagttcagggaaagagaacagctggtatatttaagaaagatttaaatagaaaacattacacatgagagcaaaatagtccatttctcttaagaaaaccaataaacactcacaaactttcatttttaggttttcagcaatgtttttttcacattagtccaactgccaccccaaaatccaaccagccagcatgacaattaaggtgacaacaggtccagttggccatactccctgtgcacccttggatgcttttcaagccaatgagggtaacatttgtggtggcaggagccagagtcaagggagaatcacttctcttcactcaggaggaaacctccctcttgagcatcttcggaatttttcatgggaaggcgtctcagtgttggtgtgcacgcttcagccccataactgtgaaggtggcagctgtcagtttctcataaacaaggaacatgagagcagcagtgaggactgtctgcagcagtttggcttcaaggcctttgtagagtcccattattccaaaacgtctaaagggaaagaggtttgaaaaaacagaagtcagctcctgcatcagaga

SEQ ID NO: 8761 - DNA, 547 bp, Homo sapiens
  MAP TO AC025436.2; EXPRESSED IN FETAL LIVER, SIGNAL = 1.6; EXPRESSED IN BONE MARROW, SIGNAL = 0.64; EXPRESSED IN PLACENTA, SIGNAL = 1.3; SWISSPROT HIT: O29366, EVALUE 2.30e+00; NT HIT: gi14861873, EVALUE 0.00e+00; EST_HUMAN HIT: AA357177.1, EVALUE 7.70e-01
aatgttccagcctaaaggggggaaaaatcctaataaaatcttcacaaatccctttcccttcttttcatcctctttcagttcgactttgcttacacaagaaacagctgcctccccttgcggaagtcggaagccaagcgcatttcaaaacagcttctgtggccgcaatttttctcaggctcttacagaatagatttcaaaacagttttaattaattcaataaaaagttcagctaaacttaggtatcaattggtcgctcagttagtgcagtacgcagaaagacaagaaagtccgcggaatccgctaagaccgagactacctgaagtcgctgtggctagcacttccggtaccggccctaaaagcggtcctaccagaaggaagaggaagtgagtccagtagactgcccaggattcctggagtagctccttatagaacagggtttctctcctggatgtataatttaggagatgggaatttttacagcctccgaaattacgcgtcggctccaacagatgtctaactgtgcggacgagggtgacagccagtgttt

SEQ ID NO: 8762 - DNA, 568 bp, Homo sapiens
  MAP TO AF238380.1; EXPRESSED IN BONE MARROW, SIGNAL = 0.87; EXPRESSED IN PLACENTA, SIGNAL = 1.4; SWISSPROT HIT: P39801, EVALUE 3.60e-01; EST_HUMAN HIT: W30739.1, EVALUE 2.00e-01; NT HIT: AF330054.1, EVALUE 5.40e-01
tgcaggttgtgaggtctctgaattctttagttgtccaaatctatggtctgactgtgggtgaggtcttgagctccttgggggcctttctctcagggtgtgagttttttgtgccttatacaactctgtggtctaggatgtaagatctacttactgtttggtggtctgattcctatggtatgagttctgtggcttctaggtggtctgtgttcagggtgtggattccttgagctctttgcagggattgtgtagactctacactgtagaggatttgggaatcaaagctataagggtatattgtcagctctctgaagagtttgatggtctattttccagtacatgttttctatggctctttgaggaagggttctgtgccccagaatgtgaggtatctgaacttttggtgagtctgtttagcgtgtgagtcttgtgagccttttggaggtctgttccaagggcatgaggtttttgagttctttggtgttctgtttacaagatatgagctctctgagctgttcacatgtctgtcaagactgtgagttgtctgagttgcttggaagaagtggtccaa

SEQ ID NO: 8763 - DNA, 565 bp, Homo sapiens
  MAP TO AC010422.6; EXPRESSED IN BONE MARROW, SIGNAL = 1.3; EXPRESSED IN PLACENTA, SIGNAL = 1.2; EXPRESSED IN HEART, SIGNAL = 1.1; EXPRESSED IN HELA, SIGNAL = 1.6; EXPRESSED IN BRAIN, SIGNAL = 1.4; SWISSPROT HIT: Q15542, EVALUE 1.10e-02; EST_HUMAN HIT: BG818399.1, EVALUE 0.00e+00; NT HIT: gi14759592, EVALUE 1.00e-63
aaaggaggaggaggatcagcatcgacctcggatcccagcctcagcgctcccatcccagcctggtccccggctcacccggccgcatccagcacctcgtagccgtggccgctgtacgtccgcagcagcgtcccccgaagcgggttccacagcttcagcgtcttgtcactgccgcacgtcaggcagtaattgccatccactggggaacaccaggcgggggttactgggccgtcgatctcaggaggcgggaggaggacccggaatgaagacgaaggcgctcaccattaaatcgtacggctcgcactgccccctgcccgcagtccagcgtcttcaaccgtttctgcggcagctctggaggccgcggctttggctcagggaaagccatgctcccaggactccttccttgcagccttaaatcggtctgtacggaaaattccgcgccttagaaacccacgcttgggtgtaaccttattattgttcttcctgacctacttcctgtttatcacttccgggttcatcattttggcatttcggtgatcgggttggaactattgaagcccgctttcag

SEQ ID NO: 8764 - DNA, 527 bp, Homo sapiens
  MAP TO AC010077.1; EXPRESSED IN LUNG, SIGNAL = 0.6; EXPRESSED IN PLACENTA, SIGNAL = 0.65; EXPRESSED IN BONE MARROW, SIGNAL = 0.62; NT HIT: AF202574.1, EVALUE 0.00e+00; EST_HUMAN HIT: BE161451.1, EVALUE 0.00e+00; SWISSPROT HIT: P26358, EVALUE 2.00e-34
ttaaactccgggaccacttgaatctcatacaacttgtgctctggagaaccctgctcagacccccgtaaagctcctgcagaacagcttcacgtcagccaaccacccacttcttacaaaagctgaaaccctgcagccaagccgccttgtgtataacccgacatcagactccttctggccaactttgaccccgaagccttccctctagcaagcaggggcaccacctcgaggaagtagaagcggttggggccgcccatggagtacacctggacgcactcgggcaggtcctccccatactccacggtgcagcggccctgcacagccttgaagtccaccacggcctcctcgtcgctccagtagagcaggttgatgtctgcgtggtagctcgctggagtggacttgtgggtgttctcaggcctgcgagcgggagaggcctcgttaggagctctcctttgtggtgagcttatgctgaattaaacagtaccatgttcctggggtgctcagggaactgcagggtaaagaccccctag

SEQ ID NO: 8765 - DNA, 576 bp, Homo sapiens
  MAP TO AC005605.1; EXPRESSED IN BONE MARROW, SIGNAL = 0.44; EST_HUMAN HIT: BI035310.1, EVALUE 2.00e-57; NT HIT: AJ244021.1, EVALUE 8.60e+00; SWISSPROT HIT: O95013, EVALUE 4.00e-08
ttgccattttctgggatttcatatttccttatttttgttttttaccttttttggcttgaattttttgagtttttatgcattcttttccagtttcttaagatgctaataagttcatctatttgagcaattgagaacatttaaagcaatagactgcctctgagcacagctttgtccatattacattaaccttttataccctgggttcccactagtttttaaataatctactatcaaataaaagatttgttaataataaattttaaatcattaacacttaacgcattattttcagtcacactaagttgattccttcgtttctttcaggttgcttcacagtcttcccttctatctgattcagtggaccaagtaaatgactctctggtaacagaatttgtattacttggacttgcacaatccttggaaatgcagtttttcctttttctcttcttctctttattctatgtgggaattatcctgggaaacctcttcattgtgttcacagtgatctttgatcctcacttacactcccccatgtatattctgctggccaacctatcgctcattgacttgagcctt

SEQ ID NO: 8766 - DNA, 527 bp, Homo sapiens
  MAP TO AC021689.3; EXPRESSED IN FETAL LIVER, SIGNAL = 1.1; EXPRESSED IN BONE MARROW, SIGNAL =   1; EXPRESSED IN PLACENTA, SIGNAL =   1; EST_HUMAN HIT: AW104003.1, EVALUE 5.00e-73; NT HIT: AF288814.1, EVALUE 3.00e-76; SWISSPROT HIT: Q01514, EVALUE 2.00e-26
tccaatctccctttaccacaagaaggagatgaaccatggcattaaaaaggtggactataagtatcattccagaaaggcaggaatcaagaaaaaaaaaaataacaaagattaccacaagcttcttctgaaattcctggcttttatctttgaaggagtactccatgaagactgcaatggcttccctctcacaaactgcatgcacgtccagcagctcctggagtgtgtctgtggggaatctcacttgctgggccatctgctggctgtagtggttggctgccctctgcacggctgctgagttctcacactgggccagaactgccattgcattctccagacaaggagtcgctccactgttgatggcatccaggtaggtctccaccagcatccccagccctgaatgatttaggaaatttagggaatagatagaaagttttcactcattgttttacgagtggtatgtatcagcattctaaaaatcagaaaaaattccatttaacatgaattttccctccttctccttctttcaa

SEQ ID NO: 8767 - DNA, 537 bp, Homo sapiens
  MAP TO AC025761.3; EXPRESSED IN LUNG, SIGNAL = 2.1; EXPRESSED IN BONE MARROW, SIGNAL = 0.68; EXPRESSED IN PLACENTA, SIGNAL =   1; EXPRESSED IN HEART, SIGNAL = 1.2; NT HIT: AF288992.1, EVALUE 2.00e-03; EST_HUMAN HIT: BG231742.1, EVALUE 1.00e-05
aggcttttgcagctaagtggttctctcctattaatttcatagcatggaatacttcctaaagtttactcatggaaaaggtcagtgtaattcataagaatcagtctcaaagtctcactggttgcttcatgaaatgtttttacgggctttttgcttcttctaaaatcactttttagttaaacagtgtttttttgttgttattgacaaaaccaaataactacttaatcaacttcgatgaacgtttctttttcggtttgatcaacagctttggcacagggagtagcactcactaaaatgatttcgtggatcacttttcttgtttctacagtttttgtgtagctgttcatgttgtataggacatgaacaaaatgaggtgggagccgcctcctaacaacttttcaataaaattaatagactttatttttagagcaattttaggttactaaaaagttgagcagaaaatacacacagagttcctatatatcacttcccccctgcatagtttcgctattaacaccttgcactggtgtggaacatttg

SEQ ID NO: 8768 - DNA, 516 bp, Homo sapiens
  MAP TO AB014080.1; EXPRESSED IN PLACENTA, SIGNAL = 1.2; EXPRESSED IN LUNG, SIGNAL = 0.99; EXPRESSED IN HELA, SIGNAL = 1.8; EXPRESSED IN BONE MARROW, SIGNAL = 0.65; EXPRESSED IN BRAIN, SIGNAL = 1.2; EST_HUMAN HIT: AL598961.1, EVALUE 0.00e+00; SWISSPROT HIT: P53587, EVALUE 1.00e-26; NT HIT: gi14759138, EVALUE 0.00e+00
cttttctcccatttgcttggtaaacaactgtttcctaatcatttgtgaaggaacagcttttgcttcttctggagagaaaaccatcttcactcctcctttgaggccactttcaaatgttccttttcctctaccaccagctaaaacctgtgccttcatcacaacatcttttgaacctaattttttggcaattgcataagcttcatctggtcactttgccacatatcctttgggaacagagacaccagtttcttgcaataattccatactcatgtattcatgtagtgagagattcctttgctgttgctgctgtacttggagtccatggttattaaacaatccagaacttcccagaacctgagcagcagcccgcagtgtggtccgaagggtggcggccaccaacagcgggcggaagaacatggaggccaccatttctgagtctaacattactattaataaaagttacagaagagattattgctgtagttttcctcataaacaccatcaaatttcgttgca

SEQ ID NO: 8769 - DNA, 550 bp, Homo sapiens
  MAP TO AC020948.6; EXPRESSED IN BRAIN, SIGNAL = 1.2; EXPRESSED IN BONE MARROW, SIGNAL = 1.2; EST_HUMAN HIT: BI825804.1, EVALUE 3.00e-06; NT HIT: gi15296404, EVALUE 4.00e-45; SWISSPROT HIT: O13166, EVALUE 4.00e+00
agccaggaatgtcaccagacacgcatccagccagtccaagtgcttgttgcgccgtgcactgggacctgcctgtgcgtggtcaccagcttgcaggagaggacgctattcatgcccttgaacttgttctactgagcggtgtcgctggtagtgcactggaaggagtaggggttctcctgccacttgaggccatagagccacagagccacgcacagcttgtccccgtccttcacagagcccaacgcctcgccaagcacaaggcctccctgcctgacttgacaggtggggaagcggttgagactgcgcctcatggtggccaagctgttgccaccacgggggctcagggagccactgaggaccaggtgtgaaccgccactaggctcatccaccatcacggagctgccatcccacttgtcgtcctaggcatcatcacttcatcactgccctgactgtcctggttgccacgaaagagctgctgaggccacggctgtcgggcacgcctgccgtctgaagcctgcaccggctgctgaaaggtattcagtggtggcacgtg

SEQ ID NO: 8770 - DNA, 584 bp, Homo sapiens
  MAP TO AC022103.4; EXPRESSED IN LUNG, SIGNAL = 1.1; EXPRESSED IN BONE MARROW, SIGNAL = 0.94; EXPRESSED IN PLACENTA, SIGNAL = 1.1; SWISSPROT HIT: P40419, EVALUE 8.50e-01; EST_HUMAN HIT: BI769199.1, EVALUE 2.00e-23; NT HIT: AL163247.2, EVALUE 2.00e-22
tattgcccataccccaactgagttgtaggaattaggcaaacagtgccgccagcatccaggggaacctctgtccgcctggacagccacgtggactgtgtggaatgacgctggtgaaataccagaaactgtcagtagatggcagtcgtatacagatttggtgcaagtcattcgggagatgggcatgcggcaggctatgtttgacctgaatatctgggggccagatgatgaacgtttcaccttccacatgacggatctcctgttgggttctgcgtccccaagtgctttcagctccctagctgctgtcctcgccctgtacgtagggtgctgcatacatgaagtgaccactgctatggcggctctcggggaagcagcagaccatcactgggaccgcgccctaaagaaggagaagctgccccacccacaggagactccccccagaggagaaaacggagccccagtgagtgacatgctcacagatgtagatagatttgattttggctggggctgactgagagaaaattgatcagcagcccaatgaagtactctgactttgtggagacagttgtctctggagcagcaattcc

SEQ ID NO: 8771 - DNA, 544 bp, Homo sapiens
  MAP TO AL035535.1; EXPRESSED IN LUNG, SIGNAL = 2.6; EXPRESSED IN FETAL LIVER, SIGNAL =   3; EXPRESSED IN BONE MARROW, SIGNAL = 2.8; EXPRESSED IN PLACENTA, SIGNAL = 2.6; EXPRESSED IN HELA, SIGNAL = 2.7; SWISSPROT HIT: P46090, EVALUE 6.70e+00; NT HIT: AL163246.2, EVALUE 1.00e-54; EST_HUMAN HIT: BI022322.1, EVALUE 1.00e-67
tctgccatggtaagacatgcttgcttctactttgccttctgtcatgattgtaagtttcctgtggcctcctagccatgttttctgtgtagtttgtggcaatgtgagtcagttaaacctcttttcttcataaattatccagtctcgggtatttctttatagcagtgtgaaaacagactaatacagaaaattggtactgggagaggggggcattactatacagatacctgaaaatgtgaaagcaattttggaactgagtaacaggcagaggttagaacagtttggaaggctcagaagaagacaggaagatgtgggaaaatttggaacttcctagagacttgttgaatgcatttgatgaaaatgctgatagtgataaggacaatgaaatccaggctgaggtggtctcagatggaggtgaggaacttgttgggaactagagtgaaagtcattcttgctatgcttaggaaaaactgggtgcattttgctcctgccctagagatccgtggaacactgaacttgagaaagatgatttacggtatctggcgga

SEQ ID NO: 8772 - DNA, 502 bp, Homo sapiens
  MAP TO AC007023.3; EXPRESSED IN BONE MARROW, SIGNAL = 0.4; SWISSPROT HIT: P20037, EVALUE 2.70e+00; NT HIT: U50871.1, EVALUE 1.20e-01; EST_HUMAN HIT: Z99434.1, EVALUE 2.80e+00
gaaaccaacgcacgactaggggaaggtgctgaacgagaacagagtgacattcctgtgtgcctgaagcctctcaggtttctgttccttctttcctaggtctcttgcctgctttgggtccccagggaattatagacaatagccagagaaattacatgagaaaagaagatctagcttctctaaaacccaatggggaagtactcttctgtgaaaaggtccttaatatcgaattaaaaaataaagtacaggacagagaaaataaagtccagaacagggaaggaaacttatccaagcatataaatgaaatactgagctagaatttagggcaaaacattcttctgaagctatgtcaaaaaggggatcctaattaacaacagataacttagcaattaaaaaatattacacaagacagagcaataactctctctttatctcttcgataactttgagcaagtgttaactaaagatgttcaatctgtgatgcccatattccagaggccccttt

SEQ ID NO: 8773 - DNA, 528 bp, Homo sapiens
  MAP TO AC012313.5; EXPRESSED IN BONE MARROW, SIGNAL = 5.6; EXPRESSED IN HEART, SIGNAL =  11; EXPRESSED IN FETAL LIVER, SIGNAL =  12; EXPRESSED IN LUNG, SIGNAL = 4.2; EST_HUMAN HIT: BE250888.1, EVALUE 1.00e-116; SWISSPROT HIT: P97461, EVALUE 2.00e-36; NT HIT: gi16162724, EVALUE 1.00e-116
ctgttgatgatggcgttcaccaggacctgcagagggttctagagagaagggggatatgagcctgacatccagccccatgcattcctcccctttcctcatacctaaaacaagagtgaccacaccacacaggggataagcctgacatacactccgtggggctttcgggtgtactgagggcacagcctgccctcaccaggccacagagccctacctcgcctgtgagcaggtgtatgatctcgaaggcatgcttgacgatgcgcacagtcatgagcttcttgccgttgttgcggccgtgcatcatcatggagttagtgaggcgctccacaatgggacactgagctttgcggaagcgtttggcggcataccgccctgcactgtgaggcaggtacttggcatacttctccttcactgcaatgtaatcctggggcagcagggagcaggaaatgaagggaaaatggtcaggagcagcatgggcgttggccagacaccagaggagagatcaagtacccattcggggtagtccaacag

SEQ ID NO: 8774 - DNA, 566 bp, Homo sapiens
  MAP TO AF015721.1; EXPRESSED IN LUNG, SIGNAL =   1; EXPRESSED IN FETAL LIVER, SIGNAL = 0.97; EXPRESSED IN PLACENTA, SIGNAL =   1; EXPRESSED IN BONE MARROW, SIGNAL = 1.1; NT HIT: AL163267.2, EVALUE 0.00e+00
atgagggatgaatgaggtgcctccacctgcctgcaatccccacaagcctgttttctcctaagttgcctattttgttaacgttatctccatcttttcatgctcctcaaatctcccctctctcttaccgtttacatccagccagtggccacaccctgtccatactacctcttaactgtctctcgattcttctctcttctaatcatctcagccttggttcagtcacttatttctctcttggactgcatcagatccttcatagttcactgtgatctgcaccttcaggtcttgttgccaggaaccacattttgacttctgttcacccccaagcctcgtgagtctccatatcatgtggctgtgtttctgtgagacagaggcagtggagaatccctgtggccccactctgcctgtgagctgtgtgcacacaggatgctgcccttacaggctctggcatcaaggggctcctggtgctggttctagctccactgtttactcagctagcaagtgagtaccgtcagctctctgagggctgttttttaaaagagatgtgagcatccacagatttgggt

SEQ ID NO: 8775 - DNA, 531 bp, Homo sapiens
  MAP TO AB015355.1; EXPRESSED IN HEART, SIGNAL = 4.8; EXPRESSED IN HELA, SIGNAL = 2.7; EXPRESSED IN FETAL LIVER, SIGNAL = 5.8; EXPRESSED IN BONE MARROW, SIGNAL = 0.69; EXPRESSED IN PLACENTA, SIGNAL = 2.7; SWISSPROT HIT: P49281, EVALUE 8.00e-22; EST_HUMAN HIT: BF307879.1, EVALUE 1.00e-79; NT HIT: AB015355.1, EVALUE 0.00e+00
aggtctctcctgaacctccccaaaacttttttttgtttcctgttgcagacagtcatctgctcctatgttttcttccagggattcctgaacctaaagtggtcacgctttgcccgagtggttctgactcgctctattgccatcatccccactctgcttgttgctgtcttccaagatgtagagcatctaacagggatgaatgactttctgaatgttctacagagcttacaggtgaggaggaagctgaggaaacacatcctagttattcaggtagcattatgtactgcccttgggtaccaagcctagctgagtgctggggggatattgagaggaagacagaggcatggttgtggtctgcagtaaatgtatatgaaatccttggcatctaaaaggattttagaaatggttggttttttaaacctgttgaatgggaactatgaactttacttacatatgggacacaaaattgtagttcattaatgcaagcaaacattaaatgaacatataggacactgtgctaggtcctgtggaggt

SEQ ID NO: 8776 - DNA, 528 bp, Homo sapiens
  MAP TO AC010387.4; EXPRESSED IN FETAL LIVER, SIGNAL = 0.62; EXPRESSED IN BRAIN, SIGNAL = 1.1; EXPRESSED IN PLACENTA, SIGNAL = 0.78; EXPRESSED IN BONE MARROW, SIGNAL = 0.63; NT HIT: AF039747.1, EVALUE 0.00e+00; SWISSPROT HIT: Q9Y6N8, EVALUE 3.00e-78; EST_HUMAN HIT: AA082659.1, EVALUE 0.00e+00
tgttttgaacggacgtctaatgtatcttcttgtcttttttcaagttatagtagtactgtttgcagctctgaaaagacagcgaaaaaaagagcctctgatcttgtcaaaagaagatatcagagacaacattgtgagctataacgatgagggtggtggagaggaggacacccaggcctttgatatcggcaccctgaggaatcctgcagccattgaggaaaaaaagctccggcgagatattattccagaaacgttatttattcctcggaggactcctacagctccagataacacggacgtccgggatttcattaatgaaaggctaaaagagcatgatcttgaccccaccgcacccccctacgactcacttgcaacctatgcctatgaaggaaatgattccattgctgaatctctgagttcattagaatcaggtactactgaaggagaccaaaactacgattacctccgagaatggggccctcggtttaataagctagcagaaatgtatggtggtggggaaagtgacaaaga

SEQ ID NO: 8777 - DNA, 506 bp, Homo sapiens
  MAP TO AL078614.2; EXPRESSED IN LUNG, SIGNAL =   3; EXPRESSED IN BRAIN, SIGNAL = 6.5; EXPRESSED IN BONE MARROW, SIGNAL = 5.4; EXPRESSED IN HEART, SIGNAL = 4.8; EST_HUMAN HIT: AW899830.1, EVALUE 1.00e-70; NT HIT: AL163248.2, EVALUE 6.00e-13
caaaagtccaggcagactccaccagtttttttacttaggaactcacagggtgatactgaagatatggctaactttaagtttttatctggaaactaggggaaaagtcacctctaagctcattcaggttgttggaagaattcagtttcttgtgattgtagcactgaggctcacatttcctctggatgtccacttgggattgcacaagctgctagaagacaccctttggttcttgcatgtggcccctttctgtcttcaaaggcagcaacaatacactgaacccttcttgtgattcaaatcactttgacttctcgggctgcaagccaggtaagactccttttttccttcttttaacttttatttcaggttcagtggtacatgtgcagatttgttatataggtaaactcgtgtcacgaggctgtggtatatagaacatttcatcatccaggtactaagcatagtacccagtatgtattctttctaaatcctctctctccttctgccttcca

SEQ ID NO: 8778 - DNA, 500 bp, Homo sapiens
  MAP TO AC010339.6; EXPRESSED IN BONE MARROW, SIGNAL = 0.48; EXPRESSED IN LUNG, SIGNAL = 0.39; EXPRESSED IN FETAL LIVER, SIGNAL = 0.39; NT HIT: AB038490.1, EVALUE 6.00e-13; SWISSPROT HIT: Q9R098, EVALUE 2.10e+00; EST_HUMAN HIT: BE151500.1, EVALUE 2.00e-10
aaaaccttaccgttagccatgctgctgattctcatttctcctttccactgagcagtcctgggcatggcatcacgcaaccttggtgtctcctctctccctccctctgtagaacaattacattctgccccagactggcacacccccaggcttcttgttgctcggttctgtgcttaaccaagcaccatcttctcaaaagaacatccaaatctctgccctctgggaggcctcctccaccccagtcaagtggttcgtgaagggggactccttcaaacacagttttctaaagacgggtcttggccgtgcaatccccaccatcattaggaaccaacacttccagacgttaagggctgaattgtatctcccccagattcacatgttcaagacccaacccctagtgtctcagaatgggactgtgtttggagacagggactttatcgaggtgattaaggtaaaatggggtcatatgggtgagccctaatgagcaatataactgatgtctt

SEQ ID NO: 8779 - DNA, 562 bp, Homo sapiens
  MAP TO AC011311.11; EXPRESSED IN LUNG, SIGNAL =   1; EXPRESSED IN FETAL LIVER, SIGNAL = 0.72; EXPRESSED IN BONE MARROW, SIGNAL = 1.5; EXPRESSED IN PLACENTA, SIGNAL = 0.54; SWISSPROT HIT: P54674, EVALUE 6.20e-01; EST_HUMAN HIT: BF963117.1, EVALUE 0.00e+00; NT HIT: AF022722.1, EVALUE 2.00e-03
gcactcactgctctttgacgttagtgaatagaccgtaagctccctggagcagggaccttatcccagcgtctaccgcggcgcccgtcacctagtaggtctccgtcattacctgctgagtagggcgcgggctggtggggcttaccgagcaccctcgctgtctgagtcattaagcaaacccggaggcttgtcgtgggtgtgggtccccttccatctgagaacgaatgggatgagtttctggagagacttggccggagaagggccggggcagctcgggaagtagtctgcctcacagaagaattcaggaaggcctcctgggagagtacctttgtgccgagccttgatagattctggcgagaaggaatgagggaacaggttgaggagactgttgtgggcaaagcatggcggtgtgattgcctaagatcggtgtgggaaagggggataacgggtagggcaagggatgctggggctgggggttggaatttactttcaggcatctgtagtcagtaggtatgatgtcatctaagagaaacagacttaatgctgtgagcatttagcagggagg

SEQ ID NO: 8780 - DNA, 534 bp, Homo sapiens
  MAP TO AC008859.4; EXPRESSED IN BONE MARROW, SIGNAL = 0.74; EXPRESSED IN PLACENTA, SIGNAL = 0.62; EXPRESSED IN BRAIN, SIGNAL = 0.82; NT HIT: AL163268.2, EVALUE 2.00e-03; SWISSPROT HIT: Q21286, EVALUE 8.60e+00; EST_HUMAN HIT: Z39118.1, EVALUE 2.00e-47
aatgcctaggaatcacctggggatcttgcctaaaaatccagattctaagtcagtcagtctgaggtgagtgcctgagattcggcgatcccgatcctaatgagctcccaagacgaggtagctgctgctggtgcatacatcacaccaatagcaaggcctgggcaccacacccagatgcagacgctcaccagctggcagctgggtccacactggagggcagggaaaataatcagactctttaggactgggcttccaacactaaaacatgaaatgattaacaacggactttacatacataatctcagttcatccacacatatacacactccataagatcattaccattttttatggttgaggaagccaagactcagaaagtcatacagctagaaagtatattggttgtctattgtggctttaacaaaggaccacaaacttagtggcttaaaatgagacaactttatgaccttatggttttgcagacaagaggttctaaaatcaaggcattggcaaggctgtgtcccttttgggagctct

SEQ ID NO: 8781 - DNA, 558 bp, Homo sapiens
  MAP TO AC005580.1; EXPRESSED IN FETAL LIVER, SIGNAL = 0.77; EXPRESSED IN HELA, SIGNAL = 0.77; EXPRESSED IN BRAIN, SIGNAL = 0.79; EXPRESSED IN BONE MARROW, SIGNAL = 0.98; EST_HUMAN HIT: AA875927.1, EVALUE 3.00e-03; NT HIT: AL163248.2, EVALUE 1.00e-04; SWISSPROT HIT: P08120, EVALUE 3.10e+00
gccaggagaaactgcagaagactgatggagaacgaaaccaagaagagaaatcggggaactgagcctgcagggcagtcaacaaagatctttgaccaaatgttgaagactttggggtatatcctgaaggcgatgaggagccatggaaggagtttcagcaataatcagatttacatgttaatcacatacctttggctacagtgtgagggacagcaggtgtgagtgtggaaagtctagttagggtgctgtattagttgtcattgccatgtgaggaattattccaaaacgtagtgccttagaacagcagcatttattgtctgtctcacggcttctatgggtcaggaatccgggggcaaatttcctggatcctccggctcagtcaccctcaaggctgccaagtgtcatccaggactgcagtcacctcaaggctccactggaaaaggatttgcttctaaattcaatcatggcagtttgcagctgttgggctaaaggcctcagtatctcactgactgctgatcagaggccatatgggagctgacagcacagctgcctatgacctca

SEQ ID NO: 8782 - DNA, 593 bp, Homo sapiens
  MAP TO AC000031.5; EXPRESSED IN BRAIN, SIGNAL = 0.44; EXPRESSED IN BONE MARROW, SIGNAL = 0.92; EXPRESSED IN PLACENTA, SIGNAL = 0.46; EXPRESSED IN FETAL LIVER, SIGNAL = 3.2; SWISSPROT HIT: P18124, EVALUE 5.00e-29; EST_HUMAN HIT: BF967942.2, EVALUE 2.00e-60; NT HIT: gi15431300, EVALUE 7.00e-59
ttttggacctttgggttcacaccattgatacctctgatcccgatgacaaatgccaatttgggttctgcacgtacatagaagttgccagcttttcttgcccccctcactattcaaatttcagttctgtacatctgcctattcgctttttcacagataagtttcctccttgccttttgaagcatcttttgggcaaacttatttctcaggcacttgatctttagctctgcaaaattccttttctttttctgaagggtttctggcacagcaggaaccttcttcttcttctctttgacaccctctatggttccagctggaaaagagaagattttagaccattggagtttaagggagctttgttcatcttagctgtcaaatttcattagttctctctgtttttcctgaggaccgtggatgataaggacagtaaagtttttgggtaaaaggcaaactttacagagttccttaataacaataccagtaaaatgagtgtcgttgtcattattagagaaataagtggaaattccaggttggaaaacaaaatcaagcagaaatttttgccacagttataacagccataactctccggcaaggaa

SEQ ID NO: 8783 - DNA, 523 bp, Homo sapiens
  MAP TO AL121929.17; EXPRESSED IN BONE MARROW, SIGNAL = 0.95; EXPRESSED IN PLACENTA, SIGNAL = 1.4; EXPRESSED IN FETAL LIVER, SIGNAL = 0.61; EST_HUMAN HIT: F27774.1, EVALUE 0.00e+00; NT HIT: gi14746644, EVALUE 0.00e+00; SWISSPROT HIT: O10296, EVALUE 5.00e-06
gttgggttgtcagggtgaacaggcagatcctgataaatggagggggacacaagaggccggggagctctcttcccgtgaatccagcgccgggttgggccatgtctcctcctgactggtgcccccttgtcctcagggacagcccccaattcgccagtgagcctgcccgagtcgccagtgaccccaggtctgggccagtggagcgatgagtgcaccatttgctatgaacacgcggtggacacggtcatctacacatgtggccacatgtgcctctgctacgcctgtggcctgcgcctcaagaaggctctgcacgcctgctgccccatctgccgccgccccatcaaggacatcatcaagacctaccgcagctcctagcccgttgcggtggcccatcccgcatacccatcttctcgggcttcagcccagtcccagctgaggaacaagccagtggggccccttctcttcctcattttggaaacttttcctcctctattaaacatgggaaactgaagcccttgaaggtttg

SEQ ID NO: 8784 - DNA, 572 bp, Homo sapiens
  MAP TO AL109944.19; EXPRESSED IN FETAL LIVER, SIGNAL = 1.6; EXPRESSED IN BRAIN, SIGNAL = 0.54; EXPRESSED IN BONE MARROW, SIGNAL = 0.76; EXPRESSED IN PLACENTA, SIGNAL = 1.8; EST_HUMAN HIT: AA435789.1, EVALUE 0.00e+00
cctcctcttttcaggacaccatcaagagtcacctcctcagtgaagccttccatggtttcataccacccatccctatcggaatgaatgtatccttgttctccgttatcccagtattttgcctgggcttctgtcacactactttcaatgtctatacctcagttatcgaatcgaaaaacaagagtcatcagtctctaaggtccttgcaagcttcaaaactttatatttttgtcaattacaactgaataaagctgaacaacttattatttatggatacttgctcaagcaccatataactctttcagatattttaaaagaatatgtttgcaaaagactccaaatcaatgtattaaattgaaatccagtatcaaaacacccattaaagtgctcttttgaaattgtacattttatatcaataaaatttcaaaatataaaaacctctattttacttgttgaattcttaggaataataactaaacagttttaaaatattagtagaaagatggtgtctttgaaataagaagaatggagttggagcataagttgcttctagttgaatgacctgggcatgattt

SEQ ID NO: 8785 - DNA, 503 bp, Homo sapiens
  MAP TO AF254983.1; EXPRESSED IN BONE MARROW, SIGNAL = 2.7; EXPRESSED IN BRAIN, SIGNAL = 1.5; SWISSPROT HIT: Q99678, EVALUE 2.70e+00; NT HIT: AL163201.2, EVALUE 0.00e+00; EST_HUMAN HIT: BG698657.1, EVALUE 4.50e-02
agatcgttctgtggtttgcctaccatgattcaacagcccaggatctgctcgggcacagacaacctgaagtgtaaagaggctcctgagagccgggtcccagctcggccccagacaccccctctgcaccgaccccacgagcccccaaaagtcatctctaccagaggttctcctcatttctgagaagagggaagcagggcccatgcgttttgaggttgcctctggctccaacgcggtgacacgcaatgccagcctcatgagggtgagagtcctctgaatggcccacgctctcttgtgacaatgacacttgtctgtgaaggagaaggccaagctgactcacacgctgagtgccccaaggatgaagggggtccccggagtgggtaccgcacctccctctttgcagacaaggagggggcggctctgagacccacagggatgtaccagagagtgcgtgttaggcagaaccgaacatccccaggaagggagggaaaagcaggtggctgata

SEQ ID NO: 8786 - DNA, 528 bp, Homo sapiens
  MAP TO AL031600.4; EXPRESSED IN LUNG, SIGNAL = 2.1; EXPRESSED IN BONE MARROW, SIGNAL = 3.3; EXPRESSED IN PLACENTA, SIGNAL = 4.7; EXPRESSED IN HEART, SIGNAL = 4.4; SWISSPROT HIT: P51798, EVALUE 3.00e-10; NT HIT: gi14774663, EVALUE 1.00e-38; EST_HUMAN HIT: AL555245.1, EVALUE 3.00e-37
actgctacacgcccactaccacgacagcttccacggtgaatcagtcaccaccacgcagcccacagtcacagacgcgtcgcacagctgtgtcacacatgcaccacgcaagcatttctgtatgactactcatttcttacgtaatttaatatgtgcaaataccagttgttaccactttcagaaaaaaaggtgaccccttcacacccagccagcccatctgcacacagtgccaccagtacacagggtggctgaggccagttctggaaggcaggcagccaagagagctgctcctgaaccagcaaagagcgggcgcccaccctgcccagccagggccaccgcaccctcaccttgagccgcaccacgtgggggatcttcaccccgttgaggaagcacttgatctgggggattccgctgccagcagccaccggctgaaagaggggaagcacggctgagtgggtcacggccaggctgagacagatgcagcccctcagccccaggagccccaggagctgaggagagcagcagacacgt

SEQ ID NO: 8787 - DNA, 590 bp, Homo sapiens
  MAP TO AC004496.1; EXPRESSED IN HEART, SIGNAL = 2.2; EXPRESSED IN BRAIN, SIGNAL =   2; EXPRESSED IN HELA, SIGNAL = 2.2; EXPRESSED IN BONE MARROW, SIGNAL = 0.7; NT HIT: gi14778042, EVALUE 0.00e+00; EST_HUMAN HIT: AA326325.1, EVALUE 0.00e+00; SWISSPROT HIT: Q24167, EVALUE 3.30e+00
gctagacatttctggctggggcaggatcccgctggcgtagcctgcagggatctctcaggcccgtcctgccttgctggggatcgtgccacaggccaggctccatgggacccgtagacaccttccttcctttaaagaggctcatggtctcaggggctggagagaaaggggttgcacaacgtcctggtctggctcttttcagttcttcctcctgtgagtttggagcggcatttgagtctgcaggtgaagaggagggcgagggggaggtcagtgcctcgcaggcagccgtgcaggcggcggacacagacgaggcgctgaggtgctacatccgctccaagccggccctgtaccagaaggtgctgctgtaccagccctttgagctgcgggagctgcaggcagagctgaggcagaacggcctccgtgtgtcctcgcgcaggctgttggacttcctggacacccactgtatcaccttcaccactgccgccacccgcagggagaagctccagggcaggaggcggcagcctcggggcaagaagaaggtggagcggaactgatggggccatcccgaccccaccccaacctgccatcagcag

SEQ ID NO: 8788 - DNA, 515 bp, Homo sapiens
  MAP TO AC008719.5; EXPRESSED IN BONE MARROW, SIGNAL = 2.7; EXPRESSED IN PLACENTA, SIGNAL = 2.8; EXPRESSED IN HEART, SIGNAL = 3.6; EXPRESSED IN BRAIN, SIGNAL = 3.1; EXPRESSED IN LUNG, SIGNAL = 2.4; SWISSPROT HIT: P08640, EVALUE 1.60e-02; NT HIT: AL163246.2, EVALUE 0.00e+00; EST_HUMAN HIT: AI522161.1, EVALUE 0.00e+00
cagttaaggcaggaacaggccattttcatttcttttgtggtggaatgtcatcagttaaggcaggaaccggccatctggatgtgtacgtgcaggtcacaggggatatgatggctgagcttgggctcagaggcctgacattcctgtcttcttatattaataagaaaaatgaaatagtggtaaagtgttgggacggcgaaaattttgggggatggtatggagagataatgggcgatgtttctcagggctgcttcgagcgggattggggcggcgtgggaacctagagtgggagagattaagctgaaggaagattttgtggtaaggggtgatattgtggggttgttagaagaaacatttgtcatttagaattattggtgatggcctggatacagttttgtatgaattgaagaactaaacggagtaagagaaggagaaaaacaggtattaaaggacgaagaattgggaggacccaggacatctgattagagagtgcctaaggaggttcagcatagccttgc

SEQ ID NO: 8789 - DNA, 591 bp, Homo sapiens
  MAP TO AF270510.1; EXPRESSED IN BRAIN, SIGNAL = 3.9; EXPRESSED IN FETAL LIVER, SIGNAL = 2.7; EXPRESSED IN BONE MARROW, SIGNAL = 1.4; NT HIT: gi16158180, EVALUE 1.00e-20; EST_HUMAN HIT: BE897245.1, EVALUE 2.00e-47; SWISSPROT HIT: P20614, EVALUE 1.90e+00
tgcctcccctattctgagtgcataaaagcccccgactcagccacattgtggggacttctctgcctttgggtaaggggaccacccacgcatcccttcttcctggaaagctgtttcatcactcaataaaaccccccgccttgctcactctttggttgtcagtgcatcctcattcttggataccggacaagagctcgggacccactgagtgtgggtacccagtaagcctgtcacactggctttttgccctcaccagtggagggcagtcaccccatacaatggggccaggggccgactgagctgctaacatgccgccatccatcaggttgtagatggcagaactaaaggagccaattaacatactaacaccccctctggggcttcagggtagtgggcgcccttgcctgggtgctgccacattcccctggaaatgatatgcctgctctggctgcaagcccctcacagagcttgctcctgtgtcagcagagtggctggctggatcttgcactcgcttactcatatgctgcctcctgcaaggagcctagggtatgtagggcttcatatcttgggggaagggaatccagaaacctgaca

SEQ ID NO: 8790 - DNA, 552 bp, Homo sapiens
  MAP TO AC022516.3; EXPRESSED IN HEART, SIGNAL = 1.3; EXPRESSED IN BRAIN, SIGNAL = 0.98; EXPRESSED IN BONE MARROW, SIGNAL = 0.84; NT HIT: U04323.1, EVALUE 5.00e-04; EST_HUMAN HIT: BG957158.1, EVALUE 9.00e-10; SWISSPROT HIT: Q9HU85, EVALUE 2.30e+00
agccctatgctgtctgatgggcccactgcctgttccacacacacctgtgtccctcatgatgatgccattatcataagatggggtcttcgggtggggagatgcaccagccaccggcatctcacttagactctgcccaattcgggctaatttaatcaaattgtagttgtgtttcctgaggcgtaaagaaaaggaggaaggtgtttcatatgcctgtttaggacccttcctattttgcctaactctgcacaggaaatggaggtgagggctctttcgacatttactgacatacacacatcacatctcctaatttggtatttttcttctctgtgtattattgagacatctcagactttccctctgaccagttctgtcttcctaacaggactcacaattctctctctacccagagagtcactgatttcaaaccaaagtcagcatctttctttgagcttaacatgattatgctggtcttcagcatttagcagacctaaaccttattatgttatcaagagaaatgctacagcaaccaattgacctcagacctttcgacca

SEQ ID NO: 8791 - DNA, 596 bp, Homo sapiens
  MAP TO AC011452.5; EXPRESSED IN PLACENTA, SIGNAL = 2.4; EXPRESSED IN LUNG, SIGNAL = 2.5; EXPRESSED IN BONE MARROW, SIGNAL = 2.2; NT HIT: gi14786937, EVALUE 2.00e-37; EST_HUMAN HIT: BI090450.1, EVALUE 1.00e-103; SWISSPROT HIT: P03586, EVALUE 2.60e+00
aggaaagaacagcatgcgagctttcctttaaaaaagatcgcctgggagccaccatgggacagggaggccaaaacaaaggaaggccagctttcctgccatgggggtgaccaatcaacacagagcgaccttcaactcgcctcggccacaaaggaaggccaatttttctgcctttgggtgtgaccgattaggacagagcgaccttcaactcacctcagccatggccaactggggttcagtagcctcttttaagctcctcctccttcccctccgtgttcccggctggcagggctgtgggaagcacaagggagctgtgagaaagcctcccttccacccatggctgactcgctgtccatgctgacgagcccccaaaatgtccaggaggaggaggacaagtcccaatgtgagtctccctgcaggggacaacaacaactatatttactgaagccacctcagccccacatttgcactgtgcttcagaacctacagaacagcttcgccaccaacaatggtgggttagcacctaacagtcagtcagcacatgtttaggagatttggtgatgaaagtctatggccacagtgggagcttctgtcttgct

SEQ ID NO: 8792 - DNA, 600 bp, Homo sapiens
  MAP TO AC007619.22; EXPRESSED IN BONE MARROW, SIGNAL = 1.1; EXPRESSED IN PLACENTA, SIGNAL = 1.3; NT HIT: AF334400.1, EVALUE 3.70e-02; SWISSPROT HIT: Q03018, EVALUE 8.80e-01; EST_HUMAN HIT: BF963893.1, EVALUE 4.00e-18
cgtgtcaggtccctaatgtgattgctgttaaccatataaaaataacctcccctcttttataatcagtcttggtgcgccttgcaaagcctacatttctaacctgtgtatacttcaaactactgtgagcatgtgttaaacacctttttttttttaaataaaaagaacactttcagctccttaaagcaagctcttttgggaaggaaagaatccctgagtgctgcagccatccatcctgctttgtctggaaagctaaggtttttgggttattgatgtttcaacaagtggagagcacctaggtctggtgagcaccagctgctgaagtgtggggggcacccaagtggcctgttcttccaggatggcattcattcttccaggcaagtgggacaaagtgggctttctgccttcactcagtgagagctgttgaaagattttctcatctgaattgtgaatgtttgtaatgtttattttcacagtaagagtgagggccttctcactttgaatatattcctttttgcaaataattttgaagtagtcctgatcctgtgttaaaagaaacatggtatgtcattatagaagaatccttcatcccccttcccttac

SEQ ID NO: 8793 - DNA, 536 bp, Homo sapiens
  MAP TO AC004204.1; EXPRESSED IN BONE MARROW, SIGNAL = 0.52; EXPRESSED IN FETAL LIVER, SIGNAL = 6.5; SWISSPROT HIT: P40818, EVALUE 4.00e-86; EST_HUMAN HIT: AW503369.1, EVALUE 0.00e+00; NT HIT: gi14785296, EVALUE 0.00e+00
tctaaaaccaaaggcccaaggcccattgcacaggacagttttactttcccacttgaaaagtgcatctttcagatgccagagtgttgttccaatctgtaaatcttttgcagaactaaaccagtcaagaagtaccatatactccacattccccctcttcttccatgtatctatagaatcatctgggaggtgtgcttcaatccagctagcagtgactcctggactgatggctttttcaggaacactgagagaatgtaaaatacaggaatcctgataatcctgcattctttgagcatccattataatcaagctgatgtttttatccatcatcattgtgtatagttcctttgctgtgattgctcctttctctttggtctcacatttttcattcttttcaccattgctcttttgggttttgtctttggaatccaatacaatctccaaagaacctttagccaacatgctgccatcctctcttcctgtttcctgccttttttgttgtagccactgtgcttccccctgcctgtccttttcctcaa

SEQ ID NO: 8794 - DNA, 584 bp, Homo sapiens
  MAP TO AL121825.19; EXPRESSED IN FETAL LIVER, SIGNAL = 0.85; EXPRESSED IN BONE MARROW, SIGNAL = 0.89; EXPRESSED IN PLACENTA, SIGNAL = 0.78; NT HIT: AF174135.1, EVALUE 4.00e-88; SWISSPROT HIT: O96017, EVALUE 2.00e-25; EST_HUMAN HIT: BG576566.1, EVALUE 2.00e-88
tcacctcctaccagtctgtgcagcaatgaaaatatttcttaccagataaaaagaataactcctaaactccagcagtccacagcacggttatacccagcagtcccaacagaaacaagaacttcaggcgccaagtaggtgggggttccacataaggttctcatgagagaggtctctcccaaaatcttggagtgcccaaaatcagtaatctaaaattcagtacaaaagggaataatgttgaacttgccataaaataaaaagattaacatagtctgccagtccaagaagacacgtaggctagatcagtttctattgtacaattcacacctgccattaatctggaatttacagattcatgtctttgcaagttaggacatttaattttgcttaaattaaaattcctgagcctaggaatctcaacactcaggctttccaacttaacctatgtcctctgtaatcttacaaaaagcttattatctttatcacagacacttcaggattctaattagttctacatggttcttagaccccagtgtctcaaacttggctgcgctatggaatacctggggagcttggaaacacatgct

SEQ ID NO: 8795 - DNA, 550 bp, Homo sapiens
  MAP TO AL121902.13; EXPRESSED IN BONE MARROW, SIGNAL = 0.62; EXPRESSED IN PLACENTA, SIGNAL = 0.73; EXPRESSED IN BRAIN, SIGNAL = 0.48; NT HIT: AJ229041.1, EVALUE 5.00e-04; SWISSPROT HIT: P02851, EVALUE 3.00e+00
gggttaggagcattgctgagtgaccaagaaaatacataaaactctactcattgagtggtagatgtcaatttccctgaggctggcatccacttttcagctgctgcatgcttctgaactgctccacattcagccattcataaatatttgctgggttcttaccgtaaggaaggcactgtcctagaagccggaagttttctagagctggcttgcaccatcttgcaagggtgaatttctgcatctctttccaagcctgcattttgtgacatcatattcgtggcttgaaattgggcatagttggagtctttacaccatggaaaccagtcatggctttttttctctcttttctagagagttggttgctaaatgtaccagcacaccactgggtacactgaaaactaaacaaagtccctgttcctatgaaacgtacattgcaaagggtcatacggataaacaaataaatatattataaactatcaggaaatgctaagtgctgtgaataaagataaaacagactaaaggactaggaagtggtgtgaggtggaggcctcta

SEQ ID NO: 8796 - DNA, 599 bp, Homo sapiens
  MAP TO AC011522.6; EXPRESSED IN BONE MARROW, SIGNAL = 0.52; EXPRESSED IN PLACENTA, SIGNAL = 0.44; EXPRESSED IN LUNG, SIGNAL = 0.69; SWISSPROT HIT: O10341, EVALUE 4.00e-12; EST_HUMAN HIT: AL520580.1, EVALUE 3.30e+00; NT HIT: M17440.1, EVALUE 2.30e+00
gggagttggggactctgactacagatccctgtgatcgacgggtgaaaggtgggggcggctggttggggggggcagctggggactgactacagatccctgtgatcgaggggtgaaaggtgggggcggctggtggggtggggagttggggactctgactacagatcgctgtgatcgaggggtgaaaggtgggggccgctggtggggtggggagctggggactctgactgcagatccctgtgatcgaggggtgaaacgtgggggccgctggtggggtggggagctggggactctgactgcagatccctgtgatcgaggggtgaaaggtgggggccgctggtggggtagggagctggggactctgactgcagatccctgtgatcgaggggtgaaaggtgggggccgctggtggggtggggagttggggactctgactacagatccctgtgatcgaggggtgaaaggtgggggccgctggtggggtggggagctggggactctgactgcagatctctgtgattgaggggtgggagcttctgtcctggagcctccgagccaccacattggcagctggcctgtcggggggacacagcatgggaagg

SEQ ID NO: 8797 - DNA, 544 bp, Homo sapiens
  MAP TO AC004199.1; EXPRESSED IN BRAIN, SIGNAL = 1.1; EXPRESSED IN BONE MARROW, SIGNAL = 0.51; NT HIT: AF055066.1, EVALUE 0.00e+00; SWISSPROT HIT: P08547, EVALUE 2.00e-03; EST_HUMAN HIT: AW969210.1, EVALUE 1.00e-11
ttttccctgtcccacatctcctaatctgaaaatttctgttttgtagaagcggccactttttgttcttcaaaaaattaaacatagaattgacatatgatccagcaattcctcttctgggtacagacccaaaagaagttaaagcagagaccaagcagatatttgtacatcatgtttataacaacattattcacaactgccaaaaggtagaagcaacagagtatacatccatcgatggatgaacaaagtatggtagatccatacagtggaatatttttcagaagaaggaaggaaattattttcctgtattatgtatgaaccttgaagacatgaagctagattaaataaatcagactgaaaaggaaaaatattgtatgaatccacttacatgattcacctagtttagtaagattcatagacagaatgtagaatggaggttatcaggggctggggaggaggagagagtgaggagatgttgcttaatagacctagcatttagtttgggaagatgaaaaagttctggagatggagggtggtgatggttaca

SEQ ID NO: 8798 - DNA, 544 bp, Homo sapiens
  MAP TO AC019183.3; EXPRESSED IN LUNG, SIGNAL = 0.54; EXPRESSED IN HELA, SIGNAL = 0.89; EXPRESSED IN FETAL LIVER, SIGNAL =   1; EXPRESSED IN BONE MARROW, SIGNAL = 0.79; SWISSPROT HIT: P38883, EVALUE 1.70e+00; EST_HUMAN HIT: AA476673.1, EVALUE 4.90e-02
tggtcaaaatgcagtggaacctcgtgttctttttcatcaatatctcttgaatgtggtcaagagccagaagctcagctgcatcaattatgtgaacttgtgtgaatcctttgattataatcatgttgtcaagatccaattatgtttcattgataaagcaagaaatggcaataataaccagaaatattctagaactggagctttcaactacttgagcgaatttctgttcttattatgttgtggacaaaagcttaatgttaagccagtaattgaactttagattttgtaggaaaaagtaaatgatgaccctgatattggaaacttataaactctcaagatttaataccaaagaaatttatgtggtcagggaatactctttaagggattgatgttttagttggtagctgaataacaagaacaaactagccatcatagaatttgggagaaagtcttccaggcagagtgaataacaagggaaatatcctaaggctagaattagcagagttttcaagaaacagaaagaagttcacatggagccaaggctagt

SEQ ID NO: 8799 - DNA, 558 bp, Homo sapiens
  MAP TO AC005307.1; EXPRESSED IN BRAIN, SIGNAL = 0.4; EXPRESSED IN BONE MARROW, SIGNAL = 0.42; SWISSPROT HIT: P44620, EVALUE 8.00e-01; EST_HUMAN HIT: AW876770.1, EVALUE 4.00e-21; NT HIT: AL163300.2, EVALUE 1.00e-26
acatgttgcaagggaaaaggaacaggtggggaaatagtcaatcatgcatccttcctgcactcagtaaatcggcactttacacagacaaggtgaacgcagagtagagatattaatagttagccttttatctgtagctctctgcttaggaagaaaagaaaaggcagcttcttgcatgactcagctttcagctaatttttccttttggcagggtgcattggggtcccgagattttattttcttttcatggttgtgggacaggagaaagaattagggatgctctttgcctctgacatgaatactggatatgtggtgattgttcatgccagatacgcaggtatcttagatgagaaattcatttttattgagtttcgggtgtttgagacagtcccaagaaaactattttcatttcctggctgtcaggaaataaaaatgtttttatttccagtcagtttcagggataaggtgagagacaaggtcagataggaccagggattaagtagtcatcataaataatagtggctgccatttgtcgagggccgggtgtatgataggcgtcgt

SEQ ID NO: 8800 - DNA, 500 bp, Homo sapiens
  MAP TO AC007165.3; EXPRESSED IN BRAIN, SIGNAL = 1.4; EXPRESSED IN BONE MARROW, SIGNAL = 1.5; NT HIT: X59770.1, EVALUE 6.00e-99; SWISSPROT HIT: P27930, EVALUE 4.00e-30; EST_HUMAN HIT: BG248550.1, EVALUE 9.00e-99
catgtgtgtgtttgtgcgtgtgtgtgtgtgcactgtcttcagaaaatcgatattttaagtctttcttttatggctagtaaaaaaagaaaacacattttagtaaaatggcattttttaaagccgtaccttgtaccattgaatcttcacgtcagttttgtcacgggtgaattcactcaggtcagggcatactaataccccagaggttgacaaggttaaaatttgcgggtatgagatgaacggcaggaaagcatctgtattctcaaaaactctgagctcaatggacattttgtcacagtaagaagcatttctgatttaaaagggaaaaaaaagataaatggcaaggcaaaataaaagtaaagctaaatgaaattaagcatcatttccccaactctattaaaatctgcatctgcattttctggattagtacagatggtttcccgacataagatggttcaacttaggattttttgactttacaatgctgcaaacacaacaagcat

SEQ ID NO: 8801 - DNA, 579 bp, Homo sapiens
  MAP TO AC020626.6; EXPRESSED IN BRAIN, SIGNAL = 1.1; EXPRESSED IN PLACENTA, SIGNAL = 0.94; EXPRESSED IN BONE MARROW, SIGNAL = 1.1; EXPRESSED IN HEART, SIGNAL = 1.1; EXPRESSED IN HELA, SIGNAL = 1.4; EXPRESSED IN FETAL LIVER, SIGNAL = 0.95; EST_HUMAN HIT: AL119079.1, EVALUE 8.10e-01; NT HIT: AJ238413.1, EVALUE 5.50e-01; SWISSPROT HIT: P46237, EVALUE 2.50e+00
tcacctctgtctctggtccctaaacagtacctagcacatagtaacacctcggtacgtatttgtggaataaataagcgaataactaagcagctggatgaaaatggagacataactgaggagtctcgccgtaaaactacagtcgtcccatttgttataagaaagacctagtagttctgctttcatcatttgcaacacatcacaatgccgaatgaatcccgtcaatgctttaactcctaagactggccgcctgcttcctgccctactcactgatgtttatattcctgtctccatagttactgagatgcctcagaagccagcagctgggttgcatcccaagctgaatacgcacaagtgtctggagacctggggtgatcaaggccaggtggaagttttggaggctgacactgctgcacatgtcatttcctcgtggacctaatgcccagagccagcttgtcacagaatcaaacttagcttgtcggaactctgagctcttcttcagcctgcaggctgtagacacggaaagaactgacaaggaattattctaaacaagagcaagaaaggttggaaggaactgccata

SEQ ID NO: 8802 - DNA, 540 bp, Homo sapiens
  MAP TO AL121925.10; EXPRESSED IN BONE MARROW, SIGNAL = 0.98; EXPRESSED IN BRAIN, SIGNAL = 0.6; EXPRESSED IN PLACENTA, SIGNAL = 0.82; SWISSPROT HIT: P23246, EVALUE 2.60e-01
ggagcaggtctgcaaagaacctgacatgcaggcccaagggcctccactggcaccaggcaacatggtcacgccccaccactggccaggtggccgcccccaccccagcatggtagagctcggtctccttgagcaggggctgagggtggtcactgtcggccatggctggggctttggccagcacttgctggggactggggtgccagtaccagtgggaaataaggggaacctctgctaggaggccctgactgagaagccaacagggagccattgagggctcctgagcagaggggggcatgccccacgcagagtttggccaagacagatctgctcgcagtgcacggggatgccagaggagagagacggggctgggaaacctcttggagggccacaatcctagcacgggccagagacctgcaggacagcgagcagggtgtggtgccggaatagctagggaagtgcgcgccaaggtgagacaggaggcagacagagttggtccccagccctgcattgctcagactgggaagcaggagggagaatgtg

SEQ ID NO: 8803 - DNA, 502 bp, Homo sapiens
  MAP TO AL031278.1; EXPRESSED IN LUNG, SIGNAL = 0.8; EXPRESSED IN HELA, SIGNAL = 0.77; EXPRESSED IN BONE MARROW, SIGNAL = 0.96; EST_HUMAN HIT: AI298477.1, EVALUE 4.50e-02; NT HIT: AF293416.1, EVALUE 4.80e-01
acatggacaatttttgccacattagaaggaaaatcctttccagtgttgagaagaagagccgtaggtcagtgtctttattcccctgtataccttttcaggagctgaacttcaaaagtaggaaacagggaggtattgacagtgatagtgatagtaatagtgaaaacagtcagttaggttctggagagaatctgagaacagcaagattgtctgagaaagacgaccctctaagggatagagaacttctaagagcactggtagactggccaaagcctataaacagagcatggaggctgcagaatacttggaccttaaaaccagaagatacagcaaaatttgagggcatcagtagtggttgccaagaagaccagccaaatctcagtgaacacaacaagcacaggatatttagtgaccaggtcaagtgataaatatctcaattgaaggcaaccaattgcctgacctacagcaagtgaactagcacgcgtgtcctctccaccatgaccat

SEQ ID NO: 8804 - DNA, 558 bp, Homo sapiens
  MAP TO AC007996.6; EXPRESSED IN BONE MARROW, SIGNAL = 0.48; EST_HUMAN HIT: AI792351.1, EVALUE 1.00e-110; SWISSPROT HIT: P04954, EVALUE 5.30e+00; NT HIT: gi4504686, EVALUE 2.10e+00
aggatcagacgtgaggatggatcatgtaggaacctgcagccccatgtcctctccttctccaaatgacttcatgccagaggacccacagatgtgtccagagaatggcccggccccttcctgccacaccagcctcctcagtgaggggcaggctcagatggtctctggtaaccttgggcctcccttctgtgtggttctatctggttctgacatccagtcttcaatgagcttcttacaaaaaagtcttgtgagataagcaaggtgaatgctgtttactttcatttttcaggtgtgaaaaccaaggcttaaagcatgcaagttatttgcccgaggtttttcagccacaaatgaagaagctgggtctgctccacacctgtgaaccaggctatttccaccataacctgaactcagatgagcaccagcccatggagaatagtccagaaggctgcccatagccttaaaggacagtgtgagcattaatcacagcctgttgcatttgaagaccacctccggaacaatgtcgttttaaatctatgcccaaggctgaacttggattggaaa

SEQ ID NO: 8805 - DNA, 523 bp, Homo sapiens
  MAP TO AL033544.15; EXPRESSED IN BONE MARROW, SIGNAL = 0.98; EXPRESSED IN PLACENTA, SIGNAL = 0.68; EXPRESSED IN LUNG, SIGNAL = 0.54; SWISSPROT HIT: O08550, EVALUE 2.50e-01; NT HIT: AF195953.1, EVALUE 8.00e-03; EST_HUMAN HIT: BF675661.1, EVALUE 7.30e-01
tcctgacaaaaatgggacaagttaagagcttattaagggctaaagctttttaccaatatttgtagagaagcatttcaaaatttttcacttacccagtttccaaatagttccttctttttctctcttttctgcctcacatggttgcttttgggggctcctgagtcccttgagaagcccctggggagggtagggggcctaagttcaagtgactgagaggctggagtggggaaggaaagggcctggcaggggtgggcagaggatggaggaggtaggggctcgaaggagggcatatcaaagaattcaagggaactggagggcaaaaccatgccaacaagatgcagtggacagagctggtagagcacagagtcagcagttcaagaaaggggcttcaggtgacagagaagttcccacaggaggatcagcatccaaaagagagaacgtggcctcacagaggccaggaagcagaaaatcccagccccgggagtcagagaataatccccactcagaacaaggagccaggaag

SEQ ID NO: 8806 - DNA, 600 bp, Homo sapiens
  MAP TO AC006162.1; EXPRESSED IN HELA, SIGNAL = 0.44; EXPRESSED IN BONE MARROW, SIGNAL = 0.62; EST_HUMAN HIT: BG708461.1, EVALUE 0.00e+00; SWISSPROT HIT: Q16653, EVALUE 7.00e-68; NT HIT: Z48051.1, EVALUE 0.00e+00
ccaggactgagatgtttgggttgagggatctcatctcagttgagagaataattgttcttggccacccaacagttaatacctaatattatatggcactactcaccttctactttcaattccattgctgcctcctcttggtaagaatgatctcggaagaagcaggtgaaacctccttcatctgagaaccttacattccggatcctgagagtcacctttccctcaccaatagcatctttcagcagctctgtccggccccgatattcaggtgcctggtctccatcttggtccttgccatttctgtagagatgaaccaccctagagaagggggggcggtaccaccccacctccatgcctgtagcgttcttcccaggagatatgcgacatggcaattccacttcatccccgaccagagcccggatagggtgtcttggtcctatcactctgaactgccctgtccaagacaccaaaaggaagagatttaaggtcagagggaaccttggcaagcaagcctgtcatgagaagggctgcttcaaaacagggaaggaagaagacactcgacttttaaatgacattctagagccagggaggattgcaattgtt

SEQ ID NO: 8807 - DNA, 511 bp, Homo sapiens
  MAP TO AL117380.28; EXPRESSED IN BRAIN, SIGNAL = 2.3; EXPRESSED IN HELA, SIGNAL = 2.6; EXPRESSED IN FETAL LIVER, SIGNAL = 2.7; EXPRESSED IN BONE MARROW, SIGNAL = 1.3; NT HIT: AF065912.1, EVALUE 7.60e+00
cctttgtatcaggggtttggatttaattaaagtcttagaaaatattatctgtcactgagcagcccagaagggtagccctgctcagaactgagaagcttcttcatgtggctctcgaagctgtcaaacaggccctctgcaaactgagactgaggccgtgtcaaatgcttgtggtttacctcgggctttgttatgtcccagagtctggaatcctggtaattacagaaaaacgtcgggtggggggtgaagggaaggcgtcagaaagttatctgtctcaacaaaaggaagagaggagagggaaagaaagggagagagagacagacagagagaagagagagaaagagacagagagagagacagggggaccaaggctgcacgctgtgagcaaagattctcaaaggaaaatcagagcagtcctgtcggaagggaggatggagctggcctggctaatgaacaaacagagcgaaacagtcccacaaaacagatagctactacaccatgctttccaatgttg

SEQ ID NO: 8808 - DNA, 578 bp, Homo sapiens
  MAP TO AC023172.1; EXPRESSED IN FETAL LIVER, SIGNAL = 1.1; EXPRESSED IN BRAIN, SIGNAL = 0.66; EXPRESSED IN BONE MARROW, SIGNAL = 0.45; SWISSPROT HIT: P20813, EVALUE 7.00e-32; NT HIT: gi14572198, EVALUE 0.00e+00; EST_HUMAN HIT: AW577437.1, EVALUE 4.00e-83
tgagattcattggtcttcttttctgtacagagagagtctacagggagattgaacaggtgattggcccacatcgccctccagagcttcatgaccgagccaaaatgccatacacagaggcagtcatctatgagattcagagattttccgaccttctccccatgggtgtgccccacattgtcacccaacacaccagcttccgagggtacatcatccccaaggtaagaccggctggaaccccatagccctcctgtttgggcatcctggattctcttaatccccgaactcaaccttttgttagctccttaattgagtcccgttgtttttgttttttgtatttcttttttgtggagtgtgtggagggttggagggaatggcaatatcttttgatcttgtgatcctccctcaggacacagaagtatttctcatcctgagcactgctctccatgacccacactactttgaaaaaccagacgccttcaatcctgaccactttctggatgccaatggggcactgaaaaagactgaagcttttatccccttctccttaggtaagctggacccacaatttctttcccaga

SEQ ID NO: 8809 - DNA, 547 bp, Homo sapiens
  MAP TO AC027329.3; EXPRESSED IN BRAIN, SIGNAL = 1.6; EXPRESSED IN FETAL LIVER, SIGNAL = 0.95; EXPRESSED IN BONE MARROW, SIGNAL = 1.2; SWISSPROT HIT: Q16587, EVALUE 3.00e+00; NT HIT: X87579.1, EVALUE 8.00e-03; EST_HUMAN HIT: AA970478.1, EVALUE 1.90e-01
ctttttcattctccctccccagtcttctcattccctatgcccttgctctgcctcatcccctgaggggatcactcatcatgaacgcagacccatggatcatgattggatgggagaatgtggaaatatatacagaacaacacattcaggtaagatgaacaaaagccatgactcgtagacatccttccaattgtactgaatgattatcagtaccctagtgtaccaccccatggtcaccccagtaaccatgtaatggtacatagtccttctcccaacaatctttccttccacaaacatttattgagtgtctattgcatattaggtactctccttgcattcaaagaggttgtaatgtaatgggtgagtgaatacatcattttaatggggtatcacaatgctaggagatagtacttggggagcctgtgcgatgttacctaatacagtcagaatgatttctagatgacttcttagaatagataaaaagttacctgaatattgaagaaagaatataagttaaccaagtgggtaaagatgtagctgggtgaaaggg

SEQ ID NO: 8810 - DNA, 502 bp, Homo sapiens
  MAP TO AC005329.1; EXPRESSED IN BONE MARROW, SIGNAL = 0.42; NT HIT: AF188893.1, EVALUE 0.00e+00; EST_HUMAN HIT: AI298962.1, EVALUE 2.00e-78; SWISSPROT HIT: Q14353, EVALUE 4.00e-24
ctgtgatacgtcccctcacccctcaccatcaaagtgaccgtcaggcagggtgggtgccacatcctcccacaggcctttcaaggggatgaccttgcagaggggaaaagaaaaagagaggacagggtagagaggtccccaggatctccccacctgcagaaagggagcggccagggggactcccgagagagaagaccacctcctccacctctgacagccccaggcccccaacccccaggaagcagtgccctcaccccaaggagtgggggtcctggagggcctgcgggcagaggggcaccttgtgtgtctgccgtggggcccagtcccggagccgctggaagacgccgtcattgcactcgatgatccaatgctcatcaatgggcgcctcctgcacctttgacgctgcgatggccatgccaaagcccacctccaggacccggccccctgggcagacacagggcgcctggcatcactaggtggggcgggcttaggaggctgcctggag

SEQ ID NO: 8811 - DNA, 567 bp, Homo sapiens
  MAP TO AC008964.4; EXPRESSED IN LUNG, SIGNAL = 1.1; EXPRESSED IN BONE MARROW, SIGNAL = 1.1; EXPRESSED IN PLACENTA, SIGNAL = 0.59; SWISSPROT HIT: P40061, EVALUE 3.20e+00; NT HIT: gi15828471, EVALUE 5.40e-01; EST_HUMAN HIT: BI601569.1, EVALUE 3.00e-71
gaactccctgcaactgataggaaaaaaagccattccgttattatatggacaaagggtatgaaaagacaatccaaagatattttaaatatcaggttgtggggaagtatattcagtgactcttacattttccacttgtccttttatctacctgttcttataaatgttggtattagaaagtttttcaagtcagaaaggcaattaagttttaaagcctagattttttattacttttaataattaccccaaatataatatgttaagtttttctcttttagcacttcagaatccagaggtggtggcccttcgaggtggactaaacaccatcttgaaaaatgtgatcgattgccaattaagtcgaataaatgaggccctaattactacaattttgcaccttcttaatcatccaaagactcgacagtatgtgcgagctgatgtagaattagaggtaggaactttaatattcttttctagttttaaaatattattataaatgtatacttttactttgaaatactaaattttatagatgcagcaccacattaattatcaagcctaaattagccgaca

SEQ ID NO: 8812 - DNA, 583 bp, Homo sapiens
  MAP TO AC008509.5; EXPRESSED IN HELA, SIGNAL = 0.77; EXPRESSED IN BONE MARROW, SIGNAL = 0.66; EXPRESSED IN PLACENTA, SIGNAL = 0.62; SWISSPROT HIT: P33896, EVALUE 7.40e+00; NT HIT: gi14734568, EVALUE 1.00e-124; EST_HUMAN HIT: AL528867.1, EVALUE 1.00e-122
aagagctttgttaaaattgttgctctttttcttcttattgttattaaagtctataatatatggaaaaagtctaagcctagttcctaaccctttaagtctaaaagatatatggttgctagtagcgtatgcctaaagtaactctctaacttcatacagttgtatttttgacactttaaaaagtttctaattattaacatattaatatatattctaaatcagatttttaagttgcataaactaaaaatgttatgttgttttagatattcagctttaccatagtgaaacattggagcttatgctacgtagatggtccaagttagagaaagactttaaaacaaagaatggaagatatgatattagtaaaatccctgacatatatgactgtataaaatatgatgtccagcataatggttccttgaaattagaaaacacaatggaattatataggctttcgaaggcattagcagatattgttatccctcaggtaagtcattcttaagaatcaatttcttataatattgaaaaaatacttttaaaatgtctgttggtggataaaaaggtagttggttttcatgtccttgga

SEQ ID NO: 8813 - DNA, 595 bp, Homo sapiens
  MAP TO AC008648.4; EXPRESSED IN BONE MARROW, SIGNAL = 0.5; SWISSPROT HIT: P18751, EVALUE 3.00e-01; NT HIT: AF207550.1, EVALUE 1.40e-01
agctgttacttcgtgcctggcacagtgccaaacactttgtatgtgttgtctcatgcaatcttcccaggcgttcttttttaattagggagatagtattgtgctcatttcgaaggtgagaaaatcagggctcagagaagtgaagtctgttgcccagagctcacagctactaactggctgagctgcatctgcagtggcctcttcacacgggtactaggaaggagtagaacggaggctggatgtgctcctcccgcttaaaaatcattctttcagcctgcagaacacttgcctctggttctctcggcccccaaggcttttcttcagcagccagcacctctggcttttgcttattgtttggattcgcccacggcctccgtcctttgtgcagcctgatttttcttgactcgtccttatttgcataagagtctcccagaatattgatgtggctcttttccagaaaagcgagcatcccccacactgctggctccaggaagccacatgagcaggccaggcaggctccagccctggtgcaacaccccggtgccatcccctcctccctgcttccttgcatccattcacagaccatcagctgagcaaa

SEQ ID NO: 8814 - DNA, 543 bp, Homo sapiens
  MAP TO AC002988.1; EXPRESSED IN BONE MARROW, SIGNAL = 0.46; NT HIT: AF127847.1, EVALUE 5.00e-66; EST_HUMAN HIT: AA758739.1, EVALUE 2.00e-20; SWISSPROT HIT: O14581, EVALUE 2.00e-24
gaccttacagttgccaagcgtagttaattctttgggatgaatataactcacccctgtatgagaaaaacttccatttgtttctggacctagtttggatgtaattttagaaaaatgacagaggacaaaaacagttgcatatcagagcagaaagctttattaagaaaaagtgtaaattttctaatgtcgtcaaggttaaagaaatctaaagtccagaatataaatactaggagaaaattctactttcacaatctgatccatgaatcataatttctggctaggggatttagagctctgaaatctcaagaacttctggaaaatggccctcctgtttctgctctctgaagaatcgattcagagctctgtttatgtctttattcctcaggctgtagatgaaggggttcagcatggaggtgaccacagtgtacatcaccgaggctgcagcatttgagagtgagttatgggttgcagcagaactaaggtacacacctacgcctgtacaataaaataaggagacaactgagaggtgagatgcacaggtggaaa

SEQ ID NO: 8815 - DNA, 596 bp, Homo sapiens
  MAP TO AC004858.2; EXPRESSED IN BONE MARROW, SIGNAL = 1.1; EXPRESSED IN HEART, SIGNAL = 1.8; EST_HUMAN HIT: AA580691.1, EVALUE 0.00e+00; NT HIT: AF109907.1, EVALUE 0.00e+00
ggtactctggaggactacccgatagttttcttaaagctatcaggaaacagtaacttctgtaaagccttaccttgatcgactgcgatccttattacgatctgagctcctttctctatcccggtcacgatctctctctcgatcccgatctcggtctctctcttttgtccggtcacggtccctatcccgttctcgttcccgctcccgttctttctccttttctcgttcacgttctctttccctttctcgttcccgttctcgcctttctcgttccctttcacgctccctctctctttctctccgttctttctcaatttcctgtctttctttttcctttttgcctttctcttcttccagtttctagaaaccaataaaagcacttttagagttaactctgtagctccagtattcagatttttcccggcgcaaagcccagtactgggaacaaaaacaccaaaccactgatacattaatattaaatacttgtggttttatgtgacaaattaaactgaagcaatcacaagactagaaagatttcgtgcaaaaccatatactctacacagaccaggaatctccaatcttggatgctgggagattgt

SEQ ID NO: 8816 - DNA, 582 bp, Homo sapiens
  MAP TO AC004143.1; EXPRESSED IN BONE MARROW, SIGNAL = 0.62; SWISSPROT HIT: P33413, EVALUE 1.10e+00; NT HIT: gi14769941, EVALUE 1.40e-01; EST_HUMAN HIT: AV645809.1, EVALUE 2.10e-01
caggtcttcaaagctcccagggctgtatatggggaggctggagggagaggcctctatggcaggtgtggcttgtaggaatcttggctgcactgggcagaagcagaggtctggaggtgggagacccagccggcattgggcggtgggggtactttgtgtctccctacaagcacagcctgcaatggcccacttgcattcagcatgaaggtgcgtatgcctgacacagcctcagcctgtttgtttccctggtcagcctgagctcactccagccttgggttcttccttcttgctgttctccctccctggtgtactccttcccttccagatcccaggacagacccctttcccccaccccatgtccctcctcccacatagactctgtgcatatggtcatccttgtgtgggtcatttgcagtaccgatagagcccgtgaaggtgtgcctccgcagagcatgtacgcagcgagcatgtacgcagcaagcatgcagcaagcacacagagggagtgacatacgaatgtccagcagctaatctaattccaagtaacctagtagggagggaaggatccgtaagaaaagggagaccc

SEQ ID NO: 8817 - DNA, 518 bp, Homo sapiens
  MAP TO AC008488.6; EXPRESSED IN HELA, SIGNAL = 0.66; EXPRESSED IN BONE MARROW, SIGNAL = 0.49; NT HIT: gi13376014, EVALUE 5.00e-04; EST_HUMAN HIT: AL602285.1, EVALUE 2.00e-04; SWISSPROT HIT: Q96287, EVALUE 1.60e+00
acagtttgccctcatggaactaagagtctaatgggaaaaaccgatatcaaaccaacaaatccaccacacatatgaatacataacagctgtgtgaacctgggcaagctgcataacctctctgtacttcggtttctgtatctgaaaaatgagggtaggaattcgctcactgagaattaaattaacgtaggtgctattcttatcctcatttttcagatagagaaactgaagcacagagaggttatgcagctttcccaggttcatgtagctggtaagaacagagtccatgttcttatcactcaagatgttctgttggggacggcatgccatggtcttaaggtaagaaagggctaagtgagtgaagagaaagtggcacaggatgaggctgcagatagagatggaggcccaactatgcaggacttgttaaggatttgagattttaagttcaatgggatgtattttagatattcaggagagagatgaggacaacttgaactagacgagtggcaaaggagatggag

SEQ ID NO: 8818 - DNA, 592 bp, Homo sapiens
  MAP TO AC004213.1; EXPRESSED IN BONE MARROW, SIGNAL = 0.72; NT HIT: AF055066.1, EVALUE 3.00e-36; EST_HUMAN HIT: AA700304.1, EVALUE 2.00e-14; SWISSPROT HIT: Q99728, EVALUE 1.50e+00
acttgccatgaggtttcagggtccttcctcctggaatagggactccttctctgtaactgggatctgaatctgaaacttggttgacgtttaggaattgagaatgggatcatgactttgtattgagttaaacaccctcagccccctgctcatcaattcttgctttctcatcacagatgtcaagcagtgcccttgttggctgctgcctgttctgacaccaccgtctattaaccttccccacaactccctgcagatcaagctgcctcagctgctcctctgagattgtcaagttaaccgtgccctctggcttttgcaggccactgtcaccatttagttctctgccttttcaaggccacactttcctcaggaatatcaatgagcccaactataggacctccttcctgccatcacacccagcctgcagaggacaccaccccgacgcttcttagccatgcaagtccctctcaccggcacattcctgaggctctggtggaagttgtgccctatgggtcctctgtggagcatggccctagtgggcattctggttcacatgatgtctccatcccacacacccacttccctcagcctcattgtc

SEQ ID NO: 8819 - DNA, 555 bp, Homo sapiens
  MAP TO AC006129.1; EXPRESSED IN FETAL LIVER, SIGNAL = 0.38; EXPRESSED IN BONE MARROW, SIGNAL = 0.5; SWISSPROT HIT: P31384, EVALUE 1.80e+00; EST_HUMAN HIT: BF222694.1, EVALUE 2.00e-01
aacgagatttttggggaacctcccatagtgctgagctccatagtgcccacggggatgacagaatctgagaatggctgggaccaggacttttgtcatcaaaagccagctggagggtataggcagtaaaattggaatgcagcaaagggaggctgacctgcaaagcactaggagggatctcataaaacctgttacccttagaggcaagacaggtggaaaaagagtaagtatgtcacttagtagacataatcaagaggagcagaaagccaaggtcagctgtccgccatagaatgtcatgatcccttgctcagtgaagacctgagacagtcctcacaccactatatgtttttctttttataacctttattaaaatacagtttattttttcatttacttggcacatttgtataattgtgaaattgttttcttagtagttttagttacatatactcagtataatgttagcttttaggaacccctctttagtaaaaataaaacaaaaacgtaagcaattttaattggtaggagttgcagagcccacagcaaaggacagagctg

SEQ ID NO: 8820 - DNA, 558 bp, Homo sapiens
  MAP TO AC010077.1; EXPRESSED IN HELA, SIGNAL = 5.1; EXPRESSED IN FETAL LIVER, SIGNAL = 2.2; EXPRESSED IN BONE MARROW, SIGNAL = 1.8; SWISSPROT HIT: P26358, EVALUE 6.00e-31; NT HIT: AF202566.1, EVALUE 0.00e+00; EST_HUMAN HIT: AW804511.1, EVALUE 1.00e-100
gagcagtcctcagatcaggccagaggctgggccaccttaggggagcgggagcacccacaggtgaggttacctcacagacgccacatcgccggcgcttaaaggcgttctccttgtcttctctgtcatccttttcaatttgctctgcgaagaaagtatcgaagatctggtagaccagcttggtggtggtggctttcgtgggtcccctgtccttctccctggtagaatgcctgatggtctgccgcctcgcctgggctcgcctacgggagaggttccagcatctcagaggactgggacagaggatgtgggccatgctctaccctccccggtctccagtcttcactctggtccctgccgcatccttacctctgtcccagcgtgaccccagccagcttgatcaggtcccgcatgcagggtgtcaggaagatgggctgctcatcactgtccccggcctcgtcataactctccacctgctccaccacaaactgcgcgtgtcgcaggagggagtcctctgtgaagcggttcaagttgaggccagaaggaggaaccgtggtcttgaaa

SEQ ID NO: 8821 - DNA, 516 bp, Homo sapiens
  MAP TO AC010285.4; EXPRESSED IN BONE MARROW, SIGNAL = 3.3; NT HIT: Y17038.1, EVALUE 1.20e-01; EST_HUMAN HIT: BE142049.1, EVALUE 1.80e-01; SWISSPROT HIT: O15027, EVALUE 8.20e+00
aaggtcacacagctgggaagtgatcaaatcagaatcctaaccctgggtgcctggctgcagagcctgccctcaccctcggaagctcccggcctcatgggcttccacgtaaaagcgtgtgcagacacgtcatgtccagaggagtaaggaggaaggatgggtctgtggagtctgggcagttctcagaggagcgggagggaaggttagctggcatggcggacactaggcacagcagccaggaggggtgtggctcctccaggccctgcagctgtgtggtccggctgaaggccaggctgtgagctggggagacaaggccagaaatggaggcaggcagacccccaggtgtcctcgaacaccaggctcaagggtcaggactcactaagcaggtgctggcagggccatgtctggtcttggtgagttgcttctggggcctagcctggctggcaggaaagggaggcacagccagggccagtgcagggctttgggcctggcaggaggggagaggtcaagtgtgtggca

SEQ ID NO: 8822 - DNA, 597 bp, Homo sapiens
  MAP TO AC010276.5; EXPRESSED IN FETAL LIVER, SIGNAL = 0.4; EXPRESSED IN BONE MARROW, SIGNAL =   1; SWISSPROT HIT: P08548, EVALUE 1.00e-05; NT HIT: AJ271735.1, EVALUE 6.00e-04; EST_HUMAN HIT: AV751859.1, EVALUE 4.00e-09
tgatagcctatttttcctcctgatattgataatttgatatccttcttttgctattgatccatctagttttagttcatctttttgtggtaattaaaaaaaacttacggtttcattaattttctcaacattctgttttctattctgttgatttttgctgtcttcattgaatctttttttctatttacattgagagtttttgttgctcctcgtctttgtctccttctttcttctcttttccttgtcattcttcttttgactttttaaggtaaaaacagagatcattaatttgagaactttcttcttttctaatataagcacgtaaacctgtaaatttctctctaaggacggctttaactgcatccagcagatttcaatatattgtattttcattatgattcagttgataatattttccacttcccttgtgattttgtttttgagccatcaactatttaaaagtgttatttgattttatgttacttgggggttttcctggatatcatagtttattcttaatttaattacattgaagtcggagaatatatttttgtatgaccgtaattctgttccatttactgacttgctttatggcccaga

SEQ ID NO: 8823 - DNA, 595 bp, Homo sapiens
  MAP TO AC010271.5; EXPRESSED IN FETAL LIVER, SIGNAL = 3.4; EXPRESSED IN BONE MARROW, SIGNAL = 2.8; SWISSPROT HIT: P18377, EVALUE 1.00e-11; NT HIT: gi14787066, EVALUE 1.00e-111; EST_HUMAN HIT: BE161881.1, EVALUE 1.00e-110
actgatggtcaggatacgccctccctgtcatcaccaaacagggacagatggaggctgtgagtgacggcatggggctgggacatgacaggccccacttgccccagactcaccgccaggtaggccagagcaggggttccattgaggcagatctccattggtgtctcttggttgtagcgggtgtcatagaaccggggccaagttgatgggatggagctgcctgcctggcccaggaaccagtaggcctcaaagatcttggtcaggtctcgagccaggcagctgcagttgtacatgaccacgcccagctccttgacctgtaggagggcagtgctgagctcagcgatagcggcctagtgctcacagatgacagggacactccccagtctggtctctgtctttccccctgtcccacagtaccccctccaccccagctccaatagctaaagtcctagaatgattatcaacttaagttttgatgaaaatcagttattccaaagctccaggtttcctgaacgtttgcaatctgctgttgcttctaccctccactgagctagcttctactcattcttaggtctaggctgacatgttgcctccttca

SEQ ID NO: 8824 - DNA, 512 bp, Homo sapiens
  MAP TO AC004712.1; EXPRESSED IN BONE MARROW, SIGNAL = 0.62; NT HIT: AJ303140.1, EVALUE 1.90e+00; EST_HUMAN HIT: BG742020.1, EVALUE 2.80e+00
gacgtccaggctcttctcacaaaagctcagaaacaatgaagaactgggtagagacaacggtaaaaattcaaaagagggggaggagatcaggaacagatcagaggggccacaggaactctgggcagcccccattaaatgtagagttcgtgaaaaagatcatttaagttctcttcaaaaagcgacctcatcgccagagaggggatgaagtaaggaaaagggaacactgaccctgcctcagaaagtgtgtgctcagccctcatgcataagtgtctgcatatgaccaggggtgagggggaggagtagtcaatggcactgggtgtcacttctgcactgacgtgaagaatcagatatgtctcccggactctggccacaggcagaagcagctgaggctggtaaacgaaaaagcaacaagatgaaaggagcctgggtctccccaaacaaagcagtttacaccctcatcatgctgtaataaaagccactagtcagttaagacccatccactttgcaatctt

SEQ ID NO: 8825 - DNA, 567 bp, Homo sapiens
  MAP TO AL022353.1; EXPRESSED IN BONE MARROW, SIGNAL = 0.73; EXPRESSED IN BRAIN, SIGNAL = 0.58; EXPRESSED IN LUNG, SIGNAL = 0.88; EXPRESSED IN PLACENTA, SIGNAL = 0.88; NT HIT: AL163247.2, EVALUE 8.40e+00; EST_HUMAN HIT: BI669578.1, EVALUE 2.00e-01; SWISSPROT HIT: P08547, EVALUE 1.10e-02
gccagccatctttctaaaactcactatttttagtatgtctgtagatctttcgaagttttctatatgaaaatcctatcgtttacaaatgatgctcgtttcttccattttgatactgacatttttaatttctcttgcttgttttactgtgatggctaggacctccactacaaagctgacgtagcaaggagaactgatgtccttttcttccaccttattctaaaagaaatagtcccacattcaaatgtatggaaattttttatttatattttttgttaacttcaaatttaatggtattttggtaagaaaacgtgtcctctatgaaacagatttttggaaatgtaaagacttcctttataacacatatcatcaattataaaatccatattaaaaaaagtttcatgtccttcacctatcaataaagatgttttgaaattatctactatgatggtagatatttcaatttattcctgtagttctaccaacttttgctttatatactttgaagttattttactgggtatattcacatttagaaatactacatcttcctgggaaattgagcatctt

SEQ ID NO: 8826 - DNA, 545 bp, Homo sapiens
  MAP TO AF107259.1; EXPRESSED IN BONE MARROW, SIGNAL = 0.62; EXPRESSED IN PLACENTA, SIGNAL = 1.3; EST_HUMAN HIT: BF438763.1, EVALUE 2.00e-63; NT HIT: AF023853.1, EVALUE 5.20e-01
agcttttcttcccccttcagtgctatacataagaggagaacagagttggggaaagactcatgcttcgagaagcagacattttcttaaaaaaattataggcttttagatcataacaagtattttttttcttttgttccctccagccaacatcccatgcaccatcgtggagactggctggatgccctgtgctctatcagggcatgtcagaccaacagaggggcaaatcagagtgaagaggaagccagaagatgggagagacatttttgaagtgagtaacctgcatgtataatgtgtactctcaaaactgcaaacaaattattttcctcaaatatttcacactggtggtcaccttctaatacattcagcctaaatgatctttgtttccattaatgtttttttgagggggaggggtagttagcacctgcaaaaaaaatgtgtcctggttaacaaaagcaagaaaacggaaatgaaaaccttacctcattttaaaaaatcaacccaactaatctaattaatcaagcaatcgattgttcccaaagccactc

SEQ ID NO: 8827 - DNA, 512 bp, Homo sapiens
  MAP TO AC004523.1; EXPRESSED IN BONE MARROW, SIGNAL = 0.62; SWISSPROT HIT: P78329, EVALUE 4.00e-21; NT HIT: gi14767688, EVALUE 0.00e+00; EST_HUMAN HIT: AA494546.1, EVALUE 1.00e-109
ccaggcacgcttagtctttctctctctctctcaggctgagctgggtgcagttgggggtcccaggccaggttcctgggttgatgggacccaaatgcgggtcttgggcacagtcacagtccccactcccgcctgcaggaactgcatcgggcaggcgttcgccatggcggagatgaaagtggtcctggcgttgatgctgctgcacttccggttcctgccagaccacactgagccccgcaggaagctggaattgatcatgcgcgccgagggcgggctttggctgcgggtggagcccctgaatgtaagcttgcagtgactttctgacccatccacctgtttttttgcagattgtcatgaataaaacggtgctgtcacctctgcctgggcctcactgacagcctgcagggggctcttggggactgggaggcttcagggaaggggcctaacctgggtgggttaggcgggatgttttccctgaaaccaagaacctgactgcctctttggctgagcatagg

SEQ ID NO: 8828 - DNA, 501 bp, Homo sapiens
  MAP TO AC011248.8; EXPRESSED IN FETAL LIVER, SIGNAL = 0.44; EXPRESSED IN BONE MARROW, SIGNAL = 1.5; SWISSPROT HIT: P55170, EVALUE 2.10e+00; NT HIT: gi14764873, EVALUE 1.00e-90; EST_HUMAN HIT: Z40250.1, EVALUE 2.00e-90
taagttggacccggagtgtcctgttctttgtagatttccaccgaatcgctgctgcctctggtgaagtagttcaagttcctccctagttcacctccctcagtgttcctcagccattcgacccattctaatttgcagtgtgccagtagcaaatgctttctcatttttcttgcagaatttagcctatgaaatcatcctaaccctgggacaggcattcgaagtcgcttaccagctagcactacaagcaagaaaagggggacactcctccacacttccagaaagctttgaaaacaaaccctccaaacccatccccaagccccgcgttagcattcgcaagtccgtggtaagtagaaacgatacagatgttctaaaaaaccttgaacaggaggaaaaggggctgctaaccaggcccttgtgtggtgtgggtgccattagaacccagggcctcttcttcatcctttcccttggcctcctcctggcatgtgtccatcatcacctctgcct

SEQ ID NO: 8829 - DNA, 532 bp, Homo sapiens
  MAP TO AC006293.1; EXPRESSED IN LUNG, SIGNAL = 0.53; EXPRESSED IN BONE MARROW, SIGNAL = 0.89; EST_HUMAN HIT: BI912561.1, EVALUE 0.00e+00; SWISSPROT HIT: P43628, EVALUE 7.00e-55; NT HIT: AF134316.1, EVALUE 0.00e+00
tgaagagagatggggtggagggtgagagagagagagagagagagcattaggtcatagagcaggggagtgagttctcagctcaggtgaagggagctgtgacaaggaagatcctccgtaaggaaaatgcctcttctcctccaggtctatatgagaaaccttctctctcagcccagccgggccccacggttctggcaggagagagcgtgaccttgtcctgcagctcccggagctcctatgacatgtaccatctatccagggagggggaggcccatgaacgtaggttctctgcagggcccaaggtcaacggaacattccaggccgactttcctctgggccctgccacccacggaggaacctacagatgcttcggctctttccgtgactctccatacgagtggtcaaactcgagtgacccactgcttgtttctgtcacaggtgaggaaaccccatatctgtctcatgtcctatgatcctagagccttagctgaggagcttcctgctgatgatggagagaagcatggacagatgcaga

SEQ ID NO: 8830 - DNA, 568 bp, Homo sapiens
  MAP TO AL096870.3; EXPRESSED IN BRAIN, SIGNAL = 0.4; EXPRESSED IN BONE MARROW, SIGNAL = 0.41; EST_HUMAN HIT: BI765026.1, EVALUE 3.00e-99; SWISSPROT HIT: P26770, EVALUE 2.00e-12; NT HIT: gi9506372, EVALUE 5.00e-38
tgatttccaacctctcctgggagctccctgggtctctgcctctcatcagtgtcccagtgagtgttcccacatgcccttaatctccttctgcacacccttcctcagcccaagcccacagccccctgagtggaggaacgctccattctgtggattagaacagacataagtcacacccagtgtgtatcagtgtgtatgatgccccctgtctcccagataggacctgggcctgggagggacaggaagggagccctcaggtgtcccccctctgcctatgggacatgcccactcctgacccctgcctggccccacagtactccatgcactgctgcacgctgggcttcctctcctgctccctctttctgcacatgagcttcgagctgaagctgctgctgctcctgctgtggctggcggcatcctgctccctcttcctgcactcccatgcctggctgtcggaatgcctcatcgtccgcctctatctgggccccttggactccaggtgtgcacagctgctggacagaggtgccgggccccctgggatggggtgagatgggatacagcagagctgtcc

SEQ ID NO: 8831 - DNA, 583 bp, Homo sapiens
  MAP TO AC005525.1; EXPRESSED IN BONE MARROW, SIGNAL = 0.83; EXPRESSED IN HELA, SIGNAL = 0.64; SWISSPROT HIT: P47179, EVALUE 3.00e-04; EST_HUMAN HIT: BG720339.1, EVALUE 0.00e+00
ctccagagtcttcaatgcccactattacttcacacagttggcctgtgacaggcaatcaggtcatcgtccacggctaccaggtgtttcatgtctactgtgacttccaggaccacaagcccttttgcgcccaccatgtcttcacctaagagatcttcaaagcccagtatgtctctggcacccagtggatcctccatgcccactgcggatcccaagcctcctgcctccttgaagtccaccaaatcagcaacacccaacagatccttagtgcccaccaaaccagcgacatcccgtaactcagtcatgagcccaagcagttccaagtccaccaaatcgaccagtacaaaaagagccccttctaaccggcccagcagcaggtcccgagtccgcagcaaagcaagaacacccagcagggtgagcaccgacaccaggaccagcaaagccagcaaggccagcgacgtgagatgccaccagcggaggggcacacacagccggggtaggacacctggcagaaggggaagccgcagctccaagaggtcacccagcagggccagcactcctggcaggataagaactcatggtgcca

SEQ ID NO: 8832 - DNA, 523 bp, Homo sapiens
  MAP TO AC008507.6; EXPRESSED IN BONE MARROW, SIGNAL = 0.72; NT HIT: gi6679434, EVALUE 1.30e-01; SWISSPROT HIT: P28876, EVALUE 4.30e-01
cagcctccttctgtgtctcctgtgctaagtaccatttctctttctttctcatgtttcatcacctccgtctctcattgactctcctctctgttttcctcttgatatatcctccccacttctctgctgcagaagaggcgaggtgagtaccattcacctctcccaagtggtccagtggcagtggggcccccacgcactctacaccgttgttgtgttgctagaggaaggagagcagctgagccctggggacctggggacgggcttcatttgattctctgctcttcctcctctgaactactctaagtgaagccaatcaggattactttcatttcatcacttcaaggacttcctcctcggagtcttttcatccttctcctgccttggcctagaattagggagggggagttagtcccctcctctcttcagcccctctggccagcatcaagcccttattgagagctccaactgtgcacccagcgtcagaaatgatttggggtgcctgtgtccggagcatacagtcctgaca

SEQ ID NO: 8833 - DNA, 555 bp, Homo sapiens
  MAP TO AC010163.7; EXPRESSED IN BONE MARROW, SIGNAL = 1.3; EXPRESSED IN LUNG, SIGNAL = 1.5; EXPRESSED IN BRAIN, SIGNAL = 1.3; NT HIT: AF131205.1, EVALUE 1.30e-01; SWISSPROT HIT: P45349, EVALUE 1.80e+00; EST_HUMAN HIT: BF821097.1, EVALUE 8.00e-04
tttaaagctgcccctgtcactctgagctgcttatcttcagacttcttatacatgaaagagaaatgagcctctatcttgcaaaagctactgttattttggggctttctattaatcacagtcaaatctaattctaattgatgcaggtgcaagtaattgaatacctgaaagtaaggaagacattttagatctctcttttaacaagacatctggagggggcctgttccagaatggttcgacagtctgatcagtgtctatggttctttcagccttttttctcgtggtcacaggatggcctctgcagctgcaaatatcacatcctcacatggaaacatctcaggtagaaggatgagcataggttggaaaagatgaaagatgttccttctcacacccctgtcctttaaccttggaggaaaactctctccgaaagctccaagcatgcttcccactgcatcttcttggccagaaccatagctgcaagggaggcagggacagttagtttctgggtgagacaggcaaagaccagggttgggagtggctggtggctggaaagtcagt

SEQ ID NO: 8834 - DNA, 531 bp, Homo sapiens
  MAP TO AC005685.1; EXPRESSED IN BONE MARROW, SIGNAL = 0.4; SWISSPROT HIT: P40889, EVALUE 1.70e+00; EST_HUMAN HIT: AW271240.1, EVALUE 2.00e-04; NT HIT: AL163204.2, EVALUE 3.20e-02
tgctccactgacttcaccactgcacagaacctcagactaggattcttccctgtagtgtacctactccagcttggaaccaagaggcagccacatcggtttaactatttcttaacactggagacaagagttgtatttttaaggattagcattagtaaattagagccaaaaaagaaattgaaagaaaatgtgattagtttggagcaaatggttgttagaagcaatctgttatttaattgttcacagtcctcacttattattcctcctcattagcctgtctgaagagctggaacctcagggtatctttgggaatttccctgtttccgcttctgttacctcctccctttccccagggttagtgctggaattagttaagacttttgggttggtgctggaattagttaagacttttgggttggtgctggaattagttaagacttttgtggctcttgagatggggctgttggaggggcgaatgtagttctctctgtcaagcaaggttttcaaaaaaatccttgattagcgggaacctga

SEQ ID NO: 8835 - DNA, 519 bp, Homo sapiens
  MAP TO AC010336.5; EXPRESSED IN BONE MARROW, SIGNAL = 1.2; EST_HUMAN HIT: AU123765.1, EVALUE 0.00e+00; NT HIT: gi14757941, EVALUE 0.00e+00; SWISSPROT HIT: Q15717, EVALUE 3.00e-60
tgacgcttgctctctgtctgccaggttctcccccatgggcgtcgatcacatgagcgggctctctggcgtcaacgtgccaggaaacgcctcctccggctggtgcattttcatctacaacctggggcaggatgccgacgaggggatcctctggcagatgtttgggccgtttggtgccgtcaccaatgtgaaagtgatccgcgacttcaacaccaacaagtgcaaagggtttggctttgtgaccatgacaaactatgaagaagccgcgatggccatagccagcctgaacggctaccgcctgggggacaaaatcttacaggtttccttcaaaaccaacaagtcccacaaataactcgctcatgcttttttttgtacggaatagataattaagagtgaaggagttgaaacttttcttgttagtgtacaactcattttgcgccaattttcacaagtgtttgtctttgtctgaatgagaagtgagaaggtttttatactctgggatgcaaccgacatgttcaaatg

SEQ ID NO: 8836 - DNA, 517 bp, Homo sapiens
  MAP TO AL023801.1; EXPRESSED IN BONE MARROW, SIGNAL =   2; EXPRESSED IN LUNG, SIGNAL = 2.1; EXPRESSED IN PLACENTA, SIGNAL = 1.6; SWISSPROT HIT: P08547, EVALUE 4.00e-44; EST_HUMAN HIT: AW875415.1, EVALUE 3.00e-34; NT HIT: AJ271735.1, EVALUE 5.00e-78
tcattgctttgggcagtatggccattttaatgatactgattctttcaatccgtaagcatagaatattttttccacttatttgtgtcatctctagtttctttcagcactgttttgtgcttcttcttgtagagatctttcacctccttggttagctgtattctcaggtattttattttctttgtggctattgcacgtgggattgtattcttgatttgactctcagcctggacattattgatgtatagaaatgccactgatttttgtacattgattttgtgtactgaaaccttgtttaaatgatttatcagttctagtagccttttggcagagtctgtagggttttctaggtatagaatcatattgtcagcaaagagagatagtttgacttcttcatttcgtatgtggatgccttttctttctttctcttgcctgattcctctggctaggacttcctctttaatttcttgaattgtgatttttagtattttttccattccattgtttggttttcttctca

SEQ ID NO: 8837 - DNA, 508 bp, Homo sapiens
  MAP TO AC010186.6; EXPRESSED IN BONE MARROW, SIGNAL = 0.53; NT HIT: gi16164509, EVALUE 0.00e+00; SWISSPROT HIT: P12344, EVALUE 3.00e-76; EST_HUMAN HIT: AL531605.1, EVALUE 0.00e+00
atgaatctgggagttggtgcctaccgggatgataacggaaagccttggacgtgctgcctagcgtccccaaggcagaggcccagattgccacaaaaagtttggacaaggaatacctgtccactgggggactggctgaattttgcaaggcatctgcagaactagcccttggtgagaacagcgaagtcttgaaaagtggccggtttgtcattgtgcagaccatttctggaactggagccttaaggattggagccagctttctgcaaagattttttaagttcagctgagatgtctttctgcccaaaccaagctggggaaatcacacgcccatcttcagggacactggcatgcagctacaaggttatcggctttatgaccccaagacttgcgattttgacttcacaggcgctgtggagggcctttcaaaaataccagagcaaaatgttgttcttctgcatgcctgcacccacaatcccacgggagtggacccaggtctggaacagtggaagga

SEQ ID NO: 8838 - DNA, 522 bp, Homo sapiens
  MAP TO AC006479.2; EXPRESSED IN BONE MARROW, SIGNAL = 0.49; SWISSPROT HIT: P42836, EVALUE 1.60e+00; EST_HUMAN HIT: W60471.1, EVALUE 3.00e-09; NT HIT: gi14783604, EVALUE 1.00e-07
aacaacccgaatgaagttggaaaaggaccctgagctccaaatggcagcatgggtaagacttcgatttcagcttcacaaaaccctgagtcgaggatccatctaagccatgtctggattcctgtgctaggctgtttttgcattgctatagagaaatactgagactgagtaatttataaagaaaatacatttattttggctcacagtttgcaggctgtgcaggaagcacagtgctggcatcttcttctggtgagggcctcacagtgctggcatcttcttctggtgagggcctcaggaggcttccaatcattgtggaagacaaaggggagcctgcatgtcacacgatgagagtaacagcaaagtgtgggggaggtgctacacacttccaaataaccaggtctcactcactgcagtgaggacagcaccaatccttctatgaaggatccactcccatgacccaaacacttcccaccaggtcctgcctctaacattagagattacatttcaacatgagaaatgaggggc

SEQ ID NO: 8839 - DNA, 578 bp, Homo sapiens
  MAP TO AC008449.4; EXPRESSED IN BONE MARROW, SIGNAL = 0.51; NT HIT: M13792.1, EVALUE 8.60e+00; SWISSPROT HIT: P21964, EVALUE 4.30e+00
tgccatcaggtctcactgacccttaataacatccctgtgaggaaggcattacaggtgccaattcaatcactgaagaactagaggttcagagaggtggcatcactttcccaaggtcaaagagccagtaggtacctaaggatctaggatttgatcccaaagctcatgctcttccatattagttggggctgagagatgcttaatcagtctgtgctgattcgaattcactttccttccttcctctctgtgtttttcagtgtagagtatgattttcggcagcaggaaggcaggttccatgaagttttgcagagtctggaggaagcagagccagttgaggaggcatcgcccccaccaaagtccccagcagaacccccagccccggaaaagcaggacttaaggcggaaaaccaagaaggtgaaaaagaaatgcttctggtggatctgagctggttgggaccatcccccagccccccaactccacgcacttccctgagatgggaaatccactgcacttaaggcctgccctgcttctttgcaaaggccctgggctgtgagccccttggcctgtgaaacagaagagcc

SEQ ID NO: 8840 - DNA, 593 bp, Homo sapiens
  MAP TO AC010339.6; EXPRESSED IN BONE MARROW, SIGNAL = 0.42; EST_HUMAN HIT: W25086.1, EVALUE 2.10e-01; NT HIT: AF326736.1, EVALUE 2.20e+00; SWISSPROT HIT: P16144, EVALUE 5.80e+00
tctaggaaaaacgcagggtgttttcctcctggcctgccacacaggtagagccttgctggttcctctgctggcatgacaacatggagtgcgcccctcagtgcacttgagggcggaaggctgggccttcgcccctgccgtgggctcagcctcactcttcgcatcaatgataactgccattgttggttgggtggtgactctgagctgtgcatgtgagtgacatcatctcgctaattcccacagcatccccgtgaagcagctactaccatctccctcattttacagacgaggaagtgaaggctcagagagtccaaagaacttgcccaaggtcacctggctgctgaggataaaagcgcagggtggtttcactccagagctccgattcaggcagccgctgcctccctccctcctgcacatcttccaaatggctggggggccttggctttccaccaatgtccaggtgcaccctctccaacaggtaagcctgcctccagcctccttttcccccagctctcctgtttcttctcccttccatgcccctggtgtgtccacacccactattttccacctctctttccccttttcccacatctttt

SEQ ID NO: 8841 - DNA, 563 bp, Homo sapiens
  MAP TO AC004204.1; EXPRESSED IN BONE MARROW, SIGNAL = 0.9; EST_HUMAN HIT: AA769858.1, EVALUE 0.00e+00; NT HIT: gi14785296, EVALUE 0.00e+00; SWISSPROT HIT: P40818, EVALUE 3.00e-89
tgcactaaaagcacaggtggtaacttccagatttcttttttaagaatcccgtcgagctctgcaaagattgcagtaaaatctgttattatctatgagtttttcttctttagaaaataatctaaggcaatcctataatgtacatttacttgtggatgctatcagtagagacaaatacatgaaggcctcaagtgtcctagactttttgtgacgggtgaggcactgtactgtagatttgaattgaccctgaaaaagtgcaacaataatagactcatagagccgcttgtgtttctgccaggcatgttctgcagctttaaagtcattgagatgatcattattttcttctttatatgtcttccgattatcagttttatttagatcttcatggagaccatccattaggaacagaagaaattcttgtgaatcttgactgtatcctgcaaactggtaattgatcttcccaatggtgactttaaggtcttttggactgatatatctatactgtcctgtccacggggctttcatgattataccaaattcttctgccacttcacctttatgcccct

SEQ ID NO: 8842 - DNA, 510 bp, Homo sapiens
  MAP TO Z49866.2; EXPRESSED IN BRAIN, SIGNAL = 1.4; EXPRESSED IN HELA, SIGNAL = 2.6; EXPRESSED IN BONE MARROW, SIGNAL = 1.2; EXPRESSED IN FETAL LIVER, SIGNAL = 0.98; EST_HUMAN HIT: BI916691.1, EVALUE 2.00e-60; SWISSPROT HIT: P16443, EVALUE 7.10e-01; NT HIT: AL163246.2, EVALUE 1.00e-41
cccagggccttgctgctttctgctgtctcaggacttggtgccctgtgtcccagccgtggctaaaaggagccaacatagagctcaggccattgcttcggagggtgcaaggctgaagccttggtggcttccacatgctgttgggcctgggggtaaagagaagtcaataattgagatttgggaacccctgcctggatttcacaggatgtatggaaatgcctggatgtccaggcagatgtctgctacaggggcagagccttcatagagaacctctgctaggacagtgtggaatggaaatgtggggttggatcccccacacagagtgcccactggggcactgcctagtggagctgtgagaagagggccactgtcctttagaccctagaatggtagatccagcaacagcttgcaccaagcctcaggcactcaacaccagcctgtgaaagcagccaggatgggggctgtaccctgcaaagtcacaggggtagagctacccaactccatgggagccca

SEQ ID NO: 8843 - DNA, 501 bp, Homo sapiens
  MAP TO AL050303.2; EXPRESSED IN BONE MARROW, SIGNAL = 1.3; EXPRESSED IN HELA, SIGNAL = 1.8; EXPRESSED IN BRAIN, SIGNAL = 1.5; EXPRESSED IN LUNG, SIGNAL = 1.1; EST_HUMAN HIT: BF306211.1, EVALUE 0.00e+00; SWISSPROT HIT: P17221, EVALUE 3.00e-06; NT HIT: AL163204.2, EVALUE 0.00e+00
cccaggtgaactggcgcagcgccaagggcaacacggccctgcacaactgtgccgagaccagcagcctggagatcctgcagctgctgctggggtgcaaggccagcatggaacgtgatagctacggcatgaccccgttgctcccggccagcgtgacgggccacaccaacatcgtggagtacctcatccaggagcagcccggccaggagcagctcataggggtagaggctcagcttaggctgccccaagaaggctcctccaccagccaggggtgtgcgcagcctcagggggctccgtgctgcatcttctcccctgaggtactgaacggggaatcttaccaaagctgctgtcccaccagccgggaagctgccatggaagccttggaattgctgggatctacctatgtggataagaaacgagatctgcttggggcccttaaacactggaggcgggccatggagctgcgtcaccaggggggtgagtacctgcccaaactggagcccc

SEQ ID NO: 8844 - DNA, 524 bp, Homo sapiens
  MAP TO AL163204.2; EXPRESSED IN PLACENTA, SIGNAL = 2.2; EXPRESSED IN BRAIN, SIGNAL = 1.4; EXPRESSED IN BONE MARROW, SIGNAL = 1.1; EXPRESSED IN HEART, SIGNAL = 1.3; EXPRESSED IN FETAL LIVER, SIGNAL = 0.94; EXPRESSED IN LUNG, SIGNAL = 1.2; NT HIT: gi16165981, EVALUE 0.00e+00; EST_HUMAN HIT: AL036326.1, EVALUE 0.00e+00; SWISSPROT HIT: P54274, EVALUE 6.00e-89
tttgccgagctttccgcgacggccgctcggaggacttctgcaggatccgcaacagggcagaggctattattcatggactatccagtctaacagcttaccagttgagaacgatatacatatgtcagtttttgacaagaattgcagcaggaaaaacccttgatgcacagtttgaaaatgatgaatgaattacacccttggaatcagccctgatgatttggggttcaactgaaaaggaacatgacaaacttcaagaagaaatacagaatttaattaaaattcaggctatagctgtttgtatggaaaatggcaactttaaagaagcagaagtctttgaaagaatatttggtgatccaaattcttatatgcctctcaaaagcaaattgcttatgataatctctcagaaagatacatttcattccttttttcaacacttcagctacaatcacatgatggagaaaattaagagttatgtgaattatgtgctaagtgaaaaatcatcaacctttctaatgaaggcagcagca

SEQ ID NO: 8845 - DNA, 534 bp, Homo sapiens
  MAP TO Z84487.2; EXPRESSED IN HEART, SIGNAL = 1.5; EXPRESSED IN BONE MARROW, SIGNAL = 0.74; EXPRESSED IN LUNG, SIGNAL = 1.1; EXPRESSED IN PLACENTA, SIGNAL = 1.8; EST_HUMAN HIT: AU139662.1, EVALUE 0.00e+00; SWISSPROT HIT: P46100, EVALUE 2.00e-98; NT HIT: gi14757747, EVALUE 0.00e+00
tctacgcaaccttggtcgaaaggagttgtccacaataatggatgaaaacaaccaatggtattgctacatttgtcacccagagcctttgttggacttggtcactgcatgtaacagcgtatttgagaatttagaacagttgttgcagcaaaataagaagaagataaaagttgacagtgaaaagagtaataaagtatatgaacatacatccagattttctccaaagaagactagttcaaattgtaatggagaagaaaagaaattagatgattcctgttctggctctgtaacctactcttattccgcactaattgtgcccaaagagatgattaagaaggcaaaaaaactgattgagaccacagccaacatgaactccagttatgttaaatttttaaagcaggcaacagataattcagaaatcagttctgctacaaaattacgtcagcttaaggcttttaagtctgtgttggctgatattaagaaggctcatcttgcattggaagaagacttaaattccgagtttcgagcgatggatgc

SEQ ID NO: 8846 - DNA, 511 bp, Homo sapiens
  MAP TO AF146191.1; EXPRESSED IN BRAIN, SIGNAL = 8.8; EXPRESSED IN HELA, SIGNAL =  11; EXPRESSED IN BONE MARROW, SIGNAL = 5.2; NT HIT: gi13643713, EVALUE 0.00e+00; EST_HUMAN HIT: BE728225.1, EVALUE 0.00e+00; SWISSPROT HIT: Q99867, EVALUE 6.00e-77
aaatgcagccggggaaacgggaccatgttcatggccagcttccgcaggtcagcattcagctggtcggggaagcacaggcacgtggtgaccccactcatggtagcagacaccaggtggttcaggtcaccataggtgggtgtgggcagttttagggtcctggaacatatgtcatatagcgcttcgttatctatgcagaaggtctcatctgcgttttctatgagctggtggactgagagggtggcgttgtagggctccaccacggtgtctgacaccttgggcaagagcaggatgctcaatgtgtttataatcctgtctgggtactcctcccagatcttactaatgagaagggtacccatcccagacccagtccccccacccagggagtgggtcagctggaaaccctgcaggcagtcacagctctcagcctcctttctgacaacgtccatcactgactccgtcagctccgcgccttcggtgtagcgtcccttggcccagttgtttccggccccac

SEQ ID NO: 8847 - DNA, 500 bp, Homo sapiens
  MAP TO AC005336.1; EXPRESSED IN HEART, SIGNAL = 1.3; EXPRESSED IN BONE MARROW, SIGNAL = 0.83; SWISSPROT HIT: O00411, EVALUE 4.00e-79; NT HIT: gi14790137, EVALUE 0.00e+00; EST_HUMAN HIT: AI023790.1, EVALUE 0.00e+00
agctccaggtcgaaggcccctggcttgggcaccacctgcagtgtctccttcatctggctggcctccaagatcttctggggctcagagcagaaccgcctgaccaggaacctggacaggtcctgcaggatggactcgctgtgcaagcaaactgctcccggcacacctggttcatgatggagacatcagctgcatgggtccggtaacagtcgtgcacagagacgaaggtcaggcccttcctgtagcagtgcagggtggtgagcatcatgtgtgaggagtccagcgagtggatgaagttgggccggaagccgttcttctgcttaggtgtgttgggcttccggctgatgtctctgttgtgggtgtaagtgatgctctgaattccacctcctgattgcttgaccttggactccaggcgatacggctggatgatggggacgcccaggggggtgacccactccaccacagagcccgtgtgggagacgaggtgggcgctctcgatcagc

SEQ ID NO: 8848 - DNA, 507 bp, Homo sapiens
  MAP TO AL121827.9; EXPRESSED IN BRAIN, SIGNAL = 2.1; EXPRESSED IN HELA, SIGNAL = 1.1; EXPRESSED IN BONE MARROW, SIGNAL = 0.87; EST_HUMAN HIT: AL535991.1, EVALUE 0.00e+00; SWISSPROT HIT: O43526, EVALUE 8.00e-26; NT HIT: gi14769907, EVALUE 3.00e-85
tgtcgacatgctcccggctgtcttccgggctgtggtacggcggcgccggctccggctctttggccccaaagtaggcctcggtctctgtcggggggatgcccatccgctgcatgtagatattcaccaggaagtccagcttcttctccatggacaagacctgcaaaaggggctgctgggctggggtgcgagggcccgtcccaggagatgtggggacccaggctgctcccaggaaatgggggggcccaggctggttccaggaaacaggagagacccaggctagtcccaggaaacgggggacccaggctagtcccaggagatgtggggacccgggctgctcccaggaaatgggggggcccaggctggttccaggaaacaggagagacccaggctagtcccaggaaatgggggacccaggctagtcccaggaaatgggggggacccaggctggtcctaggagatggggggacctggaccactcccaggaagtcggtcgacttgggctggtcc

SEQ ID NO: 8849 - DNA, 519 bp, Homo sapiens
  MAP TO AL121747.19; EXPRESSED IN HELA, SIGNAL = 1.2; EXPRESSED IN BRAIN, SIGNAL = 1.4; EXPRESSED IN PLACENTA, SIGNAL = 1.6; EXPRESSED IN LUNG, SIGNAL = 1.3; EXPRESSED IN HEART, SIGNAL = 1.6; EXPRESSED IN BONE MARROW, SIGNAL = 1.5; NT HIT: gi15305601, EVALUE 4.00e-63; EST_HUMAN HIT: AI337349.1, EVALUE 0.00e+00; SWISSPROT HIT: Q09254, EVALUE 4.20e-01
gaactccgtcccgcctgtgggctgtgggccgttagcaaagctgctagcatgaaatcgtcgagcaccgcttgcgaaacgccaaatcctcgagagcgaggccggaggctgccaaacccgcgctggggaaagggccgcctccgggcgccccatcccgctgcggacggaggtgaggttggagcgagcgctggcggaagagaggctcagcgcagggggcgcagagccggcgctggccaatatgcgccgcatgtgatacctttgagggcgcggcgggggagggtagcgtcaaatttcaaaaaaaaaaaaaaaccaaacccacacagccccggcgggcgggcgcgcgcgatgggcgccctttggctgcgggagcgagtggaggatgctgggaaggaggtaaaatggccaccggcggcggcgcggaggaagagaggaaacgggggcggccgcagcttctgccccccgcgcggcccgcggcccggggcgaggaggccgacggcggccgcgagaagatgggctgggccc

SEQ ID NO: 8850 - DNA, 558 bp, Homo sapiens
  MAP TO AC006213.1; EXPRESSED IN HELA, SIGNAL = 2.2; EXPRESSED IN BRAIN, SIGNAL = 0.95; EXPRESSED IN BONE MARROW, SIGNAL = 1.1; EXPRESSED IN FETAL LIVER, SIGNAL =   1; NT HIT: gi4507974, EVALUE 1.00e-29; EST_HUMAN HIT: N47183.1, EVALUE 4.00e-95; SWISSPROT HIT: Q14585, EVALUE 3.00e-70
tcatgttggcttgaaaccctttgaatgtaaggaatgtggggaaacgtttagattatatcgacatatgtgtctgcatcagaaaattcatcatggtgtgaaaccctacaaatgtaaagaatgtggaaaggcttttggtcatcgttcaagtctttaccaacataagaaaattcattctggtgagaaaccatataaatgtgaacaatgtgaaaaggcctttgttcgcagctatctacttgttgaacatcaaagaagtcatactggtgagaaacctcatgaatgcatggaatgtggaaaggcttttagtaagggctcaagccttcttaaacataagagaattcatagtagtgagaaactctatgattgtaaggattgtggaaaggccttttgtagaggctctcaacttacacagcatcagagaattcatactggtgagaagccacatgaatgtaaagaatgtgggaagacttttaagcttcattcatatcttattcaacatcagataattcatactgatttgaagccatatgaatgtaagcaatgtgggaaagccttcagtcg

SEQ ID NO: 8851 - DNA, 507 bp, Homo sapiens
  MAP TO AP001743.1; EXPRESSED IN HELA, SIGNAL = 0.98; EXPRESSED IN PLACENTA, SIGNAL = 3.8; EXPRESSED IN BRAIN, SIGNAL = 1.7; EXPRESSED IN BONE MARROW, SIGNAL = 1.7; EXPRESSED IN LUNG, SIGNAL = 1.6; SWISSPROT HIT: P14400, EVALUE 2.70e+00; NT HIT: gi14780528, EVALUE 0.00e+00; EST_HUMAN HIT: AW978385.1, EVALUE 0.00e+00
ggccccggcccaggacttactgccttggtaaggcatggtgtggagccccatccagtttaaaactctggcctgccagaggtcccttctagagttaagctgacagaccgtaatggttgctggcgggggatctggagatactctgcaaagctaagtcaaccttacattgcaatgtatgactttttgtttgtttggtatccagcaaacacatctaaacaaatcccaaacatccctctgcagttcttgccccgagtctcccggaacgcagctcagtagctgtacatctgctgctgctgctgctccgcctgcacctggggctgggccgcctgctgtgggggtgcctgcggctgcgagggtggcaagacgtcagtctggggcactgcccgccacgtgagcgggtgctggtcactaagctggctccccaggggcgtgatggagttgaccagggtcgtcaggttgatgaaatgggccacagactgtgggttcgaggcttccggctgggggtggatc

SEQ ID NO: 8852 - DNA, 500 bp, Homo sapiens
  MAP TO AL355840.2; EXPRESSED IN BRAIN, SIGNAL = 1.1; EXPRESSED IN HELA, SIGNAL = 2.2; EXPRESSED IN BONE MARROW, SIGNAL = 1.1; EXPRESSED IN LUNG, SIGNAL = 1.1; NT HIT: AB049737.1, EVALUE 8.00e-80; EST_HUMAN HIT: BI553351.1, EVALUE 0.00e+00; SWISSPROT HIT: Q03637, EVALUE 2.70e-02
tagggccgccgactgagctggcacgggccggtccattcccggcgctgtagggagcacagcattctctggaggcgagtctcctcccgggatccaggatccgctcgcgccccgctcagcctccggccttcaggcggtagagggcggcctacgcctgtgtgcgagccggagccggcgtgcgcagccgctgccctgctggaactgtgccgtcccgctgtggcccgcggctctgctaggcggtggatgctgctgctacgctctccaccggcgcagcgaggaagggggcggggagaatccctggcacatgccagggtcgccgtaggtggcagcggccggcgcatgcgcgccctctcccagaagccaggaacgccgaggggcgcgctcccccattcgcgcgcgcacgccggcgctggccgaggcttccccgcctgcgctcgttgtcagagccgctccggcgcgtgcgcgcgttatctccggccgacccgagcagccggttccctcct

SEQ ID NO: 8853 - DNA, 590 bp, Homo sapiens
  MAP TO AC026405.1; EXPRESSED IN BONE MARROW, SIGNAL = 1.3; EXPRESSED IN BRAIN, SIGNAL = 2.6; EXPRESSED IN HELA, SIGNAL = 1.8; EST_HUMAN HIT: AW410524.1, EVALUE 1.00e-106; SWISSPROT HIT: O14682, EVALUE 3.00e-29; NT HIT: gi14781330, EVALUE 1.00e-106
ccggtggcaagggaaggtcctatttccggcatggagaaggacgtcagtgaagagacgctgctggcgtaaaagattcaggtgagtgaggacgctgtcagcgtaggaggacttgtgaaacagatagatgttaatggagccgctgctggccctggacttgcggttctcatgcacactgactgacattttgtttccactcctaaaaataataataataataaattgaaaatgatgctcctgatgttcagaacagcagaacgaaagcaacaatggttttgcacaaaaaacagaacactttgttgttgaccatgccacctactattctagaatagtgtatggccattccaggacaaagccagagacaactacccggaaggaaggatattcactgctaatactgttgagctatttgaactctgcactgtttaaaaaaaaaaaaaaaatcactgcataaaaagcaggttcatcttggaaaacctgattgccaactttcaggccatcgaagtcttttagaatataagtcagcaaaagccaagaggagtgagtctcattcccacagctccctgtcctagtccagctcattcactgcgggc

SEQ ID NO: 8854 - DNA, 558 bp, Homo sapiens
  MAP TO AL049758.11; EXPRESSED IN LUNG, SIGNAL = 1.3; EXPRESSED IN BONE MARROW, SIGNAL = 1.2; EXPRESSED IN FETAL LIVER, SIGNAL = 1.4; EXPRESSED IN BRAIN, SIGNAL = 1.2; NT HIT: X05423.1, EVALUE 1.30e-01; EST_HUMAN HIT: BG997443.1, EVALUE 7.80e-01; SWISSPROT HIT: P04390, EVALUE 9.10e+00
tgcccagtcctctcttcccaagctacatggaagagattgtgttccaggtgctacagtctcaggtaggtgaaacctccatcagtctggacaatcaagatgacacatggaggacaggtactctagagaaccacctgaacccttagctgactttatgtgaaaaagaaatcaattgtcattgtgttcagcccttgagatctgggggatgtttataaccttagtataacttggcctatccagacaacacagggcatctttaaatgttatctaccacaggttacacatttcactgtctttaggtctcattccgcctggttaggcaatcacaaataacactgctgggcctagagaactgactccatacaaggagcttcttgttggcaatcccttccgtgttaagcacattcaatgaaaatgatgtaaatgatgctcattaacctcctcctggagttggatacaaagctatggatcatgatcactggaccattctggggatagtctttcagcctggagcctgcagtaaacttgatctgatttgcaagcatcccaggagagcctggc

SEQ ID NO: 8855 - DNA, 562 bp, Homo sapiens
  MAP TO Z68165.1; EXPRESSED IN HELA, SIGNAL =   1; EXPRESSED IN LUNG, SIGNAL = 0.92; EXPRESSED IN BONE MARROW, SIGNAL =   1; SWISSPROT HIT: Q64181, EVALUE 2.70e-01; NT HIT: gi14732254, EVALUE 1.00e-101; EST_HUMAN HIT: BE174470.1, EVALUE 1.00e-101
agcgggcgcccatgtacaacagcggcctgagccctgccacacccacgcctgcggcgcccacctcgcctctgacacccaccacacctccggctgtcgcccctaccactcagacacccccggttgccatggtggccccgcagacccaggcccctgctcagcagcagcctaagaagaacctgtccctcacggtaggtgtacactggtagggcccacaggccaccaggtaggtggtacggccctggccacctcccctagcgtgggggtgccacggtgcctgcagggggatgcaggaggtggtcctggcggggccctggcacccacacccctctccccgctgtagagagagcagatgttcgctgcccaggagatgttcaagacggccaacaaagtcacgcggcccgagaaggccctcatcctgggcttcatggccggctcccgaggtatgttcataaggcagggcctgggggtgcaccgggccgggttgggggcgggtgcccccagacactcacccagcagctcctgctctctgcagagaacccgtgccaggagcagggggacgtga

SEQ ID NO: 8856 - DNA, 532 bp, Homo sapiens
  MAP TO AC015525.3; EXPRESSED IN BRAIN, SIGNAL = 1.7; EXPRESSED IN BONE MARROW, SIGNAL = 1.9; EXPRESSED IN LUNG, SIGNAL = 1.9; EXPRESSED IN HELA, SIGNAL = 1.4; EST_HUMAN HIT: BG433950.1, EVALUE 0.00e+00; SWISSPROT HIT: P10267, EVALUE 1.00e-101; NT HIT: X82272.1, EVALUE 0.00e+00
cccattcccaagggtagaaagactgcaattttttatgcttatgtttgtctaaactttctgttaagtcgctatcaacagctggactcacttgtgcacttggacacgactgagtttgtcctgagcaattgtggtagaattgacctcgaggtacccaatctataatagttccgaattcattgttttgtaatatcaccgcactattggccacacattcttcccaaactaaaacttctgtattttttgattctttgggaatttccttggggcaaggtttccctttaggtctaaattttaatgatctttgataagaaaagtcttataaataatttacccgtggcctgagtgacatcccgcttaccatgtgataagtgaatctacagatgggactgacaataggtacttctaccaaccaattttggactgtgggcattaaacatcctggtgctctccctaggcaaataggaggataacgatacccaatggaaatatttatcatcatcccttcttcctcaggtttggcagggcagcgatc

SEQ ID NO: 8857 - DNA, 552 bp, Homo sapiens
  MAP TO AL117328.5; EXPRESSED IN BRAIN, SIGNAL = 1.1; EXPRESSED IN HELA, SIGNAL = 1.1; EXPRESSED IN BONE MARROW, SIGNAL =   1; EXPRESSED IN LUNG, SIGNAL =   1; NT HIT: gi11418333, EVALUE 0.00e+00; EST_HUMAN HIT: BE250548.1, EVALUE 0.00e+00; SWISSPROT HIT: P53246, EVALUE 3.10e-02
tctggcgccatcttccagcagaataaaaaggtcatgaaaagactgaagtcggaggtctggcatcacttctccctggcccccatggacagcctcaaggccgagtgtcggtactgcggctgtgccatcagccgggggaagaagggtgatgtgggcaccagctgcctgatgagacatctctaccggcgccatccagaagttgtcgggagccagaagggcttcctgggtgcaagtctggcaaactctccgtatgccactttggcctctgcagaaagttcctcttccaaattgactgacttgccaacagtggtcacaaaaaacaatcaagttatgtttcctgttaatagcaaaaagacctcgaagctgtggaatcatttttctatttgctccgcagactccacaaaagtcgtgtgcttgcactgtggccggaccatcagccgggggaagaagccgactaacttgggtaccagctgtcttctgagacatttacagcggttccatagcaacgtgctgaaaactgaggtctcggagacggctcggccctcctctccggac

SEQ ID NO: 8858 - DNA, 543 bp, Homo sapiens
  MAP TO AC027307.3; EXPRESSED IN BONE MARROW, SIGNAL = 2.3; EXPRESSED IN HEART, SIGNAL = 2.7; EXPRESSED IN PLACENTA, SIGNAL = 2.8; EXPRESSED IN BRAIN, SIGNAL = 2.1; EXPRESSED IN HELA, SIGNAL = 0.94; SWISSPROT HIT: P06333, EVALUE 2.00e-05; NT HIT: gi14769653, EVALUE 2.00e-89; EST_HUMAN HIT: AL045115.1, EVALUE 4.00e-89
agagggtgcgtgtgcatgggctcaagtgtatgtttggtgtgtgagtgagcaagggagtgagcatgttttctcacgtgtgcatatgtgtgtgtgtgcccacgtgtgcatgtgagtatatgtgtgtgcgtgtgaccatgtgtgcacgtgtgagtgcgtgcgtgtgcatgactgcacatgcgtgtgctctgtgtgcacccatctgtgcatgggtgaccatgaaagcctctgtgtggttgacaccatctctgctgagggtggctgcccggcccctcgacttgtcatgctcatagccagtagcctcagtcccgcctgcgagcagctccggggagcccaggcctgcctcacggccctcccccacccgcccctctctctgcagtcaagccaagccagaccccgcagccgaaggacaagtgaagcagccccctgagcctcacaaggacctcctggctggtgaggagggggccgcgccaggctcccaggcctccacagagtcttcagcgcatcccccaacagcagcccctgccagtccctcgggtccaggca

SEQ ID NO: 8859 - DNA, 533 bp, Homo sapiens
  MAP TO AC009948.2; EXPRESSED IN HELA, SIGNAL = 1.6; EXPRESSED IN BONE MARROW, SIGNAL = 0.87; EXPRESSED IN HEART, SIGNAL = 4.1; EST_HUMAN HIT: R53203.1, EVALUE 1.90e-01; SWISSPROT HIT: P05548, EVALUE 2.00e-06; NT HIT: X92412.1, EVALUE 0.00e+00
ggcctccttgcgcttgatggtgtctgtatctggaagaccacctcctgtcataacgtggagcaagcagggcattgaccttgcaagccgggcaattattgacaccactgagagctactcattgctaatagtggacaaagttaatcggtacgatgctggaaaatacacaattgaagctgaaaaccaatctggcaagaaatcagcaacagtccttgttaaagtctatggtaagcattttacttaaaattggctatacaatgagtagatcctctaaaacaatatagcttgacctatgattgatcacctctctagaaaggaactatgttgattatatttccccaagaaaaaaaaagctatcaggcaaataggaaatatgaatctttcattctgtttttcagatactcctggtccctgtccttcagtgaaagttaaggaagtatcaagagattctgtgactataacttgggaaattcccacgattgatggtggagctccagtcaacaattacatcgttgagaagcgtgaagctgctatga

SEQ ID NO: 8860 - DNA, 532 bp, Homo sapiens
  MAP TO AC022423.2; EXPRESSED IN LUNG, SIGNAL = 1.6; EXPRESSED IN BONE MARROW, SIGNAL = 1.2; EXPRESSED IN FETAL LIVER, SIGNAL = 1.3; EXPRESSED IN HELA, SIGNAL = 0.72; EXPRESSED IN HEART, SIGNAL = 1.7; EST_HUMAN HIT: BF933404.1, EVALUE 0.00e+00; SWISSPROT HIT: P15269, EVALUE 1.60e+00; NT HIT: AF338650.1, EVALUE 0.00e+00
ttcaccccaaggccagcgaccaggacctactccatgccagcccagttctcaagccattttggacgggagggtcaccccccacacagcctgggtcgctctcgggacagccaggtccctgtgacaagcagtgttgtccccgaggcaaaggcatccagaggtggtcttcccagcctggctaatggacagggcatatatagtgtaaagccgctgctggacacatcgaggaatcttccagccacagatgaaggggatatcatttcagtccaggagacgagctgcctagtcacagacaaaatcaaagtcaccagacgacactactgctatgagcagaactggccccatgaatctacctcatttttctctgtgaagcagcggatcaagtcttttgagaacctggccaatgctgaccggcctgtagccaagtccggggcttccccatttttgtcggtgagctccaagcctcccattgggaggcggtcttccggcagcattgtttccgggagcctgggccacccaggtgacgcagcagcaa

SEQ ID NO: 8861 - DNA, 501 bp, Homo sapiens
  MAP TO AL035662.21; EXPRESSED IN BRAIN, SIGNAL = 1.3; EXPRESSED IN HELA, SIGNAL = 1.7; EXPRESSED IN LUNG, SIGNAL = 1.1; EXPRESSED IN BONE MARROW, SIGNAL = 1.1; NT HIT: gi14786168, EVALUE 3.00e-67; EST_HUMAN HIT: BF356215.1, EVALUE 2.00e-56; SWISSPROT HIT: P55286, EVALUE 3.00e-07
tgcctgctacagacccccagcacctagagtcctcagagagtgtatctcttcatagggctgagaagggagacctcaggcctcaacacccaggaaaacctttaacactgctctcccattggccacctccaccccagagtaatctagcctcgatttgcatacctcccgagatgggtagctcactacctctccagacactcagctcagttctgattgcaagaatggctttttgaacagaaatccaggaaatctgtaggaatgttgaggctgggcccgctctgctgggtgggaggcgggaggagatggggtagagggtccttctaatgccctgggaggggcttggccctcagttgccccctctgtccccctcgcagtgctggtgctgctgatcctcaccctcaggcgccaccacaagagccacctgagctcggacgaggatgaagacatgcgggacaacgtcatcaaatacaacgacgaaggcggcggcgagcaggacaccgaagc

SEQ ID NO: 8862 - DNA, 525 bp, Homo sapiens
  MAP TO AL133325.13; EXPRESSED IN HELA, SIGNAL = 0.6; EXPRESSED IN BONE MARROW, SIGNAL = 0.98; EXPRESSED IN LUNG, SIGNAL = 0.95; SWISSPROT HIT: O95096, EVALUE 5.00e-19; NT HIT: AF019415.1, EVALUE 0.00e+00; EST_HUMAN HIT: BI962557.1, EVALUE 1.00e-39
atggccgagccgatcaatgctgggattgtggggtatttcttttaaaaatctgcccacgtctcgccggagaggaaaccgcttaagggcgccggagcccttaacccgcgatgatcttcagtgccacttccccccccaaattctcacccacactatgtgagccccttgaaaggcgagcccctagcccccactcctacggatttccctctttaccctgggaggtcccgacgtcttcgtcaggcgtagaggaaggcaggggtcatggcaaaggcagcggggctgggctgccaggcgcggaggtccagggtcgcacggaggatccagggtgctccgagtctggtgcaggctgcgcgcggcctccagacgcctgacgcgcttctctctccccctccccccagtgcacggtctggctgccggggcgccccctcaggactcaagctccaagtccccggagccctcggccgacgagtcaccggacaatgacaaggagaccccgggcggcgggggggacgccggcaagaagcgaaa

SEQ ID NO: 8863 - DNA, 509 bp, Homo sapiens
  MAP TO AC004032.7; EXPRESSED IN BRAIN, SIGNAL = 1.3; EXPRESSED IN HEART, SIGNAL = 1.5; EXPRESSED IN BONE MARROW, SIGNAL = 1.4; EXPRESSED IN LUNG, SIGNAL = 1.3; EXPRESSED IN HELA, SIGNAL = 0.52; SWISSPROT HIT: O88573, EVALUE 5.50e-01; NT HIT: Y11107.3, EVALUE 1.90e+00
tcccagctgctcaggccagggtggaatcccaaatgccctgtatctgggcagctcctgtctgcagagccacagtttcctcatctgcaacttgggggtggtgattcctgctgagcccggctaagagcagcatgggagacctcacgagagactggcaataccatgtgcatgttggggggtcagtcccagaggctggggcaacatcatctcaaaacagataaccctgtgtgtgcctcacccgattcaggcagcacagggggccgagggcaggggcctctggttcttggggactgatgggcatgcctgcccagcaaggaaagactgcaggacagtttttaaggacagctatggccagaaagaaccacctcacactccatgcccagggtcaaggcccagagctgagacagacacccctgctctttctcctcccaaaagcactcctcagcttttcttcatggcacaaatcctcgctgatcttccggcctcttcctactaccccgtcacccctgccc

SEQ ID NO: 8864 - DNA, 505 bp, Homo sapiens
  MAP TO AP001052.1; EXPRESSED IN HELA, SIGNAL = 0.93; EXPRESSED IN BRAIN, SIGNAL = 0.94; EXPRESSED IN BONE MARROW, SIGNAL = 0.95; NT HIT: gi14780631, EVALUE 4.00e-66; EST_HUMAN HIT: AW500084.1, EVALUE 6.00e-66; SWISSPROT HIT: Q14684, EVALUE 5.00e-17
tggagctctgtggcctgcccagccagaaaacagcaagtttgaaaaagaggaagaaaatgagagtgatgtcaaacttggtggagcacaacggggtgctggagtccgaagctgggcaaccccaggctctggtaaggtgggagcacccacaggccagctcgccacagaggcactcactcgcgtccatggggctccactgcctcctgagaggaagggtgggggctggcggccaggcctctggactcagcagcagttagaatagggtgtgttcataacagccttcactaaggaggaaatcacaggtgaccagtacttcggtcctcctcatcggccaccttcactcccttaggccacatgcttgggttcgggagggcccactccaagctgggaaagttatcccttgggccaggcactcctgccccaggcgtgttcaggccagtctaggcctctgtcaaaggcaggtctggttttcttcatcagcgcatggccagtccaggcccctttggca

SEQ ID NO: 8865 - DNA, 573 bp, Homo sapiens
  MAP TO AF166490.1; EXPRESSED IN BRAIN, SIGNAL = 0.77; EXPRESSED IN HELA, SIGNAL = 0.65; EXPRESSED IN BONE MARROW, SIGNAL = 0.77; NT HIT: gi14760087, EVALUE 2.00e-13; EST_HUMAN HIT: AI539590.1, EVALUE 0.00e+00; SWISSPROT HIT: P52742, EVALUE 6.00e-30
gcattttcacactgacgacaggcacagaattttcgtgatgtgatttctcccatttatttaacagagctgtggatgaagactcctccacattcctttgatctatagtttcattctctcacgttgtatatggtcagcctagagtctgaagtttgtgccataaacattaaatacatctggattctctctaccttgaattcatttaggttgagcaaagtggtaaatataaataaaggcttttccacactgattacagacataatattcctgtagtatgtttgtccttggtgtatttagtgttaacgctacagctgatgattcttacatattcattgcttttttagtgtgagttctctcatgttgtctaaggttaaaaaatttactaaaggctttcccacatagaggacatacatatggtttctctccagtgtgaactcttctatgaagtctaaagttgtaacttctattgaaggctttaccacatatattgcattcatatggtttctctccagtgtgagttctctcatgtcgtctaaggacagaagagtgattgaaggcttttccgcatagatggca

SEQ ID NO: 8866 - DNA, 510 bp, Homo sapiens
  MAP TO AC004624.6; EXPRESSED IN HELA, SIGNAL = 0.66; EXPRESSED IN BRAIN, SIGNAL = 0.79; EXPRESSED IN BONE MARROW, SIGNAL = 0.74; EXPRESSED IN FETAL LIVER, SIGNAL = 0.92; NT HIT: gi14786703, EVALUE 1.20e-01; EST_HUMAN HIT: AW514737.1, EVALUE 3.00e-03
ggagccataggctctcgggtcagacaggtttttattcaaatcctgcccctagttatggtgtgacctgaggcaagttagttcacctccgtgagcctcaattttcttgtctgtagaatgggtacaatcaacacacacaacttgaagtgttgcggtcaatggagaatttatctaaagtgctcacaaagtaagcactcaatgaatattagctaacatttgctgcacttggcttttctaacccaacctaatcattatcatgtcttctctcacctttatattcatcataatccctaacactcatgtattcaacacgggcgacactacctaacacaaccaggtgctctggcaacactcaccccacttctgatctggcccaagcactagctacccgcttcaaccatggacagaccctcccagtctcccagtttgctgtggacattaccattgtatttcacctggaatctggcccacagggtgcagtgatgtcccctgcccagccccagctgaaattgg

SEQ ID NO: 8867 - DNA, 515 bp, Homo sapiens
  MAP TO AC005752.1; EXPRESSED IN BRAIN, SIGNAL = 2.6; EXPRESSED IN HELA, SIGNAL = 2.3; EXPRESSED IN LUNG, SIGNAL = 1.8; EXPRESSED IN HEART, SIGNAL = 1.8; EXPRESSED IN BONE MARROW, SIGNAL = 1.1; NT HIT: gi14727743, EVALUE 0.00e+00; SWISSPROT HIT: Q9Y5F2, EVALUE 6.00e-94; EST_HUMAN HIT: BI850895.1, EVALUE 0.00e+00
tgtcgttggcgtccagcaccagcacgcgcaccagcgcctcgctgctcaaagccggggagccgcggtctgtggcgcccacgcggaagtcgaaagcctgcagggcctcgtagtccagcgacctgagggcgaacaggtggccgttgtctgtgttgatggagaccagggaggcgaggggcaggtgcaggtcctggggcgggagtagcgagtagttgacctgggcgttggtgcctgagtctctgtctgtagcgctgacactgccgatgtgcagggcggggctgttgttctcgcggacgaacagggtgtaggaggtttgggtgaaggtgggggcgttgtcattgacgtcagagaccaacacagttgtgttgtgctcggttttcagcctgggtatccccaagtcggtgacggtgatggtgatattgtactcggctgtgctctctctgtccagtggtctctctgtttccaacgtgtagtaattctcaactgaagattttagcacgaatgggaggtcttccgga

SEQ ID NO: 8868 - DNA, 522 bp, Homo sapiens
  MAP TO AL021938.1; EXPRESSED IN BONE MARROW, SIGNAL = 1.3; EXPRESSED IN FETAL LIVER, SIGNAL = 1.1; EXPRESSED IN HELA, SIGNAL = 0.96; NT HIT: gi11863151, EVALUE 0.00e+00; SWISSPROT HIT: Q92833, EVALUE 4.00e-70; EST_HUMAN HIT: AL041595.1, EVALUE 2.00e-78
tgcggcttgtgcacggactccggttgcgaggtagaacgattttcacaggaggcgctgtccgccttgccatgtgcttgtctgcctggcgtgctcttcccggccgtggcccgcttcggccgattcctctccagactgcgctccggcacttccttcttcacgtgtccgttcagcagacctctctcggccggggccttcttgccagggccttcggcggggccagccgcccctttcatcttcttggggggcgactgcggcttctccgcctggtgtgcctcttccagtctcctcttggagttccgcagcccctcccgcagctgcaggccctcccgcagctgccgcccccccacctccttagtgcatgactttgggttcaacctgccactgaccttgaggccattgacggcgggcccagtggacttggacgcccccccgagggatagcacctgtttgcgggtttttgcattgctactttcagttttccctgagattgtgtggttgacagcggaactgggcttgtggtga

SEQ ID NO: 8869 - DNA, 538 bp, Homo sapiens
  MAP TO AC005000.1; EXPRESSED IN HELA, SIGNAL = 0.76; EXPRESSED IN PLACENTA, SIGNAL = 1.7; EXPRESSED IN BRAIN, SIGNAL = 1.5; EXPRESSED IN BONE MARROW, SIGNAL = 1.4; NT HIT: gi14740527, EVALUE 0.00e+00; SWISSPROT HIT: P00966, EVALUE 3.00e-74; EST_HUMAN HIT: BE783168.1, EVALUE 0.00e+00
ccgggtcctgggtcttcgtggagagacctggaaatgcttggttcttagggttctccaagattccagcctcattgctgatctgcatgaggttctcgtccatgttccacaggttcttgggagtgactgggatgggaatcccgtgttgctttgtgtgttccataaggtcatttcggaccttgaacctgttgtagaacttgggcatcctccagggagcaatgacctttatctgggggggccagagagtagcagtttagctcaaactggacctgatcatttccctttcctgtggcgctgtgggacacttacttggccctctcctgctgggcgatttccacttgttttcgggcgatgcagggcctggtgagagaggtgcccaggaggtagtggtcctcatacagtgcgctggactggatggccagccagatgaactccttcacaaactccttgctgacttcctcaatgaacacctttttgcccccaagcttcagtgccttcttcctggcttcctcaaagtcttccttctggccagtgttggcca

SEQ ID NO: 8870 - DNA, 506 bp, Homo sapiens
  MAP TO AC002094.1; EXPRESSED IN BONE MARROW, SIGNAL = 1.2; EXPRESSED IN HELA, SIGNAL = 2.5; EXPRESSED IN BRAIN, SIGNAL =   1; NT HIT: AF382388.1, EVALUE 0.00e+00; SWISSPROT HIT: P04004, EVALUE 1.00e-20; EST_HUMAN HIT: BI758517.1, EVALUE 0.00e+00
ctcgcccaggcccagtgttccaggaatgtgacctttgctgcagcagccgctggagggggcagaggggatgggctggaggttgagcaaacagagcagcagaaaaggcagttcctcttctccagtgccctccttccctgtctctgcctctccctcccttcctcaggcatcagagcggagacttcagggagaccagagcccagcttgccaggcactgagctagaagccctgccatggcacccctgagaccccttctcatactggccctgctggcatgggttgctctggctgaccaaggtacaggggagtgttggtggccatctgggtcaatgtagggagggcgagggtggtctgggcttggtggcaccgactgacactccttcctcatagagtcatgcaagggccgctgcactgagggcttcaacgtggacaagaagtgccagtgtgacgagctctgctcttactaccagagctgctgcacagactatacggctgagtgcaagccccaa

SEQ ID NO: 8871 - DNA, 522 bp, Homo sapiens
  MAP TO AL122018.4; EXPRESSED IN HELA, SIGNAL = 1.3; EXPRESSED IN BRAIN, SIGNAL = 4.3; EXPRESSED IN HEART, SIGNAL =  10; EXPRESSED IN BONE MARROW, SIGNAL = 2.2; EXPRESSED IN LUNG, SIGNAL = 2.5; NT HIT: gi16168524, EVALUE 0.00e+00; EST_HUMAN HIT: BG761470.1, EVALUE 0.00e+00; SWISSPROT HIT: Q99798, EVALUE 4.00e-84
ggccacaagcattggccaggacgatgccacccacattcctcaaaatctgtgcgtagctgtcccgctcaatggtggcgtggatctgctcggagcctggagtgatggtgaagtgggacttgcacttgaagtcatgggccagtgcctgcttggccacagctgctgagcgcccgggatcttcatagctttaactgttgcaggtaccagtcagacctactcggatgtccagaggccatccttccttctctgccaccttgcccacttctgccacagggtgagcctggtcgggggtgaagggcccattgatgtgcggcttcagctcactgaggttaatttcaattagttggtcataatggcagccagggtcaggcaccaagtgatcctggaattcatcagctagattggcaatgtctgtccggccgtcttgcttaggtacctcctcatcctgtggttgtaagggaacacggaagtggtggccccaatttctgcgcccatgttgcagattgtcgccatgccagcacagga

SEQ ID NO: 8872 - DNA, 503 bp, Homo sapiens
  MAP TO AC007608.2; EXPRESSED IN HELA, SIGNAL = 3.8; EXPRESSED IN BRAIN, SIGNAL = 2.3; EXPRESSED IN BONE MARROW, SIGNAL =   3; EXPRESSED IN LUNG, SIGNAL = 2.6; EXPRESSED IN FETAL LIVER, SIGNAL = 2.7; NT HIT: AJ303140.1, EVALUE 0.00e+00; EST_HUMAN HIT: AI538472.1, EVALUE 0.00e+00; SWISSPROT HIT: Q9NRS6, EVALUE 1.00e-03
ggatcgcccgttttcagggcatgctttacaccggcctggttaactttactctgggtgtgctccgtccgccgcagcccccgccgggaggtggccacagctctctctggttgcgccctaggtgtaccaaatcatcgtcatccagactgggagctttgacaacaacaaggccgtcctggaacggcgctattccgacttcgcgaagctccagaaagcgctgctgaagacgttcagggaggagatcgaagacgtggagtttcccaggaagcacctgactgggaacttcgctgaggagatgatctgtgagcgtcggcgcgccctgcaggagtacctgggcctgctctacgccatccgctgcgtgcgccgctcccgggagttcctggacttcctcacgcggccggagctgcgcgaggctttcggctgcctgcgggccggccagtacccgcgcgccctggagctgctgctgcgcgtgctgccgctgcaggagaagctcaccgcccactgcc

SEQ ID NO: 8873 - DNA, 519 bp, Homo sapiens
  MAP TO AL359236.1; EXPRESSED IN BONE MARROW, SIGNAL = 3.3; EXPRESSED IN LUNG, SIGNAL = 3.3; EXPRESSED IN PLACENTA, SIGNAL = 3.8; EXPRESSED IN BRAIN, SIGNAL = 2.2; SWISSPROT HIT: P26599, EVALUE 2.00e-62; EST_HUMAN HIT: BG760552.1, EVALUE 0.00e+00; NT HIT: gi14165462, EVALUE 0.00e+00
agaagcgccggtgtcccctccagagtgacccacatccagaagctcccatcgacgtcatcgaaggggaggtgatctccctggagctgccctttgggaaggttactaacctcctgatgctgaaggggaaaaaccaggccttcatcaagatgagcacggaggaggctgccaacaccatggtgaattactacacctcggtgacgcccgtgctgcgcggccagcccatctacatccagttctccaaccacaaggggctgaagaccgacagctctcccaaccaggcgcgggacccggcagccctcaggccgtgaactcggtccagtcggggaacctggcctggactgccccggcggcacgtagacgcagggatggcgatggccgggcagagcctggtgctcaggatcatcgtggagaacctcttctaccccacgaccctggatgtgctgcaccagattttctccaagttcggcacagtgaagaccatcacattcatcaaggacaaccagttccaggccctgctgc

SEQ ID NO: 8874 - DNA, 509 bp, Homo sapiens
  MAP TO AC002119.1; EXPRESSED IN HELA, SIGNAL = 0.47; EXPRESSED IN BRAIN, SIGNAL = 3.9; EXPRESSED IN BONE MARROW, SIGNAL = 0.81; EXPRESSED IN FETAL LIVER, SIGNAL = 0.99; NT HIT: gi4502736, EVALUE 0.00e+00; EST_HUMAN HIT: AW950288.1, EVALUE 0.00e+00; SWISSPROT HIT: Q62938, EVALUE 2.00e-25
cagccggcagccttgcctaccctggacccagcaagggcacaggcggcaggggcaggtcagtcctttgagttccccaaagtgggaggtcagtggcctgggtggctctgaatacatcttctgggttttgcgcaaggctcgtgagttcaaaagtgcccagagttcttggcagggatgaaaaaaaccccagggagagactgtgggaaaggtgaggcccttggtggctttgctagacacatactgtacacaaaactgatttaataataaattcttaaaaatgcattgaatccttgagccatgacgcaggctacagtgctcaccgatccaggcctaggaggagccgcttcttgtcctcctggccgctctcgttcttcaggtcggagaagacctgtgtgaagtagtgtgggtcggcatttatctgcagcatctttgagctcatgaggttgatgacagagaggcaacggtcccaaaaggcctccttgcagctctccaccaggaagggcttgagcggg

SEQ ID NO: 8875 - DNA, 510 bp, Homo sapiens
  MAP TO AP000344.1; EXPRESSED IN PLACENTA, SIGNAL = 1.8; EXPRESSED IN BRAIN, SIGNAL = 0.87; EXPRESSED IN HEART, SIGNAL = 1.2; EXPRESSED IN BONE MARROW, SIGNAL = 0.82; SWISSPROT HIT: P10822, EVALUE 3.20e-01; EST_HUMAN HIT: BG025629.1, EVALUE 4.60e-02
ttcaggcgccgttttctgggtttttctctctaatgctccaggttttctcagcctctcaccaagcactccagcgaactcagccctcttctctggcactctgttctgcgccctggctccagctccagccctgtccctcaactcaggtcccccgaggccctgcctgggctgtgaccgtctccccaggctcgccccgtctctcaaggcccaccacccttcctgactgaaaactgttgtttcacatttgatgcctcatattctggctgtttcagatggcaggtgcatctgtccttgtggctctgtctcggccggaagctgccggccgccctctgaggtgggaaaataggcattttgtctccattttacattcaggaaacttcagctcagagagacaaactgatgggccccagggcccacagcagataagaggggcagcctcacaggagggcgggcctgcatctccggccctcctcaccccgcatccccagcatcacattgccctaagcgtggcgc

SEQ ID NO: 8876 - DNA, 508 bp, Homo sapiens
  MAP TO AL121749.7; EXPRESSED IN LUNG, SIGNAL = 2.3; EXPRESSED IN HEART, SIGNAL = 2.7; EXPRESSED IN FETAL LIVER, SIGNAL = 1.9; EXPRESSED IN BONE MARROW, SIGNAL = 1.8; EXPRESSED IN HELA, SIGNAL = 1.2; NT HIT: gi14741148, EVALUE 0.00e+00; SWISSPROT HIT: P18537, EVALUE 5.00e-37; EST_HUMAN HIT: BF087133.1, EVALUE 6.00e-66
aagtccatcgcggtgctggcgctcagctcggtggacggcgacccggtggcgggcatctgctacgtgggcaaccagagcctggacaacctgcgcggcttcgtgctggcgccgctggtcatctacctcttcatcggcaccatgttcctgctggccggcttcgtgtccctcttccgcatccgctcggtcatcaagcaacaggacggccccaccaagacgcacaagctggagaagctgatgatccgcctgggcctgttcaccgtgctctacaccgtgcccgccgcggtggtggtcgcctgcctcttctacgagcagcacaaccgcccgcgctgggaggccacgcacaactgcccgtgcctgcgggacctgcagcccgaccaggcacgcaggcccgactacgccgtcttcatgctcaagtacttcatgtgcctagtggtgggcatcacctcgggcgtgtgggtctggtccggcaagacgctggagtcctggcgctccctgtgcacccgctgct

SEQ ID NO: 8877 - DNA, 507 bp, Homo sapiens
  MAP TO AP001046.1; EXPRESSED IN FETAL LIVER, SIGNAL = 1.6; EXPRESSED IN BONE MARROW, SIGNAL = 1.6; EXPRESSED IN LUNG, SIGNAL = 1.7; EXPRESSED IN PLACENTA, SIGNAL = 1.5; EXPRESSED IN BRAIN, SIGNAL = 1.5; EXPRESSED IN HELA, SIGNAL = 0.68; NT HIT: AF202552.1, EVALUE 7.50e+00; SWISSPROT HIT: Q9Z1S5, EVALUE 7.10e-01; EST_HUMAN HIT: BI008162.1, EVALUE 2.00e-41
gggatgggtgctcaaggggcagcccgggcaggagaaccgcgtcttcccaaggcctggagagggagggcaggagccagtgccgacccaagccttgtagctgtcggtaagaaggcctggacaggagccgctccccacccctgacacacacaaaggacacagtgagtcccaagcccttggagggcagtggaaacgcccccttaacaggcaacgttcttccgagaaacagaaccagggggatttgtcccggctttcctgacatgaaaaaaacaataggcggttcatatacacgtatatatatttagacaataggcggtttacatacacatatatatgtttagagaacagacggtttacatacacggatatacgtttagacaacaggcagtttacatacacggatatatgtttagagaacaggcggtttacatacacggatatacgtttagagaacaggcggtttacatacacggatatacgtttagagaacaggcggtttacatacacgga

SEQ ID NO: 8878 - DNA, 580 bp, Homo sapiens
  MAP TO AP000537.1; EXPRESSED IN PLACENTA, SIGNAL = 1.7; EXPRESSED IN HEART, SIGNAL = 1.4; EXPRESSED IN LUNG, SIGNAL = 1.3; EXPRESSED IN BONE MARROW, SIGNAL = 1.4; EXPRESSED IN FETAL LIVER, SIGNAL = 1.6; EXPRESSED IN HELA, SIGNAL = 1.9; EXPRESSED IN BRAIN, SIGNAL =   2; NT HIT: AL163202.2, EVALUE 2.00e-71; EST_HUMAN HIT: AW449025.1, EVALUE 4.00e-46; SWISSPROT HIT: P43071, EVALUE 5.60e+00
ttctggaatcccatgtgagggctaaacactcagaaccctgcagcagtgttctggaatcctatgtgagggaaaaacactcacaacccagcagcagtgttctcaaatcgtatgtgagggacaacactcataacccaccagcagtgttctggaatcctctgtttgggacaaacattcagaaactcatagcagtgttctggattcgtatgtgagggagaaacactccgaacccaacatcagtattttggaattccatgtgagtgacaaacactcagaacccagcatctctgttctggaatcctatgtcggggacaaacactcagaacccagcagcagtgttctggaaccctatatgaggtaaaaaccctcagaacccagcagcagtgtatcataatcctgtgtgaaggacaaagattcagaatttgtagcagtgttctggaaccctatgtgaggtaaaaaccctcagaacccagcagcagtgtatcataatcctgtgtgaaggacaaagattcagaattcgtagcagtgttctggaatcccatgtgagggacaaacactcagaacccagccgcagtgttctgga

SEQ ID NO: 8879 - DNA, 527 bp, Homo sapiens
  MAP TO AC002469.7; EXPRESSED IN HELA, SIGNAL = 1.5; EXPRESSED IN BRAIN, SIGNAL = 1.5; EXPRESSED IN BONE MARROW, SIGNAL = 1.1; EXPRESSED IN LUNG, SIGNAL = 0.98; NT HIT: gi14738300, EVALUE 0.00e+00; EST_HUMAN HIT: AW953385.1, EVALUE 0.00e+00; SWISSPROT HIT: O75820, EVALUE 1.00e-42
tgtccctcagagcacccatgctctgaacctaggtttaatctctctgctgaaagatttattaaagatacttagataaattaccaagtctttctctacgatcatcaaagagtaagggaagtcaaatgctcatgggcagttgtccactattcacagaatctttagaaactatttgcctgaggccaaggagaatttgctttatcactaaatctgacccatgttgagccatactaaaactgcacttgggtactagtctcaaatcaaattgagcttatgtattgctctacatttattgcatccatgctgtgtgcaatttctgatgctgaataagagaaatacggcaattaaaggcttcaccacaagcgtcacattcatgggtttcttgggttttcacctctgcatggatcttctgatggttgacaagactgcgctgttgactgaaacttttgtcgcacttctcacacttataaggtttctctcctgtgtgtattctctgatgctgaataagacccgagttccggctaaaggcc

SEQ ID NO: 8880 - DNA, 506 bp, Homo sapiens
  MAP TO AL021392.5; EXPRESSED IN HELA, SIGNAL = 0.55; EXPRESSED IN BONE MARROW, SIGNAL = 0.86; EXPRESSED IN LUNG, SIGNAL = 1.3; EXPRESSED IN HEART, SIGNAL = 1.3; NT HIT: gi11418322, EVALUE 0.00e+00; SWISSPROT HIT: Q14517, EVALUE 7.00e-22; EST_HUMAN HIT: BE311696.1, EVALUE 0.00e+00
gtgtgtgccgagctggaccgcgaggaggtggagcactacagcttcggggtggaggcggtggaccacggctcgccccccatgagctcctccaccagcgtgtccatcacggtgctggacgtgaatgacaacgacccggtgttcacgcagcccacctacgagcttcgtctgaatgaggatgcggccgtggggagcagcgtgctgaccctgcaggcccgcgaccgtgacgccaacagtgtgattacctaccagctcacaggcggcaacacccggaaccgctttgcactcagcagccagagagggggcggcctcatcaccctggcgctacctctggactacaagcaggagcagcagtacgtgctggcggtgacagcatccgacggcacacggtcgcacactgcgcatgtcctaatcaacgtcactgatgccaacacccacaggcctgtctttcagagctcccattacacagtgagtgtcagtgaggacaggcctgtgggcacctccattgc

SEQ ID NO: 8881 - DNA, 574 bp, Homo sapiens
  MAP TO AL132654.12; EXPRESSED IN HELA, SIGNAL = 0.87; EXPRESSED IN BONE MARROW, SIGNAL = 0.96; NT HIT: gi14770873, EVALUE 0.00e+00; SWISSPROT HIT: P37370, EVALUE 1.90e-02; EST_HUMAN HIT: AL043012.2, EVALUE 0.00e+00
aaggggccgagctgacctgcccggagaggcgctgtcatggcttagctccccagccaatgttgctaggcgctcctcgaggctctgcacgcgctcttccagcatggtcccaaagccgcccactccccacccccccatgtccaacctcagacagcatccccttgctccaccctctgtcccattgagcgtctccagaccctcaagcagcccgtccacacctccctcgagcatggcagcagagagcctcgtaagctcatccccggccggggcaccggggcccctttgggtctcggtgactgcctgcagggccctctcaaggccatccatacgggcattgatcaaggctagttgcccacagcagctgcccctgccagacacgctcaggccctgcagctggctgcccagctgtgacagctcctggcgcagggccagctcccggccatcaaggctctggtgcagcctccggctggcggcctgaccctcctcacattgccgccgtacctcctgcacccgcaggtcacactcactctggacgccttgcagcttctgctcaaagccatccagcaggctcccccag

SEQ ID NO: 8882 - DNA, 560 bp, Homo sapiens
  MAP TO U73643.1; EXPRESSED IN HELA, SIGNAL = 0.57; EXPRESSED IN BONE MARROW, SIGNAL = 0.91; EXPRESSED IN LUNG, SIGNAL =   1; EXPRESSED IN FETAL LIVER, SIGNAL = 1.1; NT HIT: gi14547892, EVALUE 1.40e-01; SWISSPROT HIT: P22270, EVALUE 9.20e+00; EST_HUMAN HIT: BE249874.1, EVALUE 0.00e+00
aatgcggcactggctagcggtacagagagatggagcccaggagaaaactgctgctcttttgtcctggctggaaaatcctcctatggcctcctttagtacacatcagctgactcttcacttgtcataataaaccgcctgtctgcagctcaaaatggcaagaaaaaaggtggttctgttcagaggacactggattccaaaaggtggacttcatcatggggggaatcaagtcctgctacacaattaatacagattagtatagtcccctgcctcgcaccactggcgagatgccctccaagacctggctgacatgagcttcctgggactccccatctccagtgttgttggggtccttttacctgtaccgtattaatcgaataatcttattgttcataaaatccagagcatgtgggtgagaagaatcgatgcagaagccatcgctcagagcgattttcagtacctcttccacgaagacctggaagctgttgatctgcttgttggcgggcaccacccagagcctcttgaggttctgcttggtgtactcctcctctggcaggccctcc

SEQ ID NO: 8883 - DNA, 506 bp, Homo sapiens
  MAP TO AC005848.1; EXPRESSED IN BONE MARROW, SIGNAL = 1.5; SWISSPROT HIT: O14529, EVALUE 3.20e-01; EST_HUMAN HIT: BI838760.1, EVALUE 5.00e-54; NT HIT: gi14150136, EVALUE 9.00e-55
tccccctgccccatctcaggaccagcaagcctatacctgctggccttgagggtctgatgtggcacagtgtaagagagttagtgatcctgagtctggtgtcctttccctgacagacaaccagaggtccagcttcaaaggagatacacagggggcaggggtggagtagggcatcttcttcctgtgcccaatctttcctcccgtgttttctagtttctcacaggactggggcaggggtcagtggggaggcaggtggactgccctgagcaaacttccagagaaataccaggccaattttccctttaagggatggggaaaccaaagctgggaggattgggagggtggagagctgcagctcccttgagctgtctgggtctttgtgcccagcctggaatctcacctgaggctcagggtgcccaccaggtacgtccaccagcccaggggcctcagccacctgccgggagcggcgcaggaagacaaggaagtcatcggctgtggctagtgcagcg

SEQ ID NO: 8884 - DNA, 514 bp, Homo sapiens
  MAP TO AL139378.15; EXPRESSED IN PLACENTA, SIGNAL = 9.5; EXPRESSED IN HELA, SIGNAL = 6.5; EXPRESSED IN BONE MARROW, SIGNAL =  13; EXPRESSED IN HEART, SIGNAL = 8.7; EXPRESSED IN LUNG, SIGNAL = 5.1; EXPRESSED IN BRAIN, SIGNAL = 4.4; NT HIT: gi14753571, EVALUE 0.00e+00; SWISSPROT HIT: P23821, EVALUE 3.00e-59; EST_HUMAN HIT: BI197771.1, EVALUE 0.00e+00
ggctcctgggacgcttttgcttattttttgtacggctttttcgagttggcttaggcagaattcttctctgaacgataaagacgacatgcttcccactgaactttttctccaattcgcgtactagccggacttgaattttctggaaagatttcagttgaggaatgggaacaaagattatgatagctttccgaccaccaccaagttcaatttccttggctgccgtaatattcagctccctgagctgagctttgaggtccgagttcatctccagctccagaagagcctgggagatgccggactcgaactcgtccggcttctcatcattgggcttcacgatcttggcgctcgaactgaacatggccttctcctgggagaactcgccgagcgccggcttaggaagaggtcttctttaactagaactgaaagtagttttatggttatttgggtgagaatttaagacattaacttatattggtggttcttaaagtgtggtcctcggacagcagcatcagca

SEQ ID NO: 8885 - DNA, 501 bp, Homo sapiens
  MAP TO AC004126.1; EXPRESSED IN BRAIN, SIGNAL = 0.93; EXPRESSED IN HELA, SIGNAL = 1.6; EXPRESSED IN HEART, SIGNAL = 1.2; EXPRESSED IN BONE MARROW, SIGNAL = 0.79; SWISSPROT HIT: P09951, EVALUE 4.70e-02; EST_HUMAN HIT: BI820043.1, EVALUE 0.00e+00; NT HIT: gi13129103, EVALUE 0.00e+00
ggtcttgctgacgctggggggacgctgcgcctggctctggctgcccttggggtgactccaagcctgcaccctgctgcagacggggtgatcctgggcttgtcttcggcggcctttcgggggaccccaggccagcccgctgcacactcggaggagacccgggctccctcgtttcttctgggttcgactcgaactccacaagggcccgtctcgtccgcgaaactgaggtgaggctctcgggggattcgggccttaggcctcccagccgtcggctgcgccttaacggtgtatccatggctcagccggtaagtttccacacccctgcgcacgtgcagcccccgccgaaaccggcgccttcctatgacgtcaggagtcgccgcgtccgtgacgcacaggaggggggctgttgctgaggcggccatgttggtgaggggtggagaggcgggaccggggttggggagagtggggctcagcatgcgcgtgcgcaattcgcgcgagcgcagt

SEQ ID NO: 8886 - DNA, 509 bp, Homo sapiens
  MAP TO AC005696.1; EXPRESSED IN PLACENTA, SIGNAL = 1.9; EXPRESSED IN HELA, SIGNAL = 0.72; EXPRESSED IN BRAIN, SIGNAL = 1.6; EXPRESSED IN LUNG, SIGNAL = 1.3; EXPRESSED IN BONE MARROW, SIGNAL = 1.1; NT HIT: gi14771279, EVALUE 4.00e-94; SWISSPROT HIT: O75153, EVALUE 3.00e-30; EST_HUMAN HIT: BE383302.1, EVALUE 6.00e-94
taaacaccagcggcggggacccccggtgccccacctgcccgccccagcacggggacagtcacagccacccagacttccaagtgctccttaagagaacagtgtccgccacagccacattacccgcctggctgctcgcgagtctgcagcccgggtttctgcgctcgggagcctgacagcagggcaggtggggacgggtctccaatgactgtggctagacggagcccttcttcactctccagcgcttctcccttcaaggacccaaccccggatccacccagggcgcccgcactccctgcagctggccccggccctggtccggcagggccgcccctcacctgtgctccacgaaggcgtccaccagctcctggcgcaggcagcagagcttgtgccggtgggcgcgggggaagccggcgcgggcgcattcctcaggcagctcctcgccaggcacgggcaggaagttgaggtccggggggaaggtgcgcagcaggtcgaggatgtagtggcgcccg

SEQ ID NO: 8887 - DNA, 516 bp, Homo sapiens
  MAP TO AC016212.3; EXPRESSED IN HELA, SIGNAL = 1.4; EXPRESSED IN BRAIN, SIGNAL = 1.6; EXPRESSED IN BONE MARROW, SIGNAL = 1.1; EXPRESSED IN LUNG, SIGNAL = 1.2; NT HIT: gi14740100, EVALUE 2.00e-55; EST_HUMAN HIT: BI459789.1, EVALUE 0.00e+00
cgcggggcgatgttcaagtcctcggcgcggagctgggtcaggaggctcttcagcttgctcaggttctcggggaagcccggctgcatcggcgcctccgggccagaagccgcgtcgcgatcggaagcgccgcggccgcccccgctgccccggaaggtgaggcaagcctggcgggcgatccgttggatcaaggaggccatgttgtctcggggcatggtcggctgctcctctgcgtgccgggaccggccccctcctttcctccgccccttgcggtccccggcggccgccacggctgcccccagcccgggtcgaggcgggaggccccgcaaccaccggcccgtcgggcgcgcggcaccgccgccaacctcagcagccacgcgcccgcaactgcccggcgcgctcgccttgagccccctctgagcgcgcacgcgcacgccccacaccccgcactcacgctccgggagcagatagcggccgcgcagacggtgccaggctttgccttacgcccggcgctccatt

SEQ ID NO: 8888 - DNA, 569 bp, Homo sapiens
  MAP TO AC005618.1; EXPRESSED IN BRAIN, SIGNAL = 1.9; EXPRESSED IN HELA, SIGNAL = 0.63; EXPRESSED IN LUNG, SIGNAL = 1.2; EXPRESSED IN HEART, SIGNAL = 2.2; EXPRESSED IN BONE MARROW, SIGNAL = 0.78; EST_HUMAN HIT: BF926188.1, EVALUE 1.00e-120; SWISSPROT HIT: Q9NRJ7, EVALUE 2.00e-25; NT HIT: gi14861871, EVALUE 0.00e+00
tgaccaaggtggtggcggtggacgcagactcaggacacaacgcttggctgtcctaccacgtgctgcaggccagcgagcccgggctcttcagcctggggttgcgcacgggtgaggtgcgcacagcgcgtgccttgggcgacagggacgcggcccgccagcgcctgctggtcgctgtgcgtgatggaggacagccgccactctccgccaccgccacgctgcacctaatcttcgcggatagcctgcaagaggtattgccagacctcagcgaccgccctgagccctctgacccccagacggaactgcagttttacctggttgtggccttggccttgatctcagtgctctttctcctcgcggtgattctagcgatcgccctgcgcctgcgacgttcctccagcctcgacactgagggctgctttcaaaccggtctctgctccaagtctgggcccggggttcctcccaaccacagcgaggggactttgccctattcctacaatctatgtattgcctctcattctgcaaagacagagtttaattctctcaacctgacaccggaaatggctccccct

SEQ ID NO: 8889 - DNA, 574 bp, Homo sapiens
  MAP TO AC008103.27; EXPRESSED IN HELA, SIGNAL = 0.87; EXPRESSED IN PLACENTA, SIGNAL = 1.4; EXPRESSED IN BRAIN, SIGNAL =   1; EXPRESSED IN BONE MARROW, SIGNAL = 1.2; EXPRESSED IN LUNG, SIGNAL = 1.2; SWISSPROT HIT: O55188, EVALUE 1.40e+00; EST_HUMAN HIT: AA219176.1, EVALUE 1.00e-110; NT HIT: gi14756466, EVALUE 6.00e-44
tcctccttggcgatgccctgggcggcgtcctccctggcgatgccctgggcggcgtcctcgctggcgatgccctgggcggcgtcctcgctggcgatgccgtgggcggcgtcctcgctggcgattccgtgggcggcgtcctcgctggcgatgccgtgggcggcgtcctcgttggcgatgcccttgtcggcggcctcgttagcgatgtcgtgtacagtatcctcgttagcgatgtcgtgtgtggcgtcctcgttagtgatgtcgtgtacggtgtcctcatggggagctagaaaaacacagagttaaggtcagtgccctggtggtggagactgtgaatcacccaggggcttgcttggtgtgatgcatggaggtggctgatcacagcatgggtcaagctgatgctgggacatcctcccaggtggacctgcactagtgaagctaagggatgtggctcagaacactttctgcagtgggaatcagtttccaggttcaggtatgcattatctggtgaagtggggaaatataaaaaataaaaattgacaaattcatgaaaagcctcccatgagtgcaagtgtga

SEQ ID NO: 8890 - DNA, 540 bp, Homo sapiens
  MAP TO AJ239329.2; EXPRESSED IN HELA, SIGNAL = 1.1; EXPRESSED IN BRAIN, SIGNAL = 1.3; EXPRESSED IN PLACENTA, SIGNAL = 2.3; EXPRESSED IN HEART, SIGNAL = 1.3; EXPRESSED IN BONE MARROW, SIGNAL = 1.2; EXPRESSED IN LUNG, SIGNAL = 0.99; NT HIT: U46066.1, EVALUE 4.00e-26; SWISSPROT HIT: P08267, EVALUE 3.00e-18; EST_HUMAN HIT: BG194971.1, EVALUE 0.00e+00
ccccgggctgcccatagaactcagcgtgctcccccacccccacctgtcagaagtccctcgcagctccgcaccagcccacacccgcccgaccttgtgcgctcctccccgcataaaggtctccaccgctcacttccggtcccttcgcagagcctgtgaccacactaccaccgggcccgggggacgacgccctccaccagccgccgctgtcgtccaccatggtggtgctccgaggaccccgccgctgccgccactgcccacgccgatgccactacccgctccgggcccctggcaaacccactgcttttcccctcctcccagcgcccgcgctgcccgccctgggcccgctgtcgccggtgcgacggtaccaccatcccagctgtgaggctgccatcaacacccacatcagcctggagctccacgcatcctatgtgtacctgtccatggccttctacttcgaccaggacgacgcggccctggagcactttgaccgctacttcctgcgccagtcgcaggagaaaagggagcacgcccaggagctga

SEQ ID NO: 8891 - DNA, 504 bp, Homo sapiens
  MAP TO Z77852.1; EXPRESSED IN HELA, SIGNAL = 1.8; EXPRESSED IN PLACENTA, SIGNAL = 5.8; EXPRESSED IN BRAIN, SIGNAL = 2.4; EXPRESSED IN HEART, SIGNAL = 3.1; EXPRESSED IN LUNG, SIGNAL = 4.5; EXPRESSED IN BONE MARROW, SIGNAL =   3; EXPRESSED IN FETAL LIVER, SIGNAL = 3.6; NT HIT: gi14737164, EVALUE 0.00e+00; SWISSPROT HIT: Q9NSE2, EVALUE 5.00e-18; EST_HUMAN HIT: BG495864.1, EVALUE 0.00e+00
cagaagcagtgcccgcagcctgcaacacctgtgccgccttgtcatcaaccgtctggtggccgacgtggactgcctgccactgccccggcgcatggccgactacctccgacagtaccccttccagctctgactgtacggggcaatctgcccaccctcacccagtcgcaccctggaggggacatcagccccagctggacttgggcccccactgtccctcctccaggcatcctggtgcctgcatacctctggcagctggcccaggaagagccagcaagagcaaggcatgggagaggggaggtgtcacacaacttggaggtaaatgcccccaggccgcatgtggcttcattatactgagccatgtgtcagaggatggggagacaggcaggaccttgtctcacctgtgggctgggcccagacctccactcgcttgcctgccctggccacctgaactgtatgggcactctcagccctggtttttcaatccccagggtcgggtaggacccc

SEQ ID NO: 8892 - DNA, 505 bp, Homo sapiens
  MAP TO AL035704.7; EXPRESSED IN BONE MARROW, SIGNAL = 0.83; EXPRESSED IN HELA, SIGNAL = 0.91; EXPRESSED IN BRAIN, SIGNAL = 0.8; SWISSPROT HIT: O15534, EVALUE 3.10e-01; NT HIT: AF283320.1, EVALUE 5.00e-04; EST_HUMAN HIT: BF957952.1, EVALUE 4.50e-02
gcggctccagcacgttctccgagacccagcgctggtagtcgccctgggcggtgtgagctgccaggacgtgggccaggagcgagaaggccagcgtgctgtaatggcatctggaaggagagcagtggcaagtgggacggggcccttcctcacccgcccgcgctgtctgaaatgccaccagtttcatgggactgggcggggctgggaaggaacctgctcccctgcatcccaggtggtcagacctggaagagactttggagcactgactctgactctcttctacatctgggaagaccaaggcccagagaggggcggggaattgcccagggtcatacagcaggatggaggagagctgagctcagcggtgcacctgggaaagctgtcacacaaatcttattggtccttcacactttagtatgatttaccttatctaatggaaaattaaaggcttacactgctctggggaaacaaaaatgatagtgaccatgtatgaggcaaggtctcaccc

SEQ ID NO: 8893 - DNA, 584 bp, Homo sapiens
  MAP TO AC005756.1; EXPRESSED IN BRAIN, SIGNAL = 3.7; EXPRESSED IN HELA, SIGNAL = 4.6; EXPRESSED IN HEART, SIGNAL = 3.1; EXPRESSED IN BONE MARROW, SIGNAL = 3.5; SWISSPROT HIT: P97347, EVALUE 1.00e-03
gcagacacgcaggcacacgcaggcatacacagacacacaggcacatacagacacacaaaggcagacacatgcagacacaggcacatgcaggcagacacacacatgctcacactcaggtacacgcagacatgcagacacacacacagacacacacagacacatgctcacactcaggtacacgcagacatgcagacacacacacagacacacacagaaccagacacacagatgcatgcagacacacacagacacatgcggcacgggcacgtgctcccagagcaggagttgtgaggctggcaggctccaagactgagtttcccaacccaccgcagtggggcggcctcggatgacgtgcaggcgtgcagcccggacggccccaggggactgcagcaaaaacaaacatgccgggttgattccagcagaacccttcgacccaggcctgcacacggtgtgctgggaatccgccctgggtggggctgacccactccctcctagagttcaccgtggtccctggatgcttgctgaccccagggaggacagggcgggccgcggcaggcgggggacgggcactgcagcagctggtg

SEQ ID NO: 8894 - DNA, 508 bp, Homo sapiens
  MAP TO AP001731.1; EXPRESSED IN HELA, SIGNAL = 1.1; EXPRESSED IN BONE MARROW, SIGNAL = 1.5; NT HIT: gi14780445, EVALUE 0.00e+00; SWISSPROT HIT: Q99712, EVALUE 3.00e-94; EST_HUMAN HIT: BI518753.1, EVALUE 0.00e+00
atcggcatgtccagcacccccctggtgaagcacactgctggggctgggctcaaggccaacagaccccgcgtcatgtccaagagtgggcacagcaacgtgagaattgacaaagtggatggcatatacctactctacctgcaagacctgtggaccacagttatcgacatgaagtggagatacaaactcaccctgttcgctgccacttttgtgatgacctggttcctttttggagtcatctactatgccatcgcgtttattcatggggacttagaacccggtgagcccatttcaaatcataccccctgcatcatgaaagtggactctctcactggggcgtttctcttttccctggaatcccagacaaccattggctatggagtccgttccatcacagaggaatgtcctcatgccatcttcctgttggttgctcagttggtcatcacgaccttgattgagatcttcatcaccggaaccttcctggccaaaatcgccagacccaaaaagcggg

SEQ ID NO: 8895 - DNA, 503 bp, Homo sapiens
  MAP TO AL021937.1; EXPRESSED IN PLACENTA, SIGNAL = 1.6; EXPRESSED IN BRAIN, SIGNAL = 2.7; EXPRESSED IN HELA, SIGNAL = 0.57; EXPRESSED IN HEART, SIGNAL = 1.8; EXPRESSED IN BONE MARROW, SIGNAL = 1.6; EXPRESSED IN LUNG, SIGNAL =   2; EXPRESSED IN FETAL LIVER, SIGNAL = 1.8; NT HIT: gi16168151, EVALUE 0.00e+00; SWISSPROT HIT: P14373, EVALUE 7.00e-16; EST_HUMAN HIT: AI002159.1, EVALUE 0.00e+00
gggggcatggtgtctgccttcagagaccctccactctaaatgaagaaaagttcagtgaagcaaacacgtgacgtaaagtaaaataagaattgctactgtgaataagagtcacgtattgccacaaagcatacctatgaaaatttgaaatagggaagtttcctcatgaaaagttttgattttggaggaagaaacagaattaaagaaactaaagtcaggagatatttgggcctttgaagtagaagagaggcatggggttggcttctgtccacttgctgagcaacttgttttccttttcacagtggatatgaccttggatgccgacacagccaacaacttcctcctcatttctgacgacctcaggagcgtccgaagtgggctcatcacacagaatcggcaagaccttgccgagagatttgacgtgtccgtttgcatcctgggctcccctcgctttacctgtggccgccactactgggaggtggacgtgggaacaagcacagaatggg

SEQ ID NO: 8896 - DNA, 516 bp, Homo sapiens
  MAP TO AL121760.4; EXPRESSED IN BONE MARROW, SIGNAL = 1.3; EXPRESSED IN LUNG, SIGNAL = 1.2; EXPRESSED IN FETAL LIVER, SIGNAL = 1.4; EXPRESSED IN HELA, SIGNAL = 1.2; SWISSPROT HIT: Q9Z1S5, EVALUE 1.10e-01; EST_HUMAN HIT: BF959778.1, EVALUE 3.00e-03; NT HIT: gi7657053, EVALUE 8.00e-03
tccgagtcactcttcgctgttgctttgttcctgtatttactgtcttccgagtcactcttagctgttgctttgttcctatatttattgtcttccgagtcactcttagctgttgctttgttcctgtatttattgtcttccgaaggagactgtgagcttcctgagggtaggtccttgttagcttcctgttctcagctcggaggaggcacatggcacatagtagatgctcaataatattgtctggctggatgaatgaaggtgtctgagcacacgcagccattttcctcgttattcctccctgtcctcacaagctaggattgtgatgcccttttgaaagatgatgcgattgggtctcagagagtttgggcaagctgcctggaccacacaggcagtgagcagtgtgtgtctgtacgtcctttgtgtgtctatgtgtatgtctggatgtatctctgggtgtccaagtgtcctctgtgtgtgtctttggatgtctgtgtgtctgtgagtctctgggcacccagg

SEQ ID NO: 8897 - DNA, 506 bp, Homo sapiens
  MAP TO Z73417.1; EXPRESSED IN HELA, SIGNAL = 0.81; EXPRESSED IN BRAIN, SIGNAL = 0.84; EXPRESSED IN HEART, SIGNAL = 1.2; EXPRESSED IN BONE MARROW, SIGNAL = 0.89; EXPRESSED IN FETAL LIVER, SIGNAL =   1; NT HIT: X03819.1, EVALUE 7.50e+00; EST_HUMAN HIT: BG675952.1, EVALUE 0.00e+00
tccattgcgctcactcttcacccataatgtagtagactacctccattgtgtctgctgtcaccagcaccctcggaccagggttgagaactcagagccaccctttgagactgaagcaaggcaaagtgttgtctgattctattttctgggtattttaggaagagttgggagttgccaagagtaaccatgaaattgaacgaaaggatgaggttcatgggtgagatacccatcagtacattttcttgacttttctgttaagcctatcagaagaaagagcaactcccaaataggttttattttcttaagagttaccactatgtttggaaacagggggtatcgactatatagttgaaagggtcagaaataccattcacacccttcttacccaagtcaattggaataacttgtcttcaaacactttaggctctctaaagtgaccttctagctctgctcatttgcttgatgcatttctgagctttcctgggctgagctgaaggcccagaatcccg

SEQ ID NO: 8898 - DNA, 503 bp, Homo sapiens
  MAP TO AC005070.1; EXPRESSED IN HELA, SIGNAL = 1.6; EXPRESSED IN BONE MARROW, SIGNAL = 2.7; EXPRESSED IN FETAL LIVER, SIGNAL = 1.7; NT HIT: gi14149872, EVALUE 0.00e+00; EST_HUMAN HIT: BE161922.1, EVALUE 0.00e+00; SWISSPROT HIT: P13983, EVALUE 4.00e-04
caaaagctgccttctgtgccaacaaagttgcactgtcctccatcacctcacctagaaaatcctccaaagtcatccacgcctcacacacctgtacagcatggttatctttcaccaaagcctccttcacagcagttaggatctccctacaggcctcatcattcacagtcacctcaagttggaacacctcagcgagagcctcaaagaaacttttatccagcagcacagaaccttccagccaatactcagcaggcaacttctggaacattatttacacagacaccctcaggacaatcttcagcaacatacagtcagtttaaccaacaaagtctgaacagcacggcaccaccccctccacctcctccacctccttcttcgtcttactatcaaaaccagcagccctctgcaaactttcagaattataatcagctcaaaggtagtctttctcaacaaactgtgtttacatcaggaccaaatcaagcacttcctggcaccacaagccagca

SEQ ID NO: 8899 - DNA, 508 bp, Homo sapiens
  MAP TO AC012571.3; EXPRESSED IN PLACENTA, SIGNAL = 1.6; EXPRESSED IN BRAIN, SIGNAL = 1.5; EXPRESSED IN HELA, SIGNAL = 2.6; EXPRESSED IN HEART, SIGNAL =   2; EXPRESSED IN BONE MARROW, SIGNAL = 1.1; EXPRESSED IN LUNG, SIGNAL = 1.5; SWISSPROT HIT: P02845, EVALUE 1.20e+00; EST_HUMAN HIT: BE279746.1, EVALUE 0.00e+00; NT HIT: gi16159875, EVALUE 0.00e+00
gcttcgagccccaagctcccgaggacttggcgcagcggagtttggtggagctgcgggaaatgttgaagctccaggagagacttttgcgcaacgaaaaattcatttgcaaattgcccgacaaaggtaaaaagatctttgactcttttgccaaactgaaagccgccattgcagaatgtgaagaagttagaagaaaaaatgaactgtttcaccctgttagtttagactgtaagctaaggcaaaaagcaattgcagaagttgatgtgggtacagataaggcccggaattctgacccgatacttgatacttcatcactagttcctggatgttcctctgtagataacatcaagtcatctcaaacctcacaaaaccagggacttggacgtcctactcttgaaggtgatgaagagacttcagaggttgagtacacagtgaataagggcccagcttccagcaacagagacagggtaccaccttcatctgaagctagtgagcatcacccgcagcatcg

SEQ ID NO: 8900 - DNA, 555 bp, Homo sapiens
  MAP TO AP001629.1; EXPRESSED IN HELA, SIGNAL = 0.88; EXPRESSED IN LUNG, SIGNAL = 1.3; EXPRESSED IN BONE MARROW, SIGNAL = 1.4; NT HIT: AB038163.1, EVALUE 0.00e+00; SWISSPROT HIT: P56181, EVALUE 5.00e-20; EST_HUMAN HIT: BF527280.1, EVALUE 0.00e+00
gcgcctgtgtgtgagccgagtcattcataaagagctgttcacagatagggttgatgaagaatgcttggtaggtaagcacctgtgtgtgagccgagtcattcataaagagctgttcacagatagggttgatgaagaatgcttggtaggtaagcgcctgtatgtgagccaagtcattcataaagagctgttcacagatagggatgatgaagaatgcttggtaggtaagcgcctgtgtgtgagccgagtcattcataaagagctgtccttgtgttggtctcatgggcatcgtgtttcctccgcagagccagccccagtgcctgctgagccgtttgacaacactacctacaagaacctgcagcatcatgactacagcacgtacaccttcttagacctcaacctcgaactctcaaaattcaggatgcctcagccctcctcaggccgggagtcacctcgacactgagggccctcggtgtgaagatgaaccttccaccgtcttcactgcatcctggagtgcaaaaataaaatccactcaagagtcacaaggcccgctgtgca

SEQ ID NO: 8901 - DNA, 527 bp, Homo sapiens
  MAP TO AL136293.3; EXPRESSED IN PLACENTA, SIGNAL = 1.9; EXPRESSED IN HELA, SIGNAL = 2.4; EXPRESSED IN BRAIN, SIGNAL = 2.2; EXPRESSED IN BONE MARROW, SIGNAL = 2.4; NT HIT: gi15300999, EVALUE 0.00e+00; SWISSPROT HIT: O15040, EVALUE 2.00e-94
aacccattggcccccaaagcactttttgtgaagtccccctcctgaactcactcactgtgccttccagcctcagctgggccccaagtgctgaacagtggctgcctgggaccagagctgatgaaggcagccccgtggagcccagccaagagcaggacatcctaaccagcatggaggcctctggccacctcagcacaaatctctggcatgctgtcactgatgatgacacaggtcagaaagaaatacccatttctgaacgtgtcttggggagtgtgggaggacagctgactccggtctctgccttggcagccagcactcacaagccctggcttgagcagcctccacgggatcagacattgacgtccagcgatgaggaggacatctatgcccacgggcttccttcttcatcctcagagacgagtgtgacagagctcggacctagttgctcccagcaggacctgagccggctgggtgcagaggacgccgggctgctcaagccagatcaggtatgtgggttcgggtggtgggaa

SEQ ID NO: 8902 - DNA, 505 bp, Homo sapiens
  MAP TO AC004032.7; EXPRESSED IN HELA, SIGNAL =   1; EXPRESSED IN LUNG, SIGNAL =   1; EXPRESSED IN HEART, SIGNAL = 1.4; EXPRESSED IN BONE MARROW, SIGNAL = 0.75; EST_HUMAN HIT: BI758462.1, EVALUE 3.00e-40; SWISSPROT HIT: Q10571, EVALUE 7.00e-10; NT HIT: gi14777993, EVALUE 2.00e-40
gtgtcctgccagggaaggcggcacacagctgctaaaaagtggagccagcctcaatgttgagggtggggaggggtcttagtgtgaaagggaaggggcaattcagctaaaactgggggtgtgggggcggctgggcggggtactctacaagattcccaaagggctgccatctaagtttttgccaccctgtggcactagaatctacctggtaacatgtggggggcttgggggcagtgtgtgtgggggggtctgtcctcacagcccttggtgtaagcaaaggtgggataaccagctcctagttggggattaggagggtttgtgccctccaaacctcaaaggaccccaaaaggcgaaggctaagtcctgccctggggatggggcgggtcacccgggaagtgagaggaaaacgagtgtgcatataccttctttgctgttggggttctggggtttggccttctcccagggcgccaacgtcttgtcgtcgtccgcgctgtccaccagggccttg

SEQ ID NO: 8903 - DNA, 525 bp, Homo sapiens
  MAP TO AC007540.3; EXPRESSED IN LUNG, SIGNAL = 0.94; EXPRESSED IN BONE MARROW, SIGNAL = 1.1; EXPRESSED IN PLACENTA, SIGNAL = 1.5; EXPRESSED IN HELA, SIGNAL = 0.73; NT HIT: AF099810.1, EVALUE 5.00e-04; EST_HUMAN HIT: AW946310.1, EVALUE 5.00e-05
cgggaaggggaggcagtgtggcatgtggttaggaacagctcttcagactcagactgagagcctccaaccggctactaactagatgagtgaccttaagtgagttatttgatgtctctgtaagtgagaatgattatgacctaatgaatttgttgtgtggattaaacaaataatatatataaagtacttaaccttcatttcatctgcaaaattaggacaataatagtacctacctcatagtattaaatgaagaaatgcatataaagcatttaaagcacttggaacagagtctggtatattgtaagcacttaataagaattcagtactattattctttgtatcactaccatcaccatcttcatcttcatcaccatccccatcaccatcatcattgccatcatgtacatcatcatgattatcgtctctgtcatcatcaccatcatcatcaccatcactgtcacatcatcaccatcaccatcatcatcaccatcatctccatcattatcgccatcaccatcatctccatca

SEQ ID NO: 8904 - DNA, 500 bp, Homo sapiens
  MAP TO D87018.1; EXPRESSED IN BRAIN, SIGNAL = 0.91; EXPRESSED IN BONE MARROW, SIGNAL = 1.1; SWISSPROT HIT: Q08431, EVALUE 4.60e+00; NT HIT: X57820.1, EVALUE 4.00e-54; EST_HUMAN HIT: BF663660.1, EVALUE 5.00e-54
cggcaggtgcttcctcccagggccctcccgagggggaaaccaaaccttcctcctcctcagtctggagtgtgagctaagcttcagctccagggctcagggaggggctgggcagtccttggatggaaacatatttgcatgagcagcccctcctctggcagaggatggagaagaagaggagacctggggcagctcaggcccactgttagggctcaggggctgtgtccaccatggcctggactcttctccttctcgtgctcctctctcactgcacaggtagggaaagtccttataaactgagtctcagtgtccaacctacaccatcccctgtggctcagacctacaagaagctttaccctgggaactgccttatcacccatgatgtctgtgttttcaggttccctctcccagcctgtgctgactcagccatcttcccattctgcatcttctggagcatcagtcagactcacctgcatgctgagcagtggcttcagtgttgggga

SEQ ID NO: 8905 - DNA, 544 bp, Homo sapiens
  MAP TO AC005020.1; EXPRESSED IN LUNG, SIGNAL = 1.1; EXPRESSED IN PLACENTA, SIGNAL = 1.9; EXPRESSED IN HELA, SIGNAL = 2.1; EXPRESSED IN BONE MARROW, SIGNAL = 1.2; EXPRESSED IN FETAL LIVER, SIGNAL = 1.1; SWISSPROT HIT: Q9Y2L8, EVALUE 4.00e-49; EST_HUMAN HIT: BF981745.1, EVALUE 0.00e+00; NT HIT: AF170025.1, EVALUE 0.00e+00
tgttggccagtgttcccacaccaaacaacatcaaaaaatctactccagcacaaaatcccatcaatgtcatgaatgtggcagaggcttcactctgaagtcacatcttaatcaacatcagagaatccatactggtgagaaaccttttcaatgtaaagaatgtggaatgaatttcagctggagttgtagcctctttaaacacctgagaagccatgagaggacagatcccataaataccttaagtgtagaggggtctctgttgtagaatagctcttaattttagagaaaccttcctggagggaaaccatactcctataatgagcaaagtaacaacttcaagcatttttccagcgttaccatcaaactcacaaataggttgaaatcctttagttataactcagcctttaggaacaccggagaacccacaataatagaaatcttttcgtgttccccattgagaaatgctttagttagcatcttcatgcttggaaatctagacaagaagagaatccatggatggacatggtcgaggaattcggaaagcctg

SEQ ID NO: 8906 - DNA, 500 bp, Homo sapiens
  MAP TO AC004794.1; EXPRESSED IN BRAIN, SIGNAL = 0.78; EXPRESSED IN HELA, SIGNAL = 1.3; EXPRESSED IN BONE MARROW, SIGNAL = 0.78; EST_HUMAN HIT: AI004450.1, EVALUE 2.00e-04; SWISSPROT HIT: O60431, EVALUE 2.00e-94; NT HIT: AF262715.1, EVALUE 6.00e-16
ctgtgggctgctgctgggagcatcatggatgatcaccaacctccagtctctcatacacacctgcctcatggctcaactgaccttctgcgccggctctgaaatctcccacttcttctgtgacctcatgcccctgctgaagctctccggctcagacacgcacaccaacgagctggtgatctttgcttttggcattgtcgtgggcaccagcccattctcctgcatccttctctcgtacatccgcattttctggacagtctttaagatcccttctactcggggcaagtggaaagccttctccacctgtggcttacacctcactgtggtgtcactgtcctatgggaccatctttgctgtgtacttacagcccacatcccccagctcctcccagaaggacaaggcagccgccctaatgtgtggggtgttcatccccatgctcaacccctttatctacagcatacggaacaaggatatgaaggcagccctggggaagctcatcggca

SEQ ID NO: 8907 - DNA, 568 bp, Homo sapiens
  MAP TO AC010680.2; EXPRESSED IN HELA, SIGNAL = 0.96; EXPRESSED IN BONE MARROW, SIGNAL = 0.79; SWISSPROT HIT: gi127997, EVALUE 2.40e-02; EST_HUMAN HIT: BF824977.1, EVALUE 2.00e-14; NT HIT: gi16157781, EVALUE 3.00e-27
tgcagtggctccctcttcgaccgtctggtcctcaagaggcttagtgaattcaactgggggttctgaaagaatcatactcattagccaaggtactcctttccttctccaagagttttggtaccttctcaactttcccctgccatctccagggctttgttctgtcctaagttttattttcaagttttgattacactcagacattttcctctaaaaatgatattttatcattatttgtacagacaagaggaaaatcatttttaaaaactaggaaacattaaggaaataacagccaactcttggttaataaagtgatggatacctagcttgataataattcttcctccagctggcttttgaaaatctaggatgtgcaataaaaacaatagagatggaaggaggaagtaaaacctatgctagtcaattttggctctttaaaaagatagtctgtgaattattttgttatgctaaaaagtaaaatcagacttttgattatttggttgattttaaacatctatagtactcatcatataaagataattgagagttggcattgttcatgagcctctgc

SEQ ID NO: 8908 - DNA, 520 bp, Homo sapiens
  MAP TO L76568.1; EXPRESSED IN BONE MARROW, SIGNAL = 0.86; EXPRESSED IN BRAIN, SIGNAL = 0.85; EXPRESSED IN HELA, SIGNAL = 0.63; SWISSPROT HIT: Q92889, EVALUE 1.00e-46; NT HIT: gi14774941, EVALUE 0.00e+00; EST_HUMAN HIT: AA770518.1, EVALUE 0.00e+00
gcaagccacagcctgatgcggcgacagcactggccattacagcagattctgaaacccttcccgagtcagagaagtataatcctggtccccaagacttcttgttaaaaatgccaggggtgaatgccaaaaactgccgctccttgatgcaccacgttaagaacatcgcagaattagcagccctgtcacaagacgagctcacgagtattctggggaatgctgcaaatgccaaacagctttatgatttcattcacacctcttttgcagaagtcgtatcaaaaggaaaagggaaaaagtgaacagtgatggctgttttcttatcccatgcctgtacttttcagcggctccttgccagacatcataggtcattattaattattggtttgctatttcattcttttccaatgctcttaatgattgtacggtggaccagaagccaggattcctctctgaactctgcagttaggcatcacttgaacttgcctgtgcctgctctttttcctccctgcaccgtctatgccgg

SEQ ID NO: 8909 - DNA, 582 bp, Homo sapiens
  MAP TO AL079300.11; EXPRESSED IN BRAIN, SIGNAL = 0.82; EXPRESSED IN HELA, SIGNAL = 1.1; EXPRESSED IN LUNG, SIGNAL = 0.95; EXPRESSED IN BONE MARROW, SIGNAL =   1; EXPRESSED IN FETAL LIVER, SIGNAL = 1.1; NT HIT: gi14766820, EVALUE 2.00e-22; EST_HUMAN HIT: BF832016.1, EVALUE 6.00e-17
cccatgaatggctttgcgctgtcctcatggtaatgactgagttctcactcattacttcctgcaagcgctggttgttaaaaagagcctagcatctcccctgcctctctctctttcttcctctctcactgtgggatccctgcacatacactcacctttgtcttccatcatgagtggaagcagcttgaggccctcaccagatgcagatactgtttcttgtacagcctgcagaaccatgagtcaaaaaatcctcttttctttataattacgcagcctcaggaattcctttatagcaacactaaatggactaagacatggacaaagctgagatttaagggtggaaggagcaggttaaaagtattaatttgttgcatatcaacacttgtgagtaagatagctcttctctttgcctcttcacctttttaaaataagtgaccatgataaaagaaaaggttatagaattgggagaaaaggacaatataatataggccctcccaaaacctttgggactgtttcccactatgaggtagacttggacaaggacattttctgactcccagaagtggtgaatgccacgtggtcagc

SEQ ID NO: 8910 - DNA, 506 bp, Homo sapiens
  MAP TO AL163248.2; EXPRESSED IN BRAIN, SIGNAL = 1.5; EXPRESSED IN HELA, SIGNAL = 1.5; EXPRESSED IN BONE MARROW, SIGNAL = 1.2; SWISSPROT HIT: P34330, EVALUE 6.10e+00; NT HIT: AL163248.2, EVALUE 0.00e+00; EST_HUMAN HIT: AA127267.1, EVALUE 6.00e-57
aggttgccgctgctggttgggggtggccaccttttattcccttatttgtccccgcccatgtcctatttctgccctatcagaatgcccttttctcaatcctccctgtgattggttacttttagaatcctgctgatttgtccattttacagaggctgattggtccattttacagagctctgattggtccattttacaaacctcatgctagctacagagcactgattgatgcatttttacagagtgctgattggtgcattttacaaacctcttgctagctacagagcgctgattggtgcattttacaatccccttataagacagaacagttctccaagtccccactccaccaggaagtccagctggcttcacctctcatgactgctatttcaagatttgtacacaatctgaaatgtccctttgtttggagctttaaaccagggttccaaaaatgtttctgcatattttttcatatcttttaaaaaagctttgcatgtgcctgagatggg

SEQ ID NO: 8911 - DNA, 502 bp, Homo sapiens
  MAP TO AC016212.3; EXPRESSED IN HELA, SIGNAL = 3.4; EXPRESSED IN BRAIN, SIGNAL = 1.7; EXPRESSED IN BONE MARROW, SIGNAL = 1.9; EXPRESSED IN LUNG, SIGNAL = 2.3; SWISSPROT HIT: P11161, EVALUE 2.00e-60; NT HIT: gi9845523, EVALUE 0.00e+00; EST_HUMAN HIT: AU142101.1, EVALUE 0.00e+00
gcaaggggtcacttccccagcttcaaccacagcctcatccagcgtcacctctgcctcccccaacccactggccacaggacccctgggtgtgtgcaccatgtcccagacccagcctgacctggaccacctgtactctccgccaccgcctcctcctccttattctggctgtgcaggagacctctaccaggacccttctgcgttcctgtcagcagccaccacctccacctcttcctctctggcctacccaccacctccttcctatccatcccccaagccagccacggacccaggtctcttcccaatgatcccagactatcctggattctttccatctcagtgccagagagacctacatggtacagctggcccagaccgtaagccctttccctgcccactggacaccctgcgggtgccccctccactcactccactctctacaatccgtaactttaccctggggggccccagtgctggggtgaccggaccaggggccagtggaggc

SEQ ID NO: 8912 - DNA, 533 bp, Homo sapiens
  MAP TO AC007228.1; EXPRESSED IN HELA, SIGNAL = 1.5; EXPRESSED IN BRAIN, SIGNAL = 0.89; EXPRESSED IN BONE MARROW, SIGNAL = 0.85; SWISSPROT HIT: P10078, EVALUE 1.00e-83; NT HIT: AB037817.1, EVALUE 8.00e-74; EST_HUMAN HIT: AL042522.1, EVALUE 3.00e-65
gcattcagccagcttgcacaccttgctcaacatcagagggtccacactggagagaaaccctatgaatgtattgaatgtgggaaggcttttagtgattgctcatccctagctcatcatcgaaggattcacactgggaaaagaccttatgaatgtattgactgtgggaaagctttcaggcagaatgcttctcttatacgtcatcggcgatattatcatactggagagaaaccctttgactgtattgattgtgggaaggctttcactgatcacataggacttattcagcataagagaactcatactggagagagaccttacaaatgtaatgtgtgtgggaaggcttttagccatggctcatctctgacagtacatcagagaattcatacaggagagaaaccttatgaatgcaatatctgtgagaaagccttcagccatcgtgggtctcttactcttcatcagagagttcatactggagagaaaccctatgaatgtaaagaatgtgggaaagctttccggcagagcacgcatctggc

SEQ ID NO: 8913 - DNA, 550 bp, Homo sapiens
  MAP TO AC011467.3; EXPRESSED IN BONE MARROW, SIGNAL = 2.2; EXPRESSED IN BRAIN, SIGNAL = 2.3; EXPRESSED IN HELA, SIGNAL = 1.1; EXPRESSED IN PLACENTA, SIGNAL =   2; SWISSPROT HIT: Q03923, EVALUE 8.00e-81; NT HIT: gi16163761, EVALUE 0.00e+00; EST_HUMAN HIT: BG285112.1, EVALUE 0.00e+00
caaatgcgaacagtgtggaaaagcctttaaccggctctcacaccttactacacataagataattcatactggaaagaaaccctacatatgtgaggactgtggcaaagcttttaaccaatctgcaaaccttactacacataagagaattcatactggagagaaaccctacaaatgtgaagaaagtggcaaagcttttagccagtcctcaacccttactacacataagataattcatgctggagagaaaccctacaaatatgaagaatgtggcaaatcttttaaccaatcctcaacccttactacacgtaagataattcatactggagagaaattctgcaaatgtgaagaatggggcaaggcctttagccggttatcccaccttactacacataagagaattcattctggagagaaaccctacaaatgtgaagaatgtggcaaagcttttaaacaatcctcaacccttactacacataagaggattcattctggagagaaattctacaaatgtgaagtatgtagcaaagcctttagccggttctcacacctt

SEQ ID NO: 8914 - DNA, 546 bp, Homo sapiens
  MAP TO AC004616.1; EXPRESSED IN BONE MARROW, SIGNAL = 0.89; EXPRESSED IN LUNG, SIGNAL =   1; EXPRESSED IN HELA, SIGNAL = 0.83; SWISSPROT HIT: P13592, EVALUE 2.00e-15; NT HIT: gi14766611, EVALUE 0.00e+00; EST_HUMAN HIT: AW839816.1, EVALUE 0.00e+00
atgcccgagcccccttcatcctccacgatgtcttctctgactctggaaagagcctttgcacctgggcgtctgcctcttttggatggcaagccagaccctttcttggtcactgtgattcccaccgtaaaatggtctgccccttgctggttgacagccacacatctgtagtaaccactgtcactgacttggacctttgggatggaaagagttccatttggcaacatgtatacatgtgatgtgttagccaaatcattaattatccttctgtttggaagaatccagctaaggtgggcttcgggtattgctaaagcattgcaaggcaatgtcaccgactcccctgggttcttgccaattgtcactgtgtctttctcggctggctgagtggagggagactgcacaagtaccctatataccatgcggtccatttcatccctcacttgagcaatgcactggtacaagcctgagtcagatggctccatggacttgatcctcagccagccactgctgagaatggagaacttgctgtctgggtcatccatgggcgct

SEQ ID NO: 8915 - DNA, 544 bp, Homo sapiens
  MAP TO AF123462.1; EXPRESSED IN HELA, SIGNAL = 0.54; EXPRESSED IN BONE MARROW, SIGNAL = 0.97; EXPRESSED IN LUNG, SIGNAL = 1.1; EST_HUMAN HIT: AI685631.1, EVALUE 0.00e+00; SWISSPROT HIT: Q9QXT8, EVALUE 8.80e+00; NT HIT: gi4758827, EVALUE 0.00e+00
gtcgtcggcattgtggctgctgccgccctctgcatcttgatcctcctgtacgccatgtacaagtacaggaacagggacgaggggtcctatcaagtggacgagacgcggaactacatcagcaactccgcccagagcaacggcacgctcatgaaggagaagcagcagagctcgaagagcggccacaagaaacagaaaaacaaggacagggagtattacgtgtaaacatgcgaacactgctcacacgcgagttttcacagttatttctatccacgcctatgaatctttggacggtgagatctcacagatgtcagaactgctggaactatgaaatggggtatataaccacgactctggtggggaaaaccgttttttaaaggacacacacacacacagcgatgcatctctctctaaagctcagccacggctgcggcaaggtcccagcggtcgctgggagacagaaggttttgtgccctgctgtatcataaagcacacacttagcgctctggagccggacggtggctccaccacttccgcaggcctggaa

SEQ ID NO: 8916 - DNA, 552 bp, Homo sapiens
  MAP TO AC009290.1; EXPRESSED IN BRAIN, SIGNAL = 0.85; EXPRESSED IN HELA, SIGNAL = 1.7; EXPRESSED IN LUNG, SIGNAL = 0.94; EXPRESSED IN BONE MARROW, SIGNAL = 0.97; SWISSPROT HIT: O51761, EVALUE 4.00e+00; EST_HUMAN HIT: AW875912.1, EVALUE 2.00e-26
  unsure 200
ccctgagattccatgggtcaccacttgcaaaaaaaaaagatgctcagaaaagctatcgaaataggaacatctccattgcccaggtttgaatgagaaataaacttattttataactgtgtgaaccccaaattgcctgagaacatgcatagaaatggaatattggaagcacagatacagaagagacttcaaaaattgtaggntccccatcctcaaagtggtgcattcattgaaggtagaatatggttcagccacagtgtatgaccacgttaggtttggaatgagcctttgaaaatatagggcatagagaagcatagaagatataaatgctaagttctttacaaaacagcaagtcaaggataaaaagacaagcaattaggtgataaaacaagaaacagacaaaacaaaacatacatacacacgtgacagtggaaaagaggatcatagaacagacagcatgacatcaggtatagctttaaaaggagttagctgaatgcattacaaccagactccattaatgaatctccacaggttccagaagcactctgagggccc

SEQ ID NO: 8917 - DNA, 553 bp, Homo sapiens
  MAP TO AL357153.1; EXPRESSED IN BONE MARROW, SIGNAL = 0.8; EXPRESSED IN HELA, SIGNAL = 1.3; EXPRESSED IN BRAIN, SIGNAL = 0.77; SWISSPROT HIT: Q9UKF2, EVALUE 2.00e-38; EST_HUMAN HIT: AA187886.1, EVALUE 2.00e-01
tgctgaacatggggttccatcctggatgtagatgtcatttggacactcttcctttttcccatcacagtattccggtagatcacatataccacccaagtctctgcaaaccactccaggggcagcatatttacacttatggcagcaaagtcctgtattgcaaacactgccaagagaaagggtacaagaggtctcacaacatctatcactggcacaatctttaagggagccacagtcacattcttccctctgatttttgatcttgtctccacaacgaggagctacgtatggaaaattagtgtatggaacatttggagcactcaaacaaggatcccattgattaaacttgcgttgaattatctcataagaacaattgctcatcatatcattaagatcaggaacagggtcatgagacagttggttcgtcgaaaacaataacaaccaacagaatcatgtctcaagcccatgttatgacctagtgcatgtgctgtaacacatgcccccctaaataggtgatacctcattatatacacaaacattgctccccagttggggg

SEQ ID NO: 8918 - DNA, 507 bp, Homo sapiens
  MAP TO AL049840.4; EXPRESSED IN HELA, SIGNAL = 0.98; EXPRESSED IN BONE MARROW, SIGNAL = 0.81; EST_HUMAN HIT: BF352482.1, EVALUE 1.00e-05; SWISSPROT HIT: P78423, EVALUE 7.00e-05
ggggctcggccacacaaatgcacaatgtggccaagcctttcccagacagctggtcagggagctccagaggctttcctgaggaaggggagctgtcgctggcacctgaaggtcctgtagagagacgagggaagaagcatctagacaaaggccctgggtgggaggtcagtgttgacggagcagagagggagccaggcgccatctcagggaaccctcagtgggattctctccactaggatctggtgccatagcaggaagaaccctgtcgcatgtgggcaggaacgagctgctggctcccatcagctacttggcagtcacacgccaccctccctcccacagagtcttccgaggagtggccagaagctcaaacacagccgtgtccctctgtgcgtgagccagggactcaggcctcagacagggctctcccttgtagtgagcagagtggccctggcccttatttgaggtggtcacctgggcgctgctactgctaccactccagggctgcttcgc

SEQ ID NO: 8919 - DNA, 565 bp, Homo sapiens
  MAP TO AC010395.3; EXPRESSED IN BONE MARROW, SIGNAL =   1; EXPRESSED IN HELA, SIGNAL = 1.2; NT HIT: gi14766803, EVALUE 0.00e+00; SWISSPROT HIT: Q27969, EVALUE 1.00e-58; EST_HUMAN HIT: BF365554.1, EVALUE 0.00e+00
gggagaccctagctgcccgagatgtggtactgcaccagacatctggccatatccacaacaagaatatctccactcacctaactggcaacaacaaacaaggccatggcactgagagtagtggctctggcatctttgccgtgagcacactggatgggatgctgaagctcatggaggaagcagacaagctgttgtggtcagcgcaggtggatcaccagctcttcgccctggagaaattgggatgtcaacggcaatgggcatgaggaggtagttccatgtgcctgcgatggacagacatatattattgatcacaatcacaccgtcgtccgcttctaagtggatgaaaatatccgtgccttctatgcaggcctgtatgcctgcccagggatgcaacagctcctgcctcgtatatgtcactttcaaccagaagatctatgtgtactgggaggtgcagttggagtggatggagtctaccaatctgctgaatgactggagaccaagcctgagtaccatagcctgctgcaggagctgggcatggatcctgacaacctccctgtggctcatgccc

SEQ ID NO: 8920 - DNA, 503 bp, Homo sapiens
  MAP TO AL163853.3; EXPRESSED IN LUNG, SIGNAL = 1.4; EXPRESSED IN BONE MARROW, SIGNAL = 1.4; EXPRESSED IN FETAL LIVER, SIGNAL = 1.3; EXPRESSED IN BRAIN, SIGNAL = 1.3; SWISSPROT HIT: Q55766, EVALUE 6.10e+00; EST_HUMAN HIT: AA632290.1, EVALUE 1.00e-101
gactctgcccccacccgatgcacttctcttatgggcaatggagcaggttttagagttcggccttggaggctcatctatgtcaacccacttacggtatttatttttaaatattgatgttatatgtaatattcttaaagaacatttttcttttcaagtaaatatttttttctttttttttctgtacaggttattagtaatgttcatcatgtctgctggaacagctatagcatcatatttcattccaagcactgttggtgtggttcttttcatgactggatttggtttcttgctgagtctgaacttaagtgatatgggtcacaaaattggaaccaaatctaaggatttacccagtggtccagaaaaacatttttcatggaaggaatgccttttctacatcattatattagtcttggctcttttagaaactagtttgcttcatcactttgctggcttctcacagatttctaaaagcaattcccaggctattgtgggctatggtttga

SEQ ID NO: 8921 - DNA, 500 bp, Homo sapiens
  MAP TO AL031115.2; EXPRESSED IN PLACENTA, SIGNAL =   2; EXPRESSED IN BRAIN, SIGNAL = 1.4; EXPRESSED IN HELA, SIGNAL =   2; EXPRESSED IN BONE MARROW, SIGNAL = 1.5; EXPRESSED IN FETAL LIVER, SIGNAL = 1.9; EXPRESSED IN LUNG, SIGNAL = 1.1; EXPRESSED IN HEART, SIGNAL = 2.2; NT HIT: AF324892.1, EVALUE 8.00e-03; SWISSPROT HIT: Q20765, EVALUE 9.10e-01; EST_HUMAN HIT: AI766017.1, EVALUE 0.00e+00
cgagtcagggcctcggtggactcggccgccacccgcggggataccgccgccgccgccgccctgtagtgtcccgcgagccgggagcagcttcgggatttccatctctgcgtccgagaggctcggctggaaccagagccgaggaggaggcgcgatcccgccccctgccgcgggcctgaacacgttcctgaaaggggaaaaaaaaatgtgcaatgcgcagaaactggccctatcagatattaaaacgtatttaacgccacagtgatttaaatattctggtactgggtctctggaacagaatagaaagcccagaggtagagcctggtatgcataaatacgttctacagttaatataagtaagtaattaagggggtcttctgaggtaatggggaaatgacgacagcttgttcagtaatgctgtggaacacctaggtatctatccgctggaagcaattttaatccatgactcattgtatatacccaaataaacacaccccagcccc

SEQ ID NO: 8922 - DNA, 500 bp, Homo sapiens
  MAP TO AC005332.1; EXPRESSED IN BRAIN, SIGNAL = 1.1; EXPRESSED IN HELA, SIGNAL = 0.6; EXPRESSED IN BONE MARROW, SIGNAL =   1; EXPRESSED IN LUNG, SIGNAL = 1.1; EST_HUMAN HIT: AL135199.1, EVALUE 6.00e-20; NT HIT: gi13651733, EVALUE 0.00e+00; SWISSPROT HIT: O15403, EVALUE 4.00e-72
gccccaggccaagcgaaaagaaagccccgctattagacttctccattttgaaagagaaaagttttatttgttatgcattatttggtctctttgcaacactgggattctttgcaccttccttgtacatcattcctctgggcattagtctgggcattgaccaggaccgcgctgcttttttattatctacgatggccattgcagaagttttcggaaggatcggagctggttttgtcctcaacagggagcccattcgtaagatttacattgagctcatctgcgtcatcttattgactgtgtctctgtttgcctttacttttgctactgaattctggggtctaatgtcatgcagcatattttttgggtttatggttggaacaataggagggactcacattccactgcttgctgaggatgatgtcgtgggcattgagaagatgtcttctgcagctggggtctacatcttcattcagagcatagcaggactggctggaccgcccctt

SEQ ID NO: 8923 - DNA, 543 bp, Homo sapiens
  MAP TO AF051976.2; EXPRESSED IN HELA, SIGNAL = 1.1; EXPRESSED IN BRAIN, SIGNAL = 1.6; EXPRESSED IN HEART, SIGNAL = 1.4; EXPRESSED IN BONE MARROW, SIGNAL = 1.3; SWISSPROT HIT: Q9UKN7, EVALUE 4.00e-71; NT HIT: gi14775687, EVALUE 0.00e+00
gaggagctgcccccggtttccgctgtgccctacggccaccctttctggggcttcctcacgccgcgccagcgcaacctccagcgcgcgctgtcggccttcggcgcccaccggggcctgggcttcggccctgagtttggccgccccgtgcctcgccctgccacctcgcttgcgcggttcctcaagaagacgctgtcggagaagaagcccatcgcgcggctcaggggcagccagaagacccgggcgggcggccctgctgtcagggaggcggcctacaaacgcttcggctacaagctggctggcatggaccccgagaagcccggcacgcccatcgtgctgaggagggcccagccgcgcgctcgcagcagcaacgacgcgcgccgcccgcccgcgccacagcccgcgcccaggaccctctcccactggagcgcgctcctgtctccgcccgtgcccccgcggcccccaagctccgggcccccgcccgcgccgccgctctccccggcgctctcgggcctgccccggccggcctcgccctacggctccctc

SEQ ID NO: 8924 - DNA, 559 bp, Homo sapiens
  MAP TO AL137799.2; EXPRESSED IN HEART, SIGNAL = 1.3; EXPRESSED IN HELA, SIGNAL = 0.64; EXPRESSED IN BONE MARROW, SIGNAL = 1.1; EXPRESSED IN LUNG, SIGNAL = 1.2; EXPRESSED IN FETAL LIVER, SIGNAL = 1.1; NT HIT: AB026898.1, EVALUE 0.00e+00; SWISSPROT HIT: P03357, EVALUE 2.00e-37; EST_HUMAN HIT: AW967582.1, EVALUE 0.00e+00
gggcttggtttcccagaggggattaccccatactaggggtccttctataagcatttttaatggagggtcctgccttgtggctcttttggcttcaatattcgcttggcggttcccttctatttccctttcctttcctttctgatgaccccagcagtgtaagactgccacctctttaggtttctgtacagccgataataatctcctgatggcttcctgatgtttgatagatgttccctcagaagttaggtattccctttctctccatattgctgcatgggcatggaggactaggtaagcatacttagagtctgtatatatgtttacccttttttctttttctaattttagtgcccgagtaagggctattagttttgccagctgagcgctagttcctggagtgaggggattattttcaagtattccattatcactgaccactgcataccctgcttttcgaagtcttttttctacaaaggaacttccatcaatatacaagttgaggtcaggatcagtcaaaggaacctctagaaggtttcctcgagcggcataggtttgagca

SEQ ID NO: 8925 - DNA, 549 bp, Homo sapiens
  MAP TO Z98304.1; EXPRESSED IN PLACENTA, SIGNAL = 2.6; EXPRESSED IN BRAIN, SIGNAL = 2.3; EXPRESSED IN HELA, SIGNAL = 2.3; EXPRESSED IN LUNG, SIGNAL = 2.4; EXPRESSED IN HEART, SIGNAL = 2.6; EXPRESSED IN BONE MARROW, SIGNAL = 2.6; EXPRESSED IN FETAL LIVER, SIGNAL = 2.3; EST_HUMAN HIT: R67493.1, EVALUE 0.00e+00; NT HIT: gi14758278, EVALUE 0.00e+00; SWISSPROT HIT: Q14587, EVALUE 2.00e-30
tgtgggagggccttttccctgaagtcacatctcattctacatcagagaggtcatactggagagaaaccctatgaatgtagtgaatgtggaaaggccttctgtggaaagtctccactcattatacatcagaaaactcatcctagggagaaaacccctgaatgtgctgagtctggaatgacttttttctggaaatcacagatgattacatatcagagaagacacactggggagaaaccctccagatgcagtgactgtgggaaggcattctgccagcatgtatactttactgggcatcagaatccatataggaaagacaccttgtatatatgctgattgtgggaaggcctattcccagaagtcagtcctcattgtctatgggaaaactcacattgaatagaaatagtgacaacttctcaactgtagaatagactaatatgttcctcagtatacatgattacccttccacagaatgatctgcttaggccctcagaatattttcaaccccacaaatatggaatcaatttgctcaccctcaaactgtctcagccc

SEQ ID NO: 8926 - DNA, 500 bp, Homo sapiens
  MAP TO AC012331.9; EXPRESSED IN BONE MARROW, SIGNAL = 2.7; EXPRESSED IN LUNG, SIGNAL = 1.4; EXPRESSED IN HELA, SIGNAL = 0.57; EXPRESSED IN BRAIN, SIGNAL = 1.6; EXPRESSED IN HEART, SIGNAL = 1.4; EST_HUMAN HIT: BG722080.1, EVALUE 0.00e+00; NT HIT: gi16182008, EVALUE 0.00e+00; SWISSPROT HIT: P33240, EVALUE 2.10e+00
ccgacggttccccactgctcccaggagcggttacctgggcactctgtgcccctccttcctgttcgggcccaggccgaggacctgccagtagggctcagttgcctggagcccgttcagcccatcccccagttcactttgcctgtgggatctccccgttgctcctgcccgtggactgagtggcaggccatcctacaagcacccggacacttgacatcagtggtgtcaagacaactctaagaaggttttcggtgatcctgcaagcgctgcgttccttcctgggatcctgccttcaatttgattgcacaggtaccacagcaagccagtgctgcgtgctccgagttccagggcgtcctccagctcagccactgcactgagaacatggactctctgtggggcccaggagccgggagtcacccctttggggtccacaacacccggctgtccccagacttgtgtccagggaagatagtgttgagggccctcaaggagagcggggcagg

SEQ ID NO: 8927 - DNA, 536 bp, Homo sapiens
  MAP TO AL008728.1; EXPRESSED IN BRAIN, SIGNAL = 0.92; EXPRESSED IN HELA, SIGNAL = 1.2; EXPRESSED IN BONE MARROW, SIGNAL = 0.87; EST_HUMAN HIT: AA492008.1, EVALUE 7.50e-01; SWISSPROT HIT: P42805, EVALUE 6.60e+00
tggggaggaggaagaggatggtgatgaagatgattatgatgaggatgatgatgagaaggaggagatggggatgaagataacgatgaggatgatgatgaggaggaggtgatgatgaaaatgatgaggtgatagggatgacgacaacgatgcagctgcattctttcagtttccacaccatgctcttccaggtcccgtcgagctgggctgctgtctgaaggcgcagggctggcatctcctgtgtctgccatcccaggctccacagagccgcacatgctagcagaactcgggaaggctgagagctgggctgacgggttttaggtttcataattctcttgtgtgagctcattaaatcaagtgtgaaaaactaagaaggcacatgaattctatttttaaaatagaatgccctggttcttgcgtcatggtttttatttttttaacttcattgacttagagttgttggggatgtggctaagcaataataaggcaaaaaacgtgaactgggaattggctgcttctgtcaccgccggctcatccat

SEQ ID NO: 8928 - DNA, 543 bp, Homo sapiens
  MAP TO AL138761.3; EXPRESSED IN LUNG, SIGNAL = 1.1; EXPRESSED IN HEART, SIGNAL = 1.6; EXPRESSED IN BONE MARROW, SIGNAL = 0.75; EXPRESSED IN HELA, SIGNAL = 0.93; SWISSPROT HIT: P20397, EVALUE 1.20e-01; EST_HUMAN HIT: BG943127.1, EVALUE 0.00e+00; NT HIT: gi15299680, EVALUE 0.00e+00
caggctgaggttcagtgggctgtgaaactacagtaacttcaggctcttttttaattgacactggaatttcttttttctctttatctatctgagtagtgactttagaagcatcctgaacttcacttcctaaagccttttggtcagtatcagccaccacacttctgacctccatttcttcagtgctacttgactcagtgatttcttcaccttcagttgttcctggttcctcattgatgtccattatgttctctgaactgtttattgcttgttccttatttttaccttcttctatttcattcatttcaactatttctttaataggaacttccttagtaccaccagcctcaggacccaccatgggcttattaattaatttctggcctacttcgaccacttctttcccatcattactctgcgtatcctcagcactgtcttcatccactttctgagccacatctgctgcctcacatgttcctatcacatcacttgtattgctgatcacatctttttgagttttgtcgtcttcccccaatttctcttggg

SEQ ID NO: 8929 - DNA, 547 bp, Homo sapiens
  MAP TO AL023773.1; EXPRESSED IN BONE MARROW, SIGNAL = 0.74; EXPRESSED IN HELA, SIGNAL = 0.38; NT HIT: AF116195.1, EVALUE 0.00e+00; SWISSPROT HIT: P43363, EVALUE 4.00e-21; EST_HUMAN HIT: BE729944.1, EVALUE 0.00e+00
gggcacagctgcccgttatgaagatcacactcagaataagaatcaggaggcagttctcaggcctgcccgtgtcatcactaccctcatcggcgaggtctactgtgtttgcaaacacatagaaatggtcagggcccacttctatcagggaaaggccaaaaagaagctctatgaactcacaggctttctcgagtatcacaggaaagtagtctttgtacttggtgatgacaatcgtcagcatctctgactctgttataggctcctttgtttgatatttgaggagcaggaactccactcactcggccaccttttcatctagtgtatatgtgaaaaagaactcactgtctggcaggccaggacaggtcctgcatcctcctctttttggctgctggactcttcattcattgggctgcatgaaacagaggaagagcaggagctcagaggattctggggaggacattgggaaggaccctgtggaggactcttgggagtgctctggagaagacttgacatcccagcagagtgcacctcctcctcctcagggccacca

SEQ ID NO: 8930 - DNA, 526 bp, Homo sapiens
  MAP TO AL023584.1; EXPRESSED IN PLACENTA, SIGNAL = 2.3; EXPRESSED IN BRAIN, SIGNAL = 2.1; EXPRESSED IN HEART, SIGNAL = 1.5; EXPRESSED IN LUNG, SIGNAL = 1.5; EXPRESSED IN BONE MARROW, SIGNAL = 1.3; EST_HUMAN HIT: AA683219.1, EVALUE 1.00e-120; NT HIT: gi12731807, EVALUE 0.00e+00; SWISSPROT HIT: P31629, EVALUE 2.00e-55
ccgctgggtgaggacaaggcatctgctctgatgagcagcgtcgcatctctttctggtggtgatggcctgggacagacaatgagtatgaaccagcagggacagtcagaaactctgaatgcttcccaaactcatcctgcttaggaagtgcagaaagcttactggtttcttctctttcaaaagacatggagaaactggagctgtgggacaagttgctttcttggctggggctgcgggagaggcctgtgcctgtggattcaaagctggactcccctgaggagtgctccatatctgcaagtcgcagacgcttctttttgggtggcaacttctccgcggggagctgggaaagggtctcacttctctggggccactgaaattcttccacaggcttctctggctctttgctctgggcttccttctccttctcaggtttatcaggctcctcggtcactcgaatctcaggaacctggatgttgtgttgccgaactagcctgggctgtgtgtgataggactgctgctgcacctgctg

SEQ ID NO: 8931 - DNA, 565 bp, Homo sapiens
  MAP TO AC010680.3; EXPRESSED IN BRAIN, SIGNAL = 0.8; EXPRESSED IN HELA, SIGNAL = 1.3; EXPRESSED IN BONE MARROW, SIGNAL = 0.96; SWISSPROT HIT: Q14324, EVALUE 9.00e-20; EST_HUMAN HIT: BF224054.1, EVALUE 1.00e-112; NT HIT: gi16157781, EVALUE 0.00e+00
ccagtaaaaggacgcccacctccaaagattacttggtctaaaccaaatgtcaatctaagagacaggattggactggacataaagtcaactgactttgacactttcttgcgctgtgaaaatgtgaacaaatatgatgcaggaaaatatatcttaaccctggagaacagctgtggtaaaaaggaatataccattgttgtgaaagtgcttggtaagtctatttcaaaaaagaatcatatatattttaaaatagcttatgtattttttacacattcatttcttatttacctactatttatccagatactcctgggccacctgtcaatgtgactgttaaggaaatatccaaagactctgcttatgttacctgggagcctcccattattgatggcggaagccccatcataaactatgtggtacaaaaacgtgatgcagagaggaaatcctggtctacagtgacaactgagtgctccaaaacaagcttcagagtagctaatttggaggagggaaaatcctacttcttccgagtgtttgctgaaaatgagtatggcattggtgatcccggtga

SEQ ID NO: 8932 - DNA, 522 bp, Homo sapiens
  MAP TO AC011482.1; EXPRESSED IN HELA, SIGNAL = 1.9; EXPRESSED IN BRAIN, SIGNAL = 1.1; EXPRESSED IN FETAL LIVER, SIGNAL = 1.5; EXPRESSED IN LUNG, SIGNAL = 1.1; EXPRESSED IN BONE MARROW, SIGNAL = 1.2; SWISSPROT HIT: Q9Y2Q1, EVALUE 1.00e-94; EST_HUMAN HIT: AA209235.1, EVALUE 8.00e-84; NT HIT: gi16163766, EVALUE 0.00e+00
gctttgccacactcttcacattggaagggtttctctccagtatgaatcatcttatgtcgagtaagggctgaggactggttaaaggctttgccacactcttcacatttgtagggtttctctccagtatgaattctcttatgttgagtaagggtagtaagagctgaggaccacttaaaggctttgcaacattcatcatatttgaagggcttctctctattatgaattctcttatgttgagtaatgtgtgaagaccggttaaaggctttgccacactcttcacatttgtagggtttctctctagtatgaattaccttatgttgagtaaggtgtgaagaccggttaaaagcttttccacactcttcacatttgtagggtttctctccagtatgagtcatcttatgtcgagtaagagctgaggactggttaaaggctttgccacattcttcacatttgtgggaattctctctaatatgaattctcttatgtcgagttagttgtgaaagcatgcaaaatgatttgcca

SEQ ID NO: 8933 - DNA, 503 bp, Homo sapiens
  MAP TO AF023268.1; EXPRESSED IN LUNG, SIGNAL = 1.3; EXPRESSED IN HEART, SIGNAL = 1.4; EXPRESSED IN FETAL LIVER, SIGNAL = 1.5; EXPRESSED IN HELA, SIGNAL = 0.58; EXPRESSED IN BONE MARROW, SIGNAL = 1.2; NT HIT: AF023268.1, EVALUE 0.00e+00; SWISSPROT HIT: P49746, EVALUE 4.00e-19; EST_HUMAN HIT: AW893017.1, EVALUE 1.00e-128
ctccagcggaggtcgatgggctggagattaggactggacagaaggcgtatttgaggatgcaggtgagccgggaggagcctctgagttctgtggaaatagagtttgcaccagctggggaaggggttggtagaccttcccaccttactctgctgctatccccccagggctttgtggaatctatgaaaattattctgggtgggtccatggcccgggtaggagccctgagtgagtgtccattccaaggggacgagtccatccacagtgcaggtaacacagagacttgtttgctgacattggaccacggatcctgtggcctttggtgactcctgtcttcttgatctccctctcccttaaaacccattcctttggctcacctgttcctagggtttctaaccctgttattccaaatctttcacctgactccacaatctccaatacacccatccgagaaaaaaagtgatctaagagaagaattggttaattgcttggccttggctgaccaa

SEQ ID NO: 8934 - DNA, 521 bp, Homo sapiens
  MAP TO AC025436.2; EXPRESSED IN BRAIN, SIGNAL = 1.1; EXPRESSED IN HELA, SIGNAL = 1.8; EXPRESSED IN LUNG, SIGNAL =   1; EXPRESSED IN BONE MARROW, SIGNAL = 1.1; NT HIT: gi14861873, EVALUE 0.00e+00; SWISSPROT HIT: Q9Y5E4, EVALUE 4.00e-08
caaggcctcataatagccgggggaaaagggagtatataacaggctatgacctaaaaggcctgctatatgttttagctattacagtatacagtgtgctttgaaatgaaaattatctgaagttgtaaagcagaacgcttggtggcgctgcaggctgagtgaaaaactgcagaatcagtgtctccttaaaagctgtgcgggttttctggcagctccaaaaggaaacactttttcactactggggataggtttcagagaggcagccatcccatgtcggtcaatgttaaaaagaactaactcaagatatttaaatcaagatagctgagttggctgtaaagcaattattttgtgattaaatactgcatcttttggaccttgaggaatgatggagacgccgctccccaaagcaccagagaaaaggcaagtgaccgccattattttcttattactactgtgggaggcgggcagcgctacgattaagtattcagttctagaagagagggacagcggctcttttgtggcca

SEQ ID NO: 8935 - DNA, 505 bp, Homo sapiens
  MAP TO Z77249.1; EXPRESSED IN HELA, SIGNAL = 0.77; EXPRESSED IN BONE MARROW, SIGNAL = 1.1; EXPRESSED IN FETAL LIVER, SIGNAL = 1.4; SWISSPROT HIT: Q14186, EVALUE 8.00e-61; EST_HUMAN HIT: AA860918.1, EVALUE 0.00e+00; NT HIT: gi14763911, EVALUE 0.00e+00
ggcagagcagctcccggactctagcccaaaagtcatgcccatccacatcagcacttctgtgtcatcgtggatttcaaaggagctgttaaacttaaacagatattctgatttgtcgtcggagatgctgcagttgatgacggtcttcttgctactgctgatgatgatgaagggcacgtggatgactgagttgggcagcggccgctggctgacctgctcctccacatactggtttctcagcaccaggttcttgaaagcaatttgctgtagaataagttgttgaagttcagactgtttctgctttattctttcaagtctcttctgtctttccacccgtaagttctgacagttctgagccgagttggtggtcagaccaatccacttgatcttctttttctccctggagatgatattcatggccatcagcacgtttaaggcatcgtaggtgcgccgttttatgtttttcacgtcataagctgactcgtttggtgaggcgtggttgctggca

SEQ ID NO: 8936 - DNA, 521 bp, Homo sapiens
  MAP TO AL158150.2; EXPRESSED IN HELA, SIGNAL = 1.1; EXPRESSED IN BRAIN, SIGNAL = 0.97; EXPRESSED IN BONE MARROW, SIGNAL = 0.83; SWISSPROT HIT: Q11137, EVALUE 9.60e-01; EST_HUMAN HIT: AA490023.1, EVALUE 1.00e-101
tcggcaggactgagctggggcacccttagggcatgtgtaatgggcctgcactgttgtcagaagatccatcctgtcttcgggagggacgtaggtgatgggagctttggagaacatccggggcattggccaagcttggtacttatctcgaaactcagtggtgttacagaaaggcatgtctagcccaggaggcctggctagaggtttcaagctcttggcaggctcccccatcaggccccggtaggattgtttttgagtggtaaggctttcaaaggggatttcacagggcctgaacttctctgcttcatgcacaaagcgcttctccacggggtgggccacatagctcatcttgtagttagtcacatcctccaaggggatgttacagagctttggcatggccagaggtttacagcttatggtcttcacaaggccttttatggggtaatcgtcctggtgtgtggttctgttatcaaacctgactgatgccggctggtatttgtgttccagacgaagtggctctcgcc

SEQ ID NO: 8937 - DNA, 575 bp, Homo sapiens
  MAP TO AF238280.1; EXPRESSED IN BRAIN, SIGNAL = 1.1; EXPRESSED IN HELA, SIGNAL = 1.8; EXPRESSED IN LUNG, SIGNAL = 1.3; EXPRESSED IN BONE MARROW, SIGNAL = 1.5; EXPRESSED IN FETAL LIVER, SIGNAL = 1.2; SWISSPROT HIT: P49910, EVALUE 2.80e-01; EST_HUMAN HIT: BG746406.1, EVALUE 1.00e-101; NT HIT: gi14744683, EVALUE 1.00e-102
gcacctggatttgggctgcactctgaggtagagctgacaggacttgccagtggtttggtgtgggtgtcgaggaagaggggagtcaagggacagccaggattttggcctgagccagaaggtagaccgcagtaacgtttgctgagatgtggagtcccagggagggtgggtccgtggtcatcaagagctctcactcatctgcagccccatgcagcctaatcacccagtgctcctcccacccctccctgatgccctctgatctggactgccaccccagaggatcccctgctccccttgcctcctccacagttagtgggtgcaactgtgactgtctatgttcctgctcctgctgcagcactgccttccaagtgatattctatttattgtttcagattgtgacaccaggactgaagacaaggagtttcttcacaaggaagacattcatgaagatttggaatcacaggcagaaatatcagaaaactatgctggtgatgtttcccaggtacccgagcttggagatctgtgtgatgatgtatcagaaagagactggggagtccccgaaggcaggaggctgccac

SEQ ID NO: 8938 - DNA, 553 bp, Homo sapiens
  MAP TO AC004017.1; EXPRESSED IN HELA, SIGNAL = 0.4; EXPRESSED IN BONE MARROW, SIGNAL = 0.76; NT HIT: gi14766439, EVALUE 0.00e+00; SWISSPROT HIT: P52741, EVALUE 1.00e-39; EST_HUMAN HIT: BF797956.1, EVALUE 0.00e+00
cccagcccccacggacctactccaacacgaagccactcccagtggtgaggagccacacagtagcagcagcaagcatatacaggcatttttcaatgcaaaaagttattacaagtggggtgaatacagaaaagcttcaagccacaaacacacacttgttcagcatcagagtgtctgttctgaaggagggctttatgagtgtagcaaatgtgagaaagccttcacttgcaagaacacacttgttcagcaccagcaaattcacactggacaaaagatgtttgagtgtagtgaatgtgaggaatcctttagcaaaaagtgccacctaatcttacacaagataattcacactggagaaaggccttatgaatgcagtgatcgtgagaaagcctttatccataaatctgaattcattcaccaccagagacgtcacactggaggagtgcgtcatgagtgtggtgaatgtaggaaaacctttagctacaaatctaacctcattgaacaccagagagttcacactggagaaaggccttatgaatgtggcgagtgcgggaaatcc

SEQ ID NO: 8939 - DNA, 591 bp, Homo sapiens
  MAP TO Z70227.1; EXPRESSED IN BONE MARROW, SIGNAL = 1.4; EXPRESSED IN FETAL LIVER, SIGNAL = 1.3; EXPRESSED IN LUNG, SIGNAL = 1.3; EXPRESSED IN HELA, SIGNAL = 2.1; EXPRESSED IN PLACENTA, SIGNAL = 1.4; EXPRESSED IN BRAIN, SIGNAL = 1.4; EXPRESSED IN HEART, SIGNAL = 1.6; EST_HUMAN HIT: AA286758.1, EVALUE 0.00e+00; NT HIT: AB015978.1, EVALUE 5.60e-01; SWISSPROT HIT: Q62059, EVALUE 4.40e+00
cgatttccctgaggacttctgctcctacagactctcgacggagtaaagcttccgatagaggggaaacagattcgctactagtgttgatagtcaagttactaaggttctttatcaacgtctcggagcagatttgagaggcccctgaatcgtcccgggaattttcttcggtgagcatttgtggagactctgggatgtaggttggattaaacttctgtgatgggtccatcggcgtcttgacacaacactaagcttctcctggatctttgaaacgtagcagaaactgatgacggagcctcaaattgctacaaggtagcccggaaagagcaagagtgagtgtacttcggatgaagggaatgtggaccctcaggactaaagcagtgggagaggcctgggaggtggggcctggggagggcgaggtctgctctgaagtcaccaagctcctgatcttagaagagatggtgggcgcaggctctggaggctcaagcggaggaggggaaggaggcgagtccggaaaccctcggccaatcagagagggctggggcggcgcctgctagaaggcttagcactgcagggctctgggcgggaaggcta

SEQ ID NO: 8940 - DNA, 510 bp, Homo sapiens
  MAP TO Z97184.1; EXPRESSED IN HELA, SIGNAL = 2.2; EXPRESSED IN BONE MARROW, SIGNAL =   1; NT HIT: gi11417515, EVALUE 1.00e-20; EST_HUMAN HIT: BI827966.1, EVALUE 3.00e-43
ccctgccccctcccaaaaagtgggtgcaaaacaccaaaaaggtagattttggaatgtcaggctctcaggtaagtcggaaatagggtataattccgaaggaagccactccagcccctaagagcaccttatttctctaacctccaaggaaagggcacaagatttgtcagatacctgtgtttgctggcgctgccacttgctgtgtgaccttggataatctcttaatctttctgagctttagtttcctcatctgtcaaatggggttgagaggaatacctacctcactgttgtggggagttacacagataatgagcgtgaacatatttttgagttgtaacgggctgtgtcgttatgagatgttatcattattcttttctctttttcttcccagagacccccccggccgccctcctcctttctttgttcctgtggctgggggggtatcccctccctccacaacatggagccatctcctctgtctcccagtggggcagcacttcccctgccgctgtc

SEQ ID NO: 8941 - DNA, 570 bp, Homo sapiens
  MAP TO AL121935.12; EXPRESSED IN LUNG, SIGNAL = 2.6; EXPRESSED IN PLACENTA, SIGNAL = 2.6; EXPRESSED IN HELA, SIGNAL = 4.7; EXPRESSED IN BONE MARROW, SIGNAL = 2.9; EXPRESSED IN FETAL LIVER, SIGNAL = 2.8; EST_HUMAN HIT: AI808029.1, EVALUE 0.00e+00; NT HIT: gi14755122, EVALUE 0.00e+00; SWISSPROT HIT: P51684, EVALUE 6.00e-55
ggtcctgcttgtgacggctgcaaatttgggtaaaatgaaccgatcctgccagagcgaaaagctaattggctatacgaaaactgtcacagaagtcctggctttcctgcactgctgcctgaaccctgtgctctacgcttttattgggcagaagttcagaaactactttctgaagatcttgaaggacctgtggtgtgtgagaaggaagtacaagtcctcaggcttctcctgtgccgggaggtactcagaaaacatttctcggcagaccagtgagaccgcagataacgacaatgcgtcgtccttcactatgtgatagaaagctgagtctccctaaggcatgtgtgaaacatactcatagatgttatgcaaaaaaaagtctatggccaggtatgcatggaaaatgtgggaattaagcaaaatcaagcaagcctctctcctgcgggacttaacgtgctcatgggctgtgtgatctcttcagggtggggtggtctctgataggtagcattttccagcactttgcaaggaatgttttgtagctctagggtatatatccgcctggcatttcacaaaaca

SEQ ID NO: 8942 - DNA, 532 bp, Homo sapiens
  MAP TO AL135999.2; EXPRESSED IN BRAIN, SIGNAL = 1.6; EXPRESSED IN HELA, SIGNAL = 1.6; EXPRESSED IN PLACENTA, SIGNAL = 1.9; EXPRESSED IN BONE MARROW, SIGNAL = 1.4; EXPRESSED IN LUNG, SIGNAL = 1.4; EXPRESSED IN HEART, SIGNAL = 1.6; EXPRESSED IN FETAL LIVER, SIGNAL = 1.1; NT HIT: gi14751069, EVALUE 0.00e+00; SWISSPROT HIT: P80198, EVALUE 1.10e-01; EST_HUMAN HIT: BE961136.1, EVALUE 1.20e-02
gcagcggtgggtgtcaccagccacctccttccattcagcttccgggaggctccggcctatgctgcagtggtagagcagcagctccaggctgtctgtgctgaaggcctggcacactaggcagcggaacaccttcagggacaggctgtcgtctgggggtggtgaggtgggcaggctgtcagatgaggaacccaggagctgacttggaggcaggtgggcatcaggggataggcttccaggggctagaggacagagacagattagtggcccaagaaagaaatggggcacggttggttctctatgtggggaggtgggttaatgagtaggatagtgctcagagggacttatggttacctaagtggggagttggtccttgggagaaagcacggaatagagtttggccctggggaggagagaagagggaagaagcacagaagcttaccggatgtggggaacttgcgggcaggtgctcctacgtggtggaaaccattgagaagtagctgggcttccaggggcttgtctggcctcagccccg

SEQ ID NO: 8943 - DNA, 510 bp, Homo sapiens
  MAP TO Z83840.7; EXPRESSED IN LUNG, SIGNAL = 0.93; EXPRESSED IN HELA, SIGNAL = 1.3; EXPRESSED IN BRAIN, SIGNAL =   1; EXPRESSED IN BONE MARROW, SIGNAL = 0.88; EST_HUMAN HIT: BG676539.1, EVALUE 0.00e+00; NT HIT: gi13375776, EVALUE 0.00e+00; SWISSPROT HIT: Q15427, EVALUE 5.50e-01
gcctcgagcaccaaggggaggaaacaaggatctggtcagaggagaggatgctgtgagggacagtctccaagtcgactgttctgggagtgagaggcccacaggcaggaagcacagcctaccatggcctccagccttcactggctatggatgtgggacccgggaacaggaacaggcagtggctgtgaatggtttcatctctgccccctgtcctgagatgaatcctgtcccccactggggtgaagtcttcctgctggtgggtggggagggagagcatctggccagccagggcacaacccctgccagggatcatagagtggggatcagtccagcctcccagcaggcccaacctgaatcctggagaagacgacaaagggacaaaggggtggatccagagaaggcccccagcctgactcggcagtcccaaaaccctccgtctctgacagctcccttgggcatgccctctgcctgctcctgtctcccgtgtggcccagccccggaagctgccatcat

SEQ ID NO: 8944 - DNA, 500 bp, Homo sapiens
  MAP TO AL133445.2; EXPRESSED IN HELA, SIGNAL = 1.5; EXPRESSED IN HEART, SIGNAL = 1.3; EXPRESSED IN BONE MARROW, SIGNAL = 1.2; EXPRESSED IN LUNG, SIGNAL = 1.1; SWISSPROT HIT: P77432, EVALUE 7.00e-01; NT HIT: AB047541.1, EVALUE 4.70e-01
agagtcgccgggttccgctcctgccttctcttcttcaggcactgggtccaccatggctgagccccgtcctttgttggaatctctgcagatcacaaggagggacatcgaggaatacgtctgagagctcttcccccctcctcatccatagtcaccccatcccaacttaatccgctttcggattaggctcagaggctttggtggaacgtaaatcataaaaccgatgtcggaaagcccaggctgagcgccagaacggggatgggggtggggcggacactcgtgttcagagagcagcctgggtctccctcagccccggaatgcggggtggaggcctgtggcgaggctcctctgggcgcctagcccgctagatgcatcccctttctgctgcaagttaagatgaaaagatccaggtgcaggcaggagctagagagggaggcgctggaggattcccgggaggattagcgtatttgtttgtagcttaggcgggctactggggatgcagc

SEQ ID NO: 8945 - DNA, 501 bp, Homo sapiens
  MAP TO AC009144.4; EXPRESSED IN BONE MARROW, SIGNAL = 1.7; EXPRESSED IN HEART, SIGNAL = 1.8; EXPRESSED IN FETAL LIVER, SIGNAL = 2.1; EXPRESSED IN LUNG, SIGNAL = 1.5; EXPRESSED IN PLACENTA, SIGNAL = 2.5; EXPRESSED IN HELA, SIGNAL = 0.78; EXPRESSED IN BRAIN, SIGNAL = 1.7; EST_HUMAN HIT: BG685186.1, EVALUE 0.00e+00; NT HIT: gi14746462, EVALUE 0.00e+00; SWISSPROT HIT: Q02080, EVALUE 7.00e-01
acacggtcacgcccccattccagccccctggctgggagggcgggcacccgcttgtgattggctggtcggcctgcctctcgcgggagcagccggcgctcctctccctccctctttccctcccgcgagcctcggggttcctcagctggctgaggtggagtcagtgtcagtcagggaggcgaactgctgagcactggccgcggacgctccgttgcagtctcgcccaggggccggtacctgcgctcgcgccgccgggttgaaaggatgaagccgcagctggagcagccaccctatgattggctgtggcgcttgtgaacccaaagtaaagatggcgggcgggcaggcagccgccgcactgcccacttggaagatggcggcgcgccgcagcctcagcgctcgcggccgggggatcctgcaggcggctgcggggcggctgctgccgctgctcctgctgagctgctgctgcggtgcgggcggctgcgcagcggtgggcgagaatgagga

SEQ ID NO: 8946 - DNA, 506 bp, Homo sapiens
  MAP TO AL135785.2; EXPRESSED IN BONE MARROW, SIGNAL = 0.81; EXPRESSED IN HELA, SIGNAL = 1.3; NT HIT: gi9055245, EVALUE 3.00e-11; SWISSPROT HIT: Q80923, EVALUE 1.20e+00
cccttcctcccccaacctcaacttcccttcctccccattcaaacaatccacctagcgctggatacctgggaactcggatccccctccttaactcccagtctcctgctgggcaaacataccatgcctacaaataagtgactgcatcagcaggtacttaagtaccaaaaggggtagcaggctcaccaaaaattcgactagcacagtgagtggcgtctccaaggattctcgccccagtctctctgagcacgaggagagatatgaaatactgctccctaaggggaaactgagtgccaggcagcgccgtccaccactgggcagggggatccttcgctccacaccccagagggttggaatccctccttctctacccacccaatccccgaccctgactcaccgaactcgcaagggccgtcgcgcgccttgtgcaggtgaccggggtgcgcgcggggcgtgtgccgagcgcgcaggcgcagcgcgcagacgctggggtacgagcgaccgtcgga

SEQ ID NO: 8947 - DNA, 549 bp, Homo sapiens
  MAP TO AL035079.14; EXPRESSED IN HELA, SIGNAL = 1.4; EXPRESSED IN BONE MARROW, SIGNAL = 0.85; EXPRESSED IN FETAL LIVER, SIGNAL = 0.92; NT HIT: AB000216.1, EVALUE 0.00e+00; SWISSPROT HIT: P08572, EVALUE 1.50e-01; EST_HUMAN HIT: AI167201.1, EVALUE 0.00e+00
cagtggcagctgcgagtcgggacgccgggagcgtggggctcctgctggccacggatctcggccaccttcccgcggcctccgggcaggcaatgcggccgccgagccccgcgacgcagagaggaaggagggtggcccggagggcctagagcttgtttctgcccacttgggaaagagggcatggagttgtgagtgcccctcgctcggcgacgccgccctcggcaggctccccatggccgggacgtacagctcgactctgaagacgctggaggacttgaccttggactccgggtatggggccggggactcgtgccgctcgctcagcctctcgtcctccaagtccaactcgcaggcgctcaactcttcggcgcagcagcaccgcggggcggcctggtggtgctactccggctccatgaacagccgccacaacagctgggacacggtgaacacggtgctgcccgaggaccccgaagtggccgacctcttctcgcgctgtccgcggctccccgagctggaggagttcccctggaccgaaggagacgtggcccgggt

SEQ ID NO: 8948 - DNA, 547 bp, Homo sapiens
  MAP TO AL009173.1; EXPRESSED IN PLACENTA, SIGNAL = 3.3; EXPRESSED IN BRAIN, SIGNAL = 7.2; EXPRESSED IN HELA, SIGNAL = 1.3; EXPRESSED IN LUNG, SIGNAL = 1.9; EXPRESSED IN HEART, SIGNAL = 2.3; EXPRESSED IN BONE MARROW, SIGNAL = 2.2; EST_HUMAN HIT: AU127955.1, EVALUE 0.00e+00; NT HIT: gi13652184, EVALUE 0.00e+00; SWISSPROT HIT: Q99457, EVALUE 3.00e-06
actgcaaggggagggggctcgcgatctaaaacgagaagagatctcggggtctcatactgcgccattcggctgcggtacatctcggcactctagctgcagccgggagaggccttgccgccaccgctgtcgcccaagcctccactgccgctgccacctcagcgccggcctctgcatccccagctccagctccgctctgcgccgctgctgccatcgccgctgccacctccgcagcccgggcctccgccgccgccactcaagcatccgtgagtcattttctgcccatctctggtcgcgcggtctccctggtagagtttgtaggcttgcaagatggcagaagcagattttaaaatggtctcggaacctgtcgcccatggggttgccgaagaggagatggctagctcgactagtgattctggggaagaatctgacagcagtagctctagcagcagcactagtgacagcagcagcagcagcagcactagtggcagcagcagcggcagcggcagcagcagcagcagcagcggcagcactagcagccgcagccgct

SEQ ID NO: 8949 - DNA, 502 bp, Homo sapiens
  MAP TO AL031587.3; EXPRESSED IN BONE MARROW, SIGNAL = 0.98; EXPRESSED IN HELA, SIGNAL = 0.97; SWISSPROT HIT: P51128, EVALUE 8.00e-02; EST_HUMAN HIT: BG681123.1, EVALUE 3.00e-43; NT HIT: gi14778843, EVALUE 2.00e-43
ttcacagccacccccagcagcccttctgccccctgtggggtgctccctgtgcatggaggtaaggctgggggcagggatggcctctgggcagccacagactcaccaggtcctttgtcccccgctcagtgttgaagaaagtcaagcaccggctggtggagaacatgagttcagggaccgcagatgctctgggcctgagccgggccatcctgtgcaatggtgagtcccttcccacccagctggggccccggggactcaagcccaggctgagaagagtggggggcaccatggctgcccaccaagctgctgtgggtcccgcgggtctgaccctggcctctgcccgtggaactgagaagtcaccatctctgtacccccagaggcctctccagctcccggagggtccacagctgtcagctgggctgtcttagccagtgcccctcaggtcacagatgggaaaatagacttagtgtggggaggtgcctctgcccctgccctcagcccctta

SEQ ID NO: 8950 - DNA, 529 bp, Homo sapiens
  MAP TO AC011497.3; EXPRESSED IN BONE MARROW, SIGNAL = 1.2; EXPRESSED IN LUNG, SIGNAL = 0.97; EXPRESSED IN BRAIN, SIGNAL = 1.4; EXPRESSED IN HELA, SIGNAL = 0.93; NT HIT: gi11525931, EVALUE 1.00e-69; EST_HUMAN HIT: BF510679.1, EVALUE 8.00e-84; SWISSPROT HIT: Q05469, EVALUE 6.00e-22
gcccagcgcctgctggttaccaatcggccgggggtactcttctttgagggcgacgaggggctcaccgccgacttcctccgggagtatgtcacgctgcataagggatgcttctatggccgctgcctgggcttccaggtgagccccctgccccgtgcccctctgggcccacaatgaaggcacctggtggcccctggcctggcctatagtatggtaaagtaaccagtggtcagcattatcggactcagcaaacagcaggtacagaaaggagaagttggctggagctcagacagagctgcaccaggggtctcaaactcatggtccctaggtcatatctgctaggtggtaagaaatgcaacttgcagagcttttttcaccaggatatccactactctctattgtcctacatgcaagagatgtattcactctttgttacctgtctggcccctgaagtcacttgagtttgagacccctcagggagggatctggagccatgtgaccctatagtcattctggccctctctgggcctcc

SEQ ID NO: 8951 - DNA, 524 bp, Homo sapiens
  MAP TO AC003072.1; EXPRESSED IN LUNG, SIGNAL = 1.1; EXPRESSED IN BONE MARROW, SIGNAL = 1.1; EXPRESSED IN BRAIN, SIGNAL = 0.87; EXPRESSED IN HELA, SIGNAL = 0.42; NT HIT: gi14778260, EVALUE 0.00e+00; SWISSPROT HIT: P34680, EVALUE 4.00e-04; EST_HUMAN HIT: BE563213.1, EVALUE 0.00e+00
atgtgcaatgggtgctgccctctttcttctgggcaccatctgcctcaacctatcccctggccagtgtcactcacagggcagaaaatttatcttcaccatctcacaattagtttaatcttaaaaaaaatggattataaagttaaaagctacagcaactcttttttgtgctcataaaaggcatcatctgtttttttctgtatcaacaaaagtagaatgttcaagtttggatcttggtgtaagatcaacaatagatctgtacctctgactccaatgcaggggctcgtgggatggctcacagtggaatcatcaaacggacttccttctcatagatgtcagggatcattcccactggggaactgaccatgtgcacagtgttcttgccaaacaattggaactcatagtggatgagctgctcccaaaagccgctgttgggtcggatgatgggccggcatgacttggtccacgtgtgggcgtccagcagggacatggcgtggtacttcatgaggtaggcgaggcacagggca

SEQ ID NO: 8952 - DNA, 511 bp, Homo sapiens
  MAP TO AC005180.1; EXPRESSED IN HELA, SIGNAL = 1.2; EXPRESSED IN PLACENTA, SIGNAL =   2; EXPRESSED IN HEART, SIGNAL = 2.1; EXPRESSED IN BONE MARROW, SIGNAL = 1.1; NT HIT: gi11426102, EVALUE 0.00e+00; SWISSPROT HIT: P36383, EVALUE 3.00e-60; EST_HUMAN HIT: BI051877.1, EVALUE 0.00e+00
ctctccctcagcccagccccgcctccagagtcccctgagcttggatcatgagccaacagcatccctgaagataaccagagccaaatgtttactcaatggaagtcattattcagtgagctgctgcttaccataaactatgaaaagcacaggttttaagcccgccaggattaaatccagacggaggtcttcccatcccctgatttgctactggcagtgcttttgttggacccagctttggaccccactttggccttcttctcccggggaccatgagggttgttttggtgactgtaggcctgaactgccagatccaagcgttcctgagccatcctgatctcccgctgcagagcctccaggtcagctgggaggttctcctcatggctgccatactgctgttcctgggctgtgttggccttgttttgcttgtaggcgatcttagcattggacagttcggtgtactggatttgatctggtttgacagcaatgttatagccagggggagcagatggtg

SEQ ID NO: 8953 - DNA, 506 bp, Homo sapiens
  MAP TO AC004501.1; EXPRESSED IN LUNG, SIGNAL = 1.8; EXPRESSED IN HEART, SIGNAL = 2.3; EXPRESSED IN BONE MARROW, SIGNAL = 2.3; EXPRESSED IN PLACENTA, SIGNAL =   2; EXPRESSED IN HELA, SIGNAL = 2.7; SWISSPROT HIT: O75363, EVALUE 3.00e-42; EST_HUMAN HIT: BG468930.1, EVALUE 1.00e-129; NT HIT: AF041260.1, EVALUE 0.00e+00
ggtccagctgccaccggaagtgtccagctctcacttgggtctttgttcgctggagctttattggagctgacatcaagcttcactgatccaagggatgaatctgcggcttggtctccggtacgtcctggtacaggccgagagagcatcaagaaaaaacgagatttagcagctggtgcctcgggtttggcctctttcccaagattctttccgttggcatccgcaacagcacttatctccgttgtctcgggggaagaagtggccacattatccgtcttgacacttattcccaagtcgactgtaaacacaaacataaacagtggttattcagccaagccgggaaattcaggcactaataatggactccagacattttttatacaaaagccatactgcatactggaactgtgttgttctctggtcattctgaaaggcagaagttagctctctacatctccttggaccctgcttttcttgggagaggagaaggcaaggttggtgaggaggga

SEQ ID NO: 8954 - DNA, 503 bp, Homo sapiens
  MAP TO AF196972.1; EXPRESSED IN HELA, SIGNAL =   2; EXPRESSED IN BONE MARROW, SIGNAL = 1.5; EXPRESSED IN FETAL LIVER, SIGNAL = 2.2; NT HIT: gi4557808, EVALUE 0.00e+00; SWISSPROT HIT: P04181, EVALUE 1.00e-87; EST_HUMAN HIT: AL553802.1, EVALUE 0.00e+00
cctggtgcctggtgcagagctctcgcactcccattaagtaacctggatctggaacaacacctgcttcaccctgaattggttctaccatgaatgcagccacatttggattctgaaaagcactctccagtgcaggcagatcattgcagggaatgacgtcgaagccaggcataaacggtccaaaaccatcataactcgtcaggtctgtggaactggagatagcagaaaacgtcctaccccaaaagtttccagctgcggaaataacctttgctttgtatttctgaatgcccttcacagtatagccccacttatgagctagtttacaggcagtctctccagcttccattcctgtattcataggaagaactttgtggtagttgaaaagtttagtaatatactcctcatattcaccaagtacgttattatagaaagctctagaggttaaggtcaatttcttcccttgactctttagtgcattcacaatcttggggtgacaatgcccttgg

SEQ ID NO: 8955 - DNA, 551 bp, Homo sapiens
  MAP TO AC023490.4; EXPRESSED IN HELA, SIGNAL = 0.67; EXPRESSED IN BONE MARROW, SIGNAL = 0.91; NT HIT: AB051453.1, EVALUE 0.00e+00; SWISSPROT HIT: P39881, EVALUE 6.90e-02
gtggggctcaggctccctcctctcctctcgcctctctgtgccccacagatccaagcacagtgcctcctgctcctccttcaaaacgttatggaagtcagatgcatactgttggctggcgcccagctggggaggtgtgaacccttgggcatcttgcttttgccgaagtaccctctcaagggcagccttttcctgacacggttctttcctgggcccacactcggtgcgtagatggatgaatcctggagcagggcttttgctggtgcccatgtgctgggagcaattttccttctccccaggctggtcactgactgaaggtggcctgtggttctggggactcttctgaaagagcaggtcctttctacagccctcccaggcctctgcaagctcctgggcttggctgccagcccctgaactcggacattctccttctgagcccaggttggacactggggattgcctccttgggggttcttcaaagaatgcttctaggaacttggcctggggctccccgcagcttccagggttgtgggggctggccttggcactcggag

SEQ ID NO: 8956 - DNA, 525 bp, Homo sapiens
  MAP TO AC022150.5; EXPRESSED IN HELA, SIGNAL = 0.85; EXPRESSED IN BONE MARROW, SIGNAL = 0.78; SWISSPROT HIT: P51522, EVALUE 2.00e-28; EST_HUMAN HIT: BG287904.1, EVALUE 7.00e-35; NT HIT: U09414.1, EVALUE 0.00e+00
gggataattcatgcctttcatgccgtaagagttcatactggagagaaatgttacacatgtaacgaatgtggcaaggcttttagtagaaaagcaaaccttgcacatcatggacttcatactggagggaaatcttacaaatgtaagggttgtgacaaggttttccaccatgatttatgccttgcacaacatcagagagttcatactggagagaaccttacacatttcacgagtatggaaagacctttgctcaaaattcagcccttgtaatgcataaggcaattcatactggaaagaaaccttacacatgtaatgaatgtggcaaggtttttagtagaaaagcacaccttgcatgtcatcatagacttcatactgtctaaggtttctaatcaacaatcaaaccttgcacaacatcagagagtttatactggagagaaaccttacaagtgtaatgagtggggcaaagccttaagtgggaagtcgtcacttttttatcatcaagcaatccatggtgtagggaaactttgc

SEQ ID NO: 8957 - DNA, 502 bp, Homo sapiens
  MAP TO AL163300.2; EXPRESSED IN BONE MARROW, SIGNAL = 1.7; EXPRESSED IN FETAL LIVER, SIGNAL = 1.7; EXPRESSED IN LUNG, SIGNAL = 1.3; EXPRESSED IN HELA, SIGNAL = 1.8; EXPRESSED IN HEART, SIGNAL = 2.7; EXPRESSED IN BRAIN, SIGNAL = 1.5; NT HIT: AL163300.2, EVALUE 0.00e+00; SWISSPROT HIT: P49222, EVALUE 3.50e+00; EST_HUMAN HIT: AL537054.1, EVALUE 0.00e+00
tcatgctgaaccccagggaccaacactgtatcacctgcggttgctgaagctggagtatctcccttttgtttttggagttgtgaggcaggctgtttaaattcttttgttacttctgatacactagagatttttagtggaccagactgagttgatttctttggcaatggaacattataaggtgcagaaccaagaaccacctcgaagagtttgtctgagtaaggtatggttttctctactctttctcggaaatgggaagcccatttggcatataggatagtgccaccaatacctccaccaaaaaacaaaaggccagctccagcaatgttgccagtagtcaaccacagagctgcctgaagtagagtatcggcggcatggtcacagtggacggaggactaacttcccatagagacaactctgggccacagcggtcacactcgataactgacaggcccgcagtatctgtcgagcggacggtgctgctggtggatgcgggagctgccat

SEQ ID NO: 8958 - DNA, 500 bp, Homo sapiens
  MAP TO AL163279.2; EXPRESSED IN BRAIN, SIGNAL = 0.91; EXPRESSED IN HELA, SIGNAL = 1.1; EXPRESSED IN BONE MARROW, SIGNAL =   1; NT HIT: AL163279.2, EVALUE 0.00e+00; SWISSPROT HIT: Q9NSI6, EVALUE 2.00e-19; EST_HUMAN HIT: BG168789.1, EVALUE 3.00e-83
tggcagccgtagctgcacatcttcgagtaatcctcaggagacctgttctggcttttgatgatttcttaaccacctgtaaactactgtctgagtcactggaacagacccttttcctggaaatttttctgcttagtccattgtcttgtgatgcagaatctaaaagttaaagagcagatttctattaatcttttgtaagtctaaaggaattatatgttcaatattaaaaacaagttcagaattcgtattaatttgaagggggtattgcagtgaatggaatggtacacacctattagtatagtcatatgttgctcaacagcaaggatacgttctgagaaatgcatcgttaggctatttcgtcttaagcaaacatcacagagtgtgcttacacaaaccttacagtacaccctactacacatctaggttatatggtatagcctattactcctaggctacaaacctgtatgacatgctactgttctgaatcctgcaggcagttgtca

SEQ ID NO: 8959 - DNA, 528 bp, Homo sapiens
  MAP TO Z98044.10; EXPRESSED IN LUNG, SIGNAL =   1; EXPRESSED IN HELA, SIGNAL = 1.1; EXPRESSED IN HEART, SIGNAL = 1.5; EXPRESSED IN BONE MARROW, SIGNAL = 1.2; NT HIT: gi4758497, EVALUE 2.00e-16; SWISSPROT HIT: O95479, EVALUE 6.00e-03; EST_HUMAN HIT: AW503925.1, EVALUE 2.00e-19
tgaaaggcacgccctcccagcgaaggttgtcaatgtgcactaggacggctggggtgagggaacagcagagggtgactctctggcacagaccaggactctccggccagccctctcctctccttgccggctcctctgggcgtccccctgcctcagggaagcccctcgccttgccatgctcacccctcgcctggcatctcttccatgaccttctcttcccagtccatgcttgaaaaccggcctctggggctatctctatggctttgacacctgccttcattgaggcccctcttagagttatggtcccccaggaaaggagaaccgggctgagagcatccaacctggagactctaaaggacgccccacagtgggggcaagtggggtgggggaccctgactcttaggtatttgaggggtcagggggtcctacagagaaacgtgcttccctcctgcttgtgaagcattcaggatgcacccgacgcagggtcagaggtgcggggtgaggagagagtcaccaagcagaggcccgtgg

SEQ ID NO: 8960 - DNA, 516 bp, Homo sapiens
  MAP TO AL035669.27; EXPRESSED IN BRAIN, SIGNAL = 0.82; EXPRESSED IN BONE MARROW, SIGNAL = 1.1; EXPRESSED IN FETAL LIVER, SIGNAL = 1.1; SWISSPROT HIT: P33479, EVALUE 2.10e+00; EST_HUMAN HIT: BF528372.1, EVALUE 0.00e+00; NT HIT: gi14769822, EVALUE 0.00e+00
aaggccagggacagggagcggggccgcgaccgcaaggaccggagcaagagcaaagagagcgctcgggacccgaagcccgaggcctcgagggcctccgacgctggcaccgcctcgcaggcctagacgccccggccgggcagagaccctttttaaagccacgttcgtaagatgcgttgaacaaatagcttttgaaatagccacgatcttagattcaggatagaatattctggacttaaacattactgtaattttgtgtaaatggtttcttacaagatttcacatctttacaattctgatgcttttttaaaaaaactaaactttaatatttccatttaaaattaaaagaaatgggaaattgcctacggagcatattgcttttcagatcatagttatcttttccaataactttattgtaaattttaagggagtttcgttggaccctagagccataccttcactgacatctcatccgtttgtgtttccaaaagctgcttttacaggtcttagccgccgccc

SEQ ID NO: 8961 - DNA, 563 bp, Homo sapiens
  MAP TO AL135904.11; EXPRESSED IN LUNG, SIGNAL = 1.5; EXPRESSED IN HEART, SIGNAL = 1.8; EXPRESSED IN BONE MARROW, SIGNAL = 1.5; EXPRESSED IN BRAIN, SIGNAL = 1.3; EXPRESSED IN HELA, SIGNAL = 1.1; SWISSPROT HIT: O95047, EVALUE 2.00e-56; EST_HUMAN HIT: BI020419.1, EVALUE 0.00e+00; NT HIT: gi15300431, EVALUE 0.00e+00
tgtcctggtgtggagtggctgcagcacaacttgaagagatcaatttctagaatttcatcccacatctgctgaaatcagtcatttaaaggtagggcaggagatagctccattttaaataaatgtctcagataattctcatgtccattgagggcagaggtcccaccagtgcagagatgggttaagaaccgctcaatgatgtaacttcctaggtcactgtcagtcacaatgccataatccttttcataaagccctttctactcccagcactctcttcaaagtattcttcacttctgagttcctaagactacagataaggggattgagcatgggattaaagaggctgtgaaacagcaggagatatttcttctgctccttggggttcccatatctgggtccaacatacatgataatggctgtgccataaacgagtccaatcacacagaggtgggagaagcaggtgcggaaggctttcctctgaacttcccttgattggatctgaaggatagcacagaggatgcacatatatgaaactacaattgtggacaagggtcccaccagcccag

SEQ ID NO: 8962 - DNA, 515 bp, Homo sapiens
  MAP TO AL035462.12; EXPRESSED IN BRAIN, SIGNAL = 0.91; EXPRESSED IN HELA, SIGNAL = 1.7; EXPRESSED IN LUNG, SIGNAL = 1.1; EXPRESSED IN BONE MARROW, SIGNAL = 0.86; EXPRESSED IN FETAL LIVER, SIGNAL = 0.96; SWISSPROT HIT: O95416, EVALUE 3.60e+00; EST_HUMAN HIT: AI242312.1, EVALUE 1.00e-76; NT HIT: AB024444.1, EVALUE 3.00e-67
caccgatatgcacgcccacaagtgtcttgtacgcacgatcttgcacaaatacacacacaagcccatgctctccaacatttgcactaccatgcgaactcactagcttatccgttcacgacttgtgaccttgccatgttcccaccaacgtattcctaccatcgtgcaagctcctcctggctcacccactcgtgttattgcacactcgagtagactcaaacactcatagcactgtgcaccctgaccctcagacggccttgcgcctctcggtcccaccccgccttgcccactcccgcccttgccctcccaggccaccgtgcacacgcggggacccgtcgtgccgcctactgacgcgccctctcctcgcccgcagggacgtaccaaggccagttcaccaacggcatgcgccatggctacggagtacgccagagcgtgccctacgggatggccgtggtggtgcgctcgccgctgcgcacgtcgctgtcgtccctgcgcagcgagcacagcaacggcacggt

SEQ ID NO: 8963 - DNA, 538 bp, Homo sapiens
  MAP TO AL133409.14; EXPRESSED IN HEART, SIGNAL = 3.3; EXPRESSED IN FETAL LIVER, SIGNAL = 3.5; EXPRESSED IN PLACENTA, SIGNAL = 3.6; EXPRESSED IN HELA, SIGNAL = 5.4; EXPRESSED IN BONE MARROW, SIGNAL = 3.8; SWISSPROT HIT: P03360, EVALUE 5.00e-10; EST_HUMAN HIT: BF983020.1, EVALUE 2.00e-69; NT HIT: AL163246.2, EVALUE 1.00e-123
caaagtggccatggtggcagggatggaggttatacatgggctcagccacatggacttccagttacccaggctgacctggctatggccaagtgcccagtttgtcagcagcagacaccaacactgagccctggatatggcacgattcctccgggtgatcagccagctacctggtggcaggttgattatactggacctcttctataatagaaagggcagaggtttgtccccactggaatagacacttattctggatatggatttgcctatcctgcacacaatgcttctgccaaaatgaccatctgtggactcacggcatgccttatccaccatcatggtattccacacagcattgcctctgatcaaggcacgcactttacatctaaagaagttcaacaatggactcatgcttgaggaatccactgatcttaccgtgtgccatcatcctgagacagctagattgatagaatggtggaatgtccttttgaagtcacaattacaatgccaactaggtgacaatactttgcagggctggggcaaa

SEQ ID NO: 8964 - DNA, 502 bp, Homo sapiens
  MAP TO AC022085.4; EXPRESSED IN HELA, SIGNAL = 1.1; EXPRESSED IN BONE MARROW, SIGNAL = 0.92; EXPRESSED IN FETAL LIVER, SIGNAL = 1.1; NT HIT: gi11968022, EVALUE 0.00e+00; SWISSPROT HIT: P05693, EVALUE 6.10e-02; EST_HUMAN HIT: BF807983.1, EVALUE 0.00e+00
gctggtcagctggagagtggggttccttctccaaaggggtttctgaagcaaaagacaatcttagaaaagaactggtacaggcttcagacccactattgcctttggttggctcttccccttctttatttatgctagaaagaccagctgattgggaagagggagagttttctctgtttctggtatttctttgctccacagaaaacttcagttcttggctaggctcatggaaactttctgttgactctggtaaggacaatctagcagtgatgactggataaactggacaactgtcactgatctctcctgaattgagaggaaaaaaattattgcatccttttttgtgtttgctgcaatttatcactgactgaaactctaccaaatatttcaatgatatgttcagaaaaccatgactgtttcagctggtatctcacccctcagtttcccatcacctacatacactcctatgacaacacttactaccctctgccttgcgtgaatctca

SEQ ID NO: 8965 - DNA, 500 bp, Homo sapiens
  MAP TO AC010645.5; EXPRESSED IN HELA, SIGNAL = 0.78; EXPRESSED IN BRAIN, SIGNAL = 0.9; EXPRESSED IN BONE MARROW, SIGNAL = 1.1; SWISSPROT HIT: P56670, EVALUE 7.00e-01; EST_HUMAN HIT: AI792215.1, EVALUE 0.00e+00; NT HIT: U71363.1, EVALUE 3.00e-67
agcagaagctgctgtgttgtgcttgtgttttccttggcctggacaaatccctctctacagcactcgcatgtcatgaggacataaattctgcagatgagtggtttgcagatgcagggattgtagaccctgcctctactccctgtgttacatacatggttgtgtcctttatgttatgaggcctcctacattctgtgaccattatagtccagtaataatacatagcaccatcttccacctgaagccaacatcctgttcctccaagtacttccttggagtaattcctcagtttttcagatacacttgtgggtggtctgtgccttcccaccagagttaacatgcacttcaccagcattttcttgctttcaggttgttggtgtggagtggaagatgaggcggcaccttctaagcagagtatttatatacaaagagagactcaggtcaggactcctatggcaggtgtgtctcccaagaaggcccacccctgtgagatgtgtggcccg

SEQ ID NO: 8966 - DNA, 515 bp, Homo sapiens
  MAP TO AL022312.7; EXPRESSED IN HELA, SIGNAL = 1.3; EXPRESSED IN BONE MARROW, SIGNAL = 0.99; NT HIT: U60885.1, EVALUE 7.60e+00; EST_HUMAN HIT: BF127162.1, EVALUE 1.80e-01; SWISSPROT HIT: Q15428, EVALUE 7.20e-01
gggcgagtccctgggctttgttttctctcccccttcactccacctctctctcaggtcctggggcacctggaggggagttccagggacctggctgggaaagagctgtcctcagtgcccatgggaccagtccatgggatgtgtctgtacatctgtgtatcgggccctgaggcccacctttagcccacctcccctcccgaggtctccttctgccaatcacctgcctaatgcccctgcaccctggtgtcaggcagccccccagagctgcatccctccctcctgtagttaaccaatgctctatgagcctctctcagccaagaccttggcatcagctcaccactgccccgcccctggccctccccttcatcacgggccgtctctcaggcttggcgccctgggatgctcccttgctccagctctgtgactgtccccatgagggtcctccctcagtgcagccccatctctccagcggtgctggcacgatggacccggttgactccctgcctcctgccctctcc

SEQ ID NO: 8967 - DNA, 518 bp, Homo sapiens
  MAP TO AL163279.2; EXPRESSED IN HELA, SIGNAL = 1.2; EXPRESSED IN BONE MARROW, SIGNAL = 0.99; EST_HUMAN HIT: BG772517.1, EVALUE 3.00e-49; SWISSPROT HIT: O95447, EVALUE 2.00e-16; NT HIT: AL163279.2, EVALUE 0.00e+00
gccttgctgagagtattcgatgagccatagcatctcttctttgggcaatcatatggatttgagaattaaagagtgatgcattccaggtgtgctttttttcaactgatatttccttctggcctgtgtaagcagaaaatccagtttattactagtaaaatatacagatatgcaaatatgcacatatgcataatctctctcccatgcccccatgcacacacaccacacacatacacacaagcgtaagtgtaactagaaggggacaaaactatcatttaatgaatacccatgctttaggctaggtactttatatataactacctcatttaatacaattctttaagatcagttgtaatatattttatagctggagattttacatcatttgtccaagattacatagccacgaagtgacacagaatggattgaaaaccaggtcttctttgactctaaaatctgtacttagatttctattataacagctagactaaaagctgtgataataggccaggtgcagtggc

SEQ ID NO: 8968 - DNA, 589 bp, Homo sapiens
  MAP TO AC002381.1; EXPRESSED IN BRAIN, SIGNAL = 2.1; EXPRESSED IN LUNG, SIGNAL = 2.1; EXPRESSED IN BONE MARROW, SIGNAL =   2; EXPRESSED IN FETAL LIVER, SIGNAL = 2.4; NT HIT: gi11421924, EVALUE 0.00e+00; EST_HUMAN HIT: BF968206.1, EVALUE 0.00e+00; SWISSPROT HIT: Q99680, EVALUE 6.00e-97
tgggacttggcagcaacctcactgtattggtactttactgcatgaaatccaacttaatcaactctgtcagtaacattattacaatgaatcttcatgtacttgatgtaataatttgtgtgggatgtattcctctaactatagttatccttctgctttcactggagagtaacactgctctcatttgctgtttccatgaggcttgtgtatcttttgcaagtgtctcaacagcaatcaacgtttttgctatcactttggacagatatgacatctctgtaaaacctgcaaaccgaattctgacaatgggcagagctgtaatgttaatgatatccatttggattttttcttttttctctttcctgattccttttattgaggtaaattttttcagtcttcaaagtggaaatacctgggaaaacaagacacttttatgtgtcagtacaaatgaatactacactgaactgggaatgtattatcacctgttagtacagatcccaatattctttttcactgttgtagtaatgttaatcacatacaccaaaatacttcaggctcttaatattcgaataggcacaagattttcaacagggca

SEQ ID NO: 8969 - DNA, 545 bp, Homo sapiens
  MAP TO AC025436.2; EXPRESSED IN BRAIN, SIGNAL = 1.2; EXPRESSED IN HELA, SIGNAL = 1.8; EXPRESSED IN LUNG, SIGNAL = 1.2; EXPRESSED IN HEART, SIGNAL = 1.3; EXPRESSED IN BONE MARROW, SIGNAL = 1.4; EXPRESSED IN FETAL LIVER, SIGNAL = 1.4; NT HIT: gi14861873, EVALUE 0.00e+00; EST_HUMAN HIT: AU131635.1, EVALUE 0.00e+00; SWISSPROT HIT: Q9Y5E4, EVALUE 1.00e-50
tggtggcgctgcaggctaagagtgtggatagtgggctctgcggataactcagacgccattaagctggggaatccaaactctaaaagaaggacgcattttaggtaagatctagtggctagatcttcagggtgggcttcgttcttgtggaaatcagtcaagaaagatcggattcgcggttatttatgcaaatcatctgggtggattgtgtacggagttaaactgcgccttctggaccgggtctgaacaatggagactgcgctagcaaaaacgccacagaaaaggcaagttatgtttcttgctatattgttgcttttgtgggaggctggctctgaggcagttaggtattccataccagaagaaacagaaagtggctattctgtggccaacctggcaaaagacctgggtcttggggtgggggaactggccactcggggcgcgcgaatgcattacaaaggaaacaaagagctcttgcagcttgatataaagaccggcaatttgcttctatatgaaaaactagaccgggaggtgatgtgcggggcgacaga

SEQ ID NO: 8970 - DNA, 503 bp, Homo sapiens
  MAP TO AL109984.8; EXPRESSED IN BRAIN, SIGNAL = 1.1; EXPRESSED IN BONE MARROW, SIGNAL = 0.98; EST_HUMAN HIT: AU149207.1, EVALUE 0.00e+00; SWISSPROT HIT: P41995, EVALUE 3.00e-03; NT HIT: gi12742246, EVALUE 0.00e+00
cttggcagaccccgcctttgaatgaacaagtcgacttgctcagataatccttggagggaagagacaaatgcgaggagtgtctccacagccctgctttgctttgctttcgtcactgtcgcccagccatcgcctctgaaggcctgtgaagttggagcggccagccccagaagtggtgcccaaagcctgtctctcagtggcctcacctctggagggctgggcaacagcactggtcagaagttccgacagctgaccaccctcttcggctgagctagaggtcttggctgggctctaggggagcctcgagctgccccacggagaccagggtgctgagctgtcccgaggcaccgctttccggtgggaaggtgaccaagtctgagttcttgttctcactctgatcactgtgctgcttcttgtggcatctcagagagtcatccctgacgaaggaggcgccgcaggtctcacagcggaaggccctctgcgtcacgatcttggccacgtgctgg

SEQ ID NO: 8971 - DNA, 506 bp, Homo sapiens
  MAP TO AB016897.1; EXPRESSED IN HELA, SIGNAL = 1.4; EXPRESSED IN BRAIN, SIGNAL = 0.87; EXPRESSED IN LUNG, SIGNAL = 0.97; EXPRESSED IN BONE MARROW, SIGNAL = 0.97; EXPRESSED IN FETAL LIVER, SIGNAL =   1; NT HIT: AB011399.1, EVALUE 0.00e+00; EST_HUMAN HIT: BI770336.1, EVALUE 4.00e-58; SWISSPROT HIT: P23813, EVALUE 3.00e-03
gactgtgctcgcccctccccttcctggttcaggtcctgctcctgggactcagccgtgcgcctctgggaagggccggtccaggacgtccgcaagttgcgggagaacctggcgggtccgtggtccagcgaggcctgggattcagaagggatgaaacgttcctcgacgcttgaacaccggcctcctgcccctgggtcttcctgctatttcttcctgcccctccgtcccgcctcgagccaccccctcgtgctccccaacgcccgctcctgtgctggtcactgggggcagtgagaggaggccagaagcagaggcgatgccggcggggagcgggcggtgggggggcttctgggagcgacggacccggcagctgcagagcccagtgcggctgagtggggggagggaggagggacccccctcagaggctccacgcggaggcctgggagaatcgggtgggctggaggctttcactggatggtagccagctttggacgcaaacgtcccacgtgacc

SEQ ID NO: 8972 - DNA, 506 bp, Homo sapiens
  MAP TO AL049542.5; EXPRESSED IN HEART, SIGNAL = 1.8; EXPRESSED IN LUNG, SIGNAL = 1.9; EXPRESSED IN BONE MARROW, SIGNAL = 2.1; EXPRESSED IN FETAL LIVER, SIGNAL = 1.3; EXPRESSED IN HELA, SIGNAL =   2; NT HIT: gi5032104, EVALUE 0.00e+00; EST_HUMAN HIT: BE244620.1, EVALUE 0.00e+00; SWISSPROT HIT: P27398, EVALUE 8.20e-02
gggggcagtgcgaggacaaggacgaggaggagaaggaggagcaggaggaggaggagggagcggcggagcccagagggggctgggcgtgtccgcgttgcacgctgcacaacacgcccgtggccagctcctgctccgtctgcgggggcccacgcaggctctcgctgccacggatccctcctgaggccctggtggtcccggaagtggtggccccggccggcttccacgtcgtgcctgccgcgcctccacctggcctccccggggaaggtgccgaggccaaccccccagccaccagccagggcccagctgccgaaccagagccgcccagggtcccgcccttcagccccttctcgtccaccctgcagaacaaccccgtgccgcgcagccgacgcgaggttcccccccagctgcagccaccggtgcctgaggctgcccagccgtcaccctctgccggctgcaggggagccccccagggctcgggctgggctggggcctcccgcctagcagag

SEQ ID NO: 8973 - DNA, 519 bp, Homo sapiens
  MAP TO Z99757.11; EXPRESSED IN BRAIN, SIGNAL = 1.2; EXPRESSED IN HEART, SIGNAL = 1.5; EXPRESSED IN LUNG, SIGNAL = 1.1; EXPRESSED IN BONE MARROW, SIGNAL = 1.2; EXPRESSED IN HELA, SIGNAL = 0.85; SWISSPROT HIT: P57073, EVALUE 3.00e-07; NT HIT: gi14777053, EVALUE 4.00e-63; EST_HUMAN HIT: BF530357.1, EVALUE 6.00e-63
tgacagggtggagtcctgccggggcctcggtcaggctggctgacgcccgccagcctcagagtgcttggctggcccggggaggaacagggtctgtgtggtcccccagcgccctgtaaaccccagctctggccaggctgggcctgtcggcttcttccccccaccttggtctctgggaggggcctcgggtcttctcatagcacagcgcttcatggaattttctcggccgaggagtgaggtctaggtctgactttgctggaatttctgggaaatgtaaagaaacaaaaagccgttgatccccctggcagttagcgcgggcgtccctccccttccagcctggccggccccacccgccccacagaaggggcattcatccctgaagcctgctctcctgtccccagggcagacccacgggccgcccaccccgcccaccacccccaagacggagctgcagcaggcgggcgccaagccggagctgaagctggagggacgccggccggtggacagcgggcgccagaacat

SEQ ID NO: 8974 - DNA, 600 bp, Homo sapiens
  MAP TO AC009266.1; EXPRESSED IN BRAIN, SIGNAL = 0.96; EXPRESSED IN HELA, SIGNAL = 1.5; EXPRESSED IN BONE MARROW, SIGNAL = 1.1; EST_HUMAN HIT: AW994179.1, EVALUE 5.40e-02; NT HIT: AJ277557.1, EVALUE 5.70e-01
ggcctaagccaccatacctggcctggccctatttataaattaattgtcactgtatttgcgaaaccatctaaagaagtaagcagcatgaaccttgtaagaaaaggtgggaaaacaactcagtgccatggtgggggcactatgtaaaacatcaccttgacaatttttttttgtaaaacacttccctgccttgaaggttccttgaatctatcctttaactcacttttcttcatgatcaggcatatgtttgtttgcctgtttttctttatgtcagaacattttgaattcatggagcagctagaaaaaattcagatgaatcttgaaaacaagttctcatctaagaaggcaaggatataggtaaatttcttttgttgcttttgcaccaccttcaataactctggaatccaaactaaaatctgaagacagatacctggaaataaattctcagacacaaattaggaatttgcactcaggataagaattttaaaaaatcttgtgtcctgcttgaaatgtgcatcatagttctgtgaatttctacatgcaatggaaagtaagtacattggcctaactaaataaaagtcatcggattggaagcacgacaca

SEQ ID NO: 8975 - DNA, 532 bp, Homo sapiens
  MAP TO AC005049.2; EXPRESSED IN BRAIN, SIGNAL = 1.1; EXPRESSED IN HELA, SIGNAL = 0.95; EXPRESSED IN FETAL LIVER, SIGNAL = 1.7; EXPRESSED IN LUNG, SIGNAL =   1; EXPRESSED IN BONE MARROW, SIGNAL = 1.3; EST_HUMAN HIT: BG705632.1, EVALUE 0.00e+00; NT HIT: gi13626785, EVALUE 2.00e-83
ggatctccaccgcctggcacggcgcagccccgcgcccgcgctccgggtcgaagcggccgatctccagtgccgcgccgcccgccgccagcagctgccacagcagcagcgccccccgcagaggcgccacggccatcccgggaggcccgggccgaaggcgggagcgcggccccggctcactcgggctcagcggtcccgcgccccggtgcctgcccgccacgtcgcggggcgcgggccatcgctgagccgcccacgtgtgtccgggcgccctgggcagcgagcgggcagccgcccgagggacaggagccgccgagcccgcctagccgccaccgccgctgccaccggagccgccgctgagccagagccggcgcaacctcccggggccgaggctaccagcccccggggcggggctccgggaggacacgcccagggacacgcctcccactgggctttaaaggcgccgcgtctcccggccacgcggagcacggggtggggccgggcctggtgggtgtccgcccgcttgccctccgcttac

SEQ ID NO: 8976 - DNA, 502 bp, Homo sapiens
  MAP TO AL132654.12; EXPRESSED IN PLACENTA, SIGNAL = 1.6; EXPRESSED IN HELA, SIGNAL = 2.2; EXPRESSED IN BONE MARROW, SIGNAL = 1.3; EXPRESSED IN HEART, SIGNAL = 1.4; NT HIT: gi14770875, EVALUE 1.00e-103; EST_HUMAN HIT: BF931162.1, EVALUE 2.00e-90; SWISSPROT HIT: Q10341, EVALUE 6.00e+00
tctgcctcagggccaccagactggcagttcccatctttgcttattgagatggtaataacatcttttctagattcagtattggtacttgggctctcctgaaaagagcttggttcttggctgagcaccttcttaccatacatcatgctctctaaggactcaggcagcagactttcatcatggttgatggaaatgacatcctgaactttagaaataaagttttcacatgtcacatcaggcaggctgagatgatcatctctgctttctactctcactagattttcaggttcattttcaagggactctgaagtcctactcatttgagaatatgtaagagattcatataacttggagttggtctggtaaaggcaacagagatttcctggtgcctgggtgccagatcttttatgctgggcatagtttctataggcatccaggaaggacagctgggggtcgttcatgatgtaacagtcagtgcggttcagcccatgtttggcagtgccga

SEQ ID NO: 8977 - DNA, 519 bp, Homo sapiens
  MAP TO AP000353.1; EXPRESSED IN HELA, SIGNAL = 1.1; EXPRESSED IN BONE MARROW, SIGNAL = 0.84; SWISSPROT HIT: Q06846, EVALUE 1.70e-02
gctggtgctgctggctgcttctctggcctcctccaggcaggctgtgcagggcgtgccgtgctcctgagtgcctaaggagccacagaccacaggaccccttgcctttatcccttgctccccagccctttccatctgtcccaccctcccgggccagatagctttcttcttctgtagccaaggagcctgcacctcagggtctagcccaaggtcatccaggccactgtcatcatcctggggccagccgtgcagcaccaccacccagcctgggctatcctgatgtgaactgctgccccatggcccctggtggagcaaggctgggtgttcaggagctgggctcatgtcacatgagggcccatgtgggagcacttggctcacatatagcagcggcaaccctggagagggagttggggcaggcagtgggctgagcactgagcaggggagcaggtatgatacttcgtgaaccctggctgtgttttatgcgatgctggtggtggcaacacctgccctttgtgggctgct

SEQ ID NO: 8978 - DNA, 501 bp, Homo sapiens
  MAP TO AL139187.4; EXPRESSED IN LUNG, SIGNAL = 1.3; EXPRESSED IN BRAIN, SIGNAL = 0.91; EXPRESSED IN BONE MARROW, SIGNAL = 0.77; NT HIT: gi15301770, EVALUE 0.00e+00; EST_HUMAN HIT: BF572269.1, EVALUE 4.50e-02; SWISSPROT HIT: Q15323, EVALUE 3.10e-01
tctggccactgggaggaagggtatgtacaagacagtgcaagtggtagaaggacagcttagaggtgcccaagaagctcacacctgtgcatgggaggacagaggggagggaggtggaggaccacacagggctgccctcagagcacccagagttcctgcttcagccacgctgtctgctaatgagcattttccttggtgctctgcagggtgacgactccgatgaggaagatctttgtatcagcaacaaatggactttccaaagaaccagtcgcaggtggtctcgtgtggacgacctctacacgctgctccctcgaggagacagaaatgggtcaccgggaggcacggggatgaggaacacgaccagcagtgagagcgtcctcacagacctgagcgagcctgaggtctgctccattcacagcgaaagcagtggaggcagcgacagtcgcagccagccgggccagtgctgtacagacaacccggtcatgctggatgccccactcgtca

SEQ ID NO: 8979 - DNA, 572 bp, Homo sapiens
  MAP TO AC010205.5; EXPRESSED IN HELA, SIGNAL = 1.7; EXPRESSED IN BRAIN, SIGNAL = 1.5; EXPRESSED IN BONE MARROW, SIGNAL = 1.4; EXPRESSED IN FETAL LIVER, SIGNAL = 1.1; EXPRESSED IN LUNG, SIGNAL = 1.9; SWISSPROT HIT: P47102, EVALUE 4.20e+00; EST_HUMAN HIT: BF739893.1, EVALUE 0.00e+00; NT HIT: gi14766988, EVALUE 1.00e-63
ccacccctggacttggagaccacagcaagatttagagtggaaactcacacccaaaaaaccataggcggaaatgtgacaaaagaaaagcccccatctctgattgttccactggaaagccagatgacaaaagaaaagaaaatcacagggaaagaaaaagagaacagtagaatggaggaaaatgctgaaaatcacataggcgttactgaagtgttacttggaagaaagctgcagcattacacagatagttacttgggctttttgccatgggagaaaaaaaagtatttccaagatcttctcgacgtaagtaacatccagcctcattctttctcatgctcaggaagagtaaataatctcatgataatatcattatagctaccatttattcagcacttccctgtgccggccatggaactaaatgcttttcttacatggtttcatttaatttacccaataaccctaataataaaaaatgtcatatgaaggtatttattattgctgtccccattttgtagtttaggaaacagcccaagtgtgaatgagtaagggatttagccaggggcgtacttggagga

SEQ ID NO: 8980 - DNA, 500 bp, Homo sapiens
  MAP TO Z98883.3; EXPRESSED IN HEART, SIGNAL = 1.3; EXPRESSED IN BONE MARROW, SIGNAL = 1.4; EXPRESSED IN BRAIN, SIGNAL = 1.1; EXPRESSED IN HELA, SIGNAL = 0.36; NT HIT: AJ271966.1, EVALUE 3.00e-02; EST_HUMAN HIT: BE736493.1, EVALUE 1.80e-01; SWISSPROT HIT: P04488, EVALUE 1.20e+00
aacgttgtcggccacctgggcacagcaggtacagcctgtgtgtcagacctagctgggaggggcggtaatagggtagatgacatcaggattcaggactctgaacacaaacacagtgacactgatcagggttgccgaggtgctgtgtttcggtccagaaagtcactgctgcaggggaggggagtatggtcacagcccaggccccggccccggccgaagctgccactgacaggagacccttctctgcctgtgccaccagctttgctccgaggggtgtctgtgtcctcaggctctgccaaggcagtgtcaggctgatgcctgcccgtgtcggccggccacagccctagtggctgcccgcagagtcttgcgcccacctgattcctgcctgagaggagccgccaggtcagctgatgccagcaggacccacttcaccaggtcagcaaggaggaggcagcttcccttggggccacgccgtgcctcctccgtgtgcgctgctgccatgg

SEQ ID NO: 8981 - DNA, 505 bp, Homo sapiens
  MAP TO AP000406.1; EXPRESSED IN LUNG, SIGNAL = 1.3; EXPRESSED IN FETAL LIVER, SIGNAL = 1.1; EXPRESSED IN BONE MARROW, SIGNAL =   1; EXPRESSED IN HELA, SIGNAL = 1.6; EST_HUMAN HIT: AW973313.1, EVALUE 1.00e-127; NT HIT: gi14784891, EVALUE 0.00e+00; SWISSPROT HIT: P21522, EVALUE 2.10e-02
ggccaagcatcaaaccctcccttatccaccacacctgcagccaggtgcaccaccttcacctgcagccaggggtcagcacaagatgagaagcttaagtcttggcagcccctccttctgatccagaagatctgctgtagcctatctctaccctgagtaaatgctctgaggcagctgtggaagcacttacccagaggcgatcagcacccgggactgggcaatggccagtcgctgcaggttggtacgattcaaggtggccagggccacccttccggtcttgctgttgggtcctgggggactggcaggagagcccatggttgtcccagtgggcatgctggaggcttgtctccggatcacctgcgatggggcggtcttcagtgggcctcgaatggtgcctgtgctgtccagtggcttggccccagagcctggcagtgggggtagcttgaccactccaggaggcggcatgttcttgcgggtcactggcagctgtaggggcccagtgctgcca

SEQ ID NO: 8982 - DNA, 537 bp, Homo sapiens
  MAP TO AL049734.11; EXPRESSED IN FETAL LIVER, SIGNAL = 1.3; EXPRESSED IN BRAIN, SIGNAL = 1.2; EXPRESSED IN LUNG, SIGNAL = 1.2; EXPRESSED IN BONE MARROW, SIGNAL = 1.2; SWISSPROT HIT: O76001, EVALUE 4.00e-20; EST_HUMAN HIT: AI149586.1, EVALUE 1.90e-01; NT HIT: Z99115.1, EVALUE 5.10e-01
gacctctagtggaggagggctggagaaattttcatataactattttcaaaaagataaggaactttccattttcttaggattgagggaggatatctagctttgcctctgttcccattatagatatctattccatttgtgtcccattcttctgaaaaggacaaagataatgatcctgcacaccctaattctttccacctttctcacaccctccatctttattcccattctttcaggtaacactaagtagccaattggcatccatttaatgaatagtggcaagagggaaagatggccatggacaatgtcacagcagtgtttcagtttctccttattggcatttctaactatcctcaatggagagacacgtttttcacattagtgctgataatttacctcagcacattgttggggaatggatttatgatctttcttattcactttgaccccaacctccacactccaatctacttcttccttagtaacctgtctttcttagacctttgttatggaacagcttccatgccccaggctttggtg

SEQ ID NO: 8983 - DNA, 505 bp, Homo sapiens
  MAP TO AC012313.5; EXPRESSED IN LUNG, SIGNAL =   1; EXPRESSED IN BONE MARROW, SIGNAL = 1.1; EXPRESSED IN FETAL LIVER, SIGNAL = 1.4; EXPRESSED IN PLACENTA, SIGNAL = 1.9; EXPRESSED IN BRAIN, SIGNAL = 1.2; NT HIT: AL096806.1, EVALUE 4.80e-01; SWISSPROT HIT: Q9Z2N5, EVALUE 2.10e+00
ggccccaccctgtgaagcaaggagaggagagtggtgccacagtagggccagtgcaggtgcgtgggcaactttgagtccttctgcgatgctggcgccccctcccctcctgctgggccgggccgggtgtggggatgtgcacgtggccctgtcaggcaggcccagagtgctggcccatcccccgagtgtctagcccgcctgctggccttcctgctccaggctccagagggcattgggcatccagggacctggaggagaagagtgggggatgacagcccacccaccgtcgtgtccccctcaggccctctgtctggtgttctttgtattctctaaggtacttgccttttctctcctgttttaggtcacaggcgcgagatggagtccccaagagggtggaccctgcaggtggccccagaggaaggccaggtcctctgcaatgtgaagactgccacgaggggcctctctgagggggctgtgtctggaggctggggggcctgggaaaactcca

SEQ ID NO: 8984 - DNA, 532 bp, Homo sapiens
  MAP TO AL163303.2; EXPRESSED IN HELA, SIGNAL = 0.97; EXPRESSED IN LUNG, SIGNAL = 0.95; EXPRESSED IN BONE MARROW, SIGNAL =   1; SWISSPROT HIT: P45181, EVALUE 4.40e-01; EST_HUMAN HIT: BG948920.1, EVALUE 2.90e+00; NT HIT: AL163303.2, EVALUE 0.00e+00
gggttttcctccctcccacggggcctgggagggaactaagacgggctctgtccccgtgcagggcagtgaggatgtgctcacccgccacaggcaggcgtcagtgatactttctctgcgcctaagaagttgggtgacattatcaaacaggccacaaagataccttggcaagcacatttgagggcctggtgaaattaactccccctttcagagtccacatgaaaacgtagggtccatctacacacacagatccaggctgtggaaagccagtggaataggcctttgtcttcattccagaatcagtgggatgccaggcgggcatagcgtccttggctccgcccgggccatgcggagctgggtcccatgcagctccatgaccgggggctccgacacctcttttctgctcctgctgggtctaggtgtaattccagtgctgggggaagaagttaccctcagataaacggtcggtgtaattccagtgctgggggaagaagttaccctcagataaaccgtcggtgtaattccagtgctgggg

SEQ ID NO: 8985 - DNA, 596 bp, Homo sapiens
  MAP TO AC016572.4; EXPRESSED IN HELA, SIGNAL = 1.6; EXPRESSED IN BONE MARROW, SIGNAL = 1.1; EXPRESSED IN FETAL LIVER, SIGNAL = 0.93; SWISSPROT HIT: P35789, EVALUE 3.00e-68; EST_HUMAN HIT: AI879243.1, EVALUE 0.00e+00; NT HIT: gi14729266, EVALUE 0.00e+00
ccaccctggcaagacaccccatacatgtgatgaatgtggaaaagcttttttctcaagcagaactcttataagccataaaagagtccatcttggggagaaacccttcaagtgtgttgagtgtgggaaatctttcagttacagctctctcctttctcagcacaagaggatccacacaggggagaaaccctatgtgtgtgataggtgtgggaaggccttcaggaacagctcaggcctcacagtgcataaaaggatccacacaggtgagaaaccctatgaatgtgatgagtgtgggaaggcatacatctcacactcaagtcttatcaatcataaaagtgtccaccaggggaagcagccctataattgtgagtgtgggaaatccttcaattatagatcagtccttgaccagcacaaaaggatccacactggaaagaagccataccgatgtaatgagtgtggtaaggcttttaatatcagatcaaatctcaccaagcataaaagaacccatactggagaggaatctttaaatgtgatatatgtgggaagttatagtggcacatcccagaagagaacctatgagggagggaatgccctggatg

SEQ ID NO: 8986 - DNA, 528 bp, Homo sapiens
  MAP TO AL132795.12; EXPRESSED IN HELA, SIGNAL =   2; EXPRESSED IN BRAIN, SIGNAL = 0.87; EXPRESSED IN HEART, SIGNAL = 1.2; EXPRESSED IN LUNG, SIGNAL =   1; EXPRESSED IN BONE MARROW, SIGNAL = 1.1; EXPRESSED IN FETAL LIVER, SIGNAL = 1.2; SWISSPROT HIT: P37094, EVALUE 3.70e+00; EST_HUMAN HIT: BG717128.1, EVALUE 0.00e+00; NT HIT: Z78639.1, EVALUE 1.00e-29
gtctctcgcatggggtcgccattcttcctactttgtgctcaaggcgcaggatctggagttctcggtttccaagcaagactggtcgagtctaggtcggattggctgcgatagaacgaggggcaggggttgtaccgaatcacaaagctaggattttcatctctctctctcgttctctcttagtctccgccctcgaatcctggcaacaggcgcggtgagtttttctgagaggaacccggcctggggttgctatggagataggacgcagcaactcacagagcaaccaggacccagaaatcgcttaagagaccgcggcaaagtaacttaactgagttgccttcttccatattttcacgcccctttcatccagaacattttttttcttgaactgcttccatggaggactcaacctccccgaagcaagaaaaagaaaaccaagaagaactaggggaaacaaggcggccatgggaaggaaagacagcagcttctccccaatattctgagcctgagtcgtctgagcccttggaggcg

SEQ ID NO: 8987 - DNA, 528 bp, Homo sapiens
  MAP TO AC022085.4; EXPRESSED IN HEART, SIGNAL = 1.7; EXPRESSED IN BONE MARROW, SIGNAL = 0.83; EXPRESSED IN BRAIN, SIGNAL =   1; SWISSPROT HIT: P11532, EVALUE 2.90e+00; EST_HUMAN HIT: AI375844.1, EVALUE 0.00e+00; NT HIT: gi11968022, EVALUE 0.00e+00
ggtgtgcttccattttaacctgcactctctgctaggaaatactttattccatctgtcatagagtatcagtcactatttgatattaaatcaagacatctacaacagatattgttggcaaacattttaattaaatgaaacacgtagaattctcttgatcagggtcaaagggttactttaaaagaaagtgaggaaaaaaaagacacccgaaaagcagcacacacctgggtaagcctttgcccagctcttgctttttcttggttacttgctgaatgacctgttcccagttgacatttctccgagatgcatttagaatctgccgtagggttggcttgagcccagactccttctctgtctcactctttcggtgaccgctaatattgcgaatgcggcgggcactattgaggtttggctcaggaaggtgtactccagttttgctcttcaaactaatgtgccgggttagatccctctgaagtgaggcaggaaagccaagcttacttagttcaggcaggagagggcccgagggctgac

SEQ ID NO: 8988 - DNA, 536 bp, Homo sapiens
  MAP TO AL121963.10; EXPRESSED IN HELA, SIGNAL = 1.2; EXPRESSED IN BONE MARROW, SIGNAL = 0.83; SWISSPROT HIT: Q03692, EVALUE 1.00e-09; NT HIT: gi13642313, EVALUE 0.00e+00; EST_HUMAN HIT: BF001577.1, EVALUE 3.00e-65
ccaggccctcagggtcccacaggaccatctggccctcctggagtgggaaaaagaggtgaaaatggggttccaggacagccaggcatcaaaggtgatagaggttttccgggagaaatgggaccaattggcccaccaggtccccaaggccctcctggggaacgagggccagaaggcattggaaagccaggagctgctggagccccaggccagccagggattccaggaacaaaaggtctccctggggctccaggaatagctgggcccccagggcctcctggctttgggaaaccaggcttgccaggcctgaagggagaaagaggacctgctggccttcctgggggtccaggtgccaaaggggaacaagggccagcaggtcttcctgggaagccaggtctgactggaccccctgggaatatgggaccccaaggaccaaaaggcatcccgggtagccatggtctcccaggccctaaaggtgagacagggccagctgggcctgcaggataccctggggctaagggtgaaaggggttcccctgg

SEQ ID NO: 8989 - DNA, 500 bp, Homo sapiens
  MAP TO AC009000.5; EXPRESSED IN HELA, SIGNAL = 0.91; EXPRESSED IN HEART, SIGNAL =   2; EXPRESSED IN LUNG, SIGNAL = 1.3; EXPRESSED IN BONE MARROW, SIGNAL =   1; SWISSPROT HIT: Q05858, EVALUE 1.80e-01; NT HIT: gi8923010, EVALUE 3.00e-76; EST_HUMAN HIT: BG983485.1, EVALUE 1.00e-64
gcagcgtgtggcccttctcgatgtcatccacgtacttgaggaagtccaggtccaggcggtagccatagggggtctccacggagtagggtggatcggggtccttggcagggaaggcaggtggggaggctgggccaggggtccctggggatgggagaaacaccaggacctttgaatcctcttgtccccattctcagggtgaagactgatgcctggggagagttggggtttatttgccgaagagatgggagcccacctggtactcaaccgcgtctgctctcagaccctccagagcagggctatgcctccccttcagactcccggcgctaggctatgtcgcctctcaaatcccccaggacagggctctatccctcggcttagactaccccctttttccggtaagactctgcctcccccttcagaccctcccagggcaggactctgcctcctccctcagacctctaattgttgggctgtgtcccaccctcaaagtccccagggca

SEQ ID NO: 8990 - DNA, 510 bp, Homo sapiens
  MAP TO AL035214.2; EXPRESSED IN PLACENTA, SIGNAL = 2.2; EXPRESSED IN HELA, SIGNAL = 1.5; EXPRESSED IN BONE MARROW, SIGNAL = 2.4; EXPRESSED IN LUNG, SIGNAL = 2.2; EXPRESSED IN HEART, SIGNAL = 2.7; EXPRESSED IN FETAL LIVER, SIGNAL = 2.1; SWISSPROT HIT: P38486, EVALUE 1.10e-01; NT HIT: Z36792.1, EVALUE 9.00e-49; EST_HUMAN HIT: AL539596.1, EVALUE 0.00e+00
ttctcgacgcccccttgcactgagtcctccatccattttagtgctggaaatggggggtgggggtagcgaccccgcagtgcgacagtgaaacgtagacatattctggaaataaccccttctcacaatctacacccatggaaacacttgatctccgcaaaaatgaggtggcgctggggcaggttgcctccggggaagggggacacagagacaaacgcagtttggaaagcatcctggtttggtgcccgaggcctggaaagaaatggcggctggggtgcgggggaggtaggggaggaaaacggtgggtaagcagggcctggactcaggaaagggaaccgagtccctgtgagcccgctaagcgcgcagcccctgcccctgtctcctgtctgtccgcaggtctgcgcgtctgttgttcccagcgctctgagaggcctgaaaaggaagagcaacctgtccagaatccccgcaggtccgtgaaagcagggggctgcatggacaggggcccacaagggt

SEQ ID NO: 8991 - DNA, 570 bp, Homo sapiens
  MAP TO AC007262.4; EXPRESSED IN BRAIN, SIGNAL =   1; EXPRESSED IN HELA, SIGNAL = 2.5; EXPRESSED IN BONE MARROW, SIGNAL = 1.2; EXPRESSED IN LUNG, SIGNAL = 0.94; SWISSPROT HIT: P16473, EVALUE 7.00e-07; NT HIT: gi16190702, EVALUE 3.00e-36; EST_HUMAN HIT: BG997748.1, EVALUE 5.00e-36
ccacctcaccagacctctgagccactagcggttaagaagggtcagtgaaacttaaaaagaaataagattaagctatattgtgtcctgttatttaagtgcatatgcgcagcaagacccctgctgcagaaggaaagcattttttcattaagtgtttttgtccctctctcttgcagtgaaattacagacaacccttacatgacgtcaatccctgtgaatgcttttcagggactatgcaatgaaaccttgacactgtgagtattaccagttctactccctccatcaactaaattctattttgagccattttcatatgtttacagaccatccaagagccatactgccttatcatatatactctatagagtacaaagtgttttacacaattaaataatagtattgtcttatgggatggtactctgtagactacaaaacagtttaggtaacaagacaagaggattccattacggcagtggttggtacatttttcacgtgaagaaccagttaggcattacagaccatgcaacctctgtaggaactggtcaactctggcattgtgtggcaaaaaccgca

SEQ ID NO: 8992 - DNA, 531 bp, Homo sapiens
  MAP TO AC005261.1; EXPRESSED IN BRAIN, SIGNAL = 1.1; EXPRESSED IN HELA, SIGNAL = 1.2; EXPRESSED IN BONE MARROW, SIGNAL =   1; EXPRESSED IN FETAL LIVER, SIGNAL = 1.1; NT HIT: gi14766491, EVALUE 5.00e-66; SWISSPROT HIT: O43296, EVALUE 1.00e-49; EST_HUMAN HIT: AW629313.1, EVALUE 0.00e+00
ggaaaggccttcaaccgcagctcacacctcacgaggcaccaacagattcacactggagagaaaccctatgaatgcatccagtgtgggaaagccttttgccggagcgcaaaccttattcgacactccatcattcacactggagagaagccgtatgaatgcagtgagtgtggaaaggcttttaatcgcggctcatccctcacacatcatcaaaggattcatactgggagaaaccctaccattgtaacagatgtgggaagaccttttatgactgcacagacttcagtcaacatccaggaacttttattagggaaagagtttttgaatatcaccactgaagaaaatctgtggtgaaagggaacatcttaccatctggccattcacactgaagagaaacttcataagcatcctctctttgagaaaacgtgtaatagatgatcatttgtcgtctaaacaatcaagttagaaattgaaccagcctggagtcttattctccacctgagaattcacccatgagagagacccagtggttgc

SEQ ID NO: 8993 - DNA, 503 bp, Homo sapiens
  MAP TO AL132986.2; EXPRESSED IN BRAIN, SIGNAL = 1.7; EXPRESSED IN HELA, SIGNAL = 1.2; EXPRESSED IN BONE MARROW, SIGNAL = 1.2; EXPRESSED IN LUNG, SIGNAL = 3.6; SWISSPROT HIT: Q07352, EVALUE 4.00e-18; NT HIT: gi14784257, EVALUE 0.00e+00; EST_HUMAN HIT: BG983466.1, EVALUE 0.00e+00
ggggcggggtgcggtaatctagagaggtctgggttgtgtgagatattttgagttgaagaatctatttgactagtaaaaaagttgaactttaaagtggtagctttggggacagaggacatgggggttgcattgcaggagtcagcatggagcagggtgcttgtcacacagtttggatcttgtggtttcttacgcatggggccaaaataaacccaggtgaatggcctatgggagggagagagggaagggagcttgctagagccgaggtagagatgagttctttgagaaagagcgggcgtttgtgattgtgtagggggctgcccatagtggacatcctggtggatgtcctctgtccttaccatcctttctcttctctctccagggtaacaagatgctcaactatagtgctcccagtgcagggggttgcctgctggacagaaaggcagtgggcacccctgctggtgggggcttccctcggaggcactcagtcaccctgcccagctcca

SEQ ID NO: 8994 - DNA, 533 bp, Homo sapiens
  MAP TO AP000538.1; EXPRESSED IN BRAIN, SIGNAL = 1.1; EXPRESSED IN BONE MARROW, SIGNAL = 0.85; SWISSPROT HIT: P35617, EVALUE 1.70e+00; NT HIT: AL163202.2, EVALUE 1.00e-81; EST_HUMAN HIT: BG009093.1, EVALUE 1.00e-45
ccagcagcagggctctggaatcctatgtgagggtcaaacactcagaaggcagcagcagtattctggaatcctatgtgagggagaaacattcagaacccagtcactgtgtgctggaatcctatgtgagggagaaacactcacaactcagtcactgtgtgctggaatcctatctgagggacaaacattcagacatgtgtagaagtgtcctggaatcctatgtgagggacaaacactgagaacccagcagcagagttctagaattctttgtgaagacaaacattcagacactcgaagcagtgtcctagaatcctatgtgagggacaaacacttagaacccagcagaattgttctggaatcctttgtgatggacaaacattcaggccctcgtggcagtgttctggaaacctaagtgaggggcaaacactcagaattcagcagcagtgttctggaatcctatgtgactgacaaacactcagaaccctgaagcaatgttatgaaatcctgtgtgaggtgcaaacactcagaacccacca

SEQ ID NO: 8995 - DNA, 527 bp, Homo sapiens
  MAP TO U51559.1; EXPRESSED IN LUNG, SIGNAL = 1.1; EXPRESSED IN BONE MARROW, SIGNAL = 1.2; EXPRESSED IN FETAL LIVER, SIGNAL = 1.4; EXPRESSED IN HELA, SIGNAL = 0.68; EXPRESSED IN HEART, SIGNAL = 1.5; SWISSPROT HIT: P50552, EVALUE 2.90e-02; NT HIT: AJ291364.1, EVALUE 2.00e+00; EST_HUMAN HIT: BF974765.1, EVALUE 1.90e-01
cggccttggcctgtgattcgaggacttgcccatcgaggacaggggcaccctggcccagccctgccgagggtctgagctcagggccattgcggcgcaccagcgtgggcccggcagcacccgtgatctcgctgccccccgcgggacctctcagggagatggggctgcagctgctcaggtggtgcagggatgccacttgcccgggcggggcaagactcagaaaccagtctgacccccgaagcccggctctgcactagctggaacacgggagtgtggggtccaggctggcccctgtcaggctcctgaacaagggacctccccttgggccacatctgtcaagcacctgctttgaaaagggctgttccggggtaggcaccagggtctggggtcccccccgcctctcctgggatacacttgcctcaccctcacccacacactgaaacaccctccttgccctgtgttactgaagcaaggcccttcaaagggcctcagtttctcagggcagctttccaggtgcgccacacccctct

SEQ ID NO: 8996 - DNA, 523 bp, Homo sapiens
  MAP TO AL158175.6; EXPRESSED IN HEART, SIGNAL = 2.3; EXPRESSED IN BONE MARROW, SIGNAL = 2.3; EXPRESSED IN HELA, SIGNAL =  12; EXPRESSED IN BRAIN, SIGNAL =   2; EST_HUMAN HIT: BE379392.1, EVALUE 0.00e+00; SWISSPROT HIT: P05783, EVALUE 6.00e-64; NT HIT: gi4557887, EVALUE 0.00e+00
ccctctgcccgggtctgtaccagctctgacttcaggtgcagcaggatcccattgagctgctccatctaaagggtgtagggggcctccacctccctcaggctgttctccaagctagccttcagatttcttatggaatccaggttgatctccaatgactggactgtatgtctcagctctgtgagcatcatctcagcagctccaacctcggtggactgtgtggtgaccactgtggtgctctccttaatctgctgagaccagtacttgtccagctcatctcagttcttctgagccagctcgtcatattgggcctggatgtctgccatgatctagttgaggtcctgagatttgggggcatctacctccatggtcaacccagagttggtaatctgggcttgtaggccttttatttcctctttgtggttcttcttcatgaagagcagctcctccttgagagccttgatctgtctccagctgcagccgagtgacattcgtgtcatcaatgaccttgcagagcccatggagg

SEQ ID NO: 8997 - DNA, 562 bp, Homo sapiens
  MAP TO AL121929.17; EXPRESSED IN HELA, SIGNAL =   2; EXPRESSED IN BONE MARROW, SIGNAL = 1.1; NT HIT: gi14746644, EVALUE 3.00e-98; EST_HUMAN HIT: BF732643.1, EVALUE 0.00e+00; SWISSPROT HIT: O88935, EVALUE 1.80e+00
tgcttggcgctgttctagctgctagggataagacggaaggagcccaggagttaaatttttgaaaattttaaattatgaggaatacaagtttactgtagaaaatgaggaagtacacatatgcatatagcaagcacctgtgagcatttggaagcatccacatggtttcagtttcggtgcttccccccacctattcctctgcttaaacagatgtcctgcaagagtcgtttcttgactgtgttcgctaatttatgtcacaagcatcgtgtgcgccattagccatccgggattgtaacggtgcgcgcgtagggaccggacagcggggcgcgccggggccgcctcccgagagccctgcgtgacactgccccgtgtctcccgcgcagatagcgagctggtgctcccggactgtctgcggccgcgctccttcaccgccctgcggcggccgtcgctgcggcgcgaggcggacgacgcgcgcctctcggtgagcctatgcgacctcaacgtgccgggcgcggacggcgacgaggccgcgccggccgccggctgccccatcccgcagaactca

SEQ ID NO: 8998 - DNA, 527 bp, Homo sapiens
  MAP TO AC011311.11; EXPRESSED IN BRAIN, SIGNAL = 1.2; EXPRESSED IN HELA, SIGNAL = 4.7; EXPRESSED IN LUNG, SIGNAL = 1.1; EXPRESSED IN HEART, SIGNAL = 1.7; EXPRESSED IN BONE MARROW, SIGNAL = 1.3; SWISSPROT HIT: Q9P2G3, EVALUE 3.80e-02; NT HIT: gi9964314, EVALUE 1.30e-01; EST_HUMAN HIT: BF248003.1, EVALUE 1.90e-01
gggctaaatgcagccaggaccagtctgtggcaaggaaatttctctccttctgctgtgagtaccacatcaatcatttctgctaattctttcatgttctgaattttattcagtaaattcaagctatgttggtatttttcttttccctcaatcttgcactccatgatctactctccaaagtttccaactaagtcttctttaagtgtagcttgattcctgaggggctatttgcatgtctgattactcatgaagctacaaagatgtcaggaaacatttctaagggaaagaaaaaaggcagtttccttctaagaaaaaattctctataatttagatatgcagcattagttctaaaaaaagtatttataaacagatattattcactccaagcagagcagtttaagacaactacttttgtatctaaaaatattaattttgattacgtaaacagtaataaattaactgctgtgacaaattctcctaatcagtggcagagatttttctaggactgcaaagatttccctcccaacatg

SEQ ID NO: 8999 - DNA, 504 bp, Homo sapiens
  MAP TO U34879.1; EXPRESSED IN LUNG, SIGNAL =   2; EXPRESSED IN BRAIN, SIGNAL = 1.8; EXPRESSED IN HELA, SIGNAL = 2.7; EXPRESSED IN PLACENTA, SIGNAL = 1.9; EXPRESSED IN HEART, SIGNAL = 2.2; EXPRESSED IN BONE MARROW, SIGNAL = 2.7; SWISSPROT HIT: P53332, EVALUE 7.00e-03; NT HIT: U34879.1, EVALUE 0.00e+00; EST_HUMAN HIT: BE676231.1, EVALUE 0.00e+00
gcacgtttgaccgcctgcacaacgcccacaaggtgttgctcagtgtcgcgtgcatcctggcccaggagcagcttgtggtgggagtagcagacaaagatctgttgaagagtgagtaagagggaccctggactagggtggaggatccccaaatctccccacccccgacccttatgccgagatcaaggaagggtagggccattcattacttcccacccttcccaaatgtcacagtggttgacactcaattggtgctaaggccattttgtcaaatgaacagctttctcagcatgtggtccagtcaccactcaatcagaataccccaaatgtgaagcaaaggtatctgcattttagcaagttttccaggtgatacaccctaatgagacactgggaatgaatgggtgagtgagctgcaggtagcagtgccacagacaggaggaggaaactcaagcatggcatgggtcttggaattttccatctgcctctgatgccctctggcactgctcg

SEQ ID NO: 9000 - DNA, 574 bp, Homo sapiens
  MAP TO AC018725.1; EXPRESSED IN BRAIN, SIGNAL = 3.2; EXPRESSED IN HEART, SIGNAL = 2.6; EXPRESSED IN LUNG, SIGNAL = 3.5; EXPRESSED IN BONE MARROW, SIGNAL = 3.9; EXPRESSED IN FETAL LIVER, SIGNAL = 2.9; SWISSPROT HIT: Q12901, EVALUE 1.00e-121; NT HIT: gi7706778, EVALUE 0.00e+00; EST_HUMAN HIT: AU122309.1, EVALUE 0.00e+00
ttgtgaggcatgtgggaaggccttcattcatgattcccagcttaaggaacataagagaatccatactggggagaaaccattcaaatgtgatatatgtggtaagaccttctattttaggtcaagacttaagagccattccatggttcacacaggagaaaaaccatttaggtgtgatacatgtgataagagctttcatcagagatcagcacttaataggcattgcatggtccacacaggagagaaaccgtacagatgtgagcagtgtggaaaaggctttattggtaggctagatttttataagcatcaggtggtccacacaggagagaaaccatataattgtaaagaatgtgggaagagcttcagatggtcctcatgccttttgaaccatcagcgagtccacagtggagaaaaaagcttcaaatgtgaagaatgtgggaagggattttatacaaattcacaactgtcttcccatcagagatcccacagtggtgaaaagccatataaatgtgaggagtgtgggaagggctatgttactaagtttaatcttgacttgcaccagagggtccacacggga

SEQ ID NO: 9001 - DNA, 501 bp, Homo sapiens
  MAP TO AC025436.2; EXPRESSED IN BONE MARROW, SIGNAL = 1.9; EXPRESSED IN LUNG, SIGNAL = 2.3; EXPRESSED IN FETAL LIVER, SIGNAL =   2; EXPRESSED IN HELA, SIGNAL = 2.3; EXPRESSED IN PLACENTA, SIGNAL = 1.6; EXPRESSED IN HEART, SIGNAL = 2.4; EXPRESSED IN BRAIN, SIGNAL = 2.1; SWISSPROT HIT: Q9Y5E6, EVALUE 2.00e-31; NT HIT: gi14861873, EVALUE 0.00e+00; EST_HUMAN HIT: AW002450.1, EVALUE 0.00e+00
tccagggcagatggtggacgtgagcggcaccgggaccctgtcccagagctaccaatacgaggtgtgtctgactggaggctccgggacaaatgagttcaagttcctgaagccaattatccccaacttcgttgctcagggtgcagagagggttagcgaggcaaatcccagtttcaggaagagctttgaattcagttaagtgttaataaggatctactgagcctcgtcttagttaatctgtggaaagtccttttttactgctttgcccattggagaggtcttttttggtctggttcaaggcaagtagcaagaatagagcaaaatatcaaatccagggatggcttaggtttcattaacagtactggaaagtagttgtgtggctctgaatgttttgtatttcaatcgagaatccttagtcgatagaacattttgtttatatattgattctactttttctgtagttaatccttgcatattctcctttcatcctggcttgccaacgca

SEQ ID NO: 9002 - DNA, 518 bp, Homo sapiens
  MAP TO AC006285.11; EXPRESSED IN BRAIN, SIGNAL = 2.2; EXPRESSED IN BONE MARROW, SIGNAL = 1.6; EXPRESSED IN FETAL LIVER, SIGNAL = 1.3; EXPRESSED IN LUNG, SIGNAL = 1.9; EXPRESSED IN HEART, SIGNAL = 2.9; EST_HUMAN HIT: BE890164.1, EVALUE 0.00e+00; NT HIT: gi14776841, EVALUE 0.00e+00; SWISSPROT HIT: P56819, EVALUE 2.10e+00
ccgccgtctgagggcaagtctagactgtcccccgccggtgagatgaagcccatgccgctgtctgagggcaagtctatactgctgtttggaggggctgctgctgttgccatcctggcagtggccatcggggtagccctggctctgagaaagaaataggaggcttttcagaagagaaagacagaaggatgtaaggttggagttgtattggctggaatttgaacctccagcagctgtctggacatttgtggaacactctgggataattggggacttctgctcaacatggcagtggcatgttaggcatgttagggcttgaggtggggcattcacattcatctgactgtaaatcccaagggcctccgctcatgctaaattgagaatcttaggggtaaagcaccccctccaggaccgggtttctcagccttggcactagtgctgttctgaccattctctgtgttggggctgtcctgtgtgtggtgggctccacccactagatgccagtggcaccccctcccaga

SEQ ID NO: 9003 - DNA, 505 bp, Homo sapiens
  MAP TO AC007111.1; EXPRESSED IN BONE MARROW, SIGNAL = 0.77; EXPRESSED IN BRAIN, SIGNAL = 0.83; SWISSPROT HIT: Q92874, EVALUE 1.00e-59; EST_HUMAN HIT: AW500877.1, EVALUE 7.10e-01; NT HIT: gi16164989, EVALUE 0.00e+00
tggtgctgatcccgctgcacgcggcgccgcatcaagccgtggcggagatcgacgcgctctacgacgtgtacctggacgtgatcgacaagtggggcaccgacgtaagcccacccctcggtcccggggtccctgcaggcgcgccccgggggtctggttcatgagggcgggacctcgacggctcctgcggcggctcagacacggctccgcggcgcccgcaggacatgctgttcctgggcgacttcaacgccgactgcagctatgtgcgggcgcaggactgggccgccatccgtctgaggagcagtgaggtcttcaagtggctcatccctgacagcgccgacaccacggtgggcaactcagactgcgcctacgaccgcattgtggcctgtggcgcccgcctgcgccggagcctgaagccccagtcggccaccgtgcacgacttccaggaggaattcggcctggaccagactcaggcgagtgggccgtggggcggtgctggtcttgggtc

SEQ ID NO: 9004 - DNA, 597 bp, Homo sapiens
  MAP TO AP000884.1; EXPRESSED IN HELA, SIGNAL = 0.97; EXPRESSED IN BONE MARROW, SIGNAL = 1.2; EXPRESSED IN FETAL LIVER, SIGNAL = 0.96; EXPRESSED IN LUNG, SIGNAL = 1.2; SWISSPROT HIT: P56748, EVALUE 2.00e-64; EST_HUMAN HIT: AU121779.1, EVALUE 0.00e+00; NT HIT: AL163252.2, EVALUE 0.00e+00
gatgagcaccaccatgcccgtgatgatgaagatgattccagccgtcagcagaatgtgagccttcaccttctcattgtcccccgtgcacctggtgcatttcatgccaaggatggccatcatgaaagccaagaaggacatcacggaagcagcacacatcagtcctctggctgcctgtaggtccggagaaagagccagcagggaatcatagattttgcactgcatcctgatgttagcctgcctcacgcaattcatccacagtccttcccagaagttttcaaaaaccacgatgttgttttcaatgaaggccgacactctccactgaggcatgacagtgacagccactgtgcccaccattccaacaccaccaagaaacagcccagcgatttctaaggcatgggttgccattatcctctgggatgagttttagccagctggactccggaactgctacttctgctttgaagcagggttctctgtgccacagaagagaacagtttttcctgtagtaatgaactcggaacccagtggtttttcaaataagagctgctttgctacttctggccagatagtatccagtgctggctggctgagatggcc

SEQ ID NO: 9005 - DNA, 591 bp, Homo sapiens
  MAP TO AC007556.2; EXPRESSED IN HELA, SIGNAL = 0.83; EXPRESSED IN BONE MARROW, SIGNAL = 0.8; EXPRESSED IN FETAL LIVER, SIGNAL = 0.98; EST_HUMAN HIT: BE408496.1, EVALUE 5.30e-02
tcctcctgcgtcagaaaggtagtgtgtaaagccatggattaaaaagaaaagttaaataaaatgcttatatactttatagtttgcacaacatctagaaattactaatcactaattttcctgtttcacattaaaaacataaaattctgtgatgagctgaggttaaactgtcaattgccgctggcttgctgttgccttgtgagatccctggtagagagttttggtttacccttgtcaaatagggaagcagttcttacgtatctctccaggattgcttgatgaatagtggaaagtttgcaaagaactgagtatttaccatcatctttagttagtgtgtgatggtttcattaggtatagttcatctgagggaaaataataacacccaaacatgatatgaaacacatgaagttcaaagtaatcatagctatttaagctctattgtaatgttctggtgattctttcatagaaagatagataaactttattattgaatctgcaattggaagtacattaaaaacacaggaaaaggaaacaggatgttcttttgacacaggtactcatctgctagtcagcagttgtgcgttctgtacttcg

SEQ ID NO: 9006 - DNA, 509 bp, Homo sapiens
  MAP TO AC004886.1; EXPRESSED IN LUNG, SIGNAL = 1.5; EXPRESSED IN BONE MARROW, SIGNAL = 1.6; EXPRESSED IN PLACENTA, SIGNAL = 2.2; EXPRESSED IN HELA, SIGNAL = 1.2; NT HIT: Y19185.2, EVALUE 0.00e+00; SWISSPROT HIT: P46593, EVALUE 2.10e-02; EST_HUMAN HIT: H86807.1, EVALUE 0.00e+00
ccactccaattcctcagcaaagcgctgttgcttaattttctccagttccaggagctcacgctccaagtctagctgctgctgttgtttatcttcttcagggacaattaaaagagcactttcatctcccaccacttcaggaaacacttcggatgctgtggttaaagtgggaacagagtctatcgtctcagcagtaagagactccatagtaatagtttgcaaactggcactgatatcaataccagttactgcaatgtccgtttcagatgcacctgttgttataaaatatgatctaggcattggctggctatggtgcatggcaggtaatgaagtcactgcatcagccgtatgaataccagacaaatccctcactgtggtgctgaaaatggagccaggttgtgtggtgatagcaaatgtagagggtgttggagttgctactgaagaatagacaacaccattagatgacctcaaaacactccccacacaatactggggtcctggtggtggtgtca

SEQ ID NO: 9007 - DNA, 548 bp, Homo sapiens
  MAP TO AC007845.12; EXPRESSED IN HEART, SIGNAL = 2.9; EXPRESSED IN BONE MARROW, SIGNAL = 2.3; EXPRESSED IN HELA, SIGNAL = 0.73; EXPRESSED IN PLACENTA, SIGNAL = 2.6; EST_HUMAN HIT: BE267589.1, EVALUE 4.00e-86; SWISSPROT HIT: Q9UKP4, EVALUE 5.20e+00; NT HIT: gi14776874, EVALUE 2.00e-86
ggggagccaggagctgggacaccaacctttgcctgggcagggcagagctgacgccaagcgggtggcacctaggcctgcccagcccctcctggtagcactgccctctgccctgtgcacgagtgggcccctctggggtcgtctgactttaggaagggcacaaacctccacagtcttcctggtccggtttcaagctggctttgagaattctgttactaagctggctatgccctgtgaacccatggttcagtcccttctccaggtcagcacggctcctgagaaccctcggcggggagcgtgtgagtgtggatcctgagagccccagtgaccccagcccctcccgcacccctcccgctctgcctgcacgcggacccggctgctgacgcacctgcccttacgacgggaagcaccctgtgctttccagagtccaccgtggccccgctggagggggtgctggggcaggacttgtcgtcggccttcttcttcttgtccttcttgtacccggagaagacggacttccacagggacttgggtttggcggcggcttcttc

SEQ ID NO: 9008 - DNA, 549 bp, Homo sapiens
  MAP TO AP000540.2; EXPRESSED IN BRAIN, SIGNAL = 0.87; EXPRESSED IN HELA, SIGNAL = 0.46; EXPRESSED IN BONE MARROW, SIGNAL = 0.89; EXPRESSED IN FETAL LIVER, SIGNAL =   1; EXPRESSED IN LUNG, SIGNAL = 0.96; EST_HUMAN HIT: BG009093.1, EVALUE 3.00e-22; SWISSPROT HIT: O88799, EVALUE 3.10e-02; NT HIT: AL163202.2, EVALUE 5.00e-41
tgatacgagggtctgaatgtttttcccttatatagcattacaggacagtgctatgagtgtctgaatgtttgtcctcacaaaggattttataacactgctgcttctttctgagggtttgtcccccacataaaattcccaaacagttgctgggttcttgctattcgtccttcacataggattccagaacactgctgctggtttctgtgtatgaccctcacatataattccagaacactgctaggagggtctgaatgttagtccctcacaaaggattccagaacactgctgctgggttgtgagtgtttgtcactcacttaggattccaggacactttgtcagggttctgtgtgtttgtgcatcatgtgggatacaagaacactgctgctgtgtttttaatgtttatcaatcacataggattccagaacactactgcagggttctgagtgtctgtccctcacataggaatccagaaaactgctgcaatgttctgagggattgtccctcacgtagaattccagaacacacatgcagggttctgatggcctgtgg

SEQ ID NO: 9009 - DNA, 521 bp, Homo sapiens
  MAP TO AP001760.1; EXPRESSED IN HELA, SIGNAL = 0.79; EXPRESSED IN BONE MARROW, SIGNAL = 1.2; EXPRESSED IN LUNG, SIGNAL = 1.2; EXPRESSED IN FETAL LIVER, SIGNAL = 1.3; NT HIT: gi5174478, EVALUE 2.00e-83; SWISSPROT HIT: O95613, EVALUE 2.00e-23; EST_HUMAN HIT: AI243336.1, EVALUE 0.00e+00
gaaagctcagccctgcctgccaaattcttagaagttacacacacagaaactccaaattcatcacataaaccacaattttgtgttttcggtgctcagatatagaaccttcccatcctttttcccttgtatgaagcttgtgtcctcaatcaccgcagaaataggttatgacagttgccttttaagcaaggagatgtaagccttggttctgtttctcatagaattaaataaacttgaaatgtgcagggctcattgtggaatcacccgagtgctccgaaactccctgaaatccactcattaacaccagacaggtgcgactcctggtgagccaggtattccaccgtgcacctgttctgtttcacctgcagggtaaagaaaaagtactggaagattgtcagctgccgaaggtcgatctcgtagctcaggtgaaacagcttcaggaaaaactgaaccgtttgctgtattccatgaccttccagaatgtggatgctgccgacaccaaatctctgtggcccatggcctca

SEQ ID NO: 9010 - DNA, 547 bp, Homo sapiens
  MAP TO Z69923.1; EXPRESSED IN PLACENTA, SIGNAL =   3; EXPRESSED IN BRAIN, SIGNAL = 1.6; EXPRESSED IN BONE MARROW, SIGNAL = 1.2; EXPRESSED IN FETAL LIVER, SIGNAL = 1.3; EXPRESSED IN LUNG, SIGNAL = 1.1; EXPRESSED IN HEART, SIGNAL = 1.3; EST_HUMAN HIT: BG955121.1, EVALUE 2.00e-81; NT HIT: AL163209.2, EVALUE 0.00e+00; SWISSPROT HIT: P31792, EVALUE 2.00e-09
gccttcagctggcaaaggcagcaatatacctttactgtcctcctcaggggtatatcaactctccggctttgtgtcataatcttattcggagagaccttgatcgcttttcgcttctgcaagatatcacactggttcattacattgatgacattacagtgactggattcagtgagcaagaagtagcaaacacactggacttattggtgagacgtttgtgtgccagaggatgggaaataaatccgactaaaattcagggaccttctacatcaacaacatttctaggggtccagtggtttggggcctgtcgagatattcctaaggtgaaggataagttgctgcatttggaccctcttacaaccaagaaagaggcacaatgcttagtgggcctatatggattttggaggtaacacagtcctcatttgggtgtgttactctggtacatttaccgagtgacctgaaaggctgccagctttgggtggggtccagaacaggagaaggctctgcaacaggtccaggctgctgtgcaagctgctctgccacttgggcc

SEQ ID NO: 9011 - DNA, 530 bp, Homo sapiens
  MAP TO AL049576.19; EXPRESSED IN BRAIN, SIGNAL = 0.92; EXPRESSED IN HELA, SIGNAL =   1; EXPRESSED IN LUNG, SIGNAL = 0.94; EXPRESSED IN BONE MARROW, SIGNAL = 0.99; NT HIT: gi14726872, EVALUE 0.00e+00; SWISSPROT HIT: P28221, EVALUE 6.00e-62; EST_HUMAN HIT: BF196846.1, EVALUE 0.00e+00
cccccaccacccacagctctttcagaagttaagaaaacaacaggaaaaagaacaattctgttgattgaaccaagactcaagataccatgaattaatccaagtctcagaaaataattaaaaaaaaaaaagacaatcccgatgaggttacaggacacaaaagataacaagagtcatcaccgaataagactaggaggccttccggaaagggacaattttctgaaaagcttgccgaaactcttcattaaacacagtgtagattattggattgatgagggagtttaaatagcctagccaggtgaagaagtcaaagagcgccgggtggatccagcaggagtcccggcagatggggaggaccagagacaccacgaagaagggcagccagcagatgataaaggcccccagaatgatgcccaggattttagtggctttcctttctcgagcagcagaaatcctcttgcgttccagggcactgtcagcaagcttgattttcacgtggttgaaaaagagaggggagccagccgagtgcgagt

SEQ ID NO: 9012 - DNA, 532 bp, Homo sapiens
  MAP TO AC023123.3; EXPRESSED IN PLACENTA, SIGNAL = 1.5; EXPRESSED IN BRAIN, SIGNAL = 1.1; EXPRESSED IN LUNG, SIGNAL = 0.94; EXPRESSED IN BONE MARROW, SIGNAL = 0.8; NT HIT: gi14770720, EVALUE 0.00e+00; SWISSPROT HIT: Q12830, EVALUE 1.00e-104; EST_HUMAN HIT: BE931074.1, EVALUE 0.00e+00
tgcggaactttggcactgttttgagattatctccttttcgctttgaggacttttgtgcagctctggtgagccaagagcagtgcacactcatggcagagatgcatgttgtgcttttgaaagcagttctgcgtgaagaagacacttccaatactacctttggacctgctgatctgaaagatagcgttaattccacactgtatttcatagatgggatgacgtggccagaggtgctgcgggtgtactgtgagagtgataaggagtaccatcacgttcttccttaccaagaggcagaggactacccatatggaccagtagagaacaagatcaaagttctacagtttctagtcgatcagtttcttacaacaaatattgctcgagaggaattgatgtctgaaggggtgatacagtatgatgaccattgtagggtttgtcacaaacttggggatttgctttgctgtgagacatgttcagcagtataccatttggaatgtgtgaagccacctcttgaggaggtgccagaggacgagtggca

SEQ ID NO: 9013 - DNA, 531 bp, Homo sapiens
  MAP TO AC010872.2; EXPRESSED IN BONE MARROW, SIGNAL =   1; EXPRESSED IN HELA, SIGNAL = 1.5; EXPRESSED IN BRAIN, SIGNAL = 0.89; NT HIT: M15421.1, EVALUE 0.00e+00; SWISSPROT HIT: P04114, EVALUE 2.00e-98; EST_HUMAN HIT: R06764.1, EVALUE 0.00e+00
tggggcttctcaacggcatctctcatctctaaagcatcaatgatattgatgggctcactgagtaaaagtggcactttaattggggagtctagtagagttaggtcagccagagttcgtccagtaagctccacgccaattttatctttagtgttgtaagcatccaagtcctggctgtattcattgttgttaaattgggtcttgagtttccaggtgcctgtctgctcagctggagtaagcagggcactgactttgtgttcaagagctgcactgatgcttttcctagacacgagatgatgacttgtggagcctttgtaatcatgagagaaagtaaatgccagaggttctgctttcaacaggaatttgctatacagctgcccagtatgttctccccagagagcgagtttcccattgccatttgtatgtgcatcgatggtcatggtaaacggggccattacagaacggaagacattgctgaaatgcagtgagtctgaattatagtttgtgctcatgtcaatggctgaagccagccca

SEQ ID NO: 9014 - DNA, 505 bp, Homo sapiens
  MAP TO AC007498.2; EXPRESSED IN BRAIN, SIGNAL = 1.2; EXPRESSED IN HELA, SIGNAL = 1.8; EXPRESSED IN BONE MARROW, SIGNAL = 0.83; EST_HUMAN HIT: AU132405.1, EVALUE 0.00e+00; NT HIT: X98833.1, EVALUE 0.00e+00; SWISSPROT HIT: P39770, EVALUE 2.00e-22
tgcaggctctgtccccgtccaacagcacgcaggagttccacaagtcacccagcattgaggagaaaccacagagagcggtcccaagcgagtttgccaatggtttgtctcccaccccagtgaatggtggggctttggatttgacatctagtcacgcagagaaaatcatcaaagaagattctttggggatcctcttcccttttagagaccggggtaaatttaaaaacactgcttgtgacatttgtggcaaaacatttgcttgtcagagtgccttggacattcactatagaagtcataccaaagagagaccatttatttgcacagtttgcaatcgtggcttttccacaaagggtaatttgaagcagcacatgttgacacatcagatgcgagatctgccatcccagctctttgagcccagttccaaccttggccccaatcagaactcagcggtgattcccgccaactcgttgtcatctctcatcaagacagaggtcaacggcttcgtgca

SEQ ID NO: 9015 - DNA, 559 bp, Homo sapiens
  MAP TO AL035703.17; EXPRESSED IN BONE MARROW, SIGNAL = 1.8; EXPRESSED IN LUNG, SIGNAL = 1.9; EXPRESSED IN HEART, SIGNAL = 1.6; EXPRESSED IN BRAIN, SIGNAL = 1.9; EXPRESSED IN HELA, SIGNAL = 3.2; NT HIT: Z99114.1, EVALUE 9.00e-03; SWISSPROT HIT: P24278, EVALUE 1.00e-04
tggcagcagccaggacaagcttgtgagccctgaagtaaatggtaccaatggagatggtgcaatcacagaactgctgctccttgcacagagtgtacagctgctgcagcagctgccggctgtagttggggagctccattgcgtcaactctgccccaagaactgctcttcctctcctctccttagagttggctttgggaggacaggccctagagaaacccacaaaataccaggttaaaacttcaaaaaaccatagggaaaggccttgaatgaaacgctaaatgaacagaaaggcatttcactcattcatccaacaaatattgcttaataggaagggacagtatgccaggtatactaaatcagtaatgatcattatcattatgtgtttaaatatatgaaagagactgtgcataatgctttgtatggacggtctcatttgattctcacaacgattcagtggaaaagatattatttcctccccattttacagatgagattggagctttgaaggaccaagagaatcaccctaaggaaaaacagccatctcactgacttcgaagctc

SEQ ID NO: 9016 - DNA, 510 bp, Homo sapiens
  MAP TO AC017024.3; EXPRESSED IN BRAIN, SIGNAL = 1.7; EXPRESSED IN HEART, SIGNAL = 1.7; EXPRESSED IN LUNG, SIGNAL = 1.8; EXPRESSED IN FETAL LIVER, SIGNAL = 1.6; EXPRESSED IN BONE MARROW, SIGNAL = 1.5; EXPRESSED IN PLACENTA, SIGNAL = 1.9; EXPRESSED IN HELA, SIGNAL = 2.3; SWISSPROT HIT: P21414, EVALUE 8.00e-36; EST_HUMAN HIT: AW853949.1, EVALUE 3.00e-34; NT HIT: M10976.1, EVALUE 2.00e-37
cccaacctccgggaccaaccttggacatttgtagactgggagctatatgtggacggaagcagcttcattaacccacaaggagagaggtgcgctggataggcaatggtaaccttggacactgttattgaagccaaaccgctgcctcacagaacttcagcctaaaacgccaaactcactgttttaacttgggccttagagctaagtgaaggtaagactgtaaacatttgtatggactctcggtatgcctttttaaccctccaagtgcatggggcattatacaaagaaaaaggcctgttgaactcagggggaaaggacattaaataccagcaagaaattttacagttattaaaagcagtatgaaagcctcggagggtggccgtcatgcattgtaaaggacatcagcaagccaccacttctgttgccttaggaaattctcaagcagactcagaagcttacaaagcagcatccacccaataccgagcatcagtcacagccgccttgctccctcag

SEQ ID NO: 9017 - DNA, 534 bp, Homo sapiens
  MAP TO AP000347.1; EXPRESSED IN HELA, SIGNAL = 1.7; EXPRESSED IN PLACENTA, SIGNAL = 2.9; EXPRESSED IN BRAIN, SIGNAL = 2.9; EXPRESSED IN HEART, SIGNAL =   3; EXPRESSED IN LUNG, SIGNAL =   3; EXPRESSED IN BONE MARROW, SIGNAL = 3.4; EXPRESSED IN FETAL LIVER, SIGNAL = 2.3; SWISSPROT HIT: Q03385, EVALUE 3.00e-04; EST_HUMAN HIT: BF531102.1, EVALUE 0.00e+00
ggggctgaggctgtagtgggccaagctccaactctgaaccgcacagctcattcttccctctccaggagtgcctaagcctcaacaacttctcctcggtgcacgtcatcgtctctgctctgtgcagcaacccaataggtcagctacacaagacgtgggcaggagtgtccaggtgaggagggctctctccatggcagcatcagggttgacctagggactcacaggtctccccccatgtgccctcaatgactctgaaaggttcttggagtccagggacactggaggcagggatgggccggtggctgtggtcactaagctgccctggactcctaggcaaggatttccaactcaggactaaggttttttaaccatcaggaacagactggagccaactggaggctttcaggtgtttgtacccagcagtggaactctgtgtccagctgaaagctaactgtaaacacgcagtggctcatgtgaagtggagatggggcccaggggaggagcatgagaggtcccaccctggtcctctggagcccc

SEQ ID NO: 9018 - DNA, 502 bp, Homo sapiens
  MAP TO AC005785.1; EXPRESSED IN HELA, SIGNAL = 0.43; EXPRESSED IN BONE MARROW, SIGNAL = 0.84; NT HIT: gi14761764, EVALUE 1.00e-07; SWISSPROT HIT: O10687, EVALUE 3.60e-02; EST_HUMAN HIT: AI905359.1, EVALUE 1.00e-109
actcgaacggctggaagcggaaggagctgcaacagaagcacagcccatcaggggcggtcaccccgatcacccactgccacactccctcagtataacctcgacgcccctacattcaaaacagcaaaccaaaccaccctgcatcccacctaagtgctgggatgaccaaaactgaccaacaccctccctggaacactgctgagcaggggacagagcccctggccacaggaatagcatgatgtagaaaaaaggagtctcggggagcttagccaacaaccacgcccaagccccgccatgaagaaaagcaaggaagtcctactgtaacatcactgaccccccacgagcccaactcgtcaatgccacacccaagagggaggcggggacaggccctccctcaagagtgggtgcccactcccatgcgcacaaaggtggggatgtgtggggtcccgggggagggcttgggtccataatcacctctcccggtcctgtatgccctccccaccgc

SEQ ID NO: 9019 - DNA, 518 bp, Homo sapiens
  MAP TO AP000536.1; EXPRESSED IN BONE MARROW, SIGNAL = 1.5; EXPRESSED IN HELA, SIGNAL =   3; EXPRESSED IN HEART, SIGNAL = 1.3; EXPRESSED IN LUNG, SIGNAL = 1.2; SWISSPROT HIT: P41891, EVALUE 5.00e-04; EST_HUMAN HIT: BG009093.1, EVALUE 2.00e-50; NT HIT: AL163202.2, EVALUE 4.00e-88
gggacaaacgctcagaacccagcagcagtgttctagaatcctttgtgagagacaaacacacagaagccatcagcagtgttctagaatcctttgtgagggacaaacactctgaacccagcagcagtgttttggaatctcatgtgagggacaaacactcagaacccagcagcagagttctggaatcttatgtgggtgaaaaacaatcagatcccagtagcagtgttccagaatcttttatgagggacaaaacttcagacccttgaagaagtgttctggaatcatatgggagggagaaatactcagaacccaacagcagggttctggaatcctatgtgagggacaaacactcagaacccaggaatagtgttccggaatcctctgtgagggaaaaacattcagaacccagcagcagtgttctggaaacctatgtgagtgacaagaatttggaacacagcagtagtgttctagaatcctttgtgagggaccaacattcataccctcgaagcagtgctctggaa

SEQ ID NO: 9020 - DNA, 537 bp, Homo sapiens
  MAP TO AF042089.1; EXPRESSED IN BRAIN, SIGNAL = 1.3; EXPRESSED IN HELA, SIGNAL = 1.2; EXPRESSED IN BONE MARROW, SIGNAL = 1.1; EXPRESSED IN FETAL LIVER, SIGNAL = 1.3; EXPRESSED IN LUNG, SIGNAL = 1.2; NT HIT: gi14760973, EVALUE 0.00e+00; SWISSPROT HIT: P03356, EVALUE 2.00e-05; EST_HUMAN HIT: AW867015.1, EVALUE 1.00e-127
aggctgggcttgcagggatgaatacatcacaattactagaaatagctagccaggtgtttgtaaacagggatgcagtaagccgtaaggaaaacggcaaagagaatggaggtcaggcccggcgacacgccgacctgtttgtcagctgcagcaatcagaggggcctccccaaagaggcaagggaaggggggccctgggaaagaaactcagcttggctgtcagagtttgcagcgtaaccagtgtgctcatggtaaagaaataggacagtggaagaacaaatgccctcagctcaaaagaaaacaaggtgactcagagcaggaggccccggacaaggaggaaggggccctgctcaacctgcagaagggttcttggactgagggagactgggctcaagcgtccccaaagagcctctggtcagaatgacagtcgggggtggagacattgactttcttgtagatagcggtgcgcaacagtcgctagtaacagccccagtcgccctcttatccaaaaagactattgacgtcattggagccacagggg

SEQ ID NO: 9021 - DNA, 506 bp, Homo sapiens
  MAP TO AF238380.1; EXPRESSED IN BRAIN, SIGNAL = 1.1; EXPRESSED IN HELA, SIGNAL = 0.98; EXPRESSED IN BONE MARROW, SIGNAL =   1; EXPRESSED IN LUNG, SIGNAL = 0.97; EXPRESSED IN FETAL LIVER, SIGNAL =   1; SWISSPROT HIT: O31550, EVALUE 8.00e+00; NT HIT: gi14756590, EVALUE 8.00e-03; EST_HUMAN HIT: AA683413.1, EVALUE 1.80e-01
ccttcccgccagcctcaatgaattagagctgtgtttcccaaacttgcctgatcataagcagcctctggggccctagttagagatacaggttccggagtacctcccttcgagattctgattcagtaggcctgcgggtggagccaaggaatctgtaattttaacacgctccccacgtgattctcgtgaacaagcaagtttggaaaatactgaattaaaggaaacggggcctggctgcagaagcagcctccactagggggcttcggcgggaggattcccgggggcgtcgcctgcttccgccgccgcctccttcagtgaaagtcccttttgggtccagctgccacagccaccgcgctccctcaggccgggcgggggacaccccaggtctgcgtggcccccgcgccgccacgcccagtggccgcccgagccctgcgagcagggggaggagccgccgccagtggaggcggaggaggtagaggaggcggagacggcggagaaggcggagagga

SEQ ID NO: 9022 - DNA, 539 bp, Homo sapiens
  MAP TO AC004624.6; EXPRESSED IN HELA, SIGNAL = 0.69; EXPRESSED IN BRAIN, SIGNAL = 0.89; EXPRESSED IN BONE MARROW, SIGNAL = 0.91; SWISSPROT HIT: Q62689, EVALUE 7.70e-01; EST_HUMAN HIT: BG470266.1, EVALUE 4.80e-02; NT HIT: AY054211.1, EVALUE 1.30e-01
ttgatcctgaggccgtgggcagccatggtggggtgcttatggagggagatcctttgacagtcaccactgttgtccagagcaaggtgctgaagacctgcgtgtggctctcggtcctcctgggtcactcccagtcctttgaagatgcactggcagccttgggcagtcacacagcatgcgatgctctctggactctgcgacttcacagatgtgcagaggcctggaagccacagccatggccactgaggctcatgcaatttccaccaagacatgaagagccgcatctggctttgcagttccttatcgatgggttctaacactttaatttataaattccaggctgcattcaacctgagagctggtggctggctagctcttcacatttcccagtggccctctcaggaggaattcttcctttccaggcagccctttttgacctcaagatgctgtttgtgggccatcagcttccttctgagagatggacagagactggcagccttgtcacatgctgcagcctgggtccagcccccactgcaacacca

SEQ ID NO: 9023 - DNA, 521 bp, Homo sapiens
  MAP TO AC021287.4; EXPRESSED IN LUNG, SIGNAL = 1.4; EXPRESSED IN HEART, SIGNAL =   4; EXPRESSED IN PLACENTA, SIGNAL = 1.4; EXPRESSED IN BRAIN, SIGNAL = 1.2; EXPRESSED IN HELA, SIGNAL = 1.8; EXPRESSED IN BONE MARROW, SIGNAL = 0.99; EXPRESSED IN FETAL LIVER, SIGNAL =   1; EST_HUMAN HIT: AA196387.1, EVALUE 0.00e+00; SWISSPROT HIT: P24152, EVALUE 7.00e-03; NT HIT: gi14732352, EVALUE 0.00e+00
ctcagcttgggggcagaggcttgtaatttcatgcaaagctcctctgccaaacaaaagacccctcctcctgttgctccaaaacctgcagtcaagtcctcatcctcccaaccagtaactccagtttccccagtctggtctccaggagtggctcccacccaacctcctgccttccccacatccaacccatcaaagggcaccgttgtctcctccatcaaaatagcccagccttcttaccctcctgcccggcctgcaagtactttgaacgtggctggtcccttcaaaggaccacaagcagcagtagccagtcagaattacacacccaaaccaacagtttccacaccaacagtcaatgctgttcagcctggtgcagtgggaccatccaatgagcttccaggaatgagtgggagaggagctcagctctttgctaaaaggcagtcgagaatggagaagtatgtggtcgattcagacacggtgcaggcccacgctgctcgagctcagtctcccactccatctctcccggc

SEQ ID NO: 9024 - DNA, 502 bp, Homo sapiens
  MAP TO AL132709.2; EXPRESSED IN HELA, SIGNAL = 1.1; EXPRESSED IN BONE MARROW, SIGNAL = 0.97; EXPRESSED IN FETAL LIVER, SIGNAL =   1; SWISSPROT HIT: P20267, EVALUE 5.30e-01; EST_HUMAN HIT: BF802546.1, EVALUE 2.80e+00; NT HIT: AF286643.1, EVALUE 7.40e+00
agcatcgggccagacgatggatgccacaagcagagtccagattctgtgcccaccacccattctgtgaactttggagtgggaccgacagcagaatcctttccctgacgttggcatgagctcagagagccctctgcgccttgctacaagtggagcaagaggccagccatgcgaggcctgctgtaaagaaagaaaagatgtcacagacgacttcccttcaggagccatgggcactgacctgcatcagagcctccttcctggggcaggcatcacctcccaaggtggtcccggaacgcaccggagtcagcaggagtggaacagatgacatgcaccgtgggtacaatcgggcctgtcccatgggcggccctcaggcacctgccctggagagggctccggctgcaggccgcctcctgagggtgctgttgcttctggaaattctccaggtagggtttgatctgaaaagaaagccatgtgcaatgctggtcaccaacaaagcaggccagca

SEQ ID NO: 9025 - DNA, 551 bp, Homo sapiens
  MAP TO AC003986.1; EXPRESSED IN BRAIN, SIGNAL = 0.98; EXPRESSED IN BONE MARROW, SIGNAL = 0.87; EXPRESSED IN FETAL LIVER, SIGNAL =   1; EXPRESSED IN HEART, SIGNAL = 1.2; NT HIT: Y10871.1, EVALUE 0.00e+00; SWISSPROT HIT: Q15672, EVALUE 5.00e-32; EST_HUMAN HIT: BG987740.1, EVALUE 1.00e-107
gggtggcgctgacaaaacggtccttacccgtgaccctgggtgtctctgtctcccctcctgtcacgcacactcacgcgcacacacacccctcaccagggcgcatccccctggagactgctctccctagcggggtcagaccggccttccggggacgctgggggcgcgaggcaacggtgccaagtgaggtgggaaggctgagcggagagtgggagaggggaggaaatcgaggtggactgggaaccgcggcctggccggcctgccgtctgccacctgagaggcgaaggggtgcagcggcgcggtccttacctaggtctccggccctgctgagggggtggggggctccgcctgctagtgggacgcggacatggaccaggccccctccatcctccagaccgagaaggcgtagctgagccgctcgtgagccacatagctgcagcttgccatcttggagtccagctcgtcgctctggaggacctggtagaggaagtcgatgtacctggccgccagcttgagggtctgaatcttgctcagcttgtccgagggcagcgtgg

SEQ ID NO: 9026 - DNA, 589 bp, Homo sapiens
  MAP TO AL133485.1; EXPRESSED IN PLACENTA, SIGNAL = 4.8; EXPRESSED IN HELA, SIGNAL =  17; EXPRESSED IN BONE MARROW, SIGNAL =  14; EXPRESSED IN FETAL LIVER, SIGNAL =  12; EXPRESSED IN LUNG, SIGNAL =  13; SWISSPROT HIT: P39188, EVALUE 2.00e-06; EST_HUMAN HIT: BF109355.1, EVALUE 0.00e+00; NT HIT: gi14149743, EVALUE 3.00e-86
tgagcactgctgcttgcccctgaagttcagcaatttcatttttaaggtcacttatttgtttttctaaggtgtgcgtttcgttctcatgcctttgcttcatgttctcctgtgccttcttgcagctgaccacggtttcgtccagctgcttttcataatggcgcacctgaaggcacagagtgacaccaccacaagattactcagctcaaggtcactgaaagtgaagtgatggagcagcaattgctttttttttttttttttttttccctacaagacatttctcatttctctatcttgttttaaagtaactgaattcaacactttaagcaagatacttaagtcaggcatggtttacatatctcttttaagtggctgaattttattagtgtctgaacaaccttattaagaactgagcagccattacacatagctaccctctgtcttcccatgcatcctttccaactgtaaacttgagtcttggaacatatatattttttgagacaggttctcactctgtcacccaagctgaagtgcagtggcgtaattatggctcactgaaatctccatctcctgggctcaagcaatcctccca

SEQ ID NO: 9027 - DNA, 530 bp, Homo sapiens
  MAP TO AC011531.6; EXPRESSED IN BRAIN, SIGNAL = 1.3; EXPRESSED IN HELA, SIGNAL = 1.1; EXPRESSED IN HEART, SIGNAL = 1.3; EXPRESSED IN BONE MARROW, SIGNAL = 1.3; EXPRESSED IN FETAL LIVER, SIGNAL = 1.3; EXPRESSED IN LUNG, SIGNAL = 1.1; SWISSPROT HIT: P47902, EVALUE 1.70e+00; NT HIT: gi14762685, EVALUE 3.00e-76; EST_HUMAN HIT: BF311688.1, EVALUE 5.00e-76
ctgggggaggagaggcccaggctggggatgcttgggggagggaggcctgggctgggaggggactgggaggagggaggcctgggctggggatgctggggggaggagaggcccgggctggggatgcttgggggaggagaggcccgggctggggatgctgcggggaggagaggccctagctgggagaagggaggcgggggctcaagagaggagcttcagggatagagggtgaggaggaggggaggccggggatggggggtaggaggagaggggaggccagggctggctggggggtcggggaggctagggcataggcctggcgaggaggggaggctggggctgggtgggcgcgcggtctctgccggcccccaacgtccccgtctccgcagggccgccttcaacaacaacgtgagcgtggcctacgagtgcctgagcgccggcgggcgcaggaagaggccggggctggacgggcgcacctacagcgagctgctcaggcgcatctgccgggacggccaagcccccgaggaggtggt

SEQ ID NO: 9028 - DNA, 525 bp, Homo sapiens
  MAP TO AL132641.2; EXPRESSED IN BRAIN, SIGNAL = 1.5; EXPRESSED IN HELA, SIGNAL = 2.3; EXPRESSED IN HEART, SIGNAL = 1.4; EXPRESSED IN BONE MARROW, SIGNAL = 1.1; EXPRESSED IN LUNG, SIGNAL = 1.2; EXPRESSED IN FETAL LIVER, SIGNAL = 0.96; NT HIT: gi13648109, EVALUE 0.00e+00; EST_HUMAN HIT: R60392.1, EVALUE 0.00e+00; SWISSPROT HIT: P28654, EVALUE 8.00e-13
tccacaggaagcccaacaggcacactgctcaggtgattcttagacaaaaacaacaatttgaggctaatagcctcccggaaggccccgtcttccacccccactgtggatatggagttgtcatccaggtgcagctcttcaagcttcaagagctgggcaagagcagcccgtgaaatggtctgaatattgttttcctgcaaatggagaactctgacattcttgggaaggttcatggggaattcgtccagttggttgccatacaggtagaccgtgtgcaccgactgtacattgtgcagttctgcaggaaatccagcattattaatttggttgttgtggaggtagagtacagttacgccctccgggatcccaagaggcactgaggtcaagcttcgctcattacagtagacaaagttcctgtcgcagcggcacacactagggcaggccaggagtttggacacctgtgagtagagccccagggaaatgataagccaagacttcaggaaaaaagccccatggctgggccacttt

SEQ ID NO: 9029 - DNA, 501 bp, Homo sapiens
  MAP TO AL049748.1; EXPRESSED IN HELA, SIGNAL = 0.71; EXPRESSED IN BONE MARROW, SIGNAL = 0.77; EST_HUMAN HIT: AI740692.1, EVALUE 2.00e-90; NT HIT: gi13655032, EVALUE 1.00e-90; SWISSPROT HIT: O14791, EVALUE 5.30e-01
tccctggacccctatccgccaaattatccttccctgccagagcctgcagaccacaggagaggcagacagggagcacccccacaaacacacaaatatgggatttcaagaatttatggttatttatggtcagggctttgagagaacagaacgcaattctgggaagaacagagggcgcctagttaatgtcaggggtgtgcggcaagtcctctctttgcagaaggggcagctgtagttatgcactgatgtgtccgtttagcattcgtcgccccccaccctcatggtaagcttttagaagagcaagaccacgtccgtgttattcgctgccttcctaccttctggtttaaccacacgggatcctcgaacagccctgccccgggagctggaacaggtctggctcgccttctgcggcaggtgccggtggtgctgggtgagccggtccagctcctgctccagcttcttagcaagtgctctcagttcctctgctgtctccgtccttgcccc

SEQ ID NO: 9030 - DNA, 540 bp, Homo sapiens
  MAP TO U69568.1; EXPRESSED IN BRAIN, SIGNAL = 0.94; EXPRESSED IN BONE MARROW, SIGNAL =   1; EXPRESSED IN HEART, SIGNAL = 1.2; EXPRESSED IN HELA, SIGNAL = 0.34; EST_HUMAN HIT: BE793498.1, EVALUE 0.00e+00; NT HIT: gi14766894, EVALUE 0.00e+00; SWISSPROT HIT: P43362, EVALUE 4.00e-64
tgggcctgatgggtgcacaggaacccacaggcgaggaggaggagactacctcctcctctgacagcaaggaggaggaggtgtctgctgctgggtcatcaagtcctccccagagtcctcagggaggcgcttcctcctccatttccgtctactacactttatggagccaattcgatgagggctccagcagtcaagaagaggaagagccaagctcctcggtcgacccagctcagctggagttcatgttccaagaagcactgaaattgaaggtggctgagttggttcatttcctgctccacaaatatcgagtcaaggagccggtcacaaaggcagaaatgctggagagcgtcatcaaaaattacaagcgctactttcctgtgatcttcggcaaagcctccgagttcatgcaggtgatctttggcactgatgtgaaggaggtggaccccgccggccactcctacatccttgtcactgctcttggcctctcgtgcgatagcatgctgggtgatggtcatagcatgcccaaggccgccctcctgatca

SEQ ID NO: 9031 - DNA, 508 bp, Homo sapiens
  MAP TO AF030453.1; EXPRESSED IN HELA, SIGNAL = 0.9; EXPRESSED IN PLACENTA, SIGNAL = 1.8; EXPRESSED IN BRAIN, SIGNAL = 1.9; EXPRESSED IN HEART, SIGNAL = 2.5; EXPRESSED IN LUNG, SIGNAL =   2; EXPRESSED IN BONE MARROW, SIGNAL = 2.4; SWISSPROT HIT: Q63959, EVALUE 4.80e-02; EST_HUMAN HIT: AI937524.1, EVALUE 1.00e-23; NT HIT: gi14739530, EVALUE 2.00e-28
gggtgggacacgccaagctcttcagtgaagacacgatgttattaaaagcctgttttagggactgcacccggctctcctgtcgtcctttctcccacggggaaggcggggactgcggggcagccactctcagagacccccgtccatcagggacccccgtccagcccagtgtggcctgacacctgccaggcccccttgcagctctgtctctggtgggacagctgagggactccccatggggcgtcgggcagcacctgaaagagggcccaacagcaagggttagggcttaggatcgggagggggctttactggagctgtgagggagagagatgggaggtggtaacaatgaggggtgctgaaaagagaggagggggcattcaggacacagtgagggatggggagcacgcccaagtcatacggagagcttggatgccaggaggaggagtcgaggcccggactgggagggtaaaggcgtttttagacagatctatgaagcctggcggtgtggaca

SEQ ID NO: 9032 - DNA, 508 bp, Homo sapiens
  MAP TO AC005338.1; EXPRESSED IN BRAIN, SIGNAL = 2.4; EXPRESSED IN HELA, SIGNAL = 2.2; EXPRESSED IN LUNG, SIGNAL = 1.3; EXPRESSED IN HEART, SIGNAL = 1.3; EXPRESSED IN BONE MARROW, SIGNAL = 0.97; SWISSPROT HIT: P23468, EVALUE 4.00e-38; EST_HUMAN HIT: AI283502.1, EVALUE 0.00e+00; NT HIT: gi14765215, EVALUE 0.00e+00
catccgggcttgcacgttccgcggcgcgctggccggggcctgctcgcctgtgcgggtgaccacggactcgctggggggcccctggccgatggagttgacggccgacacccagatctcgtactccgagttggggctcaggccgccgatgctgtaacgtgtggtggtgatgtcctctttaatctgatacggcccgtcttggctcttggatttatattcgatgacgtaataggacacaggatctgggttgcccgagtcccacgtgatggtgatgctggtggctgtgttctcagtcaccatgggagtcccgggagctttggggagagctgtgggcaggaggcagctgtgtcacgcattgggcacattggttgaggaccctgaaggctgtgtgacttttcaccattcagtcgccttctctgagccttgatttgcccagcagtaatcatgggcctcatgactcctgtcatcgtctacagcaaggggtaacaaactatggcccagggtccaccca

SEQ ID NO: 9033 - DNA, 501 bp, Homo sapiens
  MAP TO Z73639.1; EXPRESSED IN LUNG, SIGNAL = 1.7; EXPRESSED IN BONE MARROW, SIGNAL = 1.8; EXPRESSED IN FETAL LIVER, SIGNAL = 1.8; EXPRESSED IN HELA, SIGNAL = 3.4; EST_HUMAN HIT: BF352349.1, EVALUE 0.00e+00; NT HIT: gi14767967, EVALUE 1.00e-69; SWISSPROT HIT: Q25460, EVALUE 7.00e-01
cagccttggggcaggacaggagagggccttgctccacctgattgaagaggtctctcaggtccagggtgagtaaggatggagggtagcagtcttcagcttcttccaggctcttgtagctctcttgtgatgaatctgtgggtgaaacagagtattagggctcgggactatgtttggctttgtgcctcacagacagggtggatttcgagttggtgataaaggcagattaacaggatacaatttctttgttcttttcttttctgtcttcctctatcgacctcaggagcccccatttctcttcctgggtccacagggaagggcaggagatgggtctctgctatgatagctaggagggtgacagtgtgagtacctctcaggtagtctcctacaccagacctccacccccaaagattaagggcagtttctctcattaacctctaccaaagtcagataaattccttcgttttcccttgtcttctgttgtcagtggtccctccacggtga

SEQ ID NO: 9034 - DNA, 500 bp, Homo sapiens
  MAP TO AC007227.3; EXPRESSED IN HELA, SIGNAL = 4.1; EXPRESSED IN PLACENTA, SIGNAL = 1.9; EXPRESSED IN BONE MARROW, SIGNAL = 2.2; EXPRESSED IN LUNG, SIGNAL =   2; EXPRESSED IN FETAL LIVER, SIGNAL = 2.1; SWISSPROT HIT: P25364, EVALUE 8.00e-02; NT HIT: gi14750145, EVALUE 0.00e+00; EST_HUMAN HIT: AI624315.1, EVALUE 0.00e+00
gcaaccgggtgcggatgagggtgaatgggtagacactgacacggatcatcattgtcattgccacaccaaacacgtagaacttcttcttgtccaggtgttcccactcgatgatctggatgttgcgtttgtcctccatggtgcctgaagacctgggatttgagcagtatggagggatgtgaagaaggagggtggagctttgtgctttccccttctggctgggctctgaaggcccattctcagccctcatctcctggacactcacctgcccaaagcttggactccacccaatctggctctgtcaatccccacttgagtcttctttcatagatcaggatactgtccccttcttggtccttggccaggccttccttactcagtttccctcctccagaaattgtccctcacttcaatgattcccctggctccatggcctcctcggctccctaccccagcttacaggatcttctatccggactctctgcctctgtctgggccctggt

SEQ ID NO: 9035 - DNA, 523 bp, Homo sapiens
  MAP TO Z85996.1; EXPRESSED IN HELA, SIGNAL = 1.1; EXPRESSED IN BONE MARROW, SIGNAL = 0.84; NT HIT: AL163206.2, EVALUE 2.00e+00; EST_HUMAN HIT: BI523322.1, EVALUE 1.20e-02; SWISSPROT HIT: P79292, EVALUE 5.00e-04
tggctcctgtggacccagccccaaggtcccatgggagagagcatccaggagcattaagagaacatagggctcagccttgtggtgctggtggtttttgtgctgatgtgggggccctgctccatgctgggttatgtggcagccatgggctacctgcctgccacaccggctgcttttgtggcctccagcctctgcaccatcctggcctactccaattgcgctgtcagccctatcctctgcttctacctctcccgccccttccaggcaggactcagggacctcttctgcaggccgatgatggccaggcatcccagaggtgtgggagtggcagcctcagtggtggcgactgtccagcctggccgtgacagggcctcaggaggcctgtggggcctggcgggggtctaagagtataggctgatggatgcgctgagattcaagggagatgggaagacccttagggacctgacagcccatcccctctattttaccagtggagagactgagacccagagggcagatggcccaa

SEQ ID NO: 9036 - DNA, 503 bp, Homo sapiens
  MAP TO AL096708.11; EXPRESSED IN BRAIN, SIGNAL =   1; EXPRESSED IN HEART, SIGNAL = 1.3; EXPRESSED IN BONE MARROW, SIGNAL =   1; EXPRESSED IN HELA, SIGNAL =   1; EST_HUMAN HIT: BF905778.1, EVALUE 4.50e-02; SWISSPROT HIT: O73692, EVALUE 9.20e-01
caggcctcccagaggtgggggatgagggagtctgtggaagaggaaagaactaagggaggagcccagtgtgagaggctctgctcccgcctgcggcacttccctgcacctgccacaggtccaattcatgggaacagctggactttctagccactgtcgttggtctaggaagttaaactgtgggcctcttacccaccgcagtcactccctggaggtggcctcagagctctggctccagagggcacctgtcttgcatggagaggtaagaaatgtttgagttgaactgaatattcgctgccggcctggggtcggtgagattagtgagaagggaacaggtggcgtaaaagctaatgggatgctttaagattggcacattgctgatttccaggctgccgtgggaaggctggtggtgggtatccaggttgctgtagcggggtggagagaaagcacctcctgttttccaatgtggaggcaatctggccatgacatctgtgtccctgcccgcc

SEQ ID NO: 9037 - DNA, 595 bp, Homo sapiens
  MAP TO AP000346.1; EXPRESSED IN BRAIN, SIGNAL = 0.86; EXPRESSED IN HELA, SIGNAL = 1.5; EXPRESSED IN BONE MARROW, SIGNAL = 0.89; SWISSPROT HIT: P04052, EVALUE 2.30e-01; NT HIT: AF000573.1, EVALUE 3.60e-02
tgattttggcagtgccgggggcatcatactgaaaataagtgccttgtacattgtgggtacccaggaagccagtttacagcccctcagaggagacccatcagcaggcatctgagggagcctggagccctgcatcctgcaggtgcctggggtcttgtgcccaggagaagctgctccctcactccacagcagtctacagagcaccccctgaccaggggtacacctgtttgtgcaggtgtcagcagggagccctgggcctctctgggctctgactttccctggcaggactgtagagggcccagaaccctgccttctcccagccaggcccttccctcccttccccaaactcacggcctcctcaccgctctctgcctcagattcaggactaatctcactatgtccttcatccctgtttgcatcaggggctgcaagaagctcagctcacctctccctcaaggccatgaatactccttttctgaccccatctgctgcaaccttttctccaagccctctggaggccctccctggaacattctttcctttcttgcttggactgaaacctagctctcccaagacctgcttcccctccctgggcatc

SEQ ID NO: 9038 - DNA, 540 bp, Homo sapiens
  MAP TO AL138688.11; EXPRESSED IN HELA, SIGNAL = 0.28; EXPRESSED IN BONE MARROW, SIGNAL = 0.76; EXPRESSED IN HEART, SIGNAL = 1.8; SWISSPROT HIT: Q9Y6H8, EVALUE 6.00e-09; NT HIT: gi14753410, EVALUE 0.00e+00
aggcttacccggcagcgtccacgcctgcagcccccagccccgtcggcagcagctccccgccactcgcgcacgaggctgaggcgggcgcggcgcccctgctgctggatgggagcggcagcagtctggaggggagcgccctggcagggacccccgaggaggaggagcaggccgtgaccaccgcggcccagatgcaccagccgcccttgcccctcggagacccaggtcgggccagcaaggccagcagggccagcagcgggcgggccagaccggaggacttggccatctagtgcccgggtgcctgcctccagacagctgtgtagtgatctttttcttagaaaccaaaaccaaagtgcacttcccaccagcagatagaacctgaaagtcccaggaggtgggagcgactggagtcccaggaggtggacgatggaggagagatcaggtttccgtgttcaatgcttgctgttcttagcactgtgagttacagtggggataactcccactttctgagtttgggggtggcggggacaagggttgtgggcc

SEQ ID NO: 9039 - DNA, 541 bp, Homo sapiens
  MAP TO AC007255.2; EXPRESSED IN LUNG, SIGNAL = 0.92; EXPRESSED IN BONE MARROW, SIGNAL = 0.99; EXPRESSED IN FETAL LIVER, SIGNAL = 1.1; EXPRESSED IN HELA, SIGNAL = 2.6; SWISSPROT HIT: P08547, EVALUE 2.00e-25; NT HIT: AL163213.2, EVALUE 7.00e-28; EST_HUMAN HIT: BG432402.1, EVALUE 4.00e-27
catctcgcaggctgtgacgctttattaagaaataaagtctcctctccttttcaaattaaaaaagatttagaaaagcaagagcaaacaaaacccaaaataagtagaagaaaagaaataataaagattggagaagaaataaatgaaattgaaatgaagaaacaacatagaagatcaaggaaacaaaaaattggtttcttgaaaaataaaacaagattgacaaacctttagccagactaattaaggaaaaaagagagaagatccaaaaaaataaaatcagagacaaaaaatgagacaactgatactacagaaaatcaaaggatcattagtggctactatgaacaataaattggaacaacaaatgtattggctaatttgccaataaattggaaaatccagaagaaatggacaaattcccagacatgtacaacctgccaagattgaaccaggaagaaatccaaaacctgaacagaccaataacaagtaatgagatcgaagctgtagtaaaaagtctcccagtaaagaaaagcccgggacccaatgg

SEQ ID NO: 9040 - DNA, 597 bp, Homo sapiens
  MAP TO AC008166.1; EXPRESSED IN LUNG, SIGNAL = 1.1; EXPRESSED IN BONE MARROW, SIGNAL = 0.89; EXPRESSED IN FETAL LIVER, SIGNAL =   1; EXPRESSED IN HELA, SIGNAL = 1.5; SWISSPROT HIT: Q11116, EVALUE 3.40e+00; NT HIT: gi16170068, EVALUE 4.00e-08; EST_HUMAN HIT: BF921379.1, EVALUE 1.00e-108
caacatttcaattgctcagtaccctcgaataactagtggctactagttccacagttagagaacacaggtggaaaacacacagaaataaaaaactttttaagacaaagataatgcttctttaggtaaaagtatgtgaataccattactttagccactctcttaataagtacttttattacagtacagtggataaataagtacagttattttatccactcccttaataagtaatataaagtctttaccatgtttaaagcccagtatcaagggaacactcagatgaatgggaaaggatcctattcacccgatgattatgaattagtagaagacatctttcatatattcatctacccatccacccatccacccattcatccatcactcattcaatttacacatatgggacatatgctgagcacactatgttagccatcagggctaacacagcatataaataaataattaccatatgctgtattaaacactaagacagagacttgtgaaaacagctaactctcaatgaagaggggagaactgacacttgaagtgaacttcaaaaggaataatatactagtactggcgaaggcatggatcaca

SEQ ID NO: 9041 - DNA, 529 bp, Homo sapiens
  MAP TO AF186192.1; EXPRESSED IN HELA, SIGNAL = 3.1; EXPRESSED IN FETAL LIVER, SIGNAL = 1.4; EXPRESSED IN BONE MARROW, SIGNAL = 1.7; EXPRESSED IN LUNG, SIGNAL = 1.5; SWISSPROT HIT: O43309, EVALUE 2.00e-15; NT HIT: gi16178790, EVALUE 0.00e+00; EST_HUMAN HIT: BI871126.1, EVALUE 0.00e+00
tgcatgctggggaaaagccctataaatgtcaagaatgtggaaacgccttcagtggaaagtcaacccttattcaacatcaggtaactcacactggtcagaaaccatgtcattgcagtgtgtatgggaaagccttcagccagagttcacagctcacaccacctcagcagactcgtgttggagagaaacctgctttaaatgatggctctaaaagatactttattcatatcaagaagattttccaagaaagacatttttaatgtgataaatgcagaagacagtttagcaactgttcacttgacattagaagataagatggcataatgaaagatatataaggtctaaatattactggcaaagtaaaataaatagttcagatgactactaaagtcaaagtcattaaatctggaagtaaacacgagaattcattctgggaaatcaggctgtctgtgtaaaggttactgctgtgctcaggagttgaaccgtgtggtgctgtatccggatactcatgacgaatggatggagggcgtga

SEQ ID NO: 9042 - DNA, 558 bp, Homo sapiens
  MAP TO AH009144.1; EXPRESSED IN BRAIN, SIGNAL = 1.3; EXPRESSED IN HELA, SIGNAL = 1.2; EXPRESSED IN BONE MARROW, SIGNAL = 1.3; EXPRESSED IN LUNG, SIGNAL =   1; EXPRESSED IN FETAL LIVER, SIGNAL = 1.3; NT HIT: AF213884.1, EVALUE 0.00e+00; EST_HUMAN HIT: AU138590.1, EVALUE 0.00e+00; SWISSPROT HIT: P08548, EVALUE 3.00e-71
cagaccagggatgcagggatggtttaacataggcaagtcaataactgtgatacaccacacaaacagaattaaaaacaaaaatcacatgatcatctcaagagacacagaaaaagcatttgacgaaatccagcatccttttatgattaaaaccctcagcaaaattggcacagaagagacatgccttaaggtaataaaagccacctgcgagaaacccacagccaacattatactgaatggggaaaagtttaaaacattccccctgaaaactggaacaagacaaggatgcccactttcaccacttctagttaacatagcactggaagtcctagacagagcaatcagacaagagaaagaaataaagggcatccaaatcagtaaagaggaagtcaaactgtcactgtttgctgatgatatgatcgtatacctagaaaaccctaaagacatatccaaaaagctcctggaactagtaaatgaattcagcaaagtttcagggtacaaaattaatgtacacaaatcagtagctctgctatacaccaacagtgacgaagctgagaatca

SEQ ID NO: 9043 - DNA, 504 bp, Homo sapiens
  MAP TO Z69638.1; EXPRESSED IN HELA, SIGNAL = 2.1; EXPRESSED IN PLACENTA, SIGNAL = 2.3; EXPRESSED IN BRAIN, SIGNAL = 1.7; EXPRESSED IN BONE MARROW, SIGNAL = 1.9; EXPRESSED IN LUNG, SIGNAL = 1.5; EXPRESSED IN HEART, SIGNAL = 2.1; EXPRESSED IN FETAL LIVER, SIGNAL = 1.6; SWISSPROT HIT: P11994, EVALUE 9.00e-05
tctgtgggaagaccccctcggggctcgtgattctgatgatcaccatctctgcttatcgggcccccgtcccctcctgaggctctcagcccatggaaggccctgggggctactcacagcaggcatgcagacaacaaccagccatccaccagcgtggggtgcagatgaggcctctccagacagaaatgctgtctcccccagacccctcctcctcggggtgtctgcacagcacaggggcaccccttgaggctgcccaccccagaggcaggcgaacccctcagccccttgagcaggaccctggggactccaaactgcccccacccctgcctgttgctgccaccaatgccaggcagtgtgccccacgcccagctctgcccccacccctacctgttgctgccaccagtgccaggcagtgtgccccacgcccagctctgcccccacccctacctgttgctgccaccagtgccaggcagtgtgcccacgcccagctctgcccccacccctacc

SEQ ID NO: 9044 - DNA, 510 bp, Homo sapiens
  MAP TO AC010680.2; EXPRESSED IN BRAIN, SIGNAL = 0.98; EXPRESSED IN HELA, SIGNAL = 0.51; EXPRESSED IN BONE MARROW, SIGNAL =   1; EXPRESSED IN HEART, SIGNAL = 4.6; SWISSPROT HIT: P54296, EVALUE 5.00e-13; NT HIT: gi16157781, EVALUE 0.00e+00; EST_HUMAN HIT: BF747381.1, EVALUE 2.80e+00
agggccacccaaggacctgcaccatgtagatgttgacaagactgaagtctccctagtctggaataagccggatcgtgatggtggttctccaatcactggatatttggtagaatatcaagaagaaggcacccaggactggattaaatttaagactgtgacaaacttagagtgtgtggttactggactacaacaaggaaagacctatagattccgtgtaaaagctgaaaacattgtgggtcttggtctccctgacacaactatcccgatagaatgtcaagaaaaactaggtaatttttggactagcagtattaccttatttctttttaaaattattcatataggtgaaaatcaaaatctaattttttcatgtttacttttcagtgcctccatccgtggagctagatgtgaaattaattgaaggtcttgtggtaaaggctggaaccacagtcagattccctgctattataagaggtgtgcctgttcctactgcaaagtggacaaccgatggga

SEQ ID NO: 9045 - DNA, 571 bp, Homo sapiens
  MAP TO AL049749.1; EXPRESSED IN BRAIN, SIGNAL = 2.2; EXPRESSED IN HELA, SIGNAL = 1.1; EXPRESSED IN LUNG, SIGNAL = 1.5; EXPRESSED IN BONE MARROW, SIGNAL = 2.8; EXPRESSED IN FETAL LIVER, SIGNAL = 1.4; EXPRESSED IN HEART, SIGNAL = 2.1; NT HIT: AJ290521.1, EVALUE 2.20e+00; EST_HUMAN HIT: R07631.1, EVALUE 8.00e-01
gccatgatgcaggtggcagtgatcatgaaggtggtggtgatggtggtgatggtggtggtgttgatgatggtgatggtggtggtgatgatggtggtggtagtggtggtgacagtgatggtggtggtagtgatggtggtggtaatggtggtgacggtgatggtggtggtagtgatggtggtgatggtggtggtaattatagccatgatgcaggtggcagtgatcctgaaggtggcggtgatggtggtgataatgatggtggtggtagtgatgctgatggtggtggtagtaattatagccatggtgcaggtggtggtgatcatgaaggtggtggtgatggtgatgataatgattgtgatgcaggtggtgatgatgaaggtggtggcagcagagatggtgcttgtgatgataacagggattgttatcatccgaataactaccatttggaacaactcttcacggtgtccaaaacctttaacgtgtattacttcattttagaagaaaaattctgaatttttcaaaacaacaactatttctaaccaagttccaccgtgagtgtcaccaaaactcagcc

SEQ ID NO: 9046 - DNA, 528 bp, Homo sapiens
  MAP TO AC006272.1; EXPRESSED IN LUNG, SIGNAL = 1.2; EXPRESSED IN FETAL LIVER, SIGNAL = 0.94; EXPRESSED IN PLACENTA, SIGNAL = 1.6; EXPRESSED IN BRAIN, SIGNAL =   1; EXPRESSED IN HELA, SIGNAL = 1.3; EXPRESSED IN BONE MARROW, SIGNAL = 0.91; SWISSPROT HIT: P25089, EVALUE 9.00e-21; NT HIT: L14061.1, EVALUE 1.00e-118; EST_HUMAN HIT: AL548676.1, EVALUE 6.00e-51
tgcattgagtgatggaggccacagatgtgaaccttctgactctgagtcttgtgccttcctcacgaagctgaagctgcctatgctcaattttccattgtccatacactctcagttcagtatttccgctggtggacagagccctttaatcctcttggtaatcagcttgataggtggcatgcatattaataatgatgggaatatagagaactatcgtttcccaaaggaactccgagagagtgccaattttatgttataaccattcacaaggctcactggggagggtctgctggtaggaggaggagctacagtggaagttaatgaatagttgtattgtaagatggtgtcacagctgagaaatggccattgctgaaatgtttcaggtgtgggaagatggaaaccaacttctccattcctctgaatgaaactgaggaggtgctccctgagcctgctggccacaccgttctgtggatcttctcattgctagtccacggagtcacctttgtcttcggggtcctgggcaatgggctt

SEQ ID NO: 9047 - DNA, 580 bp, Homo sapiens
  MAP TO AP001705.1; EXPRESSED IN BONE MARROW, SIGNAL = 0.77; EXPRESSED IN HELA, SIGNAL = 0.8; SWISSPROT HIT: O14867, EVALUE 1.00e-31; NT HIT: gi6680763, EVALUE 7.00e-56; EST_HUMAN HIT: AI241465.1, EVALUE 1.00e-103
gtggccatgtggagctgggctagcagtagactcactatgtgtggcaggtagtgttcatcctgctctaattcatagatgattttttttttcactatcatgggaaaattgtggtaatgtcttacatctttaacttatgtgagtaaaccataattcatgtgcaattaagagaggactctataaaatagtgtgtggtccctgtgaaaagcatgcttttccaggatctttttcttttacatttcttagaagaatatgttttcttcaaattaaagtacatattttataattatcacaaataagttacatatctctctattcctcttctacttattttgtttttatgtactagacagctttcaaatgatgtgtttgtttttattttgtgtatcaacaggtgacagttaaaggatttgaacctttaattcagtttgcctacactgctaaactgattttaagtaaagagaatgtggatgaagtgtgcaaatgtgtggagtttttaagtgtacataatattgaggaatcctgctttcagtttctgaaatttaagtttttggactccactgcagaccagcaagaatgccca

SEQ ID NO: 9048 - DNA, 517 bp, Homo sapiens
  MAP TO AC007159.4; EXPRESSED IN PLACENTA, SIGNAL = 2.2; EXPRESSED IN HELA, SIGNAL = 0.79; EXPRESSED IN LUNG, SIGNAL = 1.5; EXPRESSED IN HEART, SIGNAL = 1.8; EXPRESSED IN BONE MARROW, SIGNAL = 1.5; SWISSPROT HIT: O95416, EVALUE 5.00e-61; NT HIT: AJ006230.1, EVALUE 0.00e+00; EST_HUMAN HIT: BG768783.1, EVALUE 1.80e-01
cctcggcgccctactccctgctggaccccgcgcagtttagctcgagcgccatccagaagatgggcgaagtgccccacaccttggctaccggcgctctgccctacgcgtccaccctgggctaccagaacggcgccttcggcagcctcagctgccccagccagcacacgcacacgcacccgtcccccaccaaccctggctacgtggtgccctgtaactgtaccgcctggtctgcctccaccctgcagccccccgtcgcctacatcctcttcccaggcatgaccaagactggcatagacccttattcgtcagcccacgctacggccatgtaacccccagcccggcccggacctgaggcgtggtctgaaagccgggtctgcaccctgtcctctgagcctagccccggcctgcagacgcctccggggtcagccctgccgctgtcccttacaccacccagacttttcctctctcttccagggggaagggtggggcgtcctcccggacccaaggcgcagacagg

SEQ ID NO: 9049 - DNA, 527 bp, Homo sapiens
  MAP TO AP000287.1; EXPRESSED IN HELA, SIGNAL = 0.48; EXPRESSED IN BONE MARROW, SIGNAL = 0.88; NT HIT: gi14780209, EVALUE 0.00e+00; SWISSPROT HIT: Q13516, EVALUE 2.00e-21; EST_HUMAN HIT: AI571412.1, EVALUE 0.00e+00
gagcgggggcttccagcactggggcggcatgccctgcccctgcagcatgtgccaggtgccgccgccgcaccaccacgtgtcggctatgggcgccggcagcctgccgcgcctcacctccgacgccaagtgagccgactggcgccggcgcgttctggcgacaggggagccaggggccgcggggaagcgaggactggcctgcgctgggctcgggagctctgtcgcgaggaggggcgcaggaccatggactgggggtggggcatggtggggattccagcatctgcgaacccaagcaatgggggcgcccacagagcagtggggagtgaggggatgttctctccgggacctgatcgagcgctgtctggctttaacctgagctggtccagtagacatcgttttatgaaaaggtaccgctgtgtgcattcctcactagaactcatccgacccccgacccccacctccgggaaaagattctaaaaacttctttccctgagagcgtggcctgacttgcagactcggcttgggcagca

SEQ ID NO: 9050 - DNA, 541 bp, Homo sapiens
  MAP TO AL109928.12; EXPRESSED IN HELA, SIGNAL = 1.2; EXPRESSED IN BONE MARROW, SIGNAL = 0.91; EXPRESSED IN BRAIN, SIGNAL = 0.92; NT HIT: gi14786541, EVALUE 0.00e+00; EST_HUMAN HIT: AW365038.1, EVALUE 0.00e+00; SWISSPROT HIT: P40187, EVALUE 9.00e-06
gcgtgtgcaacgtggccttcgagaagcaggtggctgtgcgctacactttctcgggctggcgcagtacccacgaggcggtggcgcggtggcgcgggcccgcaggccccgagggcacggaggacgttttcaccttcggctttccagtaccgcccttcctgctggagctcggctcccgcgtgcacttcgcggtgcgctaccaagtggcgggtgccgagtactgggacaacaacgaccaccgagactacagcctcacatgtcgcaaccacgcgctgcacatgcctcgcggggagtgcgaagagagctggatccacttcatctgagccgcgcggggaccggccacctggagcctccacacctaagctgcgcctcctgtcatttccctgctgggctctcacatctatctggttgttcttcaccaccctccaagtcctctgacctaattttctgctgcaaggtcccctggcagtggcccatcctgtcttctacttgaaacgtctgagtcacttggtctaaaaagtagcctcaggtggccagaaggccg

SEQ ID NO: 9051 - DNA, 504 bp, Homo sapiens
  MAP TO AC016786.4; EXPRESSED IN BRAIN, SIGNAL = 1.2; EXPRESSED IN BONE MARROW, SIGNAL = 1.3; EXPRESSED IN FETAL LIVER, SIGNAL =   1; EXPRESSED IN LUNG, SIGNAL = 1.1; EXPRESSED IN HELA, SIGNAL = 1.4; SWISSPROT HIT: Q9Y5F3, EVALUE 1.00e-27; NT HIT: gi14758442, EVALUE 0.00e+00; EST_HUMAN HIT: AW897503.1, EVALUE 3.00e-03
atcctgccctcgcacatcggcgacgtgtctatctacacctatgtgtctgtgaatcccacgaacggggccatctacgccctgcgctcctttaacttcgagcagaccaaggcttttgagttcaaggtgcttgctaaggactcgggggcgcccgcgcacttggagagcaacgccacggtgagggtgacagtgctagacgtgaatgacaacgcgccagtgatcgtgctccccacgctgcagaacgacaccgcggagctgcaggtgccgcgcaacgctggcctgggctatctggtgagcactgtgcgcgccctagacagcgacttcggcgagagcgggcgtctcacctacgagatcgtggacggcaacgacgaccacctgtttgagatcgacccgtccagcggcgagatccgcacgctgcaccctttctgggaggacgtgacgcccgtggtggagctggtggtgaaggtgaccgaccacggcaagcctaccctgtccgcagtggccaag

SEQ ID NO: 9052 - DNA, 503 bp, Homo sapiens
  MAP TO AP001717.1; EXPRESSED IN BRAIN, SIGNAL = 0.94; EXPRESSED IN HELA, SIGNAL = 0.57; EXPRESSED IN BONE MARROW, SIGNAL = 0.84; EXPRESSED IN HEART, SIGNAL = 1.2; SWISSPROT HIT: P36677, EVALUE 4.00e-03; NT HIT: gi14780241, EVALUE 0.00e+00; EST_HUMAN HIT: AI678113.1, EVALUE 0.00e+00
tttgcctggtcaggatgggaacaattaaattaaaatcattaattcgcttgtttaattttctgatgttttcttgaaactgctcacaaacatggttccactgtttcttttcagttggtgtcattggattcccaagttttttcctagacactaaaattgcctctctgagttgctcaatagtatcgcttatttccttttgcttaaggatccattctggttggtatccattatcgatcagtattcggttcaggttgtgagtcatgggatcaatgtaagaacagtcagaaaactttttcagaggttttcctttcccactgagattgtcaaagtctccttttgccatggattcttgaatgaggtcctccactaaacgttctatagcttgcgttatcttttgctgtttgctctgtcttatatttttaacaattacactatcaggaaaatactggctttgtagtttctgcttttgatattccatcacttgttcagcagcacggtctgcccta

SEQ ID NO: 9053 - DNA, 509 bp, Homo sapiens
  MAP TO AC008462.5; EXPRESSED IN BONE MARROW, SIGNAL = 0.88; EXPRESSED IN HELA, SIGNAL = 0.93; EXPRESSED IN BRAIN, SIGNAL = 1.2; EST_HUMAN HIT: BI827744.1, EVALUE 0.00e+00
tgctgagaggaggaggcggcagcgtaggccccgtcccgcggcggcggcgagagcggcggctcctcctctgggccggcgggggcgggcgcgccgggactgtgcacgatgaagcagagcatgcagggcccgcggaagaagcagtcccggctccggggcgccgccggctgagggggcaccttggctggggtccggcggggcagcctgaggagagggcgccggcggcggcaccaactgcaacagcgaggcctcttctggctcgggcggttacgcggctccttcgagagaaggtggcccatatagaaggccccgaggagggggaccgggacgggagggagggagacccagagaggcgggctcccggcagcggggcaggccgctcgctggctcggcccccggaggggtcgcccttcctgcgcacacacacgcacacacgggcacacacgcgacggtggggggtgggcgtcagctgcgggccgccggagtgcccgacgggggctacatgctttgcc

SEQ ID NO: 9054 - DNA, 502 bp, Homo sapiens
  MAP TO AL035701.13; EXPRESSED IN PLACENTA, SIGNAL = 1.6; EXPRESSED IN BRAIN, SIGNAL = 0.99; EXPRESSED IN HELA, SIGNAL = 1.2; EXPRESSED IN BONE MARROW, SIGNAL = 0.9; EXPRESSED IN FETAL LIVER, SIGNAL =   1; EST_HUMAN HIT: BF327920.1, EVALUE 1.80e-01; NT HIT: AF084378.1, EVALUE 3.10e-02
ggccagaggcaatggcacagtatttctcaagtgcttaaaaaagaagtgactttcataaattctgtataccatgaaactatcctaaagaatgaaggggaaataaaatcattctctgaactagagaaattaaaagaagtggctgctagcagaagacccacttttaaagataggtaaagaatgttcttcagacataaaggaaatggtaataaaaaaagaatcttagagtgtcagtaaggaagatggaaaaatgagaacagcagacacttgagtacatacaatagactatcctttttctcatgagtgtaataaaccatatttgatgtttgaagcaattataatgccacctgatattcatgccaatatttagaagcatggaagttaatgggacctaaatggaagtgaggtttccacacttcattcaaagtggtaaaatgcagataccagtagacagttataaatcacaaatgcatattataacactcagaccagccaccagaaaaac

SEQ ID NO: 9055 - DNA, 508 bp, Homo sapiens
  MAP TO AC002326.1; EXPRESSED IN HELA, SIGNAL = 0.49; EXPRESSED IN BRAIN, SIGNAL = 1.6; EXPRESSED IN BONE MARROW, SIGNAL = 0.86; SWISSPROT HIT: P54253, EVALUE 5.00e-86; NT HIT: gi4506792, EVALUE 0.00e+00
acacacgctcaccctggggcccccctcccaggtcgtcatgcaatacgccgactccggcagccactttgtccctcgggaggccaccaagaaagccgagagcagccggctgcagcaggccatccaggccaaggaggtcctgaacggtgagatggagaagagccggcggtacggggccccgtcctcagccgacctgggcctgggcaaggcaggcggcaagtcggttcctcacccgtacgagtccaggcacgtggtggtccacccgagcccctcagactacagcagtcgtgatccttcgggggtccgggcctctgtgatggtcctgcccaacagcaacacgcccgcagctgacctggaggtgcaacaggccactcatcgtgaagcctccccttctaccctcaacgacaaaagtggcctgcatttagggaagcctggccaccggtcctacgcgctctcaccccacacggtcattcagaccacacacagtgcttcagagccactcccggtggga

SEQ ID NO: 9056 - DNA, 521 bp, Homo sapiens
  MAP TO AC011334.1; EXPRESSED IN PLACENTA, SIGNAL = 1.6; EXPRESSED IN BRAIN, SIGNAL =   1; EXPRESSED IN HELA, SIGNAL =   2; EXPRESSED IN BONE MARROW, SIGNAL = 1.1; SWISSPROT HIT: P07550, EVALUE 5.00e-99; NT HIT: AF022954.1, EVALUE 0.00e+00; EST_HUMAN HIT: AL553611.1, EVALUE 0.00e+00
acgaggtgtgggtggtgggcatgggcatcgtcatgtctctcatcgtcctggccatcgtgtttggcaatgtgctggtcatcacagccattgccaagttcgagcgtctgcagacggtcaccaactacttcatcacttcactggcctgtgctgatctggtcatgggcctggcagtggtgccctttggggccgcccatattcttatgaaaatgtggacttttggcaacttctggtgcgagttttggacttccattgatgtgctgtgcgtcacggccagcattgagaccctgtgcgtgatcgcagtggatcgctactttgccattacttcacctttcaagtaccagagcctgctgaccaagaataaggcccgggtgatcattctgatggtgtggattgtgtcaggccttacctccttcttgcccattcagatgcactggtaccgggccacccaccaggaagccatcaactgctatgccaatgagacctgctgtgacttcttcacgaaccaagcctatgccattgcc

SEQ ID NO: 9057 - DNA, 508 bp, Homo sapiens
  MAP TO Z84480.1; EXPRESSED IN HELA, SIGNAL = 1.8; EXPRESSED IN BRAIN, SIGNAL = 1.1; EXPRESSED IN BONE MARROW, SIGNAL = 8.8; EST_HUMAN HIT: BG468345.1, EVALUE 3.00e-43; SWISSPROT HIT: Q99439, EVALUE 5.00e-16; NT HIT: gi14765608, EVALUE 3.00e-45
ccatgtcgctgcagatgggctacacgcagggcgccaagcaaagcggccaggtctttggcctgggccggcagatacatgaccccaagttctgcccagaaggcacagtggccgacagggctccctcgggcgcgcaggctcgggggaggtccctgaatatcccccttactaccaggaggaggctggctactgaggctcccagcacgctctctccccatatcatctccccgtctgagtttctgggtttttctgtgttttcatctttttttttcttaacctgttcagtgctgccaatcaacccagggtctgtgagtggcggtgtgggatcagggaggtctttcttcccccttgccttggtccttcgcaggactgagccaccaggctgtggggtaaggggtcaaagccgtatccccatacgtgtagggtaaaggtccctgctggcacgtccaggctgtgggccgagcagtgctggggagaagagacctgggcttggagggacccagtccccgaa

SEQ ID NO: 9058 - DNA, 531 bp, Homo sapiens
  MAP TO AL359400.1; EXPRESSED IN BRAIN, SIGNAL = 1.7; EXPRESSED IN HELA, SIGNAL = 1.2; EXPRESSED IN LUNG, SIGNAL = 1.4; EXPRESSED IN BONE MARROW, SIGNAL = 1.6; SWISSPROT HIT: P14077, EVALUE 9.00e-06; NT HIT: AJ278581.1, EVALUE 0.00e+00; EST_HUMAN HIT: AA780058.1, EVALUE 0.00e+00
agctggcgcttgttccgggcaccctcagtcctgttgttggatcatctggttgggggcctctgacccagagaacctttgttctctggggcagtgcaccttccagtgattgccttggcatagcagacatggacgagggggcggcttgtttctcattggacaatcttttttaaagtgtcctagtaaaccacactgataagccctaccgggtgattggcctgctccattttctgtcctctctgaaccaccaaggtttgtttgtctgagggccatgactaaggctgcggtctttctctgatcttgcttttccttttgggcctgttcctcttggtccctgttatagaatactgaggttgccaggtttaataatgtctccaaattttgtttagggcccagggcttgcttttggaactttctcctgatatctgtggctgattgggtaataaacttatcttttagaatcaattgaccctcaagtgatttggttgacaggggagtatattttcttaaggcctcccatagccgctcgaggga

SEQ ID NO: 9059 - DNA, 505 bp, Homo sapiens
  MAP TO AC004616.1; EXPRESSED IN BONE MARROW, SIGNAL = 0.83; EXPRESSED IN PLACENTA, SIGNAL = 2.1; EXPRESSED IN BRAIN, SIGNAL =   1; EXPRESSED IN HELA, SIGNAL = 1.7; SWISSPROT HIT: P00966, EVALUE 4.00e-52; NT HIT: gi14740527, EVALUE 0.00e+00; EST_HUMAN HIT: BE379306.1, EVALUE 0.00e+00
gccctgcatcgcccacaaacaagtggaaatcacccagcaggaggggaccaagtatgtatcctacggcgtcatgggaaaggggaacgatcatgtcctgtttgagctcacctgctcactggccctcagattaaggtcattgcttcctggaggatgcccgagttttacagctggttcaagggccttaatgatctcatggaatacgcaaagcaacatcggattcccatcccagtcactctcaagaacccgtggagcatagacgagaacctcatgcatatcagctacgaggctggaattctggagaaacccaagtaccataagcacctccaggtctctacatgaagactaaggacctcaccaaagcccccaacaccactgacattctcgagattgagtccaaaaaaggggtccctgtgaaggtgaccaacgtcaaggatggcgccacccaccagacctcctaggagctcttcatgtacctgaaccaagctgcaagcaagcatggcctggg

SEQ ID NO: 9060 - DNA, 503 bp, Homo sapiens
  MAP TO Z54335.1; EXPRESSED IN BRAIN, SIGNAL =   1; EXPRESSED IN HELA, SIGNAL = 1.5; EXPRESSED IN LUNG, SIGNAL = 0.98; EXPRESSED IN HEART, SIGNAL = 1.4; EXPRESSED IN BONE MARROW, SIGNAL = 1.2; SWISSPROT HIT: P97436, EVALUE 1.60e+00; NT HIT: AF055441.1, EVALUE 4.80e-01; EST_HUMAN HIT: BI548605.1, EVALUE 1.80e-01
ctgaaggacgggctgccaggcctggctgtgtcatttggagaaaccaggcctggaatgctccagcctcgtccggcaggcaggggtgactaaagactgtacctgtcccgcctgcctgcacagggtggtttttatctggagaaagcacttggccccatgcagacacactcagtacccccccgtccccacactgatgtccttcccttaacacgggcctggaacccgcagagggtccagccagctccggaactaaactaatatggagaaaccccccaacccgaagacagagaccaaataaaccttcggaggaggatagaagaaggtggcaatggcgcttctgtggggcagcctggaaagtaatcctctctcccaggcacacggcatcctgacggtgggacaagaagaagatgcctggagaagagcacagagcacgtgagagccccggaaacccgcgcagagcacgcgagagtcctggaaaccaacccacacagagcacgcgagagccc

SEQ ID NO: 9061 - DNA, 501 bp, Homo sapiens
  MAP TO AL132780.1; EXPRESSED IN BONE MARROW, SIGNAL = 1.1; EXPRESSED IN FETAL LIVER, SIGNAL = 1.1; SWISSPROT HIT: P75054, EVALUE 2.40e-01; EST_HUMAN HIT: AA333559.1, EVALUE 2.00e-78; NT HIT: gi16189730, EVALUE 4.00e-88
tctgtgcacggcaggcatcctcgccaggagaggcagagtccatggagcagccgagacagctgtggaagagaaggtgccatgcggagctactgagagagagggaagggcaccccatcactacacacagcaaaaaatgaccttctgccaaagaagctgatggttcaggaagaaaatagagctgactatccctgaaggaaaaggaaacgtggtactgttttgctttatcacaaatacaaacaaaaggtttaaagatggaaagaaaagaacagaaaggaaaaagagtgaaaagccaggaaaagcacctaggaggaatagccctctgctgccatactcacaggattgagcaggggggccgcctcgctggcagccagcgtgcaccctgggagccgcatgtccctctgagttgctgggaagcccaaaggcccaggccccactgaggctgctcccagctgccgcagctcctcaatcaccacctgcacgccgctgcccacgctgtcacac

SEQ ID NO: 9062 - DNA, 520 bp, Homo sapiens
  MAP TO AF002994.1; EXPRESSED IN HELA, SIGNAL = 2.8; EXPRESSED IN BRAIN, SIGNAL = 0.99; EXPRESSED IN LUNG, SIGNAL = 0.94; EXPRESSED IN BONE MARROW, SIGNAL = 1.1; SWISSPROT HIT: P43360, EVALUE 9.00e-06; EST_HUMAN HIT: BG179514.1, EVALUE 0.00e+00; NT HIT: U82671.3, EVALUE 0.00e+00
aaaccaagggccccacctgccccagaacacatggactccagagcgcctggcctcaccctcaatactttcagtcctgcagcctcagcatgtgctggccggatgtaccctgaggtgccctctcacttcctccttcaggttctgaggggacaggctgacctggaggaccagaggcccccggaggagcactgaaggagaagatctgtaagtaagcctttgttagagcctccaaggttccattcagtactcagctgaggtctctcacatgctccctctctccccaggccagtgggtctccattgcccagctcctgcccacactcccgcctgttgccctgaccagagtcatcatgcctcttgagcagaggagtcagcactgcaagcctgaagaaggccttgaggcccgaggagaggccctgggcctggtgggtgcgcaggctcctgctactgaggagcaggaggctgcctcctcctcttctactctagttgaagtcaccctgggggaggtgcctgctgccgagtca

SEQ ID NO: 9063 - DNA, 554 bp, Homo sapiens
  MAP TO AC007676.19; EXPRESSED IN HEART, SIGNAL = 1.5; EXPRESSED IN BONE MARROW, SIGNAL = 2.1; EXPRESSED IN LUNG, SIGNAL = 2.2; EXPRESSED IN HELA, SIGNAL = 3.4; EXPRESSED IN PLACENTA, SIGNAL = 1.7; EST_HUMAN HIT: BF982442.1, EVALUE 0.00e+00; SWISSPROT HIT: Q14585, EVALUE 5.00e-74; NT HIT: gi13652777, EVALUE 9.00e-09
ggcctttccgcattccttgcattcatagggtttctcgccagtatgagttttctgatgttgaaagagttttgaaccagtagtataggtcttcccacattgcttgcattcaaaaagtttctcaccagtatgaatattctgatgccgagtaagatttctatacaaagtaaaggttttcttacactccttacattcatagggttttccacctttatgaattctctgatgtagaagaaagtatgaggcagtggtatagcccttcccacattctttacactcatatggctttttaccagtgtgaactctctgatgtacagtaagctggtgacctcttctaaaggcctttccacatttctcacatatgtatggcttctcatcagtatgaaactgcccatgttcaacaagatttgagcgcctactaaaagtcttcccacattccttacatttatatggtttttcgccagtatgaactctctgatgaattctaagatgtccaccttgactaaaggccctcccacactcctgacattcatacggcttcccaccagtgtgaattc

SEQ ID NO: 9064 - DNA, 546 bp, Homo sapiens
  MAP TO AC002556.1; EXPRESSED IN PLACENTA, SIGNAL = 3.2; EXPRESSED IN BRAIN, SIGNAL = 2.4; EXPRESSED IN HELA, SIGNAL = 1.5; EXPRESSED IN LUNG, SIGNAL = 2.4; EXPRESSED IN HEART, SIGNAL = 2.7; EXPRESSED IN BONE MARROW, SIGNAL = 2.6; SWISSPROT HIT: Q15620, EVALUE 2.00e-40; EST_HUMAN HIT: AA909905.1, EVALUE 8.00e-07; NT HIT: AF282280.1, EVALUE 2.00e-83
agcagggggttgcagatggccacatagcgatcataggccattgataccaacacatagcactcagaattgacaaagaaacagaagaaaaatagctgagtcatacatcccacataagagatgatactttctgaaacaaagtcattcagcattttgggggtaaacacacaggaataacagagatctataaaggacaagttgaagaggaaaaagtacatgggggtgtgaaggctaggatttatcccaattaaggtgatcaagcccaagttgcccaccacagtgaacacatagatccctaagaatagaaggaaaagagggagctggagctctggctgttctgataatcccacaaggataaactcagtcactgaggagctgtttctcagagtcattctctcttggcgagctgtctggggaagcagagggcaaaacacaaagagtcatgacaggcacaagcatggctaagggaagaagactctagtggaccagccagtgtgcagatgccctctcttccatcctccctcatctacacacctccccaccctgagg

SEQ ID NO: 9065 - DNA, 506 bp, Homo sapiens
  MAP TO AP001698.1; EXPRESSED IN BONE MARROW, SIGNAL = 0.91; EXPRESSED IN FETAL LIVER, SIGNAL = 0.99; EXPRESSED IN HELA, SIGNAL = 0.61; EST_HUMAN HIT: AL560029.1, EVALUE 1.10e-02; SWISSPROT HIT: Q00492, EVALUE 3.60e+00; NT HIT: gi13385385, EVALUE 1.20e-01
gcgcgagcgctgtgaagatgcgaggaggtggaacaatgaatttatagcggcatgccatcctgcaatggcaatttcaacagttcgtcactgcacgctgcctcttaaagggagagcttcccccaccactcccacccttcccagtccgcgcctaatcagatgggggagggcaaaagaggagggtgatcgaggaaagggagacgaagtaggaggaagggactgggacccggcgaggtggtaggaggggagaggggaaaataaaaagtaatggggcaagaaaaacagatttccttggccacttttaaagccacagcggctccgggtctgtctgatatttcacaaccaattggggttggctaaccttggcttacctcatctcctgaacgggtgttttggttaaagttattgagacgtttcaagtctctccctgcctccttcttgcctgcttttctcgccctcggtgggaagttcctgccgcaagtttttcccctttgcacacccgtgcgctc

SEQ ID NO: 9066 - DNA, 513 bp, Homo sapiens
  MAP TO AC005664.1; EXPRESSED IN BRAIN, SIGNAL = 1.2; EXPRESSED IN HELA, SIGNAL = 0.73; EXPRESSED IN BONE MARROW, SIGNAL =   1; NT HIT: gi13647481, EVALUE 0.00e+00; EST_HUMAN HIT: BE466225.1, EVALUE 0.00e+00; SWISSPROT HIT: P07901, EVALUE 2.80e+00
gggcacacactgccaaggagcgtaactcagcagcacctgctgccccacgcgctagatcagggatgcagggcctacccatgggccaaacttttcattaggaaactttaaaaatctggactccttacatctttctcttctccacattaacattattccacctcagaggggattttggtttttgttttttttttttttaatttccctgctttcaaaagatgctgcaattcccaaatctctctttgggttttgctaagagccctctagaggaggggctgccaacatacctcgtaggggaaattcaaggcctcttcatccactctgtctctctgaacgattgctttagccgtgaacccgcctgctccttcttcatctagctccaaattgtcagtaaaatcttctaactcatcgagcactgcatactccactctcttttcctgatccagctcattctcctcatccttcttatcagcactctcaccccctatgcctaccccgtcaccaacactcccgcca

SEQ ID NO: 9067 - DNA, 548 bp, Homo sapiens
  MAP TO U95626.1; EXPRESSED IN HELA, SIGNAL = 1.4; EXPRESSED IN BRAIN, SIGNAL = 0.99; EXPRESSED IN PLACENTA, SIGNAL = 2.1; EXPRESSED IN LUNG, SIGNAL = 1.5; EXPRESSED IN BONE MARROW, SIGNAL = 1.4; SWISSPROT HIT: P51677, EVALUE 1.00e-11; NT HIT: gi14736672, EVALUE 0.00e+00; EST_HUMAN HIT: BI819787.1, EVALUE 0.00e+00
ccgtggcacctggcacactgctaagcacttacatgcttaacaactagattgggaatggtgctgctctggggaagtgggcacacgttaaagaaatgtttatttcagtcttctgaaatagggaattactctggctaaaatgtagctccagaaagggaaagtggggctgtatgaatccaggtccagtttgttgtttcctccaggataaggcagctgtcggaggggaaaatcatctcccatttctccacagggcagtctgaagatggccaattacacgctggcaccagaggatgaatatgatgtcctcatagaaggtgaactggagagcgatgaggcagagcaatgtgacaagtatgacgcccaggcactctcagcccagctggtgccatcactctgctctgctgtgtttgtgatcggtgtcctggacaatctcctggttgtgcttatcctggtaaaatataaaggactcaaacgcgtggaaaatatctatcttctaaacttggcagtttctaacttgtgtttcttgcttaccctgcccttctgggctcatg

SEQ ID NO: 9068 - DNA, 500 bp, Homo sapiens
  MAP TO AL117328.5; EXPRESSED IN BRAIN, SIGNAL = 1.2; EXPRESSED IN HELA, SIGNAL = 1.2; EXPRESSED IN LUNG, SIGNAL = 1.2; EXPRESSED IN BONE MARROW, SIGNAL = 1.1; EXPRESSED IN FETAL LIVER, SIGNAL = 0.94; EST_HUMAN HIT: BE250745.1, EVALUE 0.00e+00; SWISSPROT HIT: P03010, EVALUE 2.00e-02; NT HIT: gi11418333, EVALUE 0.00e+00
atcagccgggggaagaagccgactaacttgggtaccagctgtcttctgagacatttacagcggttccatagcaacgtgctgaaaactgaggtctcggagacggctcggccctcctctccggacacccgggtgccgcggggcacagaattatcaggcgcttcctcttttgatgacaccaatgagaagttttacgattctcacccagttgccaaaaaaatcacaagtctcatagctgaaatgattgcacttgacctccagccatattcttttgtagacaacgttggctttaacaggctgcttgaatacttgaaacctcagtactccctccccgccccttcctacttctccaggacagctatcccaggtatgtatgataatgtgaagcagataattatgtcccaccttaaggaagctgagagtggtgtgatccacttcacgtctggaatatggatgagtaaccagacccgtgagtacctgaccctcacggcccactgggtttc

SEQ ID NO: 9069 - DNA, 530 bp, Homo sapiens
  MAP TO AC004922.2; EXPRESSED IN HELA, SIGNAL = 1.4; EXPRESSED IN LUNG, SIGNAL = 1.1; EXPRESSED IN BONE MARROW, SIGNAL = 1.2; EXPRESSED IN BRAIN, SIGNAL = 1.2; EST_HUMAN HIT: BE258271.1, EVALUE 5.00e-73; SWISSPROT HIT: P42704, EVALUE 5.70e-01; NT HIT: gi14781926, EVALUE 3.00e-73
ctgggagacctggagggggccaaggcgctgttgccggtcctggcaaagaggggcctcgtccccaacctgcagacattctgcaacctggccatcgggtgccacaggccgaaggacggtctacagcttctcacagacatgaaggtgagtggactcgggcctgggcaggacacccatggtgctcaggagcactctgcagctcaggaggaaagtttgaggggtctgcagaccccccacctggagaggatgaactgtgcatggggcaaagagagtggggtcaatgaccttctggtctttggtcccattttgggggaagcagaccccagtgagtgcttcagggctgggcgtagagacacacggatgttcccatccggaagaaggtggccgtgggttgacacagggctgggcacaggcctcggccccaacactctagaggtatggcagggattctcagaattcctgaggggccgtgggcagttttcaaagcccccgaggtctgtgcctcccacctaacccccattggaagtgctgcg

SEQ ID NO: 9070 - DNA, 514 bp, Homo sapiens
  MAP TO AC002494.1; EXPRESSED IN BONE MARROW, SIGNAL =   1; EXPRESSED IN BRAIN, SIGNAL =   1; EXPRESSED IN HELA, SIGNAL = 2.1; EST_HUMAN HIT: AA715046.1, EVALUE 1.00e-61; SWISSPROT HIT: P98066, EVALUE 2.10e+00; NT HIT: AL163268.2, EVALUE 1.00e-63
tgggagggacccagtgggagataattgaatcatggggacagttacctccatgctgttcttgtgatagggagtgagttctcatgagatctgatggttttataagaggcttttcccccatttcactctgcatttctccttccttccgccatgtgaaggacatgtttgcttccccttccaccgtgattgtaagtttcctgaggcctccccagccatgaggaactgtgagtcaattaaacctctttccgttataaattagccagtctcaggtatgtccttacagcagcttgagaacgggctaatacaaccaccatcaccttcacaactactacaatcacaaaaaccaccaccaccatcaccatgaccatcatagtgaccaccagcaccactttcaccacaactgtcaccacaaccaccaccattgccaccatcaccaccacaatcactactaccatcactaccactaccacaaccatcaccaccactaccaccattaccatcgccatcaccacaacca

SEQ ID NO: 9071 - DNA, 522 bp, Homo sapiens
  MAP TO U34879.1; EXPRESSED IN HELA, SIGNAL = 0.74; EXPRESSED IN BRAIN, SIGNAL = 0.93; EXPRESSED IN HEART, SIGNAL = 1.9; EXPRESSED IN BONE MARROW, SIGNAL = 1.6; NT HIT: U34879.1, EVALUE 0.00e+00; SWISSPROT HIT: P54802, EVALUE 2.00e-36; EST_HUMAN HIT: AW205518.1, EVALUE 0.00e+00
ctcgctggcggcttttcctggaggcgctggttgacagtgtggcccagggcatccctttccaacagcaccagtttgacaaaaatgtcttccaactggagcaggccttcgttctcagcaagcagaggtaccccagccagccgcgaggagacactgtggacctggccaagaagatcttcctcaaatattaccccggctgggtggccggctcttggtgatagattcgccaccactgggccttgttttccgctaattccagggcagattccagggcccagagctggacagacatcacaggataacccaggcctgggaggaggccccacggcctgctggtggggtctgacctggggggattggagggaaatgacctgccctccaccaccacccaaagtgtgggattaaagtactgttttctttccacttaaactgatgagtcccctgggtctgtcaaaatgagaaggtcactgctgccacgcttgggaggactcagggctatagcatggccctggggtgggacctgtt

SEQ ID NO: 9072 - DNA, 503 bp, Homo sapiens
  MAP TO AC004797.1; EXPRESSED IN HELA, SIGNAL = 0.48; EXPRESSED IN BONE MARROW, SIGNAL =   4; EST_HUMAN HIT: BI763812.1, EVALUE 0.00e+00; SWISSPROT HIT: P26664, EVALUE 8.10e-02
ccccatgcaccgcctcattcaggaggcccagaaggccgagcccagctcgttccgcgccagcgtggtgccctgggaaacggctgcagatgtgcgcctccacctgcaacaggtgctgaagtcgtgctgagtctggccgcctgcaggggggtacccgggccaacggcggagggggcggggaagggagattcggcaaagacagctttactactcccttttccctttggctttgttatgtccctctgggaatttctggaatctcgtatttgggggcttggggaagggggctcagagccgtccctatctattcagttaacccacctcggctgcctcccccactccactgtgcacggttgagttctggagtctgacccatcgcggggtggcgcgcaaaccttggaaggcagcagtatttcctggtcctcccaactgggaggaaggggcccccccggcaggtgagagaaggaacatctcccgccgctgtaacttgttgcctcgggctgcgt

SEQ ID NO: 9073 - DNA, 512 bp, Homo sapiens
  MAP TO AP000346.1; EXPRESSED IN BONE MARROW, SIGNAL = 0.9; EXPRESSED IN HELA, SIGNAL = 1.7; EXPRESSED IN BRAIN, SIGNAL = 0.91; EST_HUMAN HIT: AL520748.1, EVALUE 1.80e-01; SWISSPROT HIT: P48301, EVALUE 3.20e-01; NT HIT: AF000573.1, EVALUE 3.10e-02
tctcccagccaggcccttccctcccttccccaaactcacggcctcctcaccgctctctgcctcagattcaggactaatctcactatgtccttcatccctgtttgcatcaggggctgcaagaagctcagctcacctctccctcaaggccatgaatactccttttctgaccccatctgctgcaaccttttctccaagccctctggaggccctccctggaacattctttcctttcttgcttggactgaaacctagctctcccaagacctgcttcccctccctgggcatcctcctatgtggggctgctttcctccctccctgcccctcatgccttcactggagtgggacaggtccttacgaaccatctcctatgcccgttctgaggagccctctggttctgaatccctgcacaagctctgttgccctggccgtctctcctccccagcaccacaccaccagattgctcttgtagggcacgacgtggtctccatgtggctgagcccaaccgccagtcc

SEQ ID NO: 9074 - DNA, 555 bp, Homo sapiens
  MAP TO AC006549.28; EXPRESSED IN HELA, SIGNAL = 1.8; EXPRESSED IN BRAIN, SIGNAL = 1.2; EXPRESSED IN BONE MARROW, SIGNAL = 1.2; EXPRESSED IN FETAL LIVER, SIGNAL = 1.2; EXPRESSED IN LUNG, SIGNAL = 1.3; EST_HUMAN HIT: BI919029.1, EVALUE 2.00e-01; SWISSPROT HIT: P18835, EVALUE 7.90e-01
ccatcaccgccatcagcatcctcatcactatcatcatcaccatcctcatccctgtcaccatcatcgtcttcatcatcatcaccgtcatcatcactatcatcacaccagctctgtgcaaggcccttagataaagggcagcctggggctgacctcacacaaggataggaagccccaggtgagcaatgggtcagtactgggtcgacaccagatatccctgggcagaggccctggcccaaggatggggaagggaagaggacaagggatggggagtaagaaatgagggcccctcgcctccctgggacagcccaaggtgcagcctttcctcattcctggaggtttcaggatatccctgtgctgcatcctcccattgtacggtgagggggtgactgccaacccactcctcagatgaggcactgactgaggcaagtgccttgctggccaccttgcaaggccaggagacagtgcacacaatctggactccaagatctctgcccacccccatcttcatcaccactatccttatcaccatcatcatccccaggcgaccagagcaga

SEQ ID NO: 9075 - DNA, 510 bp, Homo sapiens
  MAP TO AF024533.1; EXPRESSED IN HELA, SIGNAL = 1.1; EXPRESSED IN BONE MARROW, SIGNAL = 0.74; EST_HUMAN HIT: BG828685.1, EVALUE 0.00e+00; NT HIT: gi15299631, EVALUE 0.00e+00; SWISSPROT HIT: P39880, EVALUE 4.00e-29
gggcctccctcgtggtcgtcgtcgcgggcgtcgtccgggcccggggtccccgagggcggcggctccgtctgctccgccggccgcggcacctcctcccgctcggcctctccctgagacttgggctcctcggtgtcggcgctgcctgggccctcagtggcctccacgccgtcgcagctgtcgccctccgagctgggcgccgcccggccgctgcgggccgagggtgagtcgctggcgcccgcctggccctgactcccggcctgaatttcctcaatgaacagttctctgcggatccgagacctacaagacaacaagcggcggggacgtgaggggggtgctgctggggaaagggcctctggtgctaccccagccagacccctctctctggggctcctgctccgtccagcctggaggcccctccgtgcccctccagcgaccctcgggccacggggcagcccctctccagagtcaccacccacccctccgggcctggccaggagccatcccagggct

SEQ ID NO: 9076 - DNA, 506 bp, Homo sapiens
  MAP TO AD000684.1; EXPRESSED IN BONE MARROW, SIGNAL = 1.1; EXPRESSED IN HELA, SIGNAL = 0.79; EST_HUMAN HIT: AL571917.1, EVALUE 9.00e-53; NT HIT: Y07661.1, EVALUE 0.00e+00; SWISSPROT HIT: P36858, EVALUE 3.20e-01
gcggccactgacagccactctcccccagctggtggccaaggctcctatgtacccctgcttcgggacacggacagcagtgtggcctctggtgagaatccatcgtcccgaagttggatgtgcctgtaagggagaggggtgggccaggatccatcctcccaaaccgaccaccacccccctgtccctagaagtccgcagtggctacaggattcaggccagccagcaggacgactccatgcgggtcctgtactacatggagaaggagctggccaacttcgacccttctcgacctggcccccccagtggccgtgtggagcggggtaagcaggagccttggggtctgagggcttttaaggtgggggggtgaaacatgtctccctgatacctgccgcagggactcttggtgcaaaccctggaccccgggctcctccagcagtcagtgacaccccccttccctgcagccatgagtgaagtcacctccctccacgaggacgactggcgatctcggc

SEQ ID NO: 9077 - DNA, 505 bp, Homo sapiens
  MAP TO AP000114.1; EXPRESSED IN HELA, SIGNAL =   2; EXPRESSED IN BRAIN, SIGNAL = 2.2; EXPRESSED IN BONE MARROW, SIGNAL = 1.8; EST_HUMAN HIT: BE303061.1, EVALUE 0.00e+00; NT HIT: AY026895.1, EVALUE 0.00e+00; SWISSPROT HIT: P18583, EVALUE 7.00e-49
gccatggctgccccagagtcttcagctatggctgtcctggagtcttcggctgtgaccgtcctggagtcttcgactgtgactgtcctggagtcttcgactgtaactgtcctggagccttcggttgtgactgtcccggagcctcctgttgtggctgagccagactatgttaccattcctgtgccagttgtttctgcgctggagccttctgtgcctgttctggaaccagcggtgtcagtccttcaaccttctatgattgtttcagaaccatctgtttctgtccaggaatcgactgtgacagtttcagagcctgctgtcacagtctcagagcagactcaagtaataccaactgaggtggctatagagtccacaccaatgatactggaatctagtatcatgtcatcacatgttatgaaaggaattaatctatcctctggtgatcaaaatcttgctccagagattggcatgcaggagattgcattgcattcaggtgaagaaccacatgctg

SEQ ID NO: 9078 - DNA, 518 bp, Homo sapiens
  MAP TO AC001643.1; EXPRESSED IN BRAIN, SIGNAL = 0.87; EXPRESSED IN HELA, SIGNAL = 0.3; EXPRESSED IN BONE MARROW, SIGNAL = 0.92; NT HIT: AF163572.1, EVALUE 0.00e+00; EST_HUMAN HIT: BG025899.1, EVALUE 3.00e-31; SWISSPROT HIT: P16442, EVALUE 3.20e-01
agtgcacccggtacccacgcatgaagaactcctcggctgactccaggaaggactggatgaaatgagtgtacctagtgatgatcacccggtcacccactgctacaccagcagcctgccagggtccccactgtgtgctggggtcagccaggctggggtccacttaccagctccccatctcaagatgtcactctgctctggccctctgggtcctcatttgtccaattcccaaaatgctagtaccagcctcttacggctgttgtaagcatgttcctggtagagattcttatgctcctaggccaggtgaacttttactgagcaatttctaagtgcccagcgacgttctaagaattcttatgatctttgatctgcataagcatgcccattttacaggcaggaacattgaggatcacagagaagaaagtagtgaagaagcaggtaagtggacgaatcaagggaaggcaagttgagctagatgctgggggcatggaggggggtgtggttgacacagccctgccccc

SEQ ID NO: 9079 - DNA, 544 bp, Homo sapiens
  MAP TO U82670.2; EXPRESSED IN HEART, SIGNAL = 1.4; EXPRESSED IN BONE MARROW, SIGNAL = 1.1; NT HIT: AJ306649.1, EVALUE 5.20e-01; SWISSPROT HIT: Q99102, EVALUE 3.00e-05
aggtcaggggcaagcagggccattgcccccactccaggcactttgtgcagtgaaaggtcccgggtgcgcagggccattgcccctactccatgcgcactgtgcgggaaggggtcacaggtgggcatgggcgttgcccctactccaggtgcactgcgcagggacaggtcacaggcaggcagggccattgcacctactccatccgcactgttcagggttgggtcacgggtgggcacaggcattgcccttcctgcaggtgccctgcaccgtgacaggtcaccggtgcgcagggccgttgctcccactccaggcaccctgcactgtgacgggtcacgaaaatgcacggccactggttctactccaggagccctgcccggcgacaggtcaggggtgagcaaggccactgcccctgctccaggcgccttgtgcagtgaaaggtcccgcgcacgcaggagcattgcccctactccatgtttactgtgcggggacaggtcatgggtgggtatgggcattgcacctactccaggcgccctgcttggtggcaaat

SEQ ID NO: 9080 - DNA, 505 bp, Homo sapiens
  MAP TO AC005618.1; EXPRESSED IN HEART, SIGNAL = 1.2; EXPRESSED IN BONE MARROW, SIGNAL = 0.88; EXPRESSED IN FETAL LIVER, SIGNAL = 1.1; EXPRESSED IN HELA, SIGNAL = 0.56; SWISSPROT HIT: Q9UN74, EVALUE 1.00e-36; EST_HUMAN HIT: BF325898.1, EVALUE 4.50e-02; NT HIT: gi14724436, EVALUE 0.00e+00
ccctggacagggaagagcagccacatcaccacctggtcctcacagctgtggatgggggcgagccctccagaagctgtaccacccagatcagggtaattgtcgcagatgcaaatgataaccccccagtatttactcaggacatgtacagggtcaatgttgcagagaacctgcccgctggctcctccgtattaaaagtgatggccattgacatggatgagggcatcaatgccgaaatcatctatgccttcatcaatattggcaaggaagtgagacaactgttcaagctggacagtaaaacgggggaactcaccactattggagaactggactttgaagagagagatagctacacaattggggtggaagcaaaggatggtggacatcacactgcatattgtaaagtacagatagatatttcagatgaaaatgacaatgccccggagataaccctggcttctgaatcccaacatatacaagaagatgctgagctggggactgccgttgc

SEQ ID NO: 9081 - DNA, 507 bp, Homo sapiens
  MAP TO AP001505.1; EXPRESSED IN HELA, SIGNAL = 0.59; EXPRESSED IN BRAIN, SIGNAL = 0.81; EXPRESSED IN BONE MARROW, SIGNAL = 0.94; EXPRESSED IN FETAL LIVER, SIGNAL = 0.98; NT HIT: AL163301.2, EVALUE 0.00e+00; SWISSPROT HIT: P24639, EVALUE 4.00e-12
tgtggagggtccttgccccctgaggagaggggaagagttgagctgggtgggccagagccccctgtactcctgggtgctccccagcctacactcagctctgggtcctgaccctgtctccctaggcagccggttgcatcccctctgtgcagaatgtgaacccccaagcaaggccctgctccccctgggccccagaagcccctgggggccatagggtcctgaggagtgaccgtctgtctgggggtcacagcgtcctgcggagggaccgtctgtctgggggtcacagggtcctgaggagggaccgtctgtctgggggtcacagggtcctgcggagggaccgtctgtctgggggtcacagcgtcctgcggagggaccgtctgtctgggggtcacagcgtcctgcggagggaccgtctgggggtcacagggtcctgaggagtgaccgtctgtctgggggtcacagcgtcctgcggagtgaccgtctgtctgggggtcacagcgtcctgcggag

SEQ ID NO: 9082 - DNA, 509 bp, Homo sapiens
  MAP TO U82670.2; EXPRESSED IN HEART, SIGNAL = 1.2; EXPRESSED IN BONE MARROW, SIGNAL = 0.78; EST_HUMAN HIT: BG818679.1, EVALUE 0.00e+00; NT HIT: gi14757498, EVALUE 0.00e+00; SWISSPROT HIT: O75154, EVALUE 1.60e-02
tcagaggcccacacgggagccatgtggaggactccgcgggtgggggaccgctcttgggagacccaggcagctgacacccttgagagggcctctttccccctgcctctcccaacccaggacaaggagtggggggcagacatcttcaggtgcccccacccaggccacagctggccccgatcccgatgtggggtgagggaccggccctggcccggcctccgcctgtctccagggccctgctgcctgagaggaggagaggaggccccggggccctcggagcctatttgcccggggaggactcgcgctgggctgcctccccagccccaacctagttatcacattcctccaggacgggcttgagcccctcctggaggagctcctcagcctcctggcctcctgcctggaggaggccctctggctcccgaccaggacctcctgggaccgcctctactttagtgctggctctggcaacagcctgggcaccagcccgggcaccggccccttcctgtgtc

SEQ ID NO: 9083 - DNA, 530 bp, Homo sapiens
  MAP TO AC011234.1; EXPRESSED IN PLACENTA, SIGNAL = 1.5; EXPRESSED IN BRAIN, SIGNAL = 1.2; EXPRESSED IN HELA, SIGNAL = 1.5; EXPRESSED IN BONE MARROW, SIGNAL = 1.2; EXPRESSED IN LUNG, SIGNAL = 0.94; EXPRESSED IN HEART, SIGNAL = 1.9; EXPRESSED IN FETAL LIVER, SIGNAL = 1.1; EST_HUMAN HIT: AL520970.1, EVALUE 4.00e-27; NT HIT: AJ010540.1, EVALUE 2.00e-56; SWISSPROT HIT: Q12809, EVALUE 4.00e-06
gtccacgtccaccaccacggcccccggggcgcccgcgccgcccgcgccgcccgaccgcaccgacgactcccgggccgtcagcgccagcagcgcgggcagcttcaggcggaaggtcttggcgcggcctgcgggagaggagaggcacgtggtcgtggggatcgcgagcagccccggagcgggcaaggcctgggaaatggacccccagccgctgggtaagggaaggaggggaacgggcaaccccccatccccacttccattcacaatattttgacctcgagtctcaaaaatcattctagaatccagtcatcataaaccgccatatctgaagtgacacttcagggcggattccataaatcatccctgtctctcacaccggccgctgggtgccagcgtccccattttagacatgaggaagtgtggacacaaaggcgtcatgtcactctctggaggtcacacagccagtgcgtggggcctgcgcctaagtgggcgacacaatgccaggggccctgccgtcaggggtggcatccgat

SEQ ID NO: 9084 - DNA, 537 bp, Homo sapiens
  MAP TO AC008174.2; EXPRESSED IN HEART, SIGNAL = 1.3; EXPRESSED IN BONE MARROW, SIGNAL = 1.2; EXPRESSED IN LUNG, SIGNAL = 1.2; EXPRESSED IN BRAIN, SIGNAL = 1.1; SWISSPROT HIT: Q9QXZ0, EVALUE 2.90e+00; NT HIT: gi15616630, EVALUE 5.10e-01; EST_HUMAN HIT: BG059274.1, EVALUE 7.50e-01
tgctggagcccacagaaatttggtcttttgtctttgtgttatagattggtaaactgctgaggctatgcttgtttggaaaaccatatttacttttagcagtaatgtgttctttactgtttgatagagtttcttcactatctggagtgggaatttgggacagaaagcatagctgtagtttttcaagtagcatttcaacaatttcccttccaaacatattaatttgtgctttagtatcctcggctctagtagaagctcctttaaaatgattataaaacctgctttcacaattctcaagagggggcaaatttaaaagtgaaagagaatattctaattcttttgcttttattgaaatttcagtcaaaacattttcagctatcatcaatagcttacatttttcattttccttgtcatttgattctgtttgccacttgtcaaacaattttttaaatataccttctctaggaaaaatgtgctctagctgtgaagaaacattctccaagtaaaaacatgcttgttgtttaggaagggatcctgtgc

SEQ ID NO: 9085 - DNA, 505 bp, Homo sapiens
  MAP TO AC011536.5; EXPRESSED IN PLACENTA, SIGNAL = 1.5; EXPRESSED IN HELA, SIGNAL = 0.71; EXPRESSED IN BONE MARROW, SIGNAL = 0.81; NT HIT: gi16163229, EVALUE 7.00e-68; EST_HUMAN HIT: BG004833.1, EVALUE 6.00e-63; SWISSPROT HIT: P27692, EVALUE 9.00e-03
tgcatcggtttgccgtcctgcaggagaacgtggcctggggtaatgggcgagtcagtgtgaccagggtgatcacggtccaggtggcaaacttcaccctgcggctggagcagagacagtggaaggtcacggtgagagcagatggggagcagggggcgaggggcctgtgggtaggtggggcacaggcagcgctcagcccaggagttgggggcacaagagatgagagtgcatgtgcgaggcctggggtctctgaggacagaagatgccagtcagaaccgagtgggaagccaatgagggaggtgtcatcagggacttgggagctgctcccccatctctgtccctcagtctccaccctctctttacctccatgcattgacttttctctccaaatttctcccaccctctcctccctcccactccatcctctctccacctcagtcctggattctgccctactcacctccctagtctgccacttattggcaggacgtggtgccatcagaggttg

SEQ ID NO: 9086 - DNA, 500 bp, Homo sapiens
  MAP TO AE000658.1; EXPRESSED IN BRAIN, SIGNAL = 1.8; EXPRESSED IN HEART, SIGNAL = 1.9; EXPRESSED IN BONE MARROW, SIGNAL = 2.2; EXPRESSED IN FETAL LIVER, SIGNAL = 2.1; EXPRESSED IN LUNG, SIGNAL = 1.9; EXPRESSED IN PLACENTA, SIGNAL =   2; EXPRESSED IN HELA, SIGNAL = 1.3; SWISSPROT HIT: Q15615, EVALUE 3.00e-32; NT HIT: AE008683.1, EVALUE 0.00e+00; EST_HUMAN HIT: AI809240.1, EVALUE 2.00e-04
tgtcctctgggaggctggtggatgggcgggaatagatgaagatgcagtgtcccaggaacagtgtaactacagtgagatgggctgcacaggtggacagggccttccacttgcccttggagatctgctgcctcagactcaccaggatgactgcgtaggacaccaccaggaccacaaaacagaccacggagatcaatccactgttggagacaatgaggatctcaaggacgtgggtgtgtcaatgcaggccagcttgatcacctgaggtacatcacagaagaagttgtcaatctcatcaggaccacagtagggcagcttgatggtaagggaggtgagggctatggagtggatggtccctcctgtccagagggccacagccagcagcacacataccttccagttcatcactatcatgtactgcaggggtttacagatggccacataccgatcataggccatgacggtgaggaggaagatctctgtgcaggcaaagaggtgcagga

SEQ ID NO: 9087 - DNA, 519 bp, Homo sapiens
  MAP TO AL109741.3; EXPRESSED IN BONE MARROW, SIGNAL = 1.1; EXPRESSED IN LUNG, SIGNAL = 5.9; EXPRESSED IN PLACENTA, SIGNAL = 1.5; EXPRESSED IN BRAIN, SIGNAL =   2; EXPRESSED IN HELA, SIGNAL = 1.1; NT HIT: gi13628824, EVALUE 0.00e+00; EST_HUMAN HIT: BI762638.1, EVALUE 0.00e+00; SWISSPROT HIT: P21453, EVALUE 1.00e-27
tgaggaggggccaaatgaaccctttaggagcttgacaatgctagacctttggctcagtgcaaaatcaaagctccaggggggtagaaaatatattccaggccgggacctgatctccacccttcccagtgcattgttcacaggaactaactctacccaccaacacccgacaccaccaggctgttcgtattctcccccttcctccctctggcttgcagcagctcctccctggcagcagtcgaagcccagagatttttttccaaacactggggtggccagcgaccaagtaaagagcgcttccggtgggtggacagcttccagttctaggaagaagagttgacgtttccagaagacataatggtctctgggttgtccccttcgtctttctgggggtgggaggaattgtccgatttgctgcggctgaattccatgccggcgatgatgggtcgcttgaatttgccagcagagtctccgctcgggcacttgcagcaggacatgatccggatgaaggcccgacgcatc

SEQ ID NO: 9088 - DNA, 542 bp, Homo sapiens
  MAP TO AC005678.1; EXPRESSED IN HEART, SIGNAL = 1.4; EXPRESSED IN BONE MARROW, SIGNAL = 1.1; EXPRESSED IN FETAL LIVER, SIGNAL = 1.1; EXPRESSED IN HELA, SIGNAL = 1.6; EST_HUMAN HIT: M86009.1, EVALUE 1.00e-101; SWISSPROT HIT: Q15776, EVALUE 7.70e-01; NT HIT: gi14760699, EVALUE 1.00e-105
ggtgcatggccctgccttacaattcttagaacttagaacgaccacatacatccccagcatagtcctggatccaaccacatacatccccagcatagtcctggatcctcaccgtcttctacccactccctccactcccagtgtgtacctttccaatggccccattcccattcttaggtctctctcctccccagcactcctgttctccccttttattcccatccttattctagcacttaaatcctcatcccaggcatttatagacctctgtaattcttgcctccctggtactcatcacagagctttccttccatggcataagccacagttgccagttatttgttgtttcaggtgatgaaaaacagactaagagcagggacttgcctccagctgaggagcttccagaaaaggagcatgggaagatatcgtgccacctgagagaagacattgcccagattcctacatgtgcagaagctggtgaacaggagggcaggctacaaagaaagcagaaaaatgccacaggagggaggcggcacatctgccat

SEQ ID NO: 9089 - DNA, 516 bp, Homo sapiens
  MAP TO AC005670.1; EXPRESSED IN HELA, SIGNAL = 0.77; EXPRESSED IN BONE MARROW, SIGNAL = 0.85; NT HIT: gi12740329, EVALUE 0.00e+00; EST_HUMAN HIT: BG988474.1, EVALUE 0.00e+00; SWISSPROT HIT: O60309, EVALUE 9.00e-71
tgcaacccaacaggaggccccaattgagcctccagttcctcctatggagcatgaactttccatcagtgagcagcagcagccagttcagccttctgagtcttctggggaggtcgaatcttctctgacccagcaggagaccccaggtcagcctctagaacatcatgaagtcacagtttcacctccaggtcaccatcaaactcatcatttagattcacccagtgtctctgtgaagcctccagacgtgcagctcaccatagcagcagagcctagtgcagaggtgggaaattctttagtccaccagcaggctacagctcagctctcagggtcaggtaatgatgtagaacctcccaccatccagcacgggggcccacatctgcttccagagtcatcggaagaagctggacctttagcagttcaacaggagacttcatttcagtctccggaacctattaataatgagaacccctctccaacccagcaggaggctgcagctgagcatccacagaccgctgagga

SEQ ID NO: 9090 - DNA, 532 bp, Homo sapiens
  MAP TO U63963.1; EXPRESSED IN HELA, SIGNAL = 0.77; EXPRESSED IN BRAIN, SIGNAL = 0.96; EXPRESSED IN BONE MARROW, SIGNAL = 0.9; NT HIT: U63963.1, EVALUE 0.00e+00; EST_HUMAN HIT: BF569404.1, EVALUE 3.00e-74; SWISSPROT HIT: Q12766, EVALUE 3.00e-22
tggggtcaccaggattgggctgtaggcctgcatggacgatgcgccgcgtggcagtcttggtgactgggtgctggatagagtgctcagtttctgtcatgtccacagtataatgctggtccaagagctctgggcaggacacactctagaagagaaatgagaatgcattttgacaagaaggaatgactaaggtggaacccatctggtgatgagaacactctaggctcagccagccctctttgaatcctaacatcaccatgtactgtgtctcctaggccaacccctgcccgccagtgcctccatttcctcatgtgagaacagggacagtaacagtggccaccttccagaacagatgttggattacttatgctattattgcccccggtccattcaggccagtggctgcaggggagcagaaagatcaggctctgactgaggttaagacacttttctggagtccccagcatgctcatggagccagtgagccccagggagtaatgacaataatgactcctccgaggcaaagccagaggcc

SEQ ID NO: 9091 - DNA, 538 bp, Homo sapiens
  MAP TO AP001101.1; EXPRESSED IN HEART, SIGNAL = 9.4; EXPRESSED IN LUNG, SIGNAL =   6; EXPRESSED IN BONE MARROW, SIGNAL = 1.3; EXPRESSED IN PLACENTA, SIGNAL = 4.9; EXPRESSED IN HELA, SIGNAL = 0.67; NT HIT: gi14780810, EVALUE 0.00e+00; EST_HUMAN HIT: AL079675.1, EVALUE 0.00e+00; SWISSPROT HIT: P12110, EVALUE 3.00e-33
acctcaacttgcgggcgctgtgcgaccgcgacgtcacagtgacggccatcggcatcggggacatgttccacgagaagcacgagagtgaaaacctctactccatcgcctgcgacaagccacagcaggtgcgcaacatgacgctgttctccgacctggtcgctgagaagttcatcgatgacatggaggacgtcctctgcccgggtgagcgtgtgggcgcggggcagtcggccgaggagcagcaggccccagccgctgtctagcgtgagccccagggacacccctcacctgagggatgaatgtgcagcccaggatcttgggctgtgggtgggaaggggtcgggccctctcggggctgcagggcagaggccagctgcaccctgagcctgtctaggcagatcagtgaacggccgctgagggttcgctagggactgaccctggcctggcccggcctctctcctctcttccagaccctcagatcgtgtgcccagaccttccctgccaaacaggtaatgcagggcaccctgagccaccaccccaga

SEQ ID NO: 9092 - DNA, 595 bp, Homo sapiens
  MAP TO AC007282.2; EXPRESSED IN FETAL LIVER, SIGNAL = 0.94; EXPRESSED IN HELA, SIGNAL = 2.2; EXPRESSED IN BONE MARROW, SIGNAL = 0.96; EST_HUMAN HIT: BF366455.1, EVALUE 8.40e-01; SWISSPROT HIT: Q20875, EVALUE 4.40e+00
tcagtctcctaccctccacaaagggagaaaatcaactttaattattttaaaatatttgaaattgaaataaaaattttaatggaaaaatttcaaattcttaattctgacactattttgtgtccaagtgctttttgctacttggaatatttttaaatacttaaaaagccacccataaatagtttatttttaacaacgcaatttctggtgttagcttcatttccttagacaatggctaacatcaggatccaagtctcatttacctaaatatttgctacattcatagcaatgtaggaaattttttttttttaattcaagcaagtagtgaaaagtactgaaatgaaactcatgaaaagtatcataaatattctctaaaaactgacttgggggcatatatcatctacctttaagtctgagagtttcaacaatgataatgagctccacccagtccttaacatgtcacagtttcatcttgctttttgatgcatactgtataatgcctcagaaatggatgagggagaaccatatagaaaactcaggattacagtaaaaattcagtgtaatattcataagcagctttttagctctgggatcaagc

SEQ ID NO: 9093 - DNA, 519 bp, Homo sapiens
  MAP TO AC025249.2; EXPRESSED IN BONE MARROW, SIGNAL = 0.84; EXPRESSED IN HELA, SIGNAL = 0.86; EXPRESSED IN BRAIN, SIGNAL = 0.91; NT HIT: AF325198.1, EVALUE 1.20e-01; EST_HUMAN HIT: AA569274.1, EVALUE 1.80e-01; SWISSPROT HIT: Q9H344, EVALUE 3.00e-16
tggctagaacgatcagaggagtggtcacatgatataaacatagctgccagcaaagggccctagagaagaaagattgtacactaaggcaaattcaaaaacaaaccaaagtgcccactacagcagttgaaatctgacattttttaatcaatttaaatgagccattcatagtttcatattatataaatactcatcagttttctgtacaataaaattattttaattcgatcaatacacaaatgaatgtagcttttttttgtttaagctctcatctcgttctgtacttttaattcatcacgtcaactttgcagaatatcacctccacttccatcattttcctgctcactggtgttcctgggctggaagccttccacacctggatctccattcccttctgcttcctctctgtaactgctctcttgggaaacagcctgatcctcttcgctaccatcactcagcccagcctccacgaaccaatgtactatttcctctccatgctgtccgccactgacctcggcctgt

SEQ ID NO: 9094 - DNA, 586 bp, Homo sapiens
  MAP TO AC002053.2; EXPRESSED IN BONE MARROW, SIGNAL = 6.6; EXPRESSED IN LUNG, SIGNAL = 7.4; EXPRESSED IN HELA, SIGNAL = 1.5; EXPRESSED IN PLACENTA, SIGNAL = 5.7; EXPRESSED IN BRAIN, SIGNAL = 4.8; NT HIT: gi16162115, EVALUE 2.00e-53; EST_HUMAN HIT: BI711138.1, EVALUE 3.00e-53; SWISSPROT HIT: P42568, EVALUE 7.00e-19
tgatccctggaaggttctttgaaggcacttttatgttctctggagtctttagaaggtttttccttgtgctccttcattaatttgtgaggctttgaaaaactggtactactgctgctgctgctgctgctactgctgctgctactgctgctgctgctgctgctgctgctgctgctactgctgctgctgctgctgctgctgctgctgctgctgctgctgctgctgctgctgctggtatgaatactcctattagggtcctgcaaaaaggggagaagaaaatgaaactcccaaaactaaatagcaatgaagagtcaaaagagatctacataaaatgatccttctttgattcctctcaagctatcattaaaataccaaaaatattttaatataaaccaaaaaccacaatataacaggtgagaatagtgtatgtgagaaacaggtgagagtaggttattatcaaataatttaatgaggaaagctgttttcttaatcatctgaagcatggagttttaaaacatttcaattcaacaaatgttaactactgcttgtcctagaagatacaaggatgaataacacatggaccccaccc

SEQ ID NO: 9095 - DNA, 501 bp, Homo sapiens
  MAP TO AL163282.2; EXPRESSED IN HELA, SIGNAL =   1; EXPRESSED IN BONE MARROW, SIGNAL = 0.86; EXPRESSED IN FETAL LIVER, SIGNAL = 1.2; NT HIT: AL163282.2, EVALUE 0.00e+00; SWISSPROT HIT: P36021, EVALUE 9.10e-01; EST_HUMAN HIT: BG538362.1, EVALUE 1.80e-01
gctgggtgcttgctggggagctcgccttgggggtcagataccccaaatccagtggatgcaagagcaacaaggactaatataagagagtggacttggtatgaagaagtgctgttagaggctaaagaccagaatgagtgaaggtgactgaaagttctggaggtgaattacatgaaaggtttaacaatggagaggtagctgggagagggagcgggcccttcatgttggtgaataggaggaggtgtggggacacaggagagccccttgttctctgtcttattcttctcaaggataacagtcctcagggtgaactaggggtgggaagaccaagagaggagaggggttggggtgtgcaccttctgtgtcagagtctgtgtttcctggttacctttcagggtgtgacagagcttgccatggtgctgaaacctggtcagagacctgtgagccaccacggacaggagggagggacaagagaaactgtggacaggacggaggcaccggaga

SEQ ID NO: 9096 - DNA, 571 bp, Homo sapiens
  MAP TO AC008468.4; EXPRESSED IN BRAIN, SIGNAL = 1.8; EXPRESSED IN HELA, SIGNAL = 0.56; EXPRESSED IN BONE MARROW, SIGNAL = 1.1; EXPRESSED IN FETAL LIVER, SIGNAL = 0.93; EXPRESSED IN HEART, SIGNAL = 1.3; SWISSPROT HIT: Q9Y5H5, EVALUE 1.00e-103; EST_HUMAN HIT: BG719192.1, EVALUE 0.00e+00; NT HIT: gi14728099, EVALUE 0.00e+00
aaaggcttcccacccctggctggtcattgtacagttcttgtggaagttgtggatgtaaatgacaatgctccacagttgactatcaaaacgctctcggttcctgtaaaagaggacgcacaactggggacagttattgccctgattagtgtgatcgacctagacgcagatgccaacgggcaggttacctgctccctgacgccccacgtccccttcaagctggtgtccacctacaagaattactactcgttggtgctggacagagctctggaccgcgagagtgtgtccgcctacgagctggtggttaccgcgcgggaccggggctcgccttcactgtgggccacggccagggtgtctgtggaggtggccgacgtgaacgacaacgcaccagcgttcgcgcagtccgagtacacggtgttcgtgaaggagaacaacccgccgggctgccacatcttcacggtgtctgcgcgggacgcggacgcgcaggagaacgccctggtgtcctactcgctggtggagcggcggttgggcgagcgctcgctgtcgagctacgtgtcagtgcacgcggagagcg

SEQ ID NO: 9097 - DNA, 523 bp, Homo sapiens
  MAP TO AC005263.1; EXPRESSED IN HELA, SIGNAL = 1.6; EXPRESSED IN BONE MARROW, SIGNAL = 1.1; NT HIT: gi14765814, EVALUE 0.00e+00; SWISSPROT HIT: Q11146, EVALUE 2.10e+00; EST_HUMAN HIT: AI479899.1, EVALUE 1.00e-118
cacctccctcccgcacaagggcgcccgcccctccttcacggtgcaccaccagcccctgccccggctggccctggcccaggccgcgcccgggatcccacaggccagcgccacggggccgtccgcggtgtgggtgtccctcggcatgccgcctccctatgccgcgcacctttcgggggttaagccgcgataaagaccttgcttagctagcagtgcgtattgtgtaaggtaaggccagagccctgcgcggtggctcactccagacactgaactgtccttcctttggcagagaagacggccacagggctcggcagaagttccgggggtcctgaggagggaagagggagagagccagggagaccagggagatggtcgcgagaggagggactacaggacgggcaccagccatggagtggcctgagtgtgttgggttccagctgcccgcagctgggttcctgcggtgacgccgcaggactgaggccagccctgggggcagctgtgccagcccctgtgggcgaggctcacg

SEQ ID NO: 9098 - DNA, 558 bp, Homo sapiens
  MAP TO AL031782.1; EXPRESSED IN BRAIN, SIGNAL = 2.7; EXPRESSED IN HELA, SIGNAL = 4.3; EXPRESSED IN LUNG, SIGNAL = 2.9; EXPRESSED IN HEART, SIGNAL = 2.8; EXPRESSED IN BONE MARROW, SIGNAL =   3; EXPRESSED IN FETAL LIVER, SIGNAL = 2.8; NT HIT: gi14759679, EVALUE 0.00e+00; SWISSPROT HIT: P21941, EVALUE 5.00e-36; EST_HUMAN HIT: BG699698.1, EVALUE 0.00e+00
cacaaagtttctgcttcatcacttcccttattttggatattgcaatatagtcttccacataaaacacataagtagacgaaggcttgttggcaatagctctaagttcggcatcttctgtttctgaaccaacaccaatagcaaataatgttatcttactatctcttgctgcttgagctgcatccttgacgtcatcttgggatttgccatccgtaagtaccactgctatcttagtcagaaatcgtgaggacttggcaaaaaggtaatcgagcgcaaactggatggccttccctgtctttgtgtttcctcctaagtagagtatggattccactgctgccgtcaaatgttctcctgaatcatagcttccgagaggaatctccagcacagggtagtcactatattgaaccactccaacttgaataaacttcggccctatgtcaaagttttttgtgatattgacaagccactttttcactatttcaaagttttctgggccaacactataagagccatctaagatgaaaactaaatctgtcggagcagtacgacaacctaagtgca

SEQ ID NO: 9099 - DNA, 501 bp, Homo sapiens
  MAP TO AF002993.1; EXPRESSED IN BRAIN, SIGNAL = 1.8; EXPRESSED IN BONE MARROW, SIGNAL = 1.7; EXPRESSED IN FETAL LIVER, SIGNAL = 1.4; EXPRESSED IN HELA, SIGNAL = 1.1; EST_HUMAN HIT: BI753192.1, EVALUE 3.00e-74; NT HIT: L06484.1, EVALUE 9.00e-89; SWISSPROT HIT: P22303, EVALUE 3.00e-03
cagctctgcatcctcccggccctcagcccccactcctccacccaggagccagaggaggaggagaaggagtggggaagccagggaaggcgtgtgcagcagacactgcgggggcctcatggctgcagggcaggcggcgtctgctgggagaaagaaagggaaagggtgaagggtcggtcgagaagccaggagggaggagattagggcactgtcggcccaagggttatcgctcagctgcagaggaggtggggcaggttggcaaagatgaggggagagagggagggagggaaggagacaggcagagacaaggacacaggccagcgggcaggaggggaaagagatcaggcagacacccatatccagacaaatgcagggaacagagaggagcaccctttctgctccgcaggggtccactgccctcacctcttcccggaactgggccgggcccagctcgtgcagtgagggcaccagaagcctcagtccacgaacaggccacccgacagg

SEQ ID NO: 9100 - DNA, 506 bp, Homo sapiens
  MAP TO AL079302.4; EXPRESSED IN LUNG, SIGNAL = 2.2; EXPRESSED IN BONE MARROW, SIGNAL = 2.1; EXPRESSED IN BRAIN, SIGNAL = 3.5; EXPRESSED IN PLACENTA, SIGNAL = 1.9; NT HIT: gi14251213, EVALUE 1.00e-63; EST_HUMAN HIT: BF898102.1, EVALUE 1.00e-100; SWISSPROT HIT: Q09903, EVALUE 6.00e-04
gccttgccttacccctttgagctatttagaaaaggctcaagaacagcagaaactacgatttgcagaccacttccaatgtacagtgtaagctttagtttactgtggcatttaaccctcacagcaatgcaagaggtagaaactgttatctccatttggttgataatggggtctacagagctgagagagataaaagtgatctggctaggataccattcaagaagagcatatttcaaaccagaggggctgacttctaaacacctttattcagcgttgcttttgtggttatgttcttcaacattcttctctctcccaattatctggcctattagcagctatgggctcaatccagaagcaatcctgctttggccagagttgcccttacctgtctcagcagccccaaggatgtccagtttgtcacggatggcaggtgccaaggtcagggcttggattggtgtgggtgcagagaagcctagaaagctgagtgctcggagaaccggcctgggaac

SEQ ID NO: 9101 - DNA, 512 bp, Homo sapiens
  MAP TO AL132656.3; EXPRESSED IN BRAIN, SIGNAL = 1.7; EXPRESSED IN LUNG, SIGNAL = 1.4; EXPRESSED IN HEART, SIGNAL = 1.6; EXPRESSED IN BONE MARROW, SIGNAL = 1.5; EXPRESSED IN FETAL LIVER, SIGNAL = 1.3; SWISSPROT HIT: Q9Y4H2, EVALUE 1.90e-01; NT HIT: AJ224512.2, EVALUE 4.90e-01; EST_HUMAN HIT: BG955759.1, EVALUE 6.00e-60
cactgccctggggtaggcccctcacctgttgctgagcacgctgaggaccaccaggccgctgagagactcatccctgacccatggcttgggagatgcctgtgaggctgacagggtctgccagggacacccgagggagacgctcgggcagcaaaggcttggctgttacttcttgggagacaggggtcagggagtcttggtgaccggggccaggctctctagtggagcgactctccgtggaggaacagagcatccgatgcacactcagggacatttgcaagctgcagtttccctgtcatacgcccttagctgttgggactcccctctgattccccagtgactagtgtggacctggagaccccagctcattcacctctttcctttgtctccacagcatacccagtgctgggaccgggcgtgaccgcgaaccctggcacctccctgtctgtgttcacggctctgcccttcaccacacccgctcccggcccagcacacgggccgctccttgtgactgc

SEQ ID NO: 9102 - DNA, 529 bp, Homo sapiens
  MAP TO AL136295.2; EXPRESSED IN BONE MARROW, SIGNAL =   1; EXPRESSED IN HELA, SIGNAL = 0.52; EXPRESSED IN BRAIN, SIGNAL = 1.1; EST_HUMAN HIT: BI838559.1, EVALUE 0.00e+00; SWISSPROT HIT: P20129, EVALUE 4.30e-01; NT HIT: AB053120.1, EVALUE 2.00e-49
tcgatgagcaggaaggcccggccggctccccgccacacggctgcccctactaccagtcggctcaggtgtctggcagttactgccacgcgccgtgtagccaggaacaccaccagcaacacaaagccccctaagaaagtgcatgtccagccccaggctgaattcacaaattttctgtgggcaaagaagggagactattgagaccccaagctccatctcccaccctggtctgtgctcccatcactgcactctccccaaccctacacatcatcactcgttctctccttgccgtgccctttacagcccccagtcatttaacctttgctatctccttggaagacaattcagcattccagggtccatatttcctctttagtcctgttcccaacttcccctgtaccccagggctctgttcccttccccctcccccgaccttttcctcaacctcctagcctatttttagtgttcagactggcaggaggacagaagcctggagaagggagctaggatcccagagtgcagggacccggct

SEQ ID NO: 9103 - DNA, 576 bp, Homo sapiens
  MAP TO AP000344.1; EXPRESSED IN BRAIN, SIGNAL =   1; EXPRESSED IN BONE MARROW, SIGNAL = 1.1; EXPRESSED IN LUNG, SIGNAL =   1; EXPRESSED IN HELA, SIGNAL = 1.1; EXPRESSED IN PLACENTA, SIGNAL = 1.4; EST_HUMAN HIT: AA808524.1, EVALUE 0.00e+00; NT HIT: AJ309278.1, EVALUE 0.00e+00
gggtcggggtgtagcccaggaaccttcttgtaactgaaatgcctaaccttgtttttactttaactcgttactttgaattttatcctgcttgtctctttaatcacctagccttgcttctcatgtaaataagactctctccagctaggaaggctggacaaactccagttgatcccttaatttacaagacactgagggctcctcatccaacaccctttcgtaaggagttggcctgtgtaaacagatcctcagcatttcaaaggagcccaattaactgataaggtactagcaccaacaatgtatgaagttcccaggatttctctccaagagataacaacataaaaccttgagttcatgccctgcatagactctatatctaattataatgaaagatttagaaccttgcacctgataccgttgctcttcttgtaactatttgtcttttgtttatcactctgtaaccattttgcttcttttgattcttgcatgtttttacttctgtagaattattacatttgagtccccctccccttcctaaacctaggtataaaagttaattgagccccttcctcgtggcag

SEQ ID NO: 9104 - DNA, 534 bp, Homo sapiens
  MAP TO AC007462.2; EXPRESSED IN BRAIN, SIGNAL = 0.8; EXPRESSED IN HELA, SIGNAL = 0.9; EXPRESSED IN BONE MARROW, SIGNAL = 0.85; NT HIT: X77818.1, EVALUE 1.30e-01
tggcttccatgcccttctccctgacaaagacagatcccattagactgcctagattgaagggggcccttctgctgggatttggaatactcctgggcacatcagggcccacagccttacatccttagttagatatgtgttttcacttggggcgggcttttggtattctgtgtagcaactaaaatgtgtctccctacacacacctgacctaccctccacttcttctttttgtccttacttctgtatcacacctcccatctccaggtctctcttgtgtctcttccctaaatacctgaggttctatacccatgccccagcatgctatcagaccttttctcatcctctctctctcatcagactcttcctatcctttcttataatctggagctgagaaataaatctgggataatgtggttgtgggtccttgtggtgttctgttcaggtatcatggttgcatttgtacaaaggtctttctgaagataaagtatcagtggaattttggtaatctgacagtgtgtatgcacgttttgatcagga

SEQ ID NO: 9105 - DNA, 514 bp, Homo sapiens
  MAP TO AC008272.1; EXPRESSED IN BRAIN, SIGNAL = 1.9; EXPRESSED IN PLACENTA, SIGNAL =   2; EXPRESSED IN LUNG, SIGNAL = 2.1; EXPRESSED IN HEART, SIGNAL = 1.8; EXPRESSED IN BONE MARROW, SIGNAL = 1.8; EXPRESSED IN FETAL LIVER, SIGNAL = 1.7; NT HIT: gi16157171, EVALUE 4.90e-01; SWISSPROT HIT: P06935, EVALUE 9.40e-01; EST_HUMAN HIT: BG288433.1, EVALUE 4.60e-02
ggcaggcagactggggaaggagatgatgtgggagagctatagagtagcctggggtaagttgccgtgtgctgagcagataaggacagaacgccatagaagcagagggctgtgcaaaggcatccagtgtgaatagcttggaacatgcaggaactagggactgggggagaggtgtagtggggagcaatgaggctagagatataggcaaaggctcaggtgccattcctggagtttggacttatctcgtaagaaatggggagttgtttcaaggttttaaagaaaagactatcacaatgggacaggcctatctattgctaactaaggtcagcagagaagagcagcaggatctccaacaaggagattctggcaacagaccctgggcaacctgctgaggacatgaacaaagcccttagctgtagagaaggacagagaagtcaaagaactaggtgacaggggctgaaggaggtgattatgaggagggcaggaatctagaatgacccccaggtctctggcttgg

SEQ ID NO: 9106 - DNA, 519 bp, Homo sapiens
  MAP TO AP001714.1; EXPRESSED IN BONE MARROW, SIGNAL = 1.7; EXPRESSED IN LUNG, SIGNAL = 1.4; EXPRESSED IN HEART, SIGNAL = 1.4; EXPRESSED IN FETAL LIVER, SIGNAL = 1.8; EXPRESSED IN BRAIN, SIGNAL = 1.4; NT HIT: M32788.1, EVALUE 1.20e-01; SWISSPROT HIT: P20469, EVALUE 1.00e-08; EST_HUMAN HIT: BI868476.1, EVALUE 1.80e-01
cccatatgtcaacatggatgatttcccatatgtcaacatggatgatttcccatatgtcaacatggatgatttcccatatatcaacatggatgatttcccatatatcaacatagatgatttcccatatgtcaacatggatgatttcccatatgtcaacatggatgatttcccatatgtcaacatggatgatttcccatatgtcaacatggatgatttcccatatatcaacatggatgatttcccatatatcaacatggatgatttcccatatatcaacatggatgatttcccatatatcaacatggatgatttcccatatgtcaacatggatgatttcccatatgtcaacatggatgatttcattgagtgaaaggagctagataccaaagaatacacagagaatgactccatttatgttaagctgaaaaacacttaaaactattccatgatgtaagaggtctgaatagtgattatctttgcagatcataataaagataactgggaaggagcatgagggga

SEQ ID NO: 9107 - DNA, 556 bp, Homo sapiens
  MAP TO AC016620.5; EXPRESSED IN BRAIN, SIGNAL = 1.2; EXPRESSED IN HELA, SIGNAL = 1.8; EXPRESSED IN BONE MARROW, SIGNAL = 1.2; EXPRESSED IN FETAL LIVER, SIGNAL = 1.1; EXPRESSED IN LUNG, SIGNAL =   1; NT HIT: AL163246.2, EVALUE 1.00e-109; SWISSPROT HIT: P31792, EVALUE 2.00e-10; EST_HUMAN HIT: BF983020.1, EVALUE 6.00e-48
cgtctttccccagccacccctgttatcacccaatgggcccatgaacaaagtggccatggtggcagggatggaggttacacacgggctcagtaacatggacttccactcatcaaggctgacctggctatgtatgaccactgctgagtgcctgatttgccagcagcagagaccaacactgagcccttgatatggcaccattccttggggtgatcagccagctacttggtggcaggttgattatattggacctcttccatcatggaaagggcagcggtttgtcctcaccagaatagacacttactccagatatgcgtttgcctatcctgcatggaatgccttatccaccatcatggtattctgcatagcattgcctctgaccaaggcacatactttacagctaaagaagtgcagcagtatgttcatgctcttggaattcactggtcttctccttatcattttgaagcagctggattgatagaacggtggaatggccttttgaagtcacaattacaacatcaactaggtgacaatactttgcagggctggcgcagagttc

SEQ ID NO: 9108 - DNA, 512 bp, Homo sapiens
  MAP TO AL356019.2; EXPRESSED IN LUNG, SIGNAL = 1.1; EXPRESSED IN HELA, SIGNAL = 0.61; EXPRESSED IN BONE MARROW, SIGNAL = 0.86; EXPRESSED IN FETAL LIVER, SIGNAL = 1.3; SWISSPROT HIT: P58180, EVALUE 1.00e-50; EST_HUMAN HIT: AI809240.1, EVALUE 2.00e-75; NT HIT: AE008683.1, EVALUE 3.10e-02
cgccatctgccggcctttacactattcaaccatcatgaaccctagagcctgctatgcattatcgttggttctgtggcttgggggctttatccattccattgtacaagtagcccttatcctgcacttgcctttctgtggcccaaaccagctcgataacttcttctgtgatgttccacaggtcatcaagctggcctgcaccaatacctttgtggtggagcttctgatggtctccaacagtggcctgctcagcctcctgtgcttcctgggccttctggcctcctatgcagtcatcctctgtcgtataagggagcactcctctgaaggaaagagcaaggctatttccacatgcaccacccatattatcattatatttctcatgtttggacctgctattttcatctacacttgccccttccaggctttcccagctgacaaggtagtttctcttttccatactgtcatctttcctttgatgaaccctgttatttatacgcttcgcaaccaggaggtga

SEQ ID NO: 9109 - DNA, 507 bp, Homo sapiens
  MAP TO AC009087.4; EXPRESSED IN PLACENTA, SIGNAL = 1.9; EXPRESSED IN BRAIN, SIGNAL = 1.6; EXPRESSED IN HELA, SIGNAL = 2.9; EXPRESSED IN BONE MARROW, SIGNAL = 9.1; EXPRESSED IN LUNG, SIGNAL =   3; NT HIT: X00637.1, EVALUE 0.00e+00; SWISSPROT HIT: P00738, EVALUE 2.00e-72; EST_HUMAN HIT: BG564730.1, EVALUE 0.00e+00
atgcagggctggcacccatcagcttcaaaccacatcttatcgcatccactcctgtccactcccgtccactttgccctcttccaggctgaaatcttgctttcaggcaagggcttccggccagccttgcattagttctcagctatggtcttctgaacccagtcctggatggaagtcaccttcacatacacaccatactcagccacagcacagctcttatcaaagcttaagatcccagtcgcataccaggtgtcctcctccaggtcgtgaacggcaaaggcactgcccgcatcgccatagcaggtgtcttcttggtacttagacatgccagcacagaaggtgtgttcattcagtatgggctgcacccctacagggctcttcggtgtcttcttttcggggactgtgctgccttcataatgccttatgcattggtcttggtcagccacaggcagcatgacatacttcagatggtcagtaaatttaaaattggcatttcgcccccagccagaa

SEQ ID NO: 9110 - DNA, 524 bp, Homo sapiens
  MAP TO AC006027.1; EXPRESSED IN HELA, SIGNAL = 1.4; EXPRESSED IN HEART, SIGNAL = 1.2; EXPRESSED IN BONE MARROW, SIGNAL = 0.86; EXPRESSED IN LUNG, SIGNAL = 1.6; NT HIT: gi16162300, EVALUE 0.00e+00; EST_HUMAN HIT: BF843564.1, EVALUE 0.00e+00; SWISSPROT HIT: Q99NB9, EVALUE 2.20e+00
ccacagggccttgcgctttctcctcagggctgccgcgggcaccagatgccgcaggagtttctgtttggctttggacaacagcccgcacaggaagaggttggtgaactggaagtgatccttgttcttgaagaggtcttcccgcgccggaccactgccctgcaggcactggaacgggaggaagggaggatagcaggacgtggtcgctgcccccgcagggggcatccactcctggaagaacctgagcagctcctgagtgcccaccctgtcgtccagcacgaggaagaaggctgtaaagaaggcctggagggtgaggtggaaaaactcataggactgctggtcacccccggggcccagctccgcaaagcccgcaggaagcccagctgcatgtctctctcctgcagcccggagcctgcacctcctcctgggtgaagacaaagaggctcttctccatgccccggtgggccacctgccccagcgagcacagagtgtcccggccggcgtggagggtctccactgggctgcgt

SEQ ID NO: 9111 - DNA, 501 bp, Homo sapiens
  MAP TO AC003665.1; EXPRESSED IN HELA, SIGNAL = 2.3; EXPRESSED IN BRAIN, SIGNAL = 0.88; EXPRESSED IN BONE MARROW, SIGNAL = 0.9; EXPRESSED IN FETAL LIVER, SIGNAL = 1.1; NT HIT: gi14774791, EVALUE 3.00e-64; EST_HUMAN HIT: AU125594.1, EVALUE 3.00e-03; SWISSPROT HIT: Q9UL17, EVALUE 3.00e-21
tcggggtagaagcggctgggaacaggatactggttgggtaggagaggagagtagtgatctcccccaaggaattgacagttgggtccaggcggggaggggatgctggtgtcaacagatgtgtacatgctagaaaaaaatagaaggcaagaaaacgggtcacaagcagaaccagtcacctgtgagcctacctgtttcacacattccttctccgaccctccttccctggcctgcccacctgtagcatctgtcccccaccctcctgttttcaggggcagggagaggatgtgtctcaggagggaccaaagctgagttgaacccagtggcacttacgactcaaagttctcccggaatcctttggcaaaggggttattatcaattttcagctgagtaatctagagagaagggaaatagagtcacctgagtcctgagtctggggctcgggaactttccaaatccctcccaaggaagacagtgggccccactctgccctcctccccaccg

SEQ ID NO: 9112 - DNA, 515 bp, Homo sapiens
  MAP TO Z72004.1; EXPRESSED IN BONE MARROW, SIGNAL = 1.1; EXPRESSED IN HELA, SIGNAL = 0.33; EXPRESSED IN BRAIN, SIGNAL = 1.3; NT HIT: AL163227.2, EVALUE 1.00e-29; EST_HUMAN HIT: BI011251.1, EVALUE 6.00e-20
gagggtgcaatccccaagccttgacagcttacacatggtgttggacctgcaggtgcacagaagtcaagaactgagattggggacccaccgcctagattttacagaatgtatggaaatgcctgtatgtctaggcagaattttgctgcaagtgtgaagccctcatggagaacttctgctaaggctgtgcagaagggaaatattggtttggcgcccctacacagaggccccactggagcactgcctagtggagctataataagcagaaaccagaatgacagattcaccaagagcttgtactgtgtacctggaaaagctgcagccactcaatgctagcccatgaaagcagcctagaggggggctgtatactgcaaagccacagagtcagatctgtccttgggagctcacctcttgcatcagtgggaactagatgtgagacatggagttaaaggatatcattttggagctttaagatttaataattgccctgttgaatttcggacttccatggggcctgt

SEQ ID NO: 9113 - DNA, 514 bp, Homo sapiens
  MAP TO AP000353.1; EXPRESSED IN HELA, SIGNAL = 1.5; EXPRESSED IN BONE MARROW, SIGNAL = 0.75; SWISSPROT HIT: P09021, EVALUE 1.10e-01; NT HIT: AJ301616.1, EVALUE 1.20e-01; EST_HUMAN HIT: BG492696.1, EVALUE 4.60e-02
ctgtggggcctggcatggaggcacagacctggaagcagctggaggatgaccagggtccatcaacctttgtggagagggtcccgaatggggactcaggcagggtagcattggtcgggtttgccccttaggtctcagagaaagtgctggagagggtgaggctggaagttgggggccaggtagagaacactgggtggggagttgagccgcctcagtgtgacctgcagcgctgggagtggccatataggggcagcagaggataggaacagcgagtctgggtggcaggaggttgggagggcagtcagccctgccctgcagctgggtcagccgacttggtcacaaccgcagccaaggtctgcgcacagcccacccctccgcctccccgcacctgggtcatccccgcatctcaggagtgttgaagaggttgcacaggtctccccaggtcattcagcgggcactgaccatggggtgggagtccaggcctctcacctgctcagccttgcccttggtgaatggg

SEQ ID NO: 9114 - DNA, 547 bp, Homo sapiens
  MAP TO AL121911.10; EXPRESSED IN BRAIN, SIGNAL = 0.83; EXPRESSED IN BONE MARROW, SIGNAL = 0.87; NT HIT: gi8393937, EVALUE 1.30e-01; EST_HUMAN HIT: BG434606.1, EVALUE 1.90e-01; SWISSPROT HIT: Q02100, EVALUE 5.90e-01
ccacagcgcagactaaagggaagcagatacttctctcctagttttcatcactaccttgcgtaaaccccaaatgtctgtcaaatgtctaaagtaacacaaatatatattaatcatctgagaagtatgcaatttctagtatgtgtatgtgcacactttatagttgcctacttaggaaataaccatgagagaaatacataaaagtgatacaaatatatagttatcacctgagaagtatgcagtttctagtatgtatatgtgtgtactttatagttgcttccttaggaaataaccatgagagaaatatataaagtatatgcattttccctatggaacaacatatgactctgagtctattctttaatactcatacattatctgtgcttcaattgacacttaatggggtcttgctccttgttgaggggaagataccacagacctttcctaagacaggagtgaccctttcttctgacctgcttatagacaatctcttgccaacaatgtctaaagctgtctctgggaaggaagtgttgggagaagtgggcaaggg

SEQ ID NO: 9115 - DNA, 586 bp, Homo sapiens
  MAP TO AC006121.1; EXPRESSED IN BONE MARROW, SIGNAL = 0.95; EXPRESSED IN BRAIN, SIGNAL = 0.98; NT HIT: X98296.1, EVALUE 0.00e+00; EST_HUMAN HIT: AU132252.1, EVALUE 0.00e+00; SWISSPROT HIT: Q93008, EVALUE 6.00e-44
cccccactcgcttgaccactgtgtacgagcacacccacaagtctgtattttgtgcttcctgctgtctcactttcagactgctcactctgttgtatcaactgactctctgggtttacattatccccttccagctttgcgacacctgcaactgtgtaaggttccatgtccagctctcgaggaaattcaaaataatcattgaacttgattgcacattctctttcccagtcatagtcaaatcgctttagttgtatagcaagaacaggaggtaattttttaatcagcaagcgctttacggtatcaacctaaaataaacaagacaaagttaccagatgttctattaaaatccacaggaaaaaaaaaaaaaccccaagcaaacttttaaatgatattaagacttatctgaatttttaagtataaacaaatacatgacaatgagcataatcaagataatcctatcagctgatttaaatgctgaaattaataatatgcaaatggtaaattgttgactggtttctgtcattgttatctagccattattacctgtttgatgtttactgttgttcccacgaaggtggtttcctatgca

SEQ ID NO: 9116 - DNA, 502 bp, Homo sapiens
  MAP TO AL121919.19; EXPRESSED IN LUNG, SIGNAL = 2.1; EXPRESSED IN HELA, SIGNAL = 3.8; EXPRESSED IN BONE MARROW, SIGNAL = 2.3; EXPRESSED IN HEART, SIGNAL = 2.1; EXPRESSED IN FETAL LIVER, SIGNAL = 2.5; SWISSPROT HIT: P47762, EVALUE 9.10e-01; NT HIT: U90058.1, EVALUE 4.80e-01; EST_HUMAN HIT: BF307498.1, EVALUE 0.00e+00
gaggccagtatgggtgtggggaaatgactgtcccctgcccctctttaggaagtgacggtaggaaacgtcaggtatctggattaatcactcggaaagattctgtggttccttctaagccagagcagcccatagaaattcctgaagccccttctaaatccctcaagaagaggagtctggaaggaatgagaaagcaaactcgagtagagttcagtgacaccagcagcgacgatgaagaccgattagttatagaaatatgaagcttccagagaaacatggtgtctggtcaaaaagactgttgacgcttcacaagtaaatgttgtcaggctggcggaagaactaaactctatctgtgaaacacctacagattaggaaagccattttgagttatttacaagccaactccaaccaacttctgacccccaactcagccgcagcgttccccagctccccttgggagtgctctgctcatcttcaaatggtgccaggcagggcagacatggca

SEQ ID NO: 9117 - DNA, 513 bp, Homo sapiens
  MAP TO AJ239326.3; EXPRESSED IN PLACENTA, SIGNAL = 2.1; EXPRESSED IN HELA, SIGNAL = 0.41; EXPRESSED IN LUNG, SIGNAL = 2.2; EXPRESSED IN BONE MARROW, SIGNAL = 2.1; NT HIT: AL163302.2, EVALUE 0.00e+00; EST_HUMAN HIT: BF988581.1, EVALUE 1.00e-76; SWISSPROT HIT: P39060, EVALUE 6.00e-11
gccgcttgctcggtcctcacggggcctggagctggagcctggcgccgggctcttcgtggctcaggcggggggagcggaccctgacaagttccaggtaacccccactgtgccgtcgctgggggactggagcagctgggatggggtggggtgggggtggccactgggacagggacggagctgtggccggaagaggagagcccccaccccagctgtggtcagcccgggcctccagcgcaggcctcctgggttcttggctgctcagccctggcctccggcgcaggcctcccgggttcttggccggcctggctggggtggcattcactttcttggctctctggctcctgcgcccccaggaagggtagccctgggcttccatggtttctctgagaccccgaggcccagcccaggagggccctctttgaacgactttgtaactagacatccaccccagccgtgaccccgtgacccagagacacccccaggcctgtgccaagccctgtggtgaagtggggc

SEQ ID NO: 9118 - DNA, 514 bp, Homo sapiens
  MAP TO AF050154.1; EXPRESSED IN HELA, SIGNAL = 0.73; EXPRESSED IN BRAIN, SIGNAL =  26; EXPRESSED IN BONE MARROW, SIGNAL = 9.2; NT HIT: M10065.1, EVALUE 0.00e+00; EST_HUMAN HIT: AW162446.1, EVALUE 0.00e+00; SWISSPROT HIT: P02649, EVALUE 3.00e-60
ccctggtggaacagggccgcgtgcgggccgccactgtgggctccctggccggccagccgctacaggagcgggcccaggcctggggcgagcggctgcgcgcgcggatggaggagatgggcagccggacccgcgaccgcctggacgaggtgaaggagcaggtggcggaggtgcgcgccaagctggaggagcaggcccagcagatacgcctgcaggccgaggccttccaggcccgcctcaagagctggttcgagcccctggtggaagacatgcagcgccagtgggccgggctggtggagaaggtgcaggctgccgtgggcaccagcgccgcccctgtgcccagcgacaatcactgaacgccgaagcctgcagccatgcgaccccacgccaccccgtgcctcctgcctccgcgcagcctgcagcgggagaccctgtccccgccccagccgtcctcctggggtggaccctagtttaataaagattcaccaagtttcacgcatctgctggcctccccctg

SEQ ID NO: 9119 - DNA, 500 bp, Homo sapiens
  MAP TO AL163152.2; EXPRESSED IN BRAIN, SIGNAL = 0.82; EXPRESSED IN HELA, SIGNAL = 0.94; EXPRESSED IN BONE MARROW, SIGNAL = 0.88; NT HIT: AF083078.1, EVALUE 3.00e-08; SWISSPROT HIT: P58180, EVALUE 2.00e-43
tgatctacggtgctactgtggtgggaaacattctcattatggtcacagtgacatgtagttcgacccttcattctcccttgtactttctccttggaaatctctcttttttggacatgtgtctctccactgccacaacacccaagatgatcacaagaccatctctgtgtggggctgcgtgacccagaagttcttcatgcacttctttgggagtgctgagatgactcttctgataatcatggcctttgacaggtatgtagccatatgtaaacccctgcactataggacaatcatgagccacaagctgctaaaggggtttgcgatactttcatggataattggttttttacactccataagccagatagttttaacaatgaacttgcctttctgtggccacaatgtcataaacaacatattttgtgatcttccccttgtgatcaagcttgcttgcattgaaacatacaccctggaattatttgtcattgctgacagcgggctgc

SEQ ID NO: 9120 - DNA, 508 bp, Homo sapiens
  MAP TO AC000403.1; EXPRESSED IN HELA, SIGNAL = 2.1; EXPRESSED IN PLACENTA, SIGNAL = 1.7; EXPRESSED IN LUNG, SIGNAL = 1.7; EXPRESSED IN HEART, SIGNAL = 1.3; EXPRESSED IN FETAL LIVER, SIGNAL = 1.6; EXPRESSED IN BONE MARROW, SIGNAL = 1.6; SWISSPROT HIT: P54987, EVALUE 1.00e-79; NT HIT: L38281.1, EVALUE 5.00e-78; EST_HUMAN HIT: BF312427.1, EVALUE 4.60e-02
ctggaccagcaggacgtggcctttaagcgttttcctgcacatttatctacccactgggtggcagacgcagctgcatctgtgagaaagcaccttgtagcagagagagccctgcttccaactgactacattaagagaattgtgctcaggataccaaatgtccagtatgtaaacaggccctttccagtttcggagcatgaagcccgtcattcattccagtatgtggcctgtgccatgctgcttgatggtggcatcactgtcccctcattccatgaatgccagatcaacaggccacaggtgagagagctgctcagtaaggtggagctggagtaccctccggacaacttgccaagcttcaacatactgtactgtgaaataagtgtcaccctcaaggatggagccaccttcacagatcgctctgataccttctatgggcactggagaaaaccactgagccaggaggacctagaggaaaagttcagagccaatgcctccaagatgctgtcctggg

SEQ ID NO: 9121 - DNA, 583 bp, Homo sapiens
  MAP TO AC006427.13; EXPRESSED IN HEART, SIGNAL = 1.7; EXPRESSED IN BONE MARROW, SIGNAL = 1.7; EXPRESSED IN FETAL LIVER, SIGNAL = 1.4; EXPRESSED IN HELA, SIGNAL = 1.3; EXPRESSED IN BRAIN, SIGNAL = 1.3; EST_HUMAN HIT: AI272782.1, EVALUE 3.20e+00; SWISSPROT HIT: P24880, EVALUE 2.50e+00; NT HIT: Y08924.1, EVALUE 2.20e+00
accccctccttgctccctgctgagggcctcaccattggctgtgtttgttcctcatctcctgtgctctttcctgtttcttcagggagtccctgcagagatgttttcttatgtaatcaaattataggtcaaattcatcaaaagaatagcacacaggtacattccttacgaacattaatgaatgcagtaagtaacacattctttttttaagtggaggaattggtaaataaagatgctctttggtaaagaaaaatgaagcaaggaacatagctttaaaatatgccaaatttccttgttaaactgtaaagttgtgcaaatgtttattgccatcaccaccattgttataaccatgtgtaatatatatcataggaaatatttttaaatattttatagttgatttcaataaatatcatttgggcacctagtacaagatacacactgtgctgagcataggcatgcagagactgcagaaggtagttccttcatgacaaagggaaaaagcagacatacagagcacataaacagataattttgatgtaaaaaatagaaatgctataataatgacagcagcagagacatgcctgca

SEQ ID NO: 9122 - DNA, 572 bp, Homo sapiens
  MAP TO AC017111.2; EXPRESSED IN PLACENTA, SIGNAL = 1.8; EXPRESSED IN BONE MARROW, SIGNAL = 2.5; EXPRESSED IN LUNG, SIGNAL = 3.1; EXPRESSED IN FETAL LIVER, SIGNAL = 2.5; EXPRESSED IN HELA, SIGNAL = 4.4; EST_HUMAN HIT: BE786283.1, EVALUE 8.00e-01; SWISSPROT HIT: Q00657, EVALUE 2.00e-03; NT HIT: gi13386485, EVALUE 2.20e+00
gcacttcatcatccactggccggacatttactctgagagtgatgggcaccacatgatgtctgtcactgacttccaaggagcagctatcagtcagggacttgtccccattatgggcataggaaactcggccctgttttatgtcctccaagtggaagagaccccctacatgcaggatctgtccagacactctcatgtggccatgtttgggtgcctgagtgagagtgaaagagatatgggcaacatcagtgtctacatcattcacgtgcaactctgtctcactcaggatgtggtgacccttctcctgaatagtgaagccggtgttgaggatctcaggtggctggttgtccacgggatgcaagtaaagggtaaaggtacctggagccacattcccagctcggtcttccacctggaactggaactgggccactcgagtagccacgcccagttcttgacccgggggtctgtaagcaattttatgatggttgatctgggcttgggtaaaatgggtcaccacgactgaggggttgtcagtcaagaccaaggtacccagtggggctggcaggtgattttcg

SEQ ID NO: 9123 - DNA, 500 bp, Homo sapiens
  MAP TO AC009516.17; EXPRESSED IN HELA, SIGNAL = 0.99; EXPRESSED IN BONE MARROW, SIGNAL = 0.79; SWISSPROT HIT: O32848, EVALUE 4.10e-01; EST_HUMAN HIT: BG774372.1, EVALUE 4.50e-02; NT HIT: AB051453.1, EVALUE 0.00e+00
cctgtgggctgacggtggtggtggcggcgggagtggcgatggtggcggcgagagcctccgggagccaggggtggaggtgtctggtgaggagggccgctcctcggatttggaggccttggggaggctccgggtgctgtcaagcgagcgggaacacgcaggtgcgaagcaatcaagggagctggcgtgcgtggagagcaggccgtctggggagctggagcacgcagaggacaccaggcctagcgagcgggagcgcacaccgacttcagcactcaggctgtctagagatccgagttggcaggcgggtttgggggcgtggcaagagccgctggaggtctggggcagcggttcttccaaggaatgcacagcttgggggtccggtgatcccgacaaagccgggtgcccgcggaagtgcgccaggatgtacttgaggaagagctggcgctccacctccagcgccgcctgcagatagcggatgcgcgccgcctgctcgccgtcagtct

SEQ ID NO: 9124 - DNA, 501 bp, Homo sapiens
  MAP TO AF241729.1; EXPRESSED IN LUNG, SIGNAL =   2; EXPRESSED IN BONE MARROW, SIGNAL = 1.9; SWISSPROT HIT: P47805, EVALUE 5.00e-10; NT HIT: gi12743224, EVALUE 0.00e+00; EST_HUMAN HIT: BI256217.1, EVALUE 0.00e+00
ggacgccggcgaagaagacctggaacagcagttccactaccacctgcgcgggctgcacactgtgctctcgaaactcacgcgcaaagccaacatcctcactaacagatacaagcaggagatcggcttcggcaattggggccactgaggcgtggcgcccgtggctgcccagcaccttcttcgacccatctcaccctctctcattcctcaaagctttttttttttttcctggctggggggcgggaagggcagactgcaaactggggggctgcgtacgtgcaggaggcgcggtggggctgcgtggaggagggggccacgtgtgagagagaagaaaatggtggccggagatgggagggcccaaggaacctcctgggagggggcctgcattctatgttggtgggaatgggactgggctgacgccctgcattcagcctgtgcctttcctggggtttcttttctgttcttttcggaggagagggcccgagaaggggccataccagggcg

SEQ ID NO: 9125 - DNA, 517 bp, Homo sapiens
  MAP TO AC002111.1; EXPRESSED IN BONE MARROW, SIGNAL = 0.85; SWISSPROT HIT: P27190, EVALUE 3.60e+00
gcagccagcacaggctgacccaaggtgtccttctaccgtgcggagaaacactgtcactgcagtgccaccaagttggggtcacagcaggcatttcgacgtgggccctgtgccttcctgagggagaggtgatcctccctgtgagtccccggggaacttccacaattctgattcgttacaaacaccaagccttgtcccacaatagcacaatacgctggacttgcgctggaacaaccctcagccacacctccagatggggagccccaccttgccctccagcctcgccttccacaccctgcacaactcctcctgctgggatagtgccccggtcttcagcaaactcctccttgggtgctgaggcccagctgtcacctcttctgaggaggcccggctgtcacctcttctgagaagctttccttgctttctgacccagcactccgccagccccactctgctcccacagccaaccatcttgtgcatgtcactcttctgtgtacaaacctgcctctggaccccaggc

SEQ ID NO: 9126 - DNA, 533 bp, Homo sapiens
  MAP TO AC008166.1; EXPRESSED IN LUNG, SIGNAL = 1.2; EXPRESSED IN FETAL LIVER, SIGNAL = 1.3; EXPRESSED IN BONE MARROW, SIGNAL = 1.2; EXPRESSED IN BRAIN, SIGNAL = 1.1; EXPRESSED IN HELA, SIGNAL = 1.7; NT HIT: AE007835.1, EVALUE 1.30e-01; SWISSPROT HIT: P47285, EVALUE 2.60e-01; EST_HUMAN HIT: BG340711.1, EVALUE 7.50e-01
tgagggaaattgcgtcaacatgattctagtactcattgaagtggacagaggtagatgtccataaagccaaggaatctcaatcattagggcccattgcttgcatagcccatttggtaccctgtatctaattttatattcagagtttttattagtcttcttaaagaatatccccaattagtttaagtatgaggcacaacacacctggatctgccctggaagttatatatgatatatatgatatgtgtccttattcttcatttaccggaaattaggttgctccctgctgagggtctccctgtttctgtgcatcaggcatctgaggtcatatatgtccatagactgaaggcttcagcccttaaagcttctgcaaatcataatgtctgctaggaatgatcacttcccaggtggagactggcattcttcatcagggaataggacctaaccatggcacattaagggctagatatcacaaagatattctggtactttaatagttccattcccaaaaagtacccctggcccatgccttctga

SEQ ID NO: 9127 - DNA, 531 bp, Homo sapiens
  MAP TO AP001717.1; EXPRESSED IN BONE MARROW, SIGNAL = 1.3; SWISSPROT HIT: P07898, EVALUE 3.00e-06; NT HIT: gi16166227, EVALUE 0.00e+00; EST_HUMAN HIT: BI013889.1, EVALUE 0.00e+00
gggtgctggagttgccagggcagcctggggcgccagagttgcctgggcagcctgtggcaactgtggcgctggagatctctgttcagtctgtggtgacaacatcggagctgtcaacgatgaccgtgtcgcagtccctggaggtgccctcgacgacagcgctggaatcctataatacggtagcacaggagctgcctactacattagtgggggagacttctgtaacagtaggagtggatcccttgatggccccagaatcccatatattagcttctaacaccatggagacccatatattagcatccaacaccatggactcccaaatgctagcgtccaacaccatggactcccagatgctagcatccaacaccatggactcccagatgttagcgtctagcaccatggactcccagatgttagcaactagctccatggactcccagatgttagcaactagctccatggactcccagatgttagcaactagcactatggactcccagatgttagcaaccagttccatggactcccaga

SEQ ID NO: 9128 - DNA, 500 bp, Homo sapiens
  MAP TO AC008488.6; EXPRESSED IN BRAIN, SIGNAL = 0.81; EXPRESSED IN BONE MARROW, SIGNAL = 1.1; SWISSPROT HIT: P15576, EVALUE 7.90e+00; NT HIT: AB027564.1, EVALUE 9.00e-52; EST_HUMAN HIT: AL133685.1, EVALUE 3.00e-52
gggaaaggggatctttgggaactcattgtaccttctgctcaattttgctgtgaacctaaaattcctctaaaaaataaagtctattagaaaaaaaagagctaaagagtctgtatagttgactccagttagttactggtattaatttaatggtattatgtgtcacatatgaattaaaatcctacatcattatactaactccaaatagttaatatttaatgatattcttttataaaggaaggtaaatctgtacttataataccagctttgaaatgttacttatagtttctctctagccaaccttttgtatatgtcatagcactagacaaaatgtttttatgcattgtgagtgaattggctttgttcaatttgaaattgattgtgattggtttaatttaggtgttcggatatctagttttcccaatgaagaggacaggaaacaccaacaaaggagcattattggctttttacaggctggaaaccaagccctgtcagccactgag

SEQ ID NO: 9129 - DNA, 574 bp, Homo sapiens
  MAP TO AL133279.2; EXPRESSED IN FETAL LIVER, SIGNAL = 1.2; EXPRESSED IN LUNG, SIGNAL = 1.1; EXPRESSED IN BRAIN, SIGNAL =   1; EXPRESSED IN HELA, SIGNAL = 1.8; EXPRESSED IN BONE MARROW, SIGNAL =   1; SWISSPROT HIT: P57789, EVALUE 2.00e-50; NT HIT: AF279890.1, EVALUE 0.00e+00; EST_HUMAN HIT: BE185995.1, EVALUE 9.00e-84
cggccagaaccggctacgtgcacggacactcttggtgtgtcctgcgtttgctatctgaaatgaagttcttgttctctgattccttttggcagagcaagctttcagttgtttatggcacagtgaaatatattcttcaatgctatgtaattttggactaaaaagtctgtttaaggcacatgtctcagtgtgaatattaaaaacacacacacacacacacacacaacgctcagtccaagaccaatgtccttcacatttagtttctgtcttcaagtaatgagttgttctccggctcccggtctttggtgtccgtgggtatcattccgttctccaactcagcgtgctgctggatacagtccgtcagcatggctgtgctggagttgtctgagttacacatcttttccgtctcctcctctttcttctcctcgtccagggagtaattccggaaggtcttgtagattttctgaacgtcctcgggcaaggtctttttgaggtccttgtttttcctcttggtgagtctggaggtggacccgaacttgttgatgatgttgtcctcggacgcaccctgcccatgctt

SEQ ID NO: 9130 - DNA, 505 bp, Homo sapiens
  MAP TO AC005630.1; EXPRESSED IN BONE MARROW, SIGNAL = 1.7; EXPRESSED IN FETAL LIVER, SIGNAL = 1.9; EXPRESSED IN PLACENTA, SIGNAL = 1.4; SWISSPROT HIT: Q9NYV4, EVALUE 1.80e-01; NT HIT: AF266285.1, EVALUE 7.00e-71; EST_HUMAN HIT: T70163.1, EVALUE 1.00e-119
tctgcgggagctggagaggctgcgggagctggagaggatgctggagctggggtgggaagccctgtacgagcagcgggccgagccacgcagcggcttcgaggagctggtacgttgccccacctggggaggctgccctcttccctagccctcaaggcctttgtttccccacctgtaaaatggggcattgtagccttcacatgaaatggtacttctaaaggcatctgtgagccagagccccgctctgatggctgtgggagagaggggatatttttctaacctgcctccacccttcccggtgccatgggaggcagacactaagttctggggtctccagttttagtgggtggccactgattgcttctctctgtccagaacaacgagaacaagagcacactgcagttggagcagcaagtaaaggagctggagaagtcgggtgagctgaaagagactgtaacctccgacccatccaagaagatgtgggaggcgggcaccagcctctggggag

SEQ ID NO: 9131 - DNA, 514 bp, Homo sapiens
  MAP TO AC007539.8; EXPRESSED IN HELA, SIGNAL = 1.1; EXPRESSED IN BRAIN, SIGNAL = 0.98; EXPRESSED IN LUNG, SIGNAL = 0.98; EXPRESSED IN BONE MARROW, SIGNAL = 0.75; SWISSPROT HIT: P79348, EVALUE 1.60e+00; NT HIT: gi16162050, EVALUE 3.10e-02; EST_HUMAN HIT: BG778832.1, EVALUE 4.60e-02
tctgtctggttccatggtgggcttttactgttttgcttccccgacctgcacagtcttattgtcccccaataaaatagactctacttagaagaggaatgagacaagcttcttttattcctttgaatattttcagcaagaagtcaagatttttcttttctgaccccaggaatctctattcgcaactttagtccatctcaccctcgctttcctgggaatcagaaactcttactaaggagttgcaaccagagctgtgttcttgacaccagctagggaagaaggtgtgacgacagtgcacttagagataatccaaactgcatggtgtttaggctcacacacacacacatacacgcacacacaccaggcccagcttcatcctctgcccagcttattcctatcgtctgacatttgactgggttaagaagtgaaccccaggtgttataggggattacttgctgataacagtgtgcactcctatccctgagtgatctagcactcgccctgaccagtgctttcg

SEQ ID NO: 9132 - DNA, 506 bp, Homo sapiens
  MAP TO AC011451.2; EXPRESSED IN BRAIN, SIGNAL = 1.1; EXPRESSED IN HELA, SIGNAL = 1.7; EXPRESSED IN BONE MARROW, SIGNAL = 1.1; EXPRESSED IN LUNG, SIGNAL = 1.1; EXPRESSED IN FETAL LIVER, SIGNAL = 1.2; SWISSPROT HIT: Q9Y6Q3, EVALUE 7.00e-65; NT HIT: gi14756432, EVALUE 0.00e+00; EST_HUMAN HIT: BG256451.1, EVALUE 0.00e+00
caaagggccgttcaccagtgtgagttctcatgtgtactgtaaggcctgatgagatactgaaggcttgcccacacttttgacatttatatggcctctcccctgtatgtattcttttatgttgactaaggtgcgaggagtatctaaaggctttcccacattcctcacattcaaaaggcctttctgcactgtgacttctcaaatgtcgaataagaaatgaggatcgaatgaaggctttcccacactgttgacagtcatagggttttacaccaggatgagtctgcatgtgacttttaaaggaagaggaattaataaaggcttttccacattccttacattgataaggcttctcaccagtgtgagttctcatatgtacagtaagatgtgaagagttagcaaaagctttcccacattccttacattcataaggcttttctccagtgtgagttcgcctgtgttttataagacctgatgaatcagtgaaggctttcccacatttgttgcactca

SEQ ID NO: 9133 - DNA, 577 bp, Homo sapiens
  MAP TO AL121758.5; EXPRESSED IN BONE MARROW, SIGNAL = 0.82; EXPRESSED IN FETAL LIVER, SIGNAL = 1.2; EXPRESSED IN HELA, SIGNAL = 0.82; SWISSPROT HIT: O43623, EVALUE 6.00e-18; NT HIT: gi13775235, EVALUE 3.00e-52; EST_HUMAN HIT: BE313859.1, EVALUE 0.00e+00
gaagagcagcgcggggtctgggagggagaaatttccggctctggggcgcgggagaggtgcggacctggtgcctgagttgggagccttgaaggcgcggacaggggggtcaaggtccgagggatggccggaaaggatgaagtgggtcgggggacgctggggaagacggtgtggaagtgagtcgtgggtttgggggttggggagaaaagttccgggccgggccgggggtccccacgagagggtcatgggcagggaaacgcagccggggctgggcgagggcgctgcgggcgcaggtagggggcccggggcgcgtggagagcgagttccgggcgcgagggcgaggcggaaggctcagctggccgggccggcgggggtcggcgggggtggctcggccgccttggcgcaggccgcctcgcagtgcttgtggaggtaggacttgagcgcgaagctcttgtcgcactggcggcagcggtagtgcttgaaggccgagtgcgtctgcatgtgcgcgcgcaggttggagcggtcggcgaaggccttgccgcagtgcgcgcagccgaacggcttttcgccggtgtgcgag

SEQ ID NO: 9134 - DNA, 500 bp, Homo sapiens
  MAP TO AC010320.7; EXPRESSED IN BONE MARROW, SIGNAL = 0.75; EXPRESSED IN HELA, SIGNAL = 1.2; EXPRESSED IN FETAL LIVER, SIGNAL = 0.97; SWISSPROT HIT: P41561, EVALUE 1.60e+00; NT HIT: gi15301350, EVALUE 9.00e-15; EST_HUMAN HIT: AI160765.1, EVALUE 4.00e-27
tccggcttgaaacagctgcaattcagacagatgtgcctcaagggttaatccaagttgatttttaataggcttgttttctgcattgcttcccaatacacagctcctccctagaaaagaagaaagagtagaacatgaacccatgattctggcatgtttaccgtctggtggagggaccagaatcagcctcacccaactcagacactggaagaagtatcggcatactttgcatgtcacattgtgagagctgaaaacacaagggggtgacgtgatgcattggagcagtggggaatctgcaggactcgggaggattatgagtgactttgagaaagattaagggcagaaaaatagaacagaaactgaaagcttctcagaaaaagcagggatgagcctcttagagaaaataagacatttaagagcagttgtatagacattagtaatagtataatatacgcataaagctaggagagacacaatcccaggagtgaggtgttcccacaccc

SEQ ID NO: 9135 - DNA, 510 bp, Homo sapiens
  MAP TO AL096805.1; EXPRESSED IN HELA, SIGNAL = 0.82; EXPRESSED IN BONE MARROW, SIGNAL = 0.88; EST_HUMAN HIT: AW295004.1, EVALUE 6.00e-66; SWISSPROT HIT: P51172, EVALUE 8.00e-39; NT HIT: AL096805.1, EVALUE 0.00e+00
tcatgaaggtctgggccagcgccctcatgcctctatcctgccccaggagcagcctggccaaaatcaacatcgtctaccaggagctcaactaccgctcagtggaggaggcgcccgtgtactcggtgagccttggccccctgcctgggctagagcgggggcagcgacagtggctggccctgcacagaaggggcacgggggcctgggcccgcccctcacacccgcaccccacccgcaggtgccgcagctgctctcggccatgggcagcctctgcagcctgtggtttggggcctccgtcctctccctcctggagctcctggagctgctgctcgatgcttctgccctcaccctggtgctaggcggccgccggctccgcagggcgtggttctcctggcccagagccagccctgcctcaggggcgtccagcatcaagccagaggccagtcagatgcccccgcctgcaggcggcacgtcagatgacccggagcccagcgggcctcatctcccacgggt

SEQ ID NO: 9136 - DNA, 501 bp, Homo sapiens
  MAP TO AF048727.1; EXPRESSED IN BONE MARROW, SIGNAL =   1; EXPRESSED IN HELA, SIGNAL = 2.4; SWISSPROT HIT: P46804, EVALUE 7.00e-03; NT HIT: AF048727.1, EVALUE 0.00e+00; EST_HUMAN HIT: BF346287.1, EVALUE 0.00e+00
tggccccgctctcgtacaggcaggcaaaaaccaggcccccctcaggggccggcccgatggacgccaggtcagagtagccgctggggccctcgtagatcacccagggctctgtccagctgcgcgggtccagcggggactggctcaggcggatacccatgtgtagccgagccctgcgccccactgggtgggagtacagcagccacgtggggctctggggcggggcagcaaagggcatggggagtgccagggtccaggaccccacatccccactgaccccaggcctggggccaggctgcctggggccatccccccgaggctgcagacggctgaagggcccaccaggcacctggcctccacgggggtctacagcagcctcctctgggggttcgtggactccaggaccgaggagtggaggctggaggggactcccggggcccactgaccaactgtcatcccgtggcctgttgggggcgggggctgggaagcccacgatgctgccct

SEQ ID NO: 9137 - DNA, 508 bp, Homo sapiens
  MAP TO AC004174.1; EXPRESSED IN BONE MARROW, SIGNAL = 1.3; EXPRESSED IN LUNG, SIGNAL = 1.1; EXPRESSED IN BRAIN, SIGNAL =   1; EXPRESSED IN HELA, SIGNAL = 1.4; SWISSPROT HIT: P58182, EVALUE 6.00e-06; NT HIT: gi11526383, EVALUE 6.00e-56; EST_HUMAN HIT: BF218467.1, EVALUE 7.10e-01
tgaggaaattgcctgccacggtcagcaggtagatagtgagaaagacagagaagagcaagccctggaggtcggccaggtgggagaagccgagaagaagaaactcagtcaccatggaggtgtttgcactcatcctgcctgcatacctttgactggaagacaaaagaaatggcaaggaaaaatcacaactatggaatcgtgaaatgggcaaagatgacctctctctgcatctgatcgcagcactagatctccctttctattagaatatcatggactttgaaattaggcagccttgcctggagtccatattccacccttgctcactcttgggatcctggatgagtatttgtctctctgagcctgaatccctgacttcatctcttcctgatagtgcctatcattctaaagaacatgttaaactgtctttccagttttacctgggctgaagattaagtcagtctagctcccttttcactcttttctgattttccaattcttcctgcagggctgg

SEQ ID NO: 9138 - DNA, 514 bp, Homo sapiens
  MAP TO AC004889.1; EXPRESSED IN HELA, SIGNAL = 1.5; EXPRESSED IN BONE MARROW, SIGNAL = 0.85; SWISSPROT HIT: O95047, EVALUE 4.00e-42; NT HIT: X89663.1, EVALUE 1.00e-17; EST_HUMAN HIT: BE543056.1, EVALUE 2.00e-19
gggggacaaccaatcacgggtcacagaattcatcctggttggattccagctcagtgtggagatggaagtgctcctcttctggatcttctccctgttatatctcttcagcctgctggcaaatggcatgatcttggggctcatctgtctggatcccagactgcgcacccccatgtacttcttcctgtcacacttggccgtcattgacatatactatgcttccagcaatttgctcaacatgctggaaaacctagtgaaacacaaaaaaaactatctcgttcatctcttgcattatgcagatggctttgtatttgacttttgctgctgcagtgtgcatgattttggtggtgatgtcctatgacagatttgtggcgatctgccatcccctgcattacactgtcatcatgaactggagagtgtgcacagtactggctattacttcctgggcatgtggattttccctggccctcataaatctaattctccttctaaggctgcccttctgtgggccccagga

SEQ ID NO: 9139 - DNA, 507 bp, Homo sapiens
  MAP TO AC022085.4; EXPRESSED IN LUNG, SIGNAL =   1; EXPRESSED IN HELA, SIGNAL = 1.7; EXPRESSED IN BRAIN, SIGNAL = 0.94; EXPRESSED IN HEART, SIGNAL = 2.4; EXPRESSED IN BONE MARROW, SIGNAL = 0.96; EST_HUMAN HIT: BF576494.1, EVALUE 0.00e+00; SWISSPROT HIT: P54274, EVALUE 2.10e+00; NT HIT: gi11968022, EVALUE 0.00e+00
atgccacccggaacgtcctcttggtccaccaccattcctcaaagaatgtggaaagctgtttttcctagtattattaaagccatctttttcccatttccaatcccgctgtggaggtccacgatgatgccatgcaggctgactgtaactctctctgtcttggtaaggaattcggtcttctcgtctccattggggtcgtctgtcatcagagtttatttcttggttgctattggaaggttcatcttgtctggaagaaaaacagtttttcattagcgatttaaaggaattcctatgctaccttgaaaggcataacccaccaaacttcccttgtactttcctcccgttacttagaatatgtaaccgagtctggttttatatctaatagtggttgttttcatatctttaaatgatatatttaaacgtatattcctcaacttattaatttaaaaataaaacattttaaattacttaaatttcaagtaattacaaccatctcccccatcactcaga

SEQ ID NO: 9140 - DNA, 502 bp, Homo sapiens
  MAP TO AL022319.2; EXPRESSED IN HELA, SIGNAL =   2; EXPRESSED IN BONE MARROW, SIGNAL = 1.1; EXPRESSED IN FETAL LIVER, SIGNAL =   1; EXPRESSED IN LUNG, SIGNAL = 1.1; EST_HUMAN HIT: BF940871.1, EVALUE 0.00e+00; SWISSPROT HIT: P03183, EVALUE 3.10e-01; NT HIT: AB032946.1, EVALUE 0.00e+00
tagagcggtggtgggcaggcaccttggcatctgtgcagagacggcccagtctggccaaatcctcttcctctcccctgctctaccttctccggcaccaggcagccccttaaaggaggacaaagtgtgtaaagcccgtctgctgtcttcccccaaatcctcagctcagagccttccgcttccagggccaaccccagccccgtttgctgcgttgtgtaagggcttggggtcttagaagctgctctttagcccagatacacatactcttttttgtctttgtgcaataatcagtgttcctggcagagcctgggccaagctgcagcctactgaggaggcagaggccacctcctccagaaagccctcggcctgggccgccgccgtgactctagcactctcagtcgctgtacagtttctatggtgtgaatgaacttccctcctagttgctgatggcgctggtacctgctggcccatggcccgggtgtagagaaaccaagcggcagccacc

SEQ ID NO: 9141 - DNA, 540 bp, Homo sapiens
  MAP TO AP000336.1; EXPRESSED IN BRAIN, SIGNAL = 0.84; EXPRESSED IN HELA, SIGNAL = 1.5; EXPRESSED IN BONE MARROW, SIGNAL =   1; EST_HUMAN HIT: BE062073.1, EVALUE 1.00e-54; SWISSPROT HIT: Q05858, EVALUE 3.90e+00; NT HIT: M26549.1, EVALUE 3.30e-02
gccgcccactctcctcctcctggacatgcagccgcccaccctgctcctcctcctcctggacacacagacacctaccctcctcctgctggacacacagccacccaccctgctcttcctcctccccctcctccctgctgtttgctaaatgtgccccaactactcctccaggctctgaaacccagaggctctaacaccagaagtgctgggcaggtgttttatggtctctagggtggcacggaagcatgcttggtgctgaagcctgctgagacctgggctcacccgagcccctcgcagccctcgtgagtgtcccgcacgtcgctgggacgtttcttgcatgagtgcaggtgccgcctgttcctgggtccacactgcgtgcacctcattggcgtttagagcctgaaagattcttaattccacagaaatcagggaaggatgggcctaggcccgcagttctgaggagacccatgaacctggttcgtgtgcttgtcatgtgctctcgggaaatacatcctgtgtggagagcccttcgcatctcctgcg

SEQ ID NO: 9142 - DNA, 544 bp, Homo sapiens
  MAP TO Z73965.1; EXPRESSED IN HEART, SIGNAL = 5.5; EXPRESSED IN BONE MARROW, SIGNAL =   2; EXPRESSED IN LUNG, SIGNAL = 5.2; EXPRESSED IN FETAL LIVER, SIGNAL = 1.9; NT HIT: gi16172816, EVALUE 1.00e-123; EST_HUMAN HIT: AL110464.1, EVALUE 0.00e+00; SWISSPROT HIT: P22793, EVALUE 2.60e-01
gcgctttcctgcagcccttgtttcactccctggctctccttcactctctggctttccctctatctctggttttccctctctctctgatcctccctccatctctgactctccctccctctctgactttccttcttttgcctctccctcactctctggctttcctttatcctttaacatttcctcatctcctgttttgcccttgttttctgtctttccctcgttttctaacttcttgtcttccagagtacaagttacttctggctttctctcgtcttgtggctgttcttcattttccatctttccttggtttgaagccattccttcattttcactgtagagtttttccatgtcgagatttcccctccttttcctgtcctgggggatgggggtggaggaaagaggagacaaagaggagacatgggagactgagtgcatggggtggaatgcaggtctggatagtacttgcatctcacccctgatgagggttcccctaagctggccaggcctccaagagggccttctgcccaccacgtagcccgccact

SEQ ID NO: 9143 - DNA, 512 bp, Homo sapiens
  MAP TO AP000500.1; EXPRESSED IN BONE MARROW, SIGNAL = 0.73; EXPRESSED IN FETAL LIVER, SIGNAL =   1; EXPRESSED IN HELA, SIGNAL =   1; SWISSPROT HIT: Q80925, EVALUE 4.20e-01; NT HIT: AB026898.1, EVALUE 0.00e+00; EST_HUMAN HIT: BG424199.1, EVALUE 7.20e-01
ccccaagcacccaatggcagtttcctgacatgcttcatgtaccttcctgtgccttggaatctggattctatcatccagtttggcctcaatgacacagacacatgccaagatgggtggatctatcctgacgctaagaagcgatcgctgatcaatgaggtatgtcttgtcatgggttgtctgtaactaccctacaggctcagagttgtgcctcccaccctcactgaatgggtggggaaaccgaagctcagagatgggaagccattggcctgaggtcaacctgcagaggcagggtctgggcagaaaattagattcctgttgcccagccctggccctgcctatctatagagtacatttggggtagagatgggtgctgcatggcagggttttccatctgtccaagaaatcgctcctgtagttgtggttctgacctcagaactcacaaaaaatagggctcggggaaagaagcagctttgatcaggcatctcttacggggcttcccaacccgagctgca

SEQ ID NO: 9144 - DNA, 550 bp, Homo sapiens
  MAP TO AC007262.4; EXPRESSED IN HELA, SIGNAL = 1.4; EXPRESSED IN BRAIN, SIGNAL = 1.1; EXPRESSED IN FETAL LIVER, SIGNAL = 1.1; EXPRESSED IN BONE MARROW, SIGNAL =   1; SWISSPROT HIT: P54258, EVALUE 1.80e+00; NT HIT: AB051488.1, EVALUE 0.00e+00; EST_HUMAN HIT: BI458804.1, EVALUE 7.00e-63
ctgggcgtgtggaggctgtgactcttctctagctagaggactcttcttttgtgggaaggatagcatcttctgaggacccttgctatgtgagcaggctgacataggtggtgatgaggtctgttcctttctaggttcctgtagagatctgtaggtagctgttcactagggagttaactaagaaagagaacaaaaactattcatttggatccaaggtccatcaccgctggtagctgtggtggctttggattgtcggacgaccatcagcttcagcaggtctgcactagggaacaatcattcttccctagcccaagcgtgcctctgccctctgtatcgttgacagaggctgcatgtttggcaagagaacatagtgactgctgaactgaaagttgactctaactctcgctaccaagtttttccctgacacagtgaaagagtattaagacatcagcctaggacaccttgagaaccaaggacaagatggacagggccaagtaactgggcttcaaccatgactgggactaagaataagacaagaggccaggccaaagcg

SEQ ID NO: 9145 - DNA, 523 bp, Homo sapiens
  MAP TO U85195.1; EXPRESSED IN BONE MARROW, SIGNAL = 0.77; EXPRESSED IN HELA, SIGNAL = 1.1; SWISSPROT HIT: P23270, EVALUE 4.00e-34; NT HIT: AE008683.1, EVALUE 1.00e-102
ggccgtggggactagggcagctgccccatccagggggctgttggtttcaggcctcaggtagatgaaggcacagggcacatagtacacggtgaccacggttacatgggctccacaagttgaaaaagcccggcgccgcccatcagctgtgtggattctcaggatggcctgaatgatctgtatgtaggagaggaggatcagggagaagcaactggcaaccaccaccccaatgtctacaaacgtcaccagctcgttgactgttgtgtcagcacaggccagtctcaacactgcagggatgtcacagaagaagtaatccacctgattgggcccacagtagggcaggcggaaggttaggatggcctggagagccccatggatggatcctgccatccaggctccagccacaagcaaggcgctcagcttagcagtcatgagcacagggtagcgcaggggctgacatattgccaggtacctgtcataggccattagggtgtagaggaagcactgggtgctgcccaggaagtga

SEQ ID NO: 9146 - DNA, 561 bp, Homo sapiens
  MAP TO AL031277.1; EXPRESSED IN BRAIN, SIGNAL = 1.6; EXPRESSED IN HELA, SIGNAL = 0.94; EXPRESSED IN BONE MARROW, SIGNAL = 0.9; EST_HUMAN HIT: BE256261.1, EVALUE 0.00e+00; SWISSPROT HIT: P51107, EVALUE 7.00e+00; NT HIT: gi16168391, EVALUE 0.00e+00
tccagtggctgctggttgcacacactgctaaaagcagaactagctgtccactctttagacattttatattcatcaaagcatggagggctcacagtttctctctcatctctcccagacaaactccatgctggtgagtcgctgtgactttctaatttggattttttggaagtcagcccggcatcggtccatgctgctttcccatcacttggctttccaaagtctcgaagggcaggactgtgctgtggagaactgggaggagagctggtccgcctcttaaacctacttgaggtcacaggcaacattgatgcaggagcagacacacaaacaggacctaatttagctatttcagttgctgaaatccctgcaggagttagtttatcttgggtttgaagaagttgtttgagctttgatgacaaataaacacttttctctttgtggaaagacactgcctctgttgttgatatgctaagaggaagacttaaagagcaagaggggaccatggggtcagagtctgtttcggccttaattttgggcagtgcaggtgggctcgcagttctccgc

SEQ ID NO: 9147 - DNA, 500 bp, Homo sapiens
  MAP TO Z49918.1; EXPRESSED IN BONE MARROW, SIGNAL = 0.85; EXPRESSED IN BRAIN, SIGNAL = 0.91; EST_HUMAN HIT: AI357315.1, EVALUE 1.00e-08; SWISSPROT HIT: P08547, EVALUE 2.00e-04; NT HIT: AL163209.2, EVALUE 8.00e-03
ggcattggaagaagatactgatgacgccgaaggctacctaaattctgggaactcaggagcattgaaaaaacatttttgtgatattaggcatttggatgattgggcaaaaagccagctgattgaaatgctcaaacaggcagcagccctggtgataactgtgatgtatactgatggttccacccagctaggagctgaccaggttagtaaacagtgatgtttttatttgctgtcttgacaccataaaagaagcccattttcttagtgtcagattttgataggagagctagaaacaagattttaaggctttccttcccctccagtggtaagtgattgacaatgtatgctcccatcagtttcttaggaaactgtaaaactgttttccagagtgggtgtaccattttaccttccaccagcagtgtactagggtttcaaattctccacctccttgtcaacacatgttgttgtctgtttttttagccattccagtgattccgaagtgg

SEQ ID NO: 9148 - DNA, 516 bp, Homo sapiens
  MAP TO AC008283.3; EXPRESSED IN BONE MARROW, SIGNAL = 1.6; NT HIT: AJ403947.1, EVALUE 2.00e-19; EST_HUMAN HIT: BF992473.1, EVALUE 1.00e-17
gccgttcacaacagggttcatgctcctatgagaatctaatgctgctgctcacctgacagaaggcagagctcaggaagtaatgctctcctgctgcgtggcccggttcctaacaggtcagggacccagaccggtccatggcccaggggctggggacctttgttctatatgatattatttattatatattgacagttgccctctttttcctccctacccctgacaaatagtaatgttttacattcacatatacttccagtttcttgcttcagatgagattagaagtacatgagtgttcaatattttttcactatagaagactgctcagtgacaatctagccttgaacctactaccagttgctgacaaatttagctaattgtcttagattaggagtaaaattagttctcattttctgtcaacttttaagaaatgaagatctttatccctgttagaaaattcgattttgtaaaaattaagtcttttatagatgtccaaggccaagcctactaaaagcagtg

SEQ ID NO: 9149 - DNA, 500 bp, Homo sapiens
  MAP TO AP000344.1; EXPRESSED IN BONE MARROW, SIGNAL = 1.6; EXPRESSED IN LUNG, SIGNAL = 1.6; EXPRESSED IN PLACENTA, SIGNAL =   2; EXPRESSED IN HELA, SIGNAL = 0.76; EST_HUMAN HIT: BG753829.1, EVALUE 2.00e-50; SWISSPROT HIT: Q02388, EVALUE 7.00e-01; NT HIT: gi14777147, EVALUE 1.00e-50
caggatgccagagccacagcctaaaggaggcccaggctgccacatgatactgaccccaaagagaaagccccatggcctcctacgtgctgggtctgtgccagctctggaagaacaagtcattgggatcaggacacaaattctcataccctgtccccagagcatgcccaggacatcctcagagctgggccacacgggctagccaaagccttcaatgcagggtgaggcgcatcctccctgtcccgtccccagagaaaaactcaggcccctgggatgacctatgagtgcccagccaagaggggccctgcagacggctggacagctgccctgtgccaggaagcccacccgcacctcccagcacccacctctgcacggtcagcgagggcggtggctctaggaggtccatttggatgaaggtgacacctttggggcctgtgtaggatggtgagtggggagtgccgggcggggagggcaggccctggcgtgcgggcgacctgtgtgag

SEQ ID NO: 9150 - DNA, 525 bp, Homo sapiens
  MAP TO AL022393.1; EXPRESSED IN HELA, SIGNAL = 2.3; EXPRESSED IN BONE MARROW, SIGNAL = 1.4; EXPRESSED IN LUNG, SIGNAL = 1.3; EXPRESSED IN FETAL LIVER, SIGNAL =   1; EXPRESSED IN BRAIN, SIGNAL = 1.3; NT HIT: U88081.1, EVALUE 0.00e+00; SWISSPROT HIT: O15535, EVALUE 1.00e-23; EST_HUMAN HIT: AU121601.1, EVALUE 1.00e-121
tgcttgaccaggtgggattcgttcaacatcaaataaatgctgtccctcacctgtctctccaatagaatggcacttctgagcagagtcacatgtgagctgtggctccttaggctgggactgaagggtcagtggtgtctgctctgctagaggcaccatctctttacagaggacttcttgtctgtgtctgtgggccaccatctggggacaaaaagacaagatttgacttttgaagaaattaactgtctgaaataaacacttccaagaaagaaggaaacaggaagagagtattttatcaccaatgtcaaggagacacaaagcagaagtgacaaggattcttggcatgccaaaatacacatttttctctagcaaatctcccttcctacctcatgttgtggttcatcgagctctctctccagatcctccagcaaaatcacagcctcttctccactctctggacagtgttccctcacccagccctggagctccttgggcagaatggatagaaactgctccagcaccagcaga

SEQ ID NO: 9151 - DNA, 514 bp, Homo sapiens
  MAP TO AC011493.2; EXPRESSED IN BRAIN, SIGNAL = 0.87; EXPRESSED IN HELA, SIGNAL = 1.1; EXPRESSED IN BONE MARROW, SIGNAL = 1.1; EXPRESSED IN FETAL LIVER, SIGNAL =   1; SWISSPROT HIT: O75437, EVALUE 2.00e-57; EST_HUMAN HIT: BF921029.1, EVALUE 3.00e-86; NT HIT: gi4758513, EVALUE 5.00e-81
cccagagcaaagtatttcaatgcggtaaatgtttgaaagtcttttataaatttgtaaattcaaacagacataagacacactggaaggaaacctttcaaatgtaaaaaaatgtgtcaaatcattttgcatgctttcacacaaaacccagcataaaagcatttatactacagagaagtcctacaaatgtaaagaacgtggaaaaatctttaattggtcttcaacccttactaatcataagaaaattcatactgaagaaaaaccctacaaatgtgaagaatatagaaaagcttttagtctatcctcaaatcttactacacataagataattcatattggagagaaaccttataagtgtgaagaatgtggcaaaacgtttaacaaatccttaaccctaaccatatataagaggatgcacactgaagagaaactctacaaatgtaaagaatgtggcaaagcatatgtatggtcctcaaacctaactaaacataagaggatgcacgctggagagaaaccc

SEQ ID NO: 9152 - DNA, 502 bp, Homo sapiens
  MAP TO AC011553.3; EXPRESSED IN HELA, SIGNAL =   1; EXPRESSED IN BRAIN, SIGNAL = 0.8; EXPRESSED IN FETAL LIVER, SIGNAL = 1.1; EXPRESSED IN BONE MARROW, SIGNAL =   1; EXPRESSED IN LUNG, SIGNAL = 0.96; SWISSPROT HIT: P23246, EVALUE 4.00e-05; EST_HUMAN HIT: BF891619.1, EVALUE 5.00e-17
gccagggtcacacgcccaacaggtaggatccagcaacccctgcgcagcagcccccgccatgcgagggaggacccggagttgagcgtggccctgcctgacatctgaccccgccgtcaggagctccaccaggtcagggctgctcagctgaccccacagccccaccaggcatggtcagcacggtgccgaatgcaggcctggaaagggaataaaggaggccctggggaggggccttggtgcttcatcccaagccaaccccgaaagtggaagccacagggccagggggacgtcgtggctgagatgcgagcagggtgccgggcacccccaaggcagcactgctgtccctgagaacagaaggaagtccaggcccagagtcagagccaagtggagtagtggtggttgctggcactcagtcccgtacccttggacagagcaagagtcccaagccaggaatgtgaggccgatgccttttaggaagaaaccacatctggggaaccagacccca

SEQ ID NO: 9153 - DNA, 548 bp, Homo sapiens
  MAP TO AL121653.2; EXPRESSED IN HELA, SIGNAL =   1; EXPRESSED IN BONE MARROW, SIGNAL = 1.4; EST_HUMAN HIT: AI161358.1, EVALUE 9.00e-50; NT HIT: AY027787.1, EVALUE 4.00e-91; SWISSPROT HIT: Q9SYQ8, EVALUE 1.80e+00
gcccacggactgcaggttggataagcttgatttaatgctaaatctccaccccaaagtgaacatgggttgtatgttacatgcatgtttattcaatatgcatgtatcaagaccaccttcatgaatattcatagctcctcctgtaatctgttgaatatgtatgtttagccaacccattcaacataaagtgtctaccccaacccctccttcgaggtgcctgtctctggtcttggttggaggcatgtttctcagcctgtgggatggccaccttgcaggctgtaaccctttagaagaaataaagtctcctctctccttttccaaatttatacactgttatttttttttaagtgaacaaagcacaaaccactgatatttacaatacccggcagccgttgattctgtaggtcatgaatactcaaggttttcaggtttgttacagatgtgatgtgcctctcatcttctatggtgaggggactggcttccaccatgagagaataaatgttcttacaggtgctgaggaccaaactgaggcttccagccacaccagcaca

SEQ ID NO: 9154 - DNA, 521 bp, Homo sapiens
  MAP TO AL137185.3; EXPRESSED IN LUNG, SIGNAL = 1.3; EXPRESSED IN HELA, SIGNAL = 2.1; EXPRESSED IN BONE MARROW, SIGNAL = 1.3; SWISSPROT HIT: P39553, EVALUE 8.30e+00; NT HIT: gi16172557, EVALUE 1.00e-100
gcatcagtcttgtggccaggggactattttatattaataagtgataaaattatttaaatattccttgagctcacatttaatcaataacagaaatgtaactgaaaaaataatagaaatgtttacttagccaaaaaggaaatctccagaaatttacattagtcaataaataaaatttgtacccaaactatgtcaattaaaaaaatattctgccccatttaatcacatgaaactgcaacagcaacaaaaattctgtgtaaacagttgtttaattgaactgatgctcataccccaggaacatatttacatcatctttttccttttttttttcttcttcagagtaaaaggccaagctatgatagcaactggtggagtgataactggcctggccgccttgaaaaggcaagactctgccagatcacagcagcatgtcaacctcagcccgtctcctgctacccaagagaagaagcccatcaggcgccggccccgggcagatgttgtggttgttcgtggcaaaatccggc

SEQ ID NO: 9155 - DNA, 515 bp, Homo sapiens
  MAP TO AC009288.8; EXPRESSED IN BONE MARROW, SIGNAL = 0.87; EXPRESSED IN HELA, SIGNAL = 1.4; EXPRESSED IN BRAIN, SIGNAL = 0.91; EST_HUMAN HIT: BE531263.1, EVALUE 0.00e+00; SWISSPROT HIT: P18583, EVALUE 2.40e-01; NT HIT: gi11427757, EVALUE 0.00e+00
ctcctgcgtggtcgtggtcgtgaccttggacctgaggcttctgggctgcacgtttgtctttgctaaccgggggaggtctgcagaaggcgaactccttctggacgtccatcaggccctgccggtgcaccacctttgtagccggctcttggtgggatttcgagagtgacttcgccgaattttcatgtgtgtctggtttcttctccactgacccatcacatttttgggtctcatgctgtcttttctcgttcagaaactgttctatttctgccctgatgctctgctcaaaggagtctgctctgctcatgctgactggggaggcagagccctggtccttgctggatcccacctggctgccagggccacaccacctgagccaggtacaagttttggggaacacagggcagttgggcactgctgtgagccagttcccgcttacatctactgcctccgcctgcagccctggaaggctgtgcatggctgggccccgctggccccgggctgtgcggctccactct

SEQ ID NO: 9156 - DNA, 501 bp, Homo sapiens
  MAP TO AL163636.2; EXPRESSED IN HELA, SIGNAL = 0.36; EXPRESSED IN BONE MARROW, SIGNAL = 0.94; EXPRESSED IN FETAL LIVER, SIGNAL = 0.97; EST_HUMAN HIT: BG176590.1, EVALUE 6.00e-66; SWISSPROT HIT: P81265, EVALUE 5.30e-01; NT HIT: X55888.1, EVALUE 2.00e-31
gctgccttccttcaccccatcctgcatctggatcgaggagaataagccagagaataagccacacttgaaacttggtgaagatggaaggaataactaaataaggcctaagggaaatgtcacaacagaggaaaagaaacaaaacaaaaaaccttcagaacagcaggcggaaaagagaaattcagagtgataggaagcaccactcagctacagtggctcgttggtctaggggtatgattctcgctttgggtgcgagaggtcccgggttcaaatcccggacgagccctcgtggctactgtttttccacccccttttgtcaactactgaaaaaaagtctccgttaaatttgaaacacaaactgtctcgcgatgggctgtcctgccaaagaaagcagcagcgaataagtacgtggcagatggtgctgtcgaccagtgtcaagaccaagtttcatgggttcctggacgctcagccaggggtagtctctgaagggccgcctggcaattg

SEQ ID NO: 9157 - DNA, 532 bp, Homo sapiens
  MAP TO AP000053.1; EXPRESSED IN HELA, SIGNAL = 2.4; EXPRESSED IN BONE MARROW, SIGNAL = 1.3; EXPRESSED IN FETAL LIVER, SIGNAL = 1.2; EXPRESSED IN LUNG, SIGNAL = 1.2; EST_HUMAN HIT: AI190993.1, EVALUE 0.00e+00; SWISSPROT HIT: P08680, EVALUE 4.90e+00; NT HIT: gi15616630, EVALUE 7.90e+00
ggccacccacgaacttcccctccggccagtggctgcaatcacatcttctctaaagacgtctgaagcccagccttggggagccgagttggtccttccctgggtactgagccctagggaacccttgagagttctctttgtatctttgtagtttcttcctcaccacttaatcatttccttacaggaaacttcctgtgttcaagtgactgtatggtttctgcctccagcttcatttgtgggtgccataagagaggcaagcatggagcactaggcgcaggggatgggcaactggcaagcggggagatgcatgcagcgcacttagtgcctggtacataccaagtccttttagtctggatttcattatttttaaatgggtattgctatttttaaaagaatagttacaaatatttattgtgtgttttgaaataagtgggtcaagatcaataagatattgttgatcaattgatcaataagatatcttttattcttaaaaatcatattcttctggttcagtggggaagagactgccgacctg

SEQ ID NO: 9158 - DNA, 505 bp, Homo sapiens
  MAP TO AC010519.6; EXPRESSED IN LUNG, SIGNAL = 1.2; EXPRESSED IN BRAIN, SIGNAL = 1.3; EXPRESSED IN HELA, SIGNAL = 1.4; EXPRESSED IN BONE MARROW, SIGNAL = 1.3; EST_HUMAN HIT: BE069035.1, EVALUE 1.80e-01; SWISSPROT HIT: Q06880, EVALUE 2.40e-01; NT HIT: gi11425304, EVALUE 1.00e-53
ccagccagtgcctgcccttctctgtccgtcgggtagtccctctccctgccggtccctctcctctccatctgtcagcagcccagccagtgcctacccttctgtctgttcactggtccctctctttgtctgtctgtctgccagtccctctcactgcctaacagttgtcctgccccttgtctatcagtcagccaacctgccaatccatcttcctgccagttcagccagggccctcacccttcgggcctcctcttaggggccacctgtgccatgactgagaccttccccccccagctgccacagtggcatccacttttggatcttggcgcctcgccccaggacccctcttcctcccaaacccgcctcctccggtacctgctcccttgccccgccctgcttacctggggcaggaacatctgcagggagtcctgagtgaggatggccgtgggggtggcagagggcggctgccccaggacgatcttctccgggctagacgccaggccagggc

SEQ ID NO: 9159 - DNA, 523 bp, Homo sapiens
  MAP TO AL022319.2; EXPRESSED IN HELA, SIGNAL = 1.4; EXPRESSED IN BRAIN, SIGNAL = 0.9; EXPRESSED IN BONE MARROW, SIGNAL =   1; EXPRESSED IN FETAL LIVER, SIGNAL =   1; EXPRESSED IN LUNG, SIGNAL = 1.1; SWISSPROT HIT: Q42713, EVALUE 3.20e-01; NT HIT: U93874.1, EVALUE 1.30e-01
agccctgctggtggggaacctcgctggtgagcttagaggactcccagtgtgctggccatgctgctcttcttttaaaaagccatgatgaatcttctttgaagacacttctaaagtatatgcaaaaaatacaaaaagcactgagaggatggctgtattcaattgaggggcatttccaatgatacttattcagctaacagacatttactggggcatttactatgtactaagctctggattagaggcagaaactagaatgatgaacaagacacagcccttgctctcaaaaaactacagtggctttggtttgatggtgagggaaataacaggcaaggacaacccagcagaatcggcaccagatctgaggcaggcacagggtgtcttcagagcccagaggaggagaacaatagcccctgccttccaaatgccagtgaaggctttctgggaaaagtgacatcttagctaaatcccaagaatgagcaagattcagacaaatgaataggaatggaggacggaggcaagggga

SEQ ID NO: 9160 - DNA, 517 bp, Homo sapiens
  MAP TO AC007606.2; EXPRESSED IN PLACENTA, SIGNAL =   2; EXPRESSED IN BRAIN, SIGNAL = 1.2; EXPRESSED IN HELA, SIGNAL = 1.7; EXPRESSED IN BONE MARROW, SIGNAL = 1.2; EXPRESSED IN LUNG, SIGNAL = 1.3; EXPRESSED IN HEART, SIGNAL = 1.5; EXPRESSED IN FETAL LIVER, SIGNAL = 1.4; SWISSPROT HIT: P04260, EVALUE 9.40e-01; NT HIT: X91928.1, EVALUE 4.90e-01; EST_HUMAN HIT: BF803467.1, EVALUE 4.60e-02
ccgtgcagcaggaggtgcagggccttgaagttcagcaccccgcactgtgggatggcgatgttggccagctcggtgaacgtgagtgagaagctcatcctgccagggtgggtcagtggggctggggttccaggtgtcctcaaggacaaggggtagctttcagtggttccgagagctacatggactggtcctcagaggcctggggtggtggtgagtcacagcagtcagggaggaatggcctctgttctggctggagctcagatcagagtctctggttgccaggacaccaaagaatgtgatgaaacgggcgcaattcaaagtctggagtggggcaggtgctccctggtaagcctcacccagagtaggtgctcagttaatattggatgaatgtttgaatagctgatggcagcctcttcattcaagccctctggtgatgtgagactggtaactttttcctagaagcacatatggaagggatggagaggcagctccctccttggaattttctcgaatccgggca

SEQ ID NO: 9161 - DNA, 501 bp, Homo sapiens
  MAP TO AC011536.5; EXPRESSED IN BONE MARROW, SIGNAL = 0.74; EXPRESSED IN HELA, SIGNAL = 1.1; NT HIT: gi13651412, EVALUE 0.00e+00; SWISSPROT HIT: Q9Y493, EVALUE 5.00e-17; EST_HUMAN HIT: BE873050.1, EVALUE 0.00e+00
aagtccggccgcctccactcgccgagctgggccccagcggcctgacaggctgccacgtaggtagccactgcaggacagaggcctccaggatggccctgaacttggcaggcgtccagcaagcagccctggaagtactgcgcgggcggcacaaggccgtggcagggtgccagcgggccgtcggtggcggagatcacgccgcaggcgtccgggccgccgaaggactcctgctgctctggggtgcacggcgacgggcatggcttggacacacattccccgcagccctgggccccgcccacctgccatccagcgggcttcccgcccacagccttgaggtcgtctgcggggtcctggttgtagttcccgcataagccacagagagaggccgcgtacgccgccggcacgcgcaggcgcacgaagctgtccccatcgaaagccagcgagagccctgaggttgtggtcaccaccacgtcggcgccgctcaggtgtgcgtgcaggagcgag

SEQ ID NO: 9162 - DNA, 519 bp, Homo sapiens
  MAP TO AL009181.1; EXPRESSED IN HELA, SIGNAL = 0.93; EXPRESSED IN BRAIN, SIGNAL = 0.97; EXPRESSED IN BONE MARROW, SIGNAL = 0.88; NT HIT: gi14732044, EVALUE 0.00e+00; SWISSPROT HIT: Q13554, EVALUE 1.40e-01; EST_HUMAN HIT: BG489644.1, EVALUE 2.90e+00
tcagcgagccttgccccttgctagaactcagggctgggactgtatcccgtatccaaagatgaggccacaggccctttgcacaggcgccctatctggtgaccaaatcttcagctgtagccacacccagctgtcctgtctctgggtctcccctcacaggaggctcctccctactacacagaggcccagtcttgcagctcagttttcaagcaactgtccccaccactgccctttctgggtcctgggcccggacccccaactccgaaagtccggctccaagttagaaaccgaagctgtctcaaggttgaagccccgccttcctggagatgccctgtttaaggactcagttgtagagccacaggtcccgctcctctcctggagtcactggctttcccgccccacctagagccgtggacggggcacccagaccagaggcactgcgccattgatctgtcctctgcctcgccccaaaccagaggcccaccccatgcccatctagcggcccggtcccgtctccgaaac

SEQ ID NO: 9163 - DNA, 512 bp, Homo sapiens
  MAP TO AC003973.1; EXPRESSED IN BRAIN, SIGNAL = 4.4; EXPRESSED IN BONE MARROW, SIGNAL = 3.2; EXPRESSED IN HEART, SIGNAL = 1.3; EXPRESSED IN PLACENTA, SIGNAL = 3.7; NT HIT: gi6005975, EVALUE 0.00e+00; SWISSPROT HIT: O43345, EVALUE 3.00e-87; EST_HUMAN HIT: BI093435.1, EVALUE 7.00e-69
gcaaagcctataagtggccctcaacccttagatatcacaagaaaattcatactggagagaaaccctacaaatgtgaagaatgtggcaaagcctttagtacgttctcaatcctcactaaacataaggtaattcatactggagagaaaccctacaaatgtgaagaatgtggcaaagccttcagctggttatcagtcttcagtaaacataagaaaattcatactggagagaaactctagaaatgtgaagaatgtggcaaagcctataagtggccctcaacccttagttatcataagaaaattcatactggagagaaaccctacaaatgtgaagaatgtggtgaggctttcaactggtcctcaaaccttatggaacataagagaattcatactggagagacaccctacaaatgtgaagaatgtggtaaaggctttagtatgttctcaatccttactaaacataaggtaattcatactggagagaaaccatacaaatgcaaagaatgtggcaaagcc

SEQ ID NO: 9164 - DNA, 500 bp, Homo sapiens
  MAP TO AC005332.1; EXPRESSED IN HELA, SIGNAL = 0.55; EXPRESSED IN BONE MARROW, SIGNAL = 0.83; NT HIT: AL161537.2, EVALUE 4.70e-01; EST_HUMAN HIT: AI492423.1, EVALUE 0.00e+00; SWISSPROT HIT: Q08881, EVALUE 3.50e+00
ccaccagtgctccgtgctgcgccgcagcagccagtagcgctcattgggccagatggccacgcggcgccagtccttgcgggtatactcgaaggggtgctccaccaccaggtagacatccccctccacatacgccggcatcgtggccgcggcgtttttctgcaggcaacaaggaggagggccgtggaggtcaagaccaccgagcctggaatagccccgcactcggggacagacttgggttcgagtcccgatgctgcattcgccgttcgccttcgggcctgagtttttccatttctaaaatggggacttgaataaaatcacatgtaaggcttccattcttacactcagtgctggaattacgacaacctcttcattccgtggggttgattctaagatttcagcctcgcttcagtcctgcggtggggagattgtgggtagtcttggtccaaatcgactgcgagggaaactttggttttaaaacgaggggtgattgcccgctctga

SEQ ID NO: 9165 - DNA, 539 bp, Homo sapiens
  MAP TO AC004687.1; EXPRESSED IN LUNG, SIGNAL =   1; EXPRESSED IN BONE MARROW, SIGNAL = 0.77; EXPRESSED IN HELA, SIGNAL = 0.79; EXPRESSED IN BRAIN, SIGNAL = 1.6; EST_HUMAN HIT: BG286145.1, EVALUE 7.00e-29; NT HIT: gi14769777, EVALUE 1.00e-94; SWISSPROT HIT: Q02080, EVALUE 8.00e-03
agagtgcccacctgccagccccagtacctactgggccaccttctgccacttacggcctggcacaccctatcaggcccaagtggaggctcagctcccaccccaagggccctgggaaccaggctgggagaggctggagcagcgggctgccaccctgcagttcaccacactcccagcaggtatgtgggcttgggccctgttgtccagaacacccaggaggccaggccatgggtgacggaagaaggggaccctgatcttatttgcgttatcagggaaatagcaaattgggcaggtatctctgatggggagcgtcctgcatcactgggtcttgtgcccccctgcccccaggcccacctgatgcccctctggatgtgcagatcgagcctgggccctcccctgggatcttgatcatcagttggctcccagtcaccatcgatgctgctggcacatccaacggtgtccgggtcacaggctatgccatctacgctgatgggcagaaggtatagccctgcccactgtaccctgggagtgggggtgggtcc

SEQ ID NO: 9166 - DNA, 526 bp, Homo sapiens
  MAP TO AL139423.2; EXPRESSED IN BRAIN, SIGNAL =   1; EXPRESSED IN HELA, SIGNAL = 1.1; EXPRESSED IN LUNG, SIGNAL = 1.1; EXPRESSED IN BONE MARROW, SIGNAL =   1; EXPRESSED IN FETAL LIVER, SIGNAL =   1; SWISSPROT HIT: P54119, EVALUE 1.70e+00; EST_HUMAN HIT: AW893567.1, EVALUE 7.40e-01; NT HIT: L32607.1, EVALUE 2.00e+00
cgggctccacctttcctcggctccagggactaggtgtccagttcagagttactctccgagtcagcccaccctggcctccggttggcccaactctgggctccgcataactgccccagaagcatcctctggcctcagcaacctccatcctgtttgaggggtcggcttgtgggccttggcaagctttggcctctcggccatgtttggggacaactatgtgggcagagacctctcttcctcaaccaactctgtgagtcacctcttggtgactgtctacgatggtagaagcagtcctgtacccgcgctaggcaggatctgcggtgagaaccccaagcccttggctctgttggatcgtgccattaggaagggacaaggagcctgggagcagccgggcagagagaggcagcagagatgcctcctccactccccacagcacccaatcctctccccacagcacccaatccacaccccacagcacccaatccgccccccacagcacccaatccacaccccacagcatccaatccgc

SEQ ID NO: 9167 - DNA, 510 bp, Homo sapiens
  MAP TO AC006313.1; EXPRESSED IN HELA, SIGNAL = 1.2; EXPRESSED IN BRAIN, SIGNAL = 0.9; EXPRESSED IN LUNG, SIGNAL = 0.99; EXPRESSED IN BONE MARROW, SIGNAL =   1; NT HIT: AJ133424.1, EVALUE 5.00e-04; SWISSPROT HIT: P23266, EVALUE 2.00e-05; EST_HUMAN HIT: BE765305.1, EVALUE 1.80e-01
gaatccagcaacctcttccccgggacaaaaaagacaataataagactaaggagatggtcaagaaacaacctcagaataatctttacaaaaggaaatgagaagaactcaaacaaattaggccacatagaagttcctatgagcacatggaaaacctttagtttctaatttagaagacagcttggcatcctttaacttttcttttgttgaattttactatctgtttctatgtagtttcagaattaaatgttctttcgaagtataatagcagtaagatttttaaaatagatttgaggtggggaagaagctgtcttggtcaaactgtcctttacatctctcccattgcttctctaaaccctatccaggaagtccagagacatggagacaaagaattatagcagcagcacctcaggcttcatcctcctgggcctctcttccaaccctaagctgcagaaacctctctttgccatcttcctcatcatgtacctactcactgcggtggggaatgtgctc

SEQ ID NO: 9168 - DNA, 511 bp, Homo sapiens
  MAP TO AC007238.3; EXPRESSED IN PLACENTA, SIGNAL = 1.5; EXPRESSED IN BRAIN, SIGNAL = 1.1; EXPRESSED IN HELA, SIGNAL = 1.5; EXPRESSED IN BONE MARROW, SIGNAL = 1.2; EXPRESSED IN FETAL LIVER, SIGNAL = 1.5; EXPRESSED IN LUNG, SIGNAL = 1.4; EXPRESSED IN HEART, SIGNAL = 1.3; EST_HUMAN HIT: BF344727.1, EVALUE 1.00e-91; NT HIT: gi14736551, EVALUE 1.00e-101; SWISSPROT HIT: Q13123, EVALUE 3.00e-23
tgtggccgactcattgggaagataaaggaaggagcgtatcagctaagtcagagggaggaaaggaatgtgtggccaataaacaaagttaaaattgttcaatctctgtattacctaacagatattttcacttcccacatcactgatgaaattttattggtttttattttttatatccccagattaatagcttaatcattaactattaagacaggcacattttccttaccatgcagacaactaagtttccaaaagaaaactggatctcagcatcttatccaaagacagacaaataaaaatataactacaagaaacacagatagtaggttggagactcgattgttgatgacagcggaagaatgataacaaaatgccggagcgagatagtgagccgttctccaaccctttggcccctgatggccacgatgtggatgatcctcactccttccaccaatcaaaactcaccaatgaagacttcaggaaacttctcatgacccccagggctgcacctacc

SEQ ID NO: 9169 - DNA, 524 bp, Homo sapiens
  MAP TO AC004152.1; EXPRESSED IN LUNG, SIGNAL = 1.5; EXPRESSED IN PLACENTA, SIGNAL = 1.5; EXPRESSED IN HELA, SIGNAL = 1.1; EXPRESSED IN BRAIN, SIGNAL = 1.8; EXPRESSED IN HEART, SIGNAL = 1.4; EXPRESSED IN BONE MARROW, SIGNAL = 1.9; EST_HUMAN HIT: AI871145.1, EVALUE 1.00e-82; NT HIT: gi15301269, EVALUE 5.00e-04; SWISSPROT HIT: Q13285, EVALUE 2.50e-01
agggcttgggggcagcagtcttgtgcctcctgggtgtgaattgcgggccctgaggatcctggggtctctgagcgcccccagccaccccgggttggtagacgggagcccatccccccatccttgcagcccgcacccccaccccccagctcagccaccatagcagggacaggaagacgggttgaaatctttagaaaacgcttgagaaactgcaaaaaagacgcatgctgatgaaaaacagtcctgcggttgggcgtctacaaaaaaaggggaagttctgcctggggagcgccgtgcagccgtccccttcccctccgggaaatgcataggtggacacgcgagcggccggcccgcgggggaggggaggggagggtccgccctggggacccctcagatcatcttcatgttgaacttgcgcgcgcctccctggcccgccgcggcggccggcccatccaccttgcggaaggagtactccaccgagaagttgtttttgtgctgcccgcggccgcggctccacacgaacagca

SEQ ID NO: 9170 - DNA, 551 bp, Homo sapiens
  MAP TO AP000127.1; EXPRESSED IN BRAIN, SIGNAL = 1.5; EXPRESSED IN HELA, SIGNAL = 3.9; EXPRESSED IN BONE MARROW, SIGNAL = 1.3; EXPRESSED IN FETAL LIVER, SIGNAL = 1.6; EXPRESSED IN LUNG, SIGNAL = 1.6; EST_HUMAN HIT: BE698042.1, EVALUE 3.00e-03; NT HIT: gi11466252, EVALUE 3.40e-02
tgaattgtccacttatggctatgcccaattttctgttcaggcacttatttttcttactcatttgtaacaaacctttacatattaaacatacaagctctttcacagggattacaatatttttttcttctactactcttgccttttaattcggatcactgtattgttgacatacagttataaactatagattttttaaataatttcttcctatgttacttaggcttaaacagaccttcaccataccaaaaggttcatctacttcttctactcgtttggtaagaaatttttttttgacatgtaactataacttttctggaatttaacttgctataactttatttagaatgttgagatgaaatttataaatgagattggtgttatggattttttttctactttcatgaccagattggggtaataatagtttgtaaaataataccagctatctatatgtcataaaagagtgtatacagtataacactgatctatattctttacctgtgcttaacaaagtaacagagcttactagttcagtgttctgggcccaaagc

SEQ ID NO: 9171 - DNA, 539 bp, Homo sapiens
  MAP TO AL096712.17; EXPRESSED IN BONE MARROW, SIGNAL = 0.99; EXPRESSED IN HELA, SIGNAL = 1.2; EST_HUMAN HIT: BG029939.1, EVALUE 7.00e-32; NT HIT: AB012770.1, EVALUE 2.00e-31; SWISSPROT HIT: Q01522, EVALUE 3.00e+00
ccagggcagaggaaccagctgacctgtacctgccctgagactaagtgatttggccttggccacagagcaaagatacacaagtcttgaagacaactattgattcaattggactatactgtggttttgtggcatgttgaccttcacctaacttccccctgaattcatgttggttctgagttgcctcagctttgcctcctgggatgagttatgccctggctggctctgctggtcactttaccctatcttggcactctaactctggctcctgatctcatcagcatgctgaagccttaaccctctactcaatccccttcccttatctcaaaagtttactgttcccattccatttcctgtctttggtgctcagaatttggtacctggcccagaaactgagaactctggccagagactcatgaagtgcctgccccacccctgaagaccactcttgcccttcccttctgtgtggtacctgaagatgctgttcctcttcctggaaagtcttctctagttgctccactcttgcctgctgctgagcctgc

SEQ ID NO: 9172 - DNA, 544 bp, Homo sapiens
  MAP TO AC005146.1; EXPRESSED IN BRAIN, SIGNAL = 1.7; EXPRESSED IN BONE MARROW, SIGNAL = 0.79; NT HIT: gi16188056, EVALUE 0.00e+00; EST_HUMAN HIT: BF963362.1, EVALUE 0.00e+00
atcctcccagaggacggcggcccatacaccaactccatcctgtttgacagcgatgataacatcaagtgggtctgccaagatatggggctgggggattcacaggactttagagactatatggaaagtctgcaagaccagatgtaaactcctttcttatgtttgtattcacctttatgccttctgttttttgaatgctggagcagtgagtttgatcagcaataggggatgatttaacaaagtttgatttgtggaggtctggtgggattcatttctaagcaggtaaaagaggtttggagagctatagaagctgggttttaagtttggaaatgcctctaaaacagccacatgtggggactggagaaattctaagacaacagttttatggactgcctggtacgagctcagtgcaaatgtattaaacctgaccccacagacattgttagtcatctcgtgacaaatggccatgtggaattagaaaagatttgggtgttgatttttctatttctagaccttttaaagcacagtggacacttattgccccttg

SEQ ID NO: 9173 - DNA, 503 bp, Homo sapiens
  MAP TO AL031277.1; EXPRESSED IN PLACENTA, SIGNAL = 2.1; EXPRESSED IN BRAIN, SIGNAL = 1.6; EXPRESSED IN BONE MARROW, SIGNAL = 1.1; NT HIT: gi7705546, EVALUE 0.00e+00; SWISSPROT HIT: Q01101, EVALUE 3.00e-05; EST_HUMAN HIT: AI808800.1, EVALUE 1.00e-82
cacgttctgggtggcctgggcctgttctgctggaggctggggctcttcaaggcctccttttcgccgtacacctttgggaatcagatgacgttcgtgaactctacgctgatgccgtctcatattagtatgagttccaaaaacctttttacaatatttgcacggatgaagttctttaacttccccattctcttctacgacagaagaatttattgtgtcttgggaagccttctctgaattcatgatcagacagtctggcccaagactgggaggactcgaatcatcttttgaagcaacgttttctccagatgctttgccatcagccagatcctctgacggctgtagtgtttggctgggtttccgctttaaccctgcttcatggcgccgctcatgtcgccgccggttaatctgtgtgccaaaggctttcccacagtacttgcatttgaaagcatgattgacggtggatatatggatatgcatgtgacgctcaagcccctgtttggttg

SEQ ID NO: 9174 - DNA, 500 bp, Homo sapiens
  MAP TO AC002110.1; EXPRESSED IN BONE MARROW, SIGNAL = 0.87; EXPRESSED IN HELA, SIGNAL = 0.51; EST_HUMAN HIT: BF061127.1, EVALUE 0.00e+00; SWISSPROT HIT: O22315, EVALUE 7.00e-01
ccccttcccctctgggcttgcctttgtcagcgccccccaacccggcagagaaaggcccggtctcctaggaaacgcagtcaccgccaaagggcagaggcctcgctgcccagcctggaatcgctggtgactcactctccctccttcccaggaaccacgtcctaagtcccactggtgaatggtccctctccacatggagttgccactgcgcgcggtgaggggctgctgagctggctggaagaccgcacctcctcggcgctgggtggacccggctgccacccgctctgcctcccccgacctcttctaagctgctcccggtaaggattccgcgacccccggagaacaggacggaagcctcgattctctcaagtcttagccaagttccctcttaagaggccaagaaaagcagcttcgttcggctgggcaggcattttcctgcctggccctgcggccgcacgcgtgcctccgccgcgacaaaggccacactcagcgcccgaaggagg

SEQ ID NO: 9175 - DNA, 538 bp, Homo sapiens
  MAP TO Z98744.1; EXPRESSED IN BONE MARROW, SIGNAL = 0.76; EST_HUMAN HIT: BG292093.1, EVALUE 1.00e-118; NT HIT: X83509.1, EVALUE 0.00e+00
cgtggggagtccaaccaacaccctggactcttgcttgccttgcgttactcgattagggttgagggagaactgcccgagatttttcgaatgcaaggaatcttgctgcctgatctaacatgttgtgcacagccattttttagaggtctctgggtggctctgaaaagagcctttggggctttgttgcggttttcacacgccagcttcctacttctttttggcagccgccttcttggcctttgcagctttaggttttgctgctttgggcttagcggctttgggctttgccgccttcggcttaactgccttgggcttggcaggactcttggttgcctttttcggtttggcagcggccttggccttcttagggctcttcgccacctttttgacgccagccgccgcgggcttcttcgccttcttcggagtcttcttcactgcctttttcgcccctgcagccttcttggccttcttaggcgtggcccccgcgggcttcttagctttagcggcgcctgccttcttggctttgggcttggcttccccg

SEQ ID NO: 9176 - DNA, 552 bp, Homo sapiens
  MAP TO AL080250.11; EXPRESSED IN BONE MARROW, SIGNAL = 0.78; EXPRESSED IN HELA, SIGNAL = 2.5; SWISSPROT HIT: Q99715, EVALUE 2.00e-26; EST_HUMAN HIT: BF744397.1, EVALUE 1.00e-95; NT HIT: gi14757166, EVALUE 7.00e-96
tgaggatcccggctgtattgcacaagactaatctggaccctatttggtgaaatttcaaaactttttacaagaacttccaaaaaggctctaactttaacaaagtttgcaatcccaatgctataggagccatcaaccaaaaacacaatatcggcttttatatccacaccacgtgagcattctgtaaagagaaaaaaagtacattaaacttcaatacatattaatcattaaaatatacatatctagctttcttagtaagcgtgcttctttaaaaaaaaaactattgcaaatatttcattcaaaactaagtccaaacaagtaaggcattctgtcaaacagatcttcacatattccaaatacaatgatgcacacattgacttacccacttgaactttcattggctgagtcttctccattattgaaatgggttcactggatgtcattcccttcatggcggaaacactgatctggtattctgtgtctgctgagaggtcgcgaacactgagcgtggttgtctgaggccccacactcagagcgtgctgtcggcttcctgca

SEQ ID NO: 9177 - DNA, 538 bp, Homo sapiens
  MAP TO U52112.1; EXPRESSED IN HELA, SIGNAL = 0.42; EXPRESSED IN BONE MARROW, SIGNAL = 0.85; NT HIT: Z29373.1, EVALUE 0.00e+00; EST_HUMAN HIT: BF197093.1, EVALUE 4.80e-02; SWISSPROT HIT: Q9XEK9, EVALUE 7.70e-01
aggggtggggaggggagaggagagcgctcaggaagcagaaagctcagggaggatggaatgcaaagggaaaaccccagggaaaaggcgacacagatcaagacagagccgtggagcaagagagaccaagtcggaggtggaggggaggagatggagagccaagtggaaaagccagagaagaggggccctgctaaggagtgcaggtgtagacagagatgactgcagtgactcaggcaggtctgcccagaatcagtcactccccccaccagcccgccccccccctccccccccgccaccttcctgctcagccatgaggcaggcaccaggaaagcctgagggagtgaaagggcatgagatgaccggaagtgcaatggagacagagacagggcaaaggaggagactgcacaagaaacaagatgggccaggggagaagctggggtggggtggagggctggcaggacacccaggcccctcgccacgagacaactggctgacagcagcttccagcccacaatcccacacgaactccgggacctgccct

SEQ ID NO: 9178 - DNA, 504 bp, Homo sapiens
  MAP TO AL031652.1; EXPRESSED IN BONE MARROW, SIGNAL = 1.1; EXPRESSED IN FETAL LIVER, SIGNAL = 1.1; EXPRESSED IN HELA, SIGNAL = 0.7; EXPRESSED IN BRAIN, SIGNAL = 0.77; SWISSPROT HIT: P39188, EVALUE 3.00e-04; NT HIT: AF111168.2, EVALUE 2.00e-12; EST_HUMAN HIT: BG007192.1, EVALUE 4.00e-24
tccaaaggccagttccagccctaccattttgaaaagtctccatgaccactctgaaaaggtagagctcctctgagctggatgcctttagtgcccatgacattttaaaatatgtgtcatatgctactttgttatctgacttaactgttcatatgggtgttgtatcttgccaacacctgtaagccctctgatggcaggggccatttcttttttcaaaatagagatggggtcttgctatgtcttgaagtcctgggctcaagtaatcctcctgtcttggcctctcaaagcactgggattacaggtgtgagccactgcacctggcccctgggtgccatttcttatagctcatcttgctcataatcagccatatgatgagatacacaaaagagctacatgttgtacgtcaaattgatttcacttattaccttggctctcttatacacacaaaatcagcttttgtttttaaatattagatgtttactctggagacggcaattcccccacctg

SEQ ID NO: 9179 - DNA, 514 bp, Homo sapiens
  MAP TO AC018739.2; EXPRESSED IN BONE MARROW, SIGNAL = 1.1; EXPRESSED IN HELA, SIGNAL = 1.9; SWISSPROT HIT: Q9L4Q8, EVALUE 1.20e+00; NT HIT: AF139625.1, EVALUE 0.00e+00; EST_HUMAN HIT: BE247720.1, EVALUE 0.00e+00
tgtggcacagctttgacaggggtggaagacatccggtgacctttgcagatctgttgatccctttctaagattttcagtacaaatgaggaattactagaaaatgatatttcatcagcagcttgttctaaaaacaaaaattcatctaattccaaattttccttttccttttctcgttcccaagtctctaactttttctgaagagaaacgtcaagagaagattcagactctttcatggtctcccttatggggctcttagcagccagccggctggccggccctgttgaaagaggaagtctgtctttaccttgtgtcttattccaccctgtgcagccagtatcgcaaggttttggacactcagttacattttctttattattagatgtgactttgttttcaaatttgatctggtctctaaactgcccatcacatttcttccccgtctgtattttcaatcctgacggagaaagacttttcctgttactacacttcagcattttcggcttctgactgaggg

SEQ ID NO: 9180 - DNA, 563 bp, Homo sapiens
  MAP TO AP001725.1; EXPRESSED IN PLACENTA, SIGNAL = 1.8; EXPRESSED IN BONE MARROW, SIGNAL = 1.2; EXPRESSED IN FETAL LIVER, SIGNAL = 1.1; EXPRESSED IN LUNG, SIGNAL =   1; SWISSPROT HIT: Q9Y3R5, EVALUE 3.00e-55; NT HIT: gi14780345, EVALUE 0.00e+00; EST_HUMAN HIT: BG979766.1, EVALUE 0.00e+00
aggcccaaaagccagcctccccagagagcatgtgggtgtaccagcctcctctttgctacccaccgctctccttctcctgctttgggtgcctcctaaatttcattatacacttaacacagggattctctagtctggagagtgatgattttgaaaaacagaattgaaatacattcatgatttcaactgatacttaaatagcttggtgttaagagatgcacaattcacatctttttattttttacagagtccagtaaaaggtgaaaacggcaaaataattttggaaacaaaggcagtgattcccggtgacgaagatgcttcgtttccccctctgaagtctgaggacagtgggatcgggctcagtgcctcgtcaccggagctctctgagcacttgagggttcctcgagtttctctggaaagggacgacgtttggaagaagggcgggagcatgcagaggacgtttctttgcatccaagagctaatcgccaactttgccagcaagaacatttttggagtacagctgacagcgtcaggagaagaaagcaagtccgaggagcctgcaggga

SEQ ID NO: 9181 - DNA, 532 bp, Homo sapiens
  MAP TO AC005006.2; EXPRESSED IN BRAIN, SIGNAL = 1.5; EXPRESSED IN HELA, SIGNAL = 0.56; EXPRESSED IN BONE MARROW, SIGNAL = 1.1; EXPRESSED IN LUNG, SIGNAL = 0.92; EXPRESSED IN HEART, SIGNAL = 1.2; SWISSPROT HIT: P31314, EVALUE 2.90e-02; NT HIT: AB029901.1, EVALUE 0.00e+00; EST_HUMAN HIT: BE206556.1, EVALUE 0.00e+00
cccaacccccaccccaagtcaccaccactgaggctgattaacaaaaacacaacatcaaattcctttacttctgaggtctcccctttaaggggaggcagaaatagaacattctttatcggggagggaaaggggtttaataaaaactggtataattagttaaatactgatctcggttaggccctctctgtgttcatgggcccagtcttggctggctgcctccccccagggagccccccctcaccccggggtctgaggtggcaccaggagggggctgggggcggccagcaccagcggcgtcctgctcagcccctctgcagggagcgagcaggcaggcaagccgctgggcggtgggacgtcaccaccgcaggaaatcgcgaatgaacttccagagcttggtgacccacaggttggcgccgaggtccatcaggtactggatctcgggcgtgagcatgcgccggcagagctgcgcgtgccgctgcccgatgctcttcttgaggttgtagcccaggatggacttggtgcccagcggctg

SEQ ID NO: 9182 - DNA, 519 bp, Homo sapiens
  MAP TO AL139397.1; EXPRESSED IN LUNG, SIGNAL = 0.98; EXPRESSED IN BONE MARROW, SIGNAL = 1.1; EXPRESSED IN FETAL LIVER, SIGNAL = 1.1; EXPRESSED IN BRAIN, SIGNAL = 1.1; EXPRESSED IN HELA, SIGNAL =   2; EST_HUMAN HIT: BI752566.1, EVALUE 2.00e-69; SWISSPROT HIT: P32521, EVALUE 7.20e-01
ctgggaggtgggtcggctcctatgcttcttgtgtgcagccttcctctttatcatggtaacagacacactgccgtggccagcgcccgtcctggaccgctgccctgcagctgcctttccaaacggggtcttcatgcctgcgaagaggagcacagttgccaggtggaccgagaaaggaaattaacaaaatcaatgcataacacggagagctttttctcctaatcagcgcacccagtaaacccacacctgtttttcccgaaagctagatagcaaagctggaaatcaaggcaccctggctgagtgcctgcagtaaccttcctccccagctcagtctggctaagatctgcggttcggtgaaatacgaagcgtttccccattcccctcgccctgcttccaacactacccggccaggaggcgcagattccccaccgtcccggattgcgggcctcaagtgcacaaatcggacacctcgccgttgcctccgcagtgagcctatggaggaggaaaatcagcgggcgagca

SEQ ID NO: 9183 - DNA, 527 bp, Homo sapiens
  MAP TO AC008468.4; EXPRESSED IN HELA, SIGNAL = 1.5; EXPRESSED IN LUNG, SIGNAL =   1; EXPRESSED IN BONE MARROW, SIGNAL = 0.95; SWISSPROT HIT: Q9UN74, EVALUE 5.00e-87; NT HIT: gi14861872, EVALUE 0.00e+00; EST_HUMAN HIT: BG719192.1, EVALUE 1.00e-119
gggacagctcccactttctggccattgtagagttattgtggaagtagaagacaacaacgataatgtcccagatttggaattcaagtctttatcacttccaattagagaggacgctccactgggtacagtcatcgccctgatcagcgtgtccgacaaagacatgggtgtcaatgggctggtcacctgctccttgacgtcccacgtccccttcaagctggtgtccaccttcaagaattactactcgttggtgctggacagtgccctggaccgcgagagcgtgtcagcctatgagctggtggtgaccgcgcgagacgggggctcgccttcgctgtgggccacggccagtgtttctgtggaggtggctgatgtgaacgacaacgctccggcgttcgcgcagcccgagtacacagtgttcgtgaaggagaacaacccgccgggctgccacatcttcactgtgtctgcgtgggacgcggacgcgcaggagaacgcgctggtgtcctactcgctggtagagcggcgggtagggg

SEQ ID NO: 9184 - DNA, 501 bp, Homo sapiens
  MAP TO AC005846.1; EXPRESSED IN HELA, SIGNAL = 2.1; EXPRESSED IN BONE MARROW, SIGNAL = 1.1; SWISSPROT HIT: O14581, EVALUE 7.90e+00; NT HIT: M60675.1, EVALUE 0.00e+00; EST_HUMAN HIT: BE903681.1, EVALUE 1.00e-17
tgcagatccccaccctctcccctgcacctggtatgctggcaccttgtgtgcaggtgggagggctgggcgagggctggcatggccttggtgctacatgcatctgccaagatacgactcgggttctaatcctggcttccctggtctgtgtggccttggttgaaacttgccttcaaagggcctgtgtttcctcacctccctggcagggagacaaactgtgatcctttttcgggggaagatcttttcttattgtgtgtgcttctataaattcaaaggtaatggaagcctattgttaacatttaaacaatgccaataaggagtaaaaaaaaaaaaaaaatgcaagtcttactttatcacacagcctcttccccacccaattccaccctctgccttcaaggtaacctctgttaaaggtggtgatgataagcttcattttgaccacactgggtgggtgaaattattccgagtagctgacattcttcagggcaagaccaggatgtcagg

SEQ ID NO: 9185 - DNA, 502 bp, Homo sapiens
  MAP TO AP000508.1; EXPRESSED IN BONE MARROW, SIGNAL = 0.94; SWISSPROT HIT: P40818, EVALUE 2.00e-57; NT HIT: gi4827053, EVALUE 9.00e-92; EST_HUMAN HIT: BE882214.1, EVALUE 5.00e-88
tggcttggcggaacaatcaggaataactttttcattctgaggagactgttgctcatgatttgtactttcagatttgattatatgctcttcaggcaatttgactgccagttttttagtatgatcaatctgtggaacattctttatgctaggcactggctgaatgatgggtgaaacatcagatttagaagcagcaactgattcaactggaattgatatattcagtggtcctgtcctctcattttgatcattatcacttatttgatcacttatcaattctatgtcttcatccacttctataggtggaggtggcatctcggcagcaggtttagaaggaattgattcttccaatgagggataagtaaaatccaatgagatagacaactcttcattctggtgttgtgggggtggagtgaccttagcatttgttgtatactgggaatagcaaaggaaccagtttttatagcctccctctaaaaccaaagcccaaggcccattgcacagg

SEQ ID NO: 9186 - DNA, 516 bp, Homo sapiens
  MAP TO AC024049.2; EXPRESSED IN BRAIN, SIGNAL = 1.1; EXPRESSED IN BONE MARROW, SIGNAL = 1.5; EXPRESSED IN HELA, SIGNAL = 0.96; SWISSPROT HIT: P97471, EVALUE 7.20e-01; NT HIT: AL163278.2, EVALUE 1.20e-01; EST_HUMAN HIT: BF763860.1, EVALUE 6.00e-20
tggggtcgtgtagcgggtgctgttctgtgtgtgagcttcgtggtgatggggtcgtgtagcgggtgctgttttgtgtgtgagcttcgtggtggtggggttgtggagcaggtgctgttttgtgtgtgagcttcttggtggtggggtcatgtagcgggtgccattctgtgtctgacttcttttgttcatcacttttcatggactgaattgtgtcccccaccaagttcatagatggaaaccctaacccccaatgtgactacgtttggggatggggtcttcaaacaggtaattgaggttaaatgggattatacgtgtttggccctgatccactaggactaatgtccttacaagaataaaaagtgccaccaggggcacatgcccagaggaaaagccacgggaggacagtacaagccaggaagggagacctcaccagaaaccagccttgccagagcctcggtgcggccccagccttgtgagaaagtgtgtttctgttgtcgtagccgcccactgcagagcatt

SEQ ID NO: 9187 - DNA, 538 bp, Homo sapiens
  MAP TO AC009294.6; EXPRESSED IN BRAIN, SIGNAL = 6.7; EXPRESSED IN HEART, SIGNAL = 5.9; EXPRESSED IN BONE MARROW, SIGNAL =  15; EXPRESSED IN LUNG, SIGNAL = 7.5; SWISSPROT HIT: P09867, EVALUE 5.00e-65; NT HIT: gi13646381, EVALUE 0.00e+00; EST_HUMAN HIT: AL540495.1, EVALUE 0.00e+00
ggggctttgggtttgtcccctatgtcactgtggaggaggtggatgcagccatgaatgcaaggccacacaagatgggtggaagagttgtggaaccaaagacagctgtctcaagagaagattctcaaagaccaggtgcctacttaacagtgaaaaagatatttgttggtggcattaaagaagacactgaagaacatcccctaagagattattatgaacagtatggaaaaactgaagtgattgaaatcatgactgaccaaggcagtggcaagaaaagggactttgcctttgtaacttttgacaaccatgactccacggataagattgtcattcagaaataccatattgtgaatggccacaactgtgaagttaggaaagccctgtcaaagcaaaagatggctagtgctccgtccagccaaagaagtcgaagtggttctggaaactttggtggtggtcgtggaggtggtttcagtgggaatgacaactttggtcatggaggaaacttcagtggttgtggtggctttggtggcagccatggtgg

SEQ ID NO: 9188 - DNA, 586 bp, Homo sapiens
  MAP TO AL021707.2; EXPRESSED IN HELA, SIGNAL = 0.5; EXPRESSED IN HEART, SIGNAL = 1.2; EXPRESSED IN BONE MARROW, SIGNAL = 0.82; SWISSPROT HIT: P07399, EVALUE 7.40e+00; EST_HUMAN HIT: BF881080.1, EVALUE 0.00e+00
caaaaggcgtggggccaaattctgccatcaatagctgtgaactctgtgccatgatttcctcaactggaaaaatgggcagcaacagaatccatcttggaagatcagtgtgaggactgagtggacacaaggaaagcactcagaacggtgctttgcaccaagtgttcatgtgtgttagtgatcctatcattattcccatagtcagatcaggggccaaatgtacagaagtgaaaacttttctaccagagtgtgactggatacacagaatcttgtttctggaatttatttactagtaggtgaaactgggcaaatcgcctaaaatgaatcctagtttcctaagttcatcactgataaggttgttgcaagattgttcatacatatcacaaagtactaagccattgaggtactcaccctgagtcctttccttctccctagttttagctcaggaaataatttgcaaatatctgattaggagtaggagaaatactaatggctggccaaaaggaagcatgtactgggtcctcctttcagtgacatgacctgatgatctgagacgaattattttatctcccagtgccccaggtcctga

SEQ ID NO: 9189 - DNA, 588 bp, Homo sapiens
  MAP TO AL121932.13; EXPRESSED IN BRAIN, SIGNAL = 1.3; EXPRESSED IN HELA, SIGNAL = 1.5; EXPRESSED IN BONE MARROW, SIGNAL = 1.3; EXPRESSED IN FETAL LIVER, SIGNAL = 1.3; EXPRESSED IN LUNG, SIGNAL = 0.99; NT HIT: gi16174470, EVALUE 0.00e+00; SWISSPROT HIT: P13667, EVALUE 5.00e-01; EST_HUMAN HIT: AI820939.1, EVALUE 0.00e+00
gcaagaaacccatgtggtcccaactttttaaagatgtgaattggacagccagacttgcttatttgtctgatatcttcagtatttttaatgatcttaatgcttctatgcaagggaagaatgcaacttatttttcaatggcagataaagttgaaggacaaaaacagaagttagaagcttggaaaaacagaatttctacagattgttatgacatgtttcataatttaacaacaattatcaatgaagtaggtaatgatcttgatattgcacatctgcgaaaagttatcagtgaacatcttacaaatttgttagaatgttttgaattttattttccatcaaaagaagatccacgcataggaaatttgtggatccaaaatccatttctttcatcaaaagataacttaaatttaactgtaactctacaggataagttgttgaagctggctaccgacgaaggattgaaaatcagttttgaaaatacagcatcacttccttcattttggataaaagctaaaaatgactatcctgagcttgctgagattgctttaaaattgctgcttcttttcccctcaacatacctctgtgagaccg

SEQ ID NO: 9190 - DNA, 518 bp, Homo sapiens
  MAP TO Z68326.1; EXPRESSED IN LUNG, SIGNAL = 3.1; EXPRESSED IN PLACENTA, SIGNAL = 5.7; EXPRESSED IN HELA, SIGNAL =   4; EXPRESSED IN BRAIN, SIGNAL = 5.4; EXPRESSED IN BONE MARROW, SIGNAL = 3.6; EXPRESSED IN HEART, SIGNAL = 6.7; NT HIT: AL161589.2, EVALUE 2.00e-03; SWISSPROT HIT: P98152, EVALUE 7.20e-01
tagtggagccgccaaagccgccgccgccgccgtcgccacagccaccggcaggcgggcaggcaggggcggaggtggcggaggaggcaggaacaattactgccgccgccgccgccgccgccgccgctgccgcgcaggcggtgtaggaggaggaggaggcggcagagacggtagcttcctgaggggaagactccgccgccagcggggtgactgtgctcggcgccgccgccatcgcagcgaggcgcgcggacaattgcacttgcgtctcgattccgttaagctcctttagccccgccttccgttagccccaccccctttgttcctctttttaacgcttcagctcgagcctcgttctcgctcctcagtccaccaatcggagagctttaagcccgccggccgtttccccctcccccactgccttgcgtcaccccacctccctttggaggggaagcaacgacggccaagggcaaagggcaaaaagcgcgggatgtgaaagcacgtgggcctcgcacagtgaggct

SEQ ID NO: 9191 - DNA, 548 bp, Homo sapiens
  MAP TO AC007719.1; EXPRESSED IN HELA, SIGNAL = 0.44; EXPRESSED IN BONE MARROW, SIGNAL = 0.76; EST_HUMAN HIT: BG333267.1, EVALUE 4.90e-02; NT HIT: AB034984.1, EVALUE 1.30e-01; SWISSPROT HIT: P22467, EVALUE 6.80e+00
  unsure 169
gaccccatgtgacctttgagtgctatgtagtaagagtgagacatcttttcttgttgtcgttgctttaagacattaatatatttaagtttcattacaacatagccttccacatcctgacatatacagtgagatattgtataatatcttacagaagagttttaaaattacnaactttggaatttgcccatcactaaaatatctgcatgcaatatgggagtgttttcaaatattaagatattccgtgctaagtagagacaactcagataactctatgatttttacttttctttcaaatgttctcacattaggtacatgcttgtggttagaatgtgccagctcacttggtggcagaagatttgaggatcctttagatgcattttacttaaatagatcattgtagtttatcaccagattgaaggaaatggcagagagctggaaataagagtcataacaattgtttaactgagaaatgattacccatatgtggctacagggcttgtgagaaattgaaaaggctaaattgctaccagtgcctccattcagctcct

SEQ ID NO: 9192 - DNA, 522 bp, Homo sapiens
  MAP TO AF225898.1; EXPRESSED IN BRAIN, SIGNAL = 1.4; EXPRESSED IN HELA, SIGNAL =   2; EXPRESSED IN BONE MARROW, SIGNAL = 0.8; EXPRESSED IN LUNG, SIGNAL = 1.2; EXPRESSED IN HEART, SIGNAL = 1.3; EST_HUMAN HIT: BE883884.1, EVALUE 3.00e-77; NT HIT: gi15299284, EVALUE 0.00e+00; SWISSPROT HIT: P37275, EVALUE 7.00e-61
tcagcctcctccactccctgcagcagaagctgagaagcctgagtcctctgtttcatcagctactggagatggcaatttgtctcctagtcagccacctttaaagaacctcttgtctctcctaaaagcatattatgctttgaatgcacaaccaagtgcagaagagctctcaaaaattgctgattcagtaaacctaccactggatgtagtaaaaaagtggtttgaaaagatgcaagctggacagatttcagtgcagtcttctgaaccatcttctcctgaaccaggcaaagtaaatatccctgccaagaacaatgatcagcctcaatctgcaaatgcaaatgaaccccaggacagcacagtaaatctacaaagtcctttgaagatgactaactccccagttttaccagtgggatcaaccaccaatggttccagaagtagtacaccatccccatcacctctaaacctttcctcatccagaaatacacagggttacttgtacacagctgagggtgcacaagaagagcc

SEQ ID NO: 9193 - DNA, 500 bp, Homo sapiens
  MAP TO AC004775.1; EXPRESSED IN LUNG, SIGNAL = 1.1; EXPRESSED IN BONE MARROW, SIGNAL = 1.2; EXPRESSED IN FETAL LIVER, SIGNAL = 1.1; EXPRESSED IN BRAIN, SIGNAL = 1.6; EXPRESSED IN HELA, SIGNAL = 0.78; SWISSPROT HIT: O15084, EVALUE 1.00e-06; EST_HUMAN HIT: BG704014.1, EVALUE 3.00e-80; NT HIT: AP003003.2, EVALUE 7.40e+00
tccaccaccggtcgcatctggctccgtggtgcctcgcaggcctggatcgccaagaaggcggcgcagcgcgtacgaggagccgggccgcaggtactggtaggcgcgacgcccgctgtgatcacgcacgtgcacctgggcacccagacgcaccaccagcagcacggcagcgtcctcgtggccgtgcagtgcagccaggtgcagcggcgtgtagccgccgtgggagcgtgcgttcacgtcgactggtgcgccactgcgccgcgcgacctccaccagctgcagcgccatctcgccgtcgccgctcttggcggcccaatgcagggccgtgaagccagacatgaagtcgcgcttggccgccaagccgcggtcgcgcagcagcagcccgtgcagctggtgggtccagcggcccccggcagtccgcacgagccactcgtgctcggacggctccaggggcaccgcggacggcggcggcgcggcgggcaactcctcggcgtcagggctca

SEQ ID NO: 9194 - DNA, 509 bp, Homo sapiens
  MAP TO AC012112.1; EXPRESSED IN FETAL LIVER, SIGNAL = 2.6; EXPRESSED IN LUNG, SIGNAL = 1.5; EXPRESSED IN PLACENTA, SIGNAL = 3.6; EXPRESSED IN BRAIN, SIGNAL = 1.6; EXPRESSED IN BONE MARROW, SIGNAL = 1.6; NT HIT: gi14771305, EVALUE 0.00e+00; SWISSPROT HIT: Q05037, EVALUE 1.00e-05; EST_HUMAN HIT: BE326268.1, EVALUE 1.00e-118
ggctgtcagacacttgctgcctttgaatcttgcagcaacatcactaaccacatcccagacatatttccaaatttcaacatctacccccaaaacataggtgtctgagagactccagcattttcggacttcttagtcttgagagtgccaggctatttatctcgaccagccaagctctggagagcaatgttgaatccctgagaagagagagcatggggcgtgctgatttaaaaacagaaaatgcaaagttggactgaaaatatccttagtcttccaagcaatctgcttaagggttccaaacttaccttaatttggtgagaaaagaagctgccctatttttctttcttcttcttctacaactggaaccagccatttccgaaaaccaccaccatggaggttgcaatggtgagtgcggagagctcagggtgcaacagtcacatgccttatggttatgctgcccaggcccgggcccgggagcgggagaggcttgctcactccagggcagctgcagc

SEQ ID NO: 9195 - DNA, 504 bp, Homo sapiens
  MAP TO AL096810.1; EXPRESSED IN BRAIN, SIGNAL = 1.6; EXPRESSED IN HELA, SIGNAL = 0.53; EXPRESSED IN BONE MARROW, SIGNAL = 0.77; EST_HUMAN HIT: AA974656.1, EVALUE 7.00e-01; NT HIT: AL096810.1, EVALUE 0.00e+00; SWISSPROT HIT: P49154, EVALUE 5.40e-01
ttggtggccccagccagaacgggctgcccaagggtaaattgctagaaggcctgccgtttggcaccgacgggaccggcaacatccgaacgggaccctggaaaaacgaaactactgtgtagatgggggcagaggacacggtgttcctggaggagcttcagagcagagtggggggcccatctgccacatgaggtcactgggggtaccgaagtgaccccgcctttcagaagccgttcacacccctgccccttccttgtgatcacacccctgccccttccttgtgaaagacctcagcggggaaacgctccgggccacgcccactccccttatcccaattccgcgtgctggtcccgcacacggtcatccggtttctgtcctgtggtctccagtcctggggcaccctagaggcagagcaggggattccatcaaaggacccactgagaccccagcatggccctgcccgagatgccctgctgcccacggagtcctggcttcccctggtgtggc

SEQ ID NO: 9196 - DNA, 524 bp, Homo sapiens
  MAP TO Z84479.1; EXPRESSED IN BRAIN, SIGNAL = 0.99; EXPRESSED IN BONE MARROW, SIGNAL = 0.91; EXPRESSED IN LUNG, SIGNAL = 0.96; EXPRESSED IN HELA, SIGNAL = 1.2; NT HIT: AL163303.2, EVALUE 5.00e-04; SWISSPROT HIT: Q13495, EVALUE 7.40e-01; EST_HUMAN HIT: BG328110.1, EVALUE 1.00e-113
accttgctgggtgcaagccgagcctttcccggcttctccaggccgcctgcgttgttcacggagggcccttgcccatctgcagagccagcactggcgggtgaagtccctctcatgctttgactctccttctgtctcatctgtagctcagccaggaaaggcggttaaggacttatgtagttaattggccccacccagataatcccggataatctcccacctcgagatccgtgcaccttaatcctgtctgcagagtcccatgctagcaactcagcagcaaacagcccctgcactgtgccctgcaggaacatggctgctggtggcaggccggcccagacagacagactaccacctgagccaaggaacctccactcaggtggccgagggtcccacttccgagccgagggtgctacgcaggctcagcagccagcctccctcggctgccttacagcaactctgctgacagtccctgggcagattggcctccatgggcaggggcacaggtgccacgtccactccccagacca

SEQ ID NO: 9197 - DNA, 547 bp, Homo sapiens
  MAP TO AC003006.1; EXPRESSED IN BRAIN, SIGNAL = 0.79; EXPRESSED IN HELA, SIGNAL = 0.92; EXPRESSED IN BONE MARROW, SIGNAL = 0.95; EST_HUMAN HIT: BE938655.1, EVALUE 1.00e-112; NT HIT: gi14766432, EVALUE 0.00e+00; SWISSPROT HIT: P17029, EVALUE 1.00e-24
tggctcctgccccagcaaaggccaatagccatttaaaaagtgcaacacagctgctgaaagcatctcacatacttgacactcacagggaatctccccagtgggaatgtccatatctatgaagtttcacttcttactgatggttccctcccaatggctgctcccagagttccactctagggtgagctgttgggctgaacagagacagcacattgcttagactgctaaggcctgtgtccggtgtgaaattcccaatggcgggtaaggttcagcctccaggggaaggctttcctgcatctgctgcactcattaactactgctagttccccaccatatagtaagtcaggggcattggcctaagactttcccccacatttgctacactcttaaagcttttctccagcatgaaccctctggtgcagaacaagtgtctgtttccggatgaattctctcccgcactcactacacacataaggcctttccccagtgtggactttccagtgcctgatgaggttgggtctttgagtgaaggctttcccgcacttgctgc

SEQ ID NO: 9198 - DNA, 594 bp, Homo sapiens
  MAP TO Z97632.1; EXPRESSED IN BONE MARROW, SIGNAL = 1.4; EST_HUMAN HIT: AL568802.1, EVALUE 0.00e+00; NT HIT: gi15310493, EVALUE 0.00e+00; SWISSPROT HIT: P93149, EVALUE 4.30e-01
ccaaaaccacccaaagtccccctctcatcagaatcgtcaaacaacttctcactggaatcttcctcctcatcaaacaacttctcattggaatcatcatcttcgaacaacttttcgtcagcatcttcaacttcctttccatctgcatcttcatcttccttgtcatctgactcttcaaacagcttttcatctgcatcaccttcttccgcctttttatcagcagcttcaagccccttttcatctgcatattcttcatcctctttctcatcagactcatcatcaaatactttttcatatgtatcctcctcttcttccttttcatctgaatcttcgtcaaactctctctcagagccttcctcatctaacactttttcagagccgtcatcttcaaattcggagttttcagagtcattttcttctaactctttgtcaagaacattttcatgaagctccttttcagaaccttcctcgtccaaatctttctcgagaccattttcttcaaattctctttcggagccatcttcagactgtttttcagagcagtcttcatcagactctttctctgagtcatcttcttcggactcttttgtggggcca

SEQ ID NO: 9199 - DNA, 522 bp, Homo sapiens
  MAP TO AC004643.1; EXPRESSED IN BRAIN, SIGNAL = 1.5; EXPRESSED IN BONE MARROW, SIGNAL = 1.5; EXPRESSED IN FETAL LIVER, SIGNAL = 1.4; EXPRESSED IN HEART, SIGNAL = 1.5; SWISSPROT HIT: P56747, EVALUE 1.00e-23; EST_HUMAN HIT: BI769688.1, EVALUE 4.00e-95; NT HIT: gi14777982, EVALUE 3.00e-95
gctttttgccgccttgcagcctgatcactggctctggccttggactgtcattgtataggtttcatcctgttatctttcatttgcattcaggatagccagggcagggctgcttgcacagtcactgtcatcagccagtgcctgtcacataactagaaagaataataaatgctaaagcattaagtgtccattttgcccacgagaagtgaggctcagggagcatgtgttgactgagttccaggatgtgatgaccactttccagggtgcatgcccctagagtcctgtccacatgtggcctgaggtctgggcctgccaggcctcaccttgttgtgcttctgtcccaaacacagtgcagctccttcaacctcgccatggcctctgccggaatgcagatcctgggagtcgtcctgacactgctgggctgggtgaatggcctggtctcctgtgccctgcccatgtggaaggtgaccgctttcatcggcaacagcatcgtggtggcccaggtggtgtgggagggcctgtgga

SEQ ID NO: 9200 - DNA, 501 bp, Homo sapiens
  MAP TO AC006479.2; EXPRESSED IN LUNG, SIGNAL = 1.6; EXPRESSED IN HEART, SIGNAL = 1.3; EXPRESSED IN HELA, SIGNAL =   2; EXPRESSED IN BONE MARROW, SIGNAL = 1.5; EST_HUMAN HIT: BI771808.1, EVALUE 0.00e+00; NT HIT: gi14745457, EVALUE 0.00e+00; SWISSPROT HIT: P54120, EVALUE 4.00e-18
attcgcccaccacatgctgccaccagcttgcttagggctttgttatctgagtcgtgcatgtaatccatcagggagccaccattgaggtcttccttgtgggtaaagaggacaattgtgtgtcccatggcatcctctccaaagatctccttcaccctctgtgcagcctgctggtcctgtgaggtatagcggcccagctgagtcaccaggagcagcacatggggtcctggtgcagacagcaagtagcacctctgcacctctttgtacagagcttcacagtggtccttccaagaaaacatatctggtgtgtcaataatgacaatctctctatttccccagcttccctgacttttgctgcaagtcttagtcaaggtctgggaacccagcttcgattcaaatgcttgcttcctgaggatgctgttccctgcagcacttttgccagttcctgttttgcccaccaggatgattctcagctcagatctgctggcacattggccctttgca

SEQ ID NO: 9201 - DNA, 550 bp, Homo sapiens
  MAP TO U62631.1; EXPRESSED IN HELA, SIGNAL = 1.1; EXPRESSED IN BONE MARROW, SIGNAL = 0.89; SWISSPROT HIT: O14842, EVALUE 1.00e-22; EST_HUMAN HIT: AU117321.1, EVALUE 2.00e-01; NT HIT: U62631.1, EVALUE 0.00e+00
ctgtgggcccagccctgttctgaattctctccacccctcctccccacagagtctcagaaatcgagaagctttcttcctctgggacctgtgcgccacatcctatctcctgtgacgctgcaggagcttccctggttttaagaggtgacatggtggagagaaagcacaggactgggggccacaggtcctggcttctcatccaggctccgctgctccctgactgctgcctttctctgtgggcctcgtttcctccctgatcccaccaggtgaattgtaattctccacacagggctggaacccgcgagtgatcccaggagcccctcctctccggggccccaagatctgaggacagggagccaggttgcacacaggagccgtgcaggccaggacggcggccccatggacctgcccccgcagctctccttcggcctctatgtggccgcctttgcgctgggcttcccgctcaacgtcctggccatccgaggcgcgacggcccacgcccggctccgtctcacccctagcctggtctacgccctgaacctgggctgctccg

SEQ ID NO: 9202 - DNA, 517 bp, Homo sapiens
  MAP TO AC005081.2; EXPRESSED IN HEART, SIGNAL =   3; EXPRESSED IN BONE MARROW, SIGNAL = 1.7; EXPRESSED IN PLACENTA, SIGNAL = 2.3; SWISSPROT HIT: P30622, EVALUE 6.00e-43; NT HIT: AF041055.1, EVALUE 0.00e+00; EST_HUMAN HIT: BI047278.1, EVALUE 3.00e-43
gcactcaccagcacgcggtcccccaggcgcaggtccttttcgccccgcttcacagagccgctgtctgagaggttggatcccgactcgttgccggtcttcacggagctgttgaggacgctctcccgcagggggatgacgcggctggtcagcgggggcgtggccgtgcccgaatgcaatgacaggttctgggcagtcagcgactccacggagtgggcatcactccccgagccctcggccgtgggctgccgggtcagcttggagggccgcgtgaagataccctggagggccgggcactcgaagtagcgcacgccgcccaccgcgccatcattcttgcccaccgggtcgtccagcaccacgccagcccactggcccggtgcgaactgcgtctctcccagatactgcaccacgcctggcttcacgccgttcacccacacccgctcgcccaccacaaagtcccccaggaagtcatcccccacttccgccgccttggggcccggcttctcgggggcagcagctg

SEQ ID NO: 9203 - DNA, 541 bp, Homo sapiens
  MAP TO AJ239329.2; EXPRESSED IN HELA, SIGNAL = 0.53; EXPRESSED IN BRAIN, SIGNAL = 0.97; EXPRESSED IN HEART, SIGNAL = 1.2; EXPRESSED IN BONE MARROW, SIGNAL = 0.93; SWISSPROT HIT: Q60924, EVALUE 1.00e-06; NT HIT: AB004801.1, EVALUE 3.30e-02; EST_HUMAN HIT: AL043092.2, EVALUE 4.00e-61
gccccgggcagagactggacactggagtcttgggaggctgcaggcagagatgagacactccagtctcaggaggccccaggtggagattggacaccagagtcttgggaggctctgggcagagatgggacattccagtctcgggaggctccaggtggagactgtacatccgagtcttgggaggctctgggtggagatgggatactccagtctcaggaggctctgggtggagactggtcacctgagtcttgggaggctctgggcagagatgagacactccagtcttgggaggcccagggcagagactggacactggagtcttgggaggctccaggcagagatgggacacctgagactcgggaggcctcgtgcagaattccccacaagggtatttaccaggctcagtgggttccttggttgtcttctcctggccctcacaatgaacccattcgtcctccagcttcctctcaggattcagcagtttcagcacctgtagtaggagactggacactcgatgagtattgggaggttccgggtggagatg

SEQ ID NO: 9204 - DNA, 506 bp, Homo sapiens
  MAP TO AC005222.1; EXPRESSED IN HELA, SIGNAL = 0.52; EXPRESSED IN LUNG, SIGNAL =   1; EXPRESSED IN BONE MARROW, SIGNAL = 1.2; EST_HUMAN HIT: AL548335.1, EVALUE 9.00e-56; SWISSPROT HIT: P35663, EVALUE 4.70e+00
tgccccctcttccagaccctgtagggaggagctgccgctccaagtcccaccattctctccttcctggtccatctctgaggcaggggatgggggaacctacctaggcagaggcaggagggcctggggttcaggaggaagcagtgcatggtcactgcacgttcagtggatgtcatgccccatgatgacctctgtgtgcattgacaaggtcacacagtgagggagtgacggggctgggacagaacctgggtcggggcactggcgacctgactcataaccattgggttctcttgcatttgggggcagaagcagtgaattccctctggctcttcctggcgtgtctgccttctaggcccctgactcacagtcttctgtctctgcctcctctctgctcccagggacagaagatgtgctccagggtccctctgctgctgccgctgctcctgctactggccctggggcctggggtgcagggctgcccatccggctgccagtgcagccagccacag

SEQ ID NO: 9205 - DNA, 503 bp, Homo sapiens
  MAP TO AL049564.10; EXPRESSED IN LUNG, SIGNAL = 1.1; EXPRESSED IN BONE MARROW, SIGNAL = 0.97; SWISSPROT HIT: P10275, EVALUE 1.00e-71; EST_HUMAN HIT: BE150271.1, EVALUE 4.50e-02; NT HIT: M23263.1, EVALUE 0.00e+00
ccggccagagccagtggaaagttgtagtagtcgcgactctggtacgcagctgcctcgtccagtgctccggacttgtagagagacagggtagacggcagttcaagtgtcccggagctccctgctgcagcgctgccagagcagcctaggctctcgccttctagccctttggtgtaacctcccttgaaaggggaatactcagcagtatcttcagtgctcttgcctgcgctgtcgtctagcagagaacctttgcattcggccaatggggcacaaggagtgggacgcacagcgggtggaactcccaaaagtggggcgtacatgcaatccccccgaagctgttcccctggactcagatgctccaacgcctccacacccaggcccatggacaccgacactgccttacacaactccttggcgttgtcagaaatggtcgaagtgccccctaagtaattgtccttggaggaagtgggagcccccgaggcctccctcgctctcccgctgctgct

SEQ ID NO: 9206 - DNA, 594 bp, Homo sapiens
  MAP TO AL050343.17; EXPRESSED IN PLACENTA, SIGNAL = 1.5; EXPRESSED IN HELA, SIGNAL = 0.61; EXPRESSED IN BONE MARROW, SIGNAL =   1; EST_HUMAN HIT: BI823405.1, EVALUE 2.10e-01; NT HIT: gi16189783, EVALUE 1.40e-01; SWISSPROT HIT: Q25434, EVALUE 8.00e-12
gatcagtttgggtgagtgcccagtctataatgagactgatggatctgttgattctgtatttatagactaccaaggaatgtgattgttcctgttcttagcaaatcccttatatatttatgtagatagctttcattgtgggtggtcggagaccctaaagtgtatctgaacataggagatatttgggaaatgtgtctgaatataggagatacttgggaaatgtgtctgaatgtagttgatatttcggaaatgtgtctgaatataggagatacttgggaaatgtgtctgaacgtagttgatacttcggaaatgtgtctgaacctaggagatacttgggaaatgtgtctgaacataggagatacttgggaaatgtgtctgaacgtaggagatacttgggaaatgtgtctgaacctaggagatacttgggaaatgtgtctgaatgtagcagatacttgggaaatgtatctgaacttaggagatacttgggaaatgtgtctgaacctaggagatacttgggaaatgtatctgaacataggagatatttgggaaatgtatctgaacgtaggagatacttgggaaatgtgtctgaacgtagca

SEQ ID NO: 9207 - DNA, 532 bp, Homo sapiens
  MAP TO AL031983.1; EXPRESSED IN HELA, SIGNAL = 1.5; EXPRESSED IN BONE MARROW, SIGNAL = 0.76; EST_HUMAN HIT: AI240943.1, EVALUE 0.00e+00; NT HIT: AF314088.1, EVALUE 2.00e-49; SWISSPROT HIT: P23275, EVALUE 2.00e-43
ggcctctccccagactccgcagcagcctcctcgctgcccccttcactttcttattcctgagggtgtagatgagcgggttgagagcaggtgtgaccacggtgtagaagagcgatacgaacttgccccgtgcctggttgtagcgctgcgcgggctgcaggtaggtgtagatggccgagccgtagaacaggcagacggctgtcaggtgggacccacacgtgcccaccgccctcctccggcctccgctgaaccgcatgcaacagacagctcgggccacggcaccgtaggaggccaggatgacggcaaacggcagcagcaggatgaccacgcgggcggcgaacatctggttctcggtagtgtctccgtcgcctccgcaggccagcttgagcaacgccggcagctcacagatgaagtggtccagcaggcggggcgcgcacagcggccgctcagccaggagcgcggtttgcgcaaccgagttggtgaggccacttagccaggaggcgctggccagcgtgcgacataggcgcggggagac

SEQ ID NO: 9208 - DNA, 579 bp, Homo sapiens
  MAP TO AC008174.2; EXPRESSED IN HELA, SIGNAL = 1.7; EXPRESSED IN BONE MARROW, SIGNAL = 1.1; EXPRESSED IN LUNG, SIGNAL = 1.1; EST_HUMAN HIT: BG742468.1, EVALUE 8.10e-01; SWISSPROT HIT: O25320, EVALUE 6.40e-01
tggttttgcttttggccttagcagcactcagtcctaagtgtgttttttttgtaaatttaggcaaagtggtaatttttgatcttgtttttaaatgtgctttaaagcatggcttagggttgtccttagggctcacctttaaaggaagtgagacaaaatttgtgatcttattgagaaccatttgaattaagtctttcttcacttgcaatggtaaatatggcaaaagagtgttttccatcacagagatattttgactgtcgacataagaataagcctgtgatatcgcatatctaggggaattacttatttttcctgcttgtttagtttctctaaaccttaatggtttcattagtaaggaatcattgtggtcagatatttcaacttctgtcctacttttattattttcatataatgatgtcacaactaccaagtacattttccccaaaacactttcaactatgtcatttgctacactgttaatatgtgattgaaaactgtttttctgtgttgtgtctgatgttttaatcttagaattagatataaagttggcagtttcattaagtggaggcaaatggcctgtga

SEQ ID NO: 9209 - DNA, 545 bp, Homo sapiens
  MAP TO U82670.2; EXPRESSED IN BRAIN, SIGNAL =   1; EXPRESSED IN BONE MARROW, SIGNAL = 0.98; SWISSPROT HIT: Q99102, EVALUE 2.00e-07; NT HIT: AY056047.1, EVALUE 8.10e+00; EST_HUMAN HIT: H11370.1, EVALUE 1.90e-01
tgcgggatgacaggtcgcaggagcccacagccattgcccctactccaggcgccctgcccggggacaggtcaggggcgcccagggccattgcccctactccaggagccatgctcagtggcaggtcacgggcacgcagggccattgcccctacaccaagcgccctgcgaggttacaggtcttgggcgcacagggccattgcccctaccccaggctgcctgtacagtgacaggtcacgggcgcacagggccattgcccctgctcgaggcaccaagcatggtggcaggtcatgggcatgcaggtccattgcccccaaaccaggctccctgtgcggggacaggtcacaggcgagcagggccattgaccctaccttaggcgccaggcgcggtggcaggtcacgggcccacagagccattgcccctactccaggctccctgtgcggcaacaggtcacgggcttgcggagccattgcccttactccaggtgtcctgtgcggtgtcaggtcacgggtgccaaaggacattacccctactccaggcgccctgcga

SEQ ID NO: 9210 - DNA, 517 bp, Homo sapiens
  MAP TO AC010609.5; EXPRESSED IN HEART, SIGNAL = 1.5; EXPRESSED IN BONE MARROW, SIGNAL = 1.3; EXPRESSED IN FETAL LIVER, SIGNAL = 1.2; EXPRESSED IN LUNG, SIGNAL = 1.1; EXPRESSED IN BRAIN, SIGNAL = 1.3; EXPRESSED IN HELA, SIGNAL =   1; NT HIT: gi15298553, EVALUE 3.00e-24; EST_HUMAN HIT: BG196839.1, EVALUE 4.00e-24
gggacgcaccacccgaagacaacaaaagcctagtggtaagcctctcaaaggctcgagaacatggggcaggttctttgggggagcagttcaaagccagtcctacaaagcctttggtgccttctgaggcccacctggaaaaagtattgcatgtgcaagggctcaggaccaaatgagccactactaggggacttaccacactgggaggtgggagggcttgtgtgtcccataaggctgaatttcagagaccttaggtatcagctactctggtctcacacccagggttgaaatcctttctacaccatcctgatcgtcagtcttttcttgaacacttaataccccaacccaggtggtctgatttgttgtggaacttttatttgtataaatttaaggggtgtaggtgtagctttgtgtgtgtgactatattgcatactggtgaagtctgggcttttagtgtaaccatcatctgaataatatacattgtacccactaagtaatttcccatccctcaccccctcca

SEQ ID NO: 9211 - DNA, 500 bp, Homo sapiens
  MAP TO AC035144.2; EXPRESSED IN HELA, SIGNAL = 2.3; EXPRESSED IN BRAIN, SIGNAL = 1.8; EXPRESSED IN BONE MARROW, SIGNAL = 4.4; EXPRESSED IN FETAL LIVER, SIGNAL = 2.6; EXPRESSED IN HEART, SIGNAL = 2.4; NT HIT: gi14725421, EVALUE 0.00e+00; EST_HUMAN HIT: BG178783.1, EVALUE 0.00e+00
ttcagcgccacctcactgccaagtcacatggacgggttaataatgtgtttgatcatttttcagattgtgaatttttggctgccttgtataatccttttgggaattttaaaccccacttacaaaaactatgtgatggtatcaacaaaatgttggatgaagagaacatatgagcacatgagttaagattgtgactgatcatgatttatttgaagatggagcactgctgatttatgaaggaaaaaagaagaattttctaaagattacacatatttcagaaagactttacccaattcagttgtcagacataatgatttatttgaaggcttgttttatttgaagaaaagcatattgccaaaaattctggttaaaagcttcctaacgggtaacagaccatgggagagatatgtggttgggtaatgcaaatgtagttatacaaagaaaaatacagatgtctccagacctgaggactttttaatagggcagttgttgtgttggtggca

SEQ ID NO: 9212 - DNA, 521 bp, Homo sapiens
  MAP TO AC011718.2; EXPRESSED IN PLACENTA, SIGNAL = 1.9; EXPRESSED IN BRAIN, SIGNAL = 2.6; EXPRESSED IN LUNG, SIGNAL = 2.1; EXPRESSED IN HEART, SIGNAL = 2.7; EXPRESSED IN BONE MARROW, SIGNAL = 2.1; NT HIT: gi11427757, EVALUE 0.00e+00; EST_HUMAN HIT: AL555878.1, EVALUE 0.00e+00; SWISSPROT HIT: P08125, EVALUE 1.40e-01
gctggatcccacctggctgccagggccacaccacctgagccaggtacaagttttggggaacacagggcagttgggcactgctgtgagccagttcccgcttacatctactgcctccgcccgcagccctggaaggctgtgcatggctgggccccgctggccccgggctgtgccgctccactctttaccttcaggtactcctggatggcctcctcaatgtcccggtccacggaatcgtcactgtctgaatctagcaccaatgggccaaagtctgcagtttcctcctcccccacggggtcaaagtcagcaacaagaccacaggcagccaacgcaggcagctccttgtgcatggtgggcttggcagcaggcctggcgtcgtggcatccctctgccccctctgcgcagtgcgctcatcgctggtgcccctagcagccctgtcgctctgcagcgtgctgatgagcatctgcacccgggtgctcaccgacatgctctccacgcccttgtcagcctccgagaagcacccg

SEQ ID NO: 9213 - DNA, 503 bp, Homo sapiens
  MAP TO AC022150.5; EXPRESSED IN PLACENTA, SIGNAL = 1.5; EXPRESSED IN BONE MARROW, SIGNAL = 0.91; SWISSPROT HIT: Q9CIK7, EVALUE 4.60e+00; NT HIT: gi8922743, EVALUE 4.00e-66; EST_HUMAN HIT: BI761488.1, EVALUE 4.00e-73
ggcttacacatgtttgtgccctgtcagtgttttgtcatgatataggaaataagcttttatagacttgatttgaaggacatgtaattgtctgttatttattaaagaatcttactacttttgtgttcgtaaactttgaagatcatgtttgggaagtttaaaataagtattttttattgtgtcatatttacacacttcagtatgatttaccatctgcacttaattgcaaacgtattggtgtttatattttgtagatatctcttccaaacgcatgatgaaggaggtcttgtcaacagggcaaggcaatacagaagtgatccacacagggatgttgcaaagacatgaaagttatcacactggagatttttgcttccaggaaattgaaaaagatattcatgactttgagtttcagtcacaaaaagatgaaagaaatggccatgaagcatccatgccaaaaatcaaagagttgatgggtagcacagaccgacatgatcaaaggcatgctg

SEQ ID NO: 9214 - DNA, 553 bp, Homo sapiens
  MAP TO AC005609.1; EXPRESSED IN BRAIN, SIGNAL =   1; EXPRESSED IN HELA, SIGNAL = 0.3; EXPRESSED IN BONE MARROW, SIGNAL = 0.74; EST_HUMAN HIT: BG719192.1, EVALUE 1.00e-106; SWISSPROT HIT: Q9UN75, EVALUE 2.00e-90; NT HIT: gi14728078, EVALUE 0.00e+00
ctctccgcgtgcaccgacacgtagctcgacagtgcgtgctcgcccacccgccgctccaccagcgagtaggacaccagcgcgttcttctgcgcgtccgcgtcccatgccgacaccgtgaagatgtggcagcccggcgggttgttctccttcacgaacactgtgtactcgggctgcgcgaacgcaggcgcattgtcgttcacgtcggccacctccacggacactctagccgtggcccacagcgaaggcgagcccccatcccgcgcagtcaccaccagctcataggccgacacgctctcgcggtccagggcgctgtccagcaccaacgagtagtaattcttgtaggtggacaccagcttgaagggaacatgaggtgtcagtgagcagatgacctgtccattggctccagagtcacgatccgacacgctaatcagggcaatgacggtacccacctgagcatcctcttgcacagggagcgacagtgaagtaaccattacttcagggacattgtcattcacgtccagaacttccaccaggaccatgctgtgacctgcca

SEQ ID NO: 9215 - DNA, 576 bp, Homo sapiens
  MAP TO AC027307.3; EXPRESSED IN BONE MARROW, SIGNAL = 0.85; EXPRESSED IN HELA, SIGNAL = 0.84; EXPRESSED IN BRAIN, SIGNAL = 4.8; NT HIT: gi14769630, EVALUE 0.00e+00; EST_HUMAN HIT: BG222938.1, EVALUE 0.00e+00; SWISSPROT HIT: O88935, EVALUE 2.20e-01
tcccatctccgcacccttcgtgcacgagggcctgggggtcgccgtggggggcttccccgccagccggcacggctcccccagccgctcggcccgagtaccccccttcaactatgtgcccagccccatggtggtcgcagccaccaccgactcggccgcggagaaagccccggccactgcctccgccaccctcctggaatagtggcctaggccggccttctggaacgttctctcccggccctgcggcgcggtctggctgccccatgggcctgcgctgtagacgtcccccataggtcgccccagggcctctgcccacccgagccccaccactctcagaacccccgcccagcgcacggcgacctcgcgcctcaccggaagaccttgcctctgtgccgcggaggtccaggaggaaacggggcggccgctaggcctcaagtcccgaccgtggagcgctggcaagggcgtcctggcccagccctgagcgcgcggcccttcccctgtcggaagccgttgcttgaccccgggcgagggaggcggtagcctccgggtccgggtctgggtctgggtccgctgcttcgc

SEQ ID NO: 9216 - DNA, 559 bp, Homo sapiens
  MAP TO AC000074.2; EXPRESSED IN PLACENTA, SIGNAL =   2; EXPRESSED IN HELA, SIGNAL = 0.56; EXPRESSED IN BRAIN, SIGNAL = 1.7; EXPRESSED IN HEART, SIGNAL = 2.3; EXPRESSED IN BONE MARROW, SIGNAL =   1; NT HIT: gi14777116, EVALUE 1.00e-85; EST_HUMAN HIT: AW139431.1, EVALUE 0.00e+00; SWISSPROT HIT: O00192, EVALUE 5.00e-24
tccttgcgggcgctatccactgagggcgagcgccgcaccagccggtccaggctgcccatgctgccccgttcaggctgggccaggggcgccgtcaccattgggaacgcaggccgctcgtccgccagctcgccgccatcatctgctgtgtcctcgtaggccctgcacaggcaagtggggcgcgtggacatcgtcacagcagccgccagccctgcctctgagctgccccatcacaccttcttcaggactgcaaactcacccagcagcgctgggctgagagcacctgtatcttggcccggagcatggtggggacacagagagtcatgcaccagcccagtgagaaccaattcagagccaaatgccaaaccccagccagcggctaccaggacccaggcaaccctcccaggacagcaaactcactcactgctgtcaccgggcagtttcccaatcccgagcaaaacaagtttctgtgagacatctgctatggctgctggagagaccgtctcacctcccttccacaaaaccaccccatcttccatgaggcccatctctggctgtgcca

SEQ ID NO: 9217 - DNA, 510 bp, Homo sapiens
  MAP TO AC022845.2; EXPRESSED IN BRAIN, SIGNAL = 1.1; EXPRESSED IN HELA, SIGNAL = 1.8; EXPRESSED IN BONE MARROW, SIGNAL = 1.1; EXPRESSED IN LUNG, SIGNAL = 1.2; NT HIT: gi13376600, EVALUE 4.80e-01; EST_HUMAN HIT: BI559499.1, EVALUE 0.00e+00; SWISSPROT HIT: P98167, EVALUE 2.40e-01
tgcgggagcgaagcatagccttctcgctcctctcctcctctgacagtccccggaggtttgccaaggcttccctcagaccgtccagttccttaaactccgtctcctcttcctggttgttcagtttttcattttgcttctctaagcgttcttcagggggcggggtgtccatcctgggagcctgctgtttctggagcataggcgctctcatccactaagggctgactacagtcttttcccctcagatttcaaacgctgcagggtgttgctagggactcttggcactccccagcagttggtttttccagtaaggagccctgtaattggtggacaggtcttcagaatgctatgaagtaacaacaggggaatctgggggagtccagagccaatctggtcgggttacttttgcctttctaaccaatcacagctctcagttgtcaactgtctcagtgtctggcctgtacagcacagagatgccaaccccactcaatctccagccagcatcaggggagg

SEQ ID NO: 9218 - DNA, 524 bp, Homo sapiens
  MAP TO AL049853.1; EXPRESSED IN PLACENTA, SIGNAL = 3.9; EXPRESSED IN HEART, SIGNAL = 3.2; EXPRESSED IN BONE MARROW, SIGNAL = 2.6; EXPRESSED IN FETAL LIVER, SIGNAL = 1.9; EST_HUMAN HIT: BE619651.1, EVALUE 1.90e-01; SWISSPROT HIT: P47973, EVALUE 4.00e-03
gggaccaccccaatgccctcacctggagcagacaagacaggagttctggggccccccaggaaaagtaccacagactggagctccccagacagcatggggactggcatggcatgcccccgctcaggttcacagggctgccaccagggcaggcccagccacggaggcccacttttttgtagctagcccaatttaatgtatctcgaacccaggttagcatcaaaagtctgacttccaggttacaggagccaggggaggggaggggagacgggacaagcctgttcccccagtggcaagtggagagagactgagcagcctttagtggggcccgaacccccctgcgccagggcagctgccgagggcccagccccacaggccacctcccgtctgccctggatgtaccagagatgtgggatttctgccctcacaagtgagtgggcaccagctttggggcaggtgtagccctgggagcttcagctccccggcttggagacacaggagccccatcaagcagcaccagctcccgc

SEQ ID NO: 9219 - DNA, 575 bp, Homo sapiens
  MAP TO AF176681.1; EXPRESSED IN HELA, SIGNAL = 0.67; EXPRESSED IN BONE MARROW, SIGNAL = 0.81; NT HIT: gi14744683, EVALUE 1.00e-102; EST_HUMAN HIT: BG746406.1, EVALUE 1.00e-101; SWISSPROT HIT: P23949, EVALUE 2.20e-01
gcacctggatttgggctgcactctgaggtagagctgacaggacttgccagtggtttggtgtgggtgtcaaggaaaaggggagtcaagggacagccaggattttggcctgagccagaaggtaaaccgcagtaacgtttgctgaaatgtggagtcccagggagggtgggtccgtggtcatcaaaagctctcactcatctgcagccccatgcagcctaatcacccagtgctcctcccacccctccctgatgccctctgatctggactgccaccccagaggatcccctgctccccttgcctcctccacagttagtgggtgcaactgtgactgtctatgttcctgctcctgctgcagcactgccttccaagtgatattctatttattgtttcagattgtgacaccaggactgaagacaaggagtttcttcacaaggaagacattcatgaagatttggaatcacaggcagaaatatcagaaaactatgctggtgatgtttcccaggtacccgagcttggagatctgtgtgatgatgtatcagaaagagactggggagtccccgaaggcaggaggctgccac

SEQ ID NO: 9220 - DNA, 531 bp, Homo sapiens
  MAP TO AC007281.3; EXPRESSED IN BONE MARROW, SIGNAL = 0.83; EXPRESSED IN HELA, SIGNAL = 2.1; SWISSPROT HIT: P34489, EVALUE 8.50e+00; EST_HUMAN HIT: BE144149.1, EVALUE 3.00e-03
cccaggagaccaactggggacctggttctgttgtaaaaccgtattgtctggctgcagggctgctgccacagcaacaagaatcagtgatgtcacagcctcagaatctgcctgccagagatcgggtttccagaggatatgatcaactctttctgctgggagacaattttgcacatcccatctcaaagacagtttaaacctttgttctctcttgtttcctctttaaacatatgtgtctctgttctatctccaaaatcagataaaatctcataatagcaagagctaggatttattgagcattcactatgtgcaagttgactatgtattgtgctttaccttcattagcctattcggtcctcacaaaaaccctaagaggtagaagacactaacatcttctgtgttttaagagtgaggtccctgagccttggtaacattgtagtcaagctttgctagacatcaaagcctatgttcacaatgagaaactactgattttccctgtcagatccatgagagtcaacaggactgcccctggcc

SEQ ID NO: 9221 - DNA, 509 bp, Homo sapiens
  MAP TO AC003006.1; EXPRESSED IN HELA, SIGNAL = 1.6; EXPRESSED IN BONE MARROW, SIGNAL = 1.1; EST_HUMAN HIT: BE084820.1, EVALUE 0.00e+00; SWISSPROT HIT: P17031, EVALUE 1.60e-02; NT HIT: gi8923076, EVALUE 9.00e-83
tccctgaccaaaggatgttgtgctctagtcatgttggggggggcctggacatatttatatagtactcacacgtcatcagcaaataaggttccacaggcaagttgtttgcaaatgaaggagttatagaccctgcctttattctgtctgttgactcatttagtcatgcccttgacaatatgaggccttctatatctgtgataatgctaagcagccccaacctcaacctgaacccaactccctgtttgtgcaaataattccatagactagttttttggtttgtcagatactcttgtgggtaggctgcatactcaacaaagtcaacatgtacctcaccagcatttctttgcttttaggttgttggcatggaggggaagatgaggcagcaccttctaagcagagcacgtgtatacatatatacaaagaccagggaggtcatagtggagaaaggccttatgagtgtggggaatataggaaattatttaagaacaagtcctgcctcactgaaccca

SEQ ID NO: 9222 - DNA, 581 bp, Homo sapiens
  MAP TO AL160236.1; EXPRESSED IN BONE MARROW, SIGNAL = 0.8; EXPRESSED IN HELA, SIGNAL =   2; NT HIT: AB037814.1, EVALUE 0.00e+00; EST_HUMAN HIT: BG113710.1, EVALUE 0.00e+00; SWISSPROT HIT: Q62136, EVALUE 1.50e+00
tgggagcagatgggttgaaggtgtaaatttaatatataccactattatctaccactaatacgacttcctgaagaagtcatcctagtctggaaaagatagtatacttcccacacatcactaaacgttttatttgtcagcatttagcccgttatttgagatagtagaatttagatttttattctcaaaagctgtcgtgtgtgaattttttttttttttttttaaggatcttatggaggccatttggattctcaggaagatttctgaaactggaaagccatagcataactgaatcaaaatcgttgattccagtagcttggacatccctgacacagatgcttttggaagcacctggtattttcttattgggtcaaagaaaaagattctcaaccatgccagaaacagaaacacatgagagagagactgaattgttttcaccaccttctgatgtccgaggcatgacaaaacttgatagaacagcttttaaaaagacagtcaacattccagtgcttaaagtgaggaaagaaatagtcagtaaattgatgcgatccctaaaaagggcagcattgcagcgcccaggcata

SEQ ID NO: 9223 - DNA, 565 bp, Homo sapiens
  MAP TO AL139423.2; EXPRESSED IN HELA, SIGNAL = 1.1; EXPRESSED IN BONE MARROW, SIGNAL = 0.92; EXPRESSED IN LUNG, SIGNAL =   1; NT HIT: gi16157341, EVALUE 3.00e-98; EST_HUMAN HIT: BE003506.1, EVALUE 1.00e-95; SWISSPROT HIT: Q92985, EVALUE 3.20e-02
gcgcggatgcagtggaagtggttggtagccttgctgtacacgcagccctcgtacttgcactcctcgtacttgtagaacttcttgaagccgtccttggcgtaggcatcgtccttgatgtggtagctcttgtgcttctcgatgtcacacttgttcttgaaagtgaatgtgcagccggggcgcctggatgggacattgggagcctgtcatgagacccagaggaggccccaccctgctacaccatggccctgggagggacagtcccccgggtggaaaacccaggctggacaccgaggcaggggcctgagccgtcccacgagcctgggtccttgccttccctccccgcttctgcccacgaaggcccccaccaggctcccgcttacctgcagtggaagtgcgtggtcttctgtccgtagaactggcagtcggctgtgccacagtcttcggtggctcggaagcgctggaagccgtcgttaatgagctgggtattcttcttgtggaagttctcgtgggtcatcacgtcagacgtgctcgtgtacaccttgttacagcccacctgcacaggacg

SEQ ID NO: 9224 - DNA, 561 bp, Homo sapiens
  MAP TO AC067968.1; EXPRESSED IN LUNG, SIGNAL = 1.1; EXPRESSED IN BONE MARROW, SIGNAL = 1.4; EXPRESSED IN HEART, SIGNAL = 1.5; EXPRESSED IN FETAL LIVER, SIGNAL = 1.2; NT HIT: gi11433035, EVALUE 0.00e+00; EST_HUMAN HIT: BF672190.1, EVALUE 0.00e+00; SWISSPROT HIT: Q9UK12, EVALUE 1.00e-116
tgaacaagatgacaacccctcccagattaaagcaagactatctacagttcacacaagagaaaaacctttccagggtgaaaattgtaaacagttcttcagtgatgtttccttctttgatcttcctcagcagttatattcaggagagaagtctcatacctgtgatgagtgtggaaaaagcttctgttacatctcagcccttcatattcatcagagggtccacatgggagtgaaatgctataagtgtgatgtgtgtggtaaggaatttagtcagagctcacgtctgcaaactcatcaaagagtccacactggagagaaaccattcaaatgtgagcagtgtgggaaaggcttcagatgtagatcagcacttaaagttcattgcaaattacacatgagagagaaaccttataattgtgagaaatgtgggaaggctttcatgcacaatttccagcttcagaaacatcacagaattcatactggggagaagccattcaaatgtgaaatatgtggtaagagcttctgtcttaggtcaagtcttaataggcattgcatggtccacacagc

SEQ ID NO: 9225 - DNA, 526 bp, Homo sapiens
  MAP TO AL109854.1; EXPRESSED IN PLACENTA, SIGNAL =   3; EXPRESSED IN HELA, SIGNAL = 1.9; EXPRESSED IN LUNG, SIGNAL = 1.5; EXPRESSED IN BONE MARROW, SIGNAL = 1.6; EST_HUMAN HIT: AI902889.1, EVALUE 7.00e-72; SWISSPROT HIT: P15711, EVALUE 1.70e-02; NT HIT: AB017602.1, EVALUE 2.00e+00
gccagaaccttccagggggcagagtgggagtaaagggcatggggaggggttctccaaggacagaggtggttgtggtactgctgggacctgtggaacttgagattgtatttgggaatgtgcttaggctctcaggaagtgggggccttggtctgtcaggtctaggaggtagtggggtttgaggcatatgggggtttggggtctcaggcttggaaagtgatatgcttgtggaaatttggtgtggtggggcactcggtttaagagataataagattttaggggtcttggacaagaggattccaggccccaggtgtggcatgttgtttcgggtcttgggagcaggaaccctaggtctggtgtgtagtgggtacttgggaacctgaagtgtagagactccaggtcttgactgtggcaggcctttaggtgcctgtgatgtgagtgccccaagttgggggtgcgatggagcaccaggtttggaatgcagtggagtaacacatttcacagtgtcagctttgggcgaggctgggat

SEQ ID NO: 9226 - DNA, 562 bp, Homo sapiens
  MAP TO AP000532.1; EXPRESSED IN HELA, SIGNAL = 0.94; EXPRESSED IN BONE MARROW, SIGNAL = 0.98; NT HIT: gi15299593, EVALUE 0.00e+00; EST_HUMAN HIT: AL516673.1, EVALUE 0.00e+00; SWISSPROT HIT: P51955, EVALUE 3.00e-92
tggccgctgccagaagatccagaggaagagtgacggcaagatactagcttggaaagaacttgattatggcttcatgacagaagctgagaaacagatgcttatttctgaagtgaatttgctttgtaaactgaaaaatccaaacatcgttcattactatgatcgtattattgaccggaccaacacaacactgtacattgtaatggaatattgtgaagaaggagacctggctagtgtaattacaaagggaaccaaggaaaggcaatacttagatgaagagtttgttcttcgagtgacgactcagttgactctggccctgaagtaatgccacagacgaagtggtggtgatcatactgtagtgcgtcggggtctgaaaccagccagtgttttcctggatggcaagcaaaacgtcaagcttggagatttggggctagccagaatattaaaccacgacacgagttttgcaaaaacatttgttggcataccttattacatgtctcctgaacaaacgaatcacatgtcctacaatgagaaaccagatatctggtcattgggctgcttgccg

SEQ ID NO: 9227 - DNA, 576 bp, Homo sapiens
  MAP TO AC011094.1; EXPRESSED IN BRAIN, SIGNAL = 1.5; EXPRESSED IN HELA, SIGNAL = 3.5; EXPRESSED IN BONE MARROW, SIGNAL = 1.4; EXPRESSED IN LUNG, SIGNAL = 1.6; SWISSPROT HIT: P36112, EVALUE 1.10e+00; NT HIT: gi14762047, EVALUE 2.00e-77; EST_HUMAN HIT: AW196464.1, EVALUE 3.00e-77
tgcttccttttccttccactcttgtgctttccttttcttactttcaatttgctctttaataattgggccatatttttgataggcaacaaatgctttatatttagcttgaattttaacagctgcattattctgctgttttaacaaagaatttttttctttttcttgttggtctttaaatcttgttctttcttcttccatttgtaaatgcaagtttctaatatactcctaaaacaaagtaagatacatggtagtcagcataaactaaacatgagatgttactaaaatgtcatctgaaatgtagattgaaaacaaatactaaaactgaagtcttaataaagtttctataaaatttatttagagaaactaaagtcatttatcttaaagggtattacttttttaatatttaggagattgaatcatgttaagttgatactctaatgttacatgtattctaagccacccagatatgaattgaagatttccttgaagatagaaagcatataaaatcagaaagacacagaataagcaagcaaacaacaacaacaacaaaagggaaaccacaggctaaaaaccacg

SEQ ID NO: 9228 - DNA, 508 bp, Homo sapiens
  MAP TO AL163207.2; EXPRESSED IN PLACENTA, SIGNAL = 2.2; EXPRESSED IN BRAIN, SIGNAL = 2.6; EXPRESSED IN FETAL LIVER, SIGNAL = 2.8; EXPRESSED IN HEART, SIGNAL = 1.7; EXPRESSED IN BONE MARROW, SIGNAL = 2.2; EXPRESSED IN LUNG, SIGNAL = 2.4; SWISSPROT HIT: P13816, EVALUE 6.10e+00; NT HIT: AL163207.2, EVALUE 0.00e+00; EST_HUMAN HIT: BE184313.1, EVALUE 2.00e-04
ttccgctggagttgggccactcagcagcctgggctctcctccgactgcccaggccaaactccgcctcatctggttggcccatggcctgccggcatctgttggtgtgctcctccgccagcgtgcttccccgccagcatggtccccgacaggtgctcctccgccagcgtggtcctcggctaggtgctcctctgccagcgtgctcccccgccagatgctcctctgccagcggggtcctcagtcaggtgctcctctgccagcgtgctcccccgccaggtgctcctctgccagcgtgatcctcggccaggtgctcctccaccaccgtgctcccccgccagcgtgctcctctgtcaggtgctcccccgccaggtgctcctctgccagcatgctcccccgccagcatgctcctctgccaggtgctcccccaccaggtgctcctccttcagatgctcctccagcaggtgctcccccgccagcgtgctcctccaccagcgtgctcctcctccagcgt

SEQ ID NO: 9229 - DNA, 600 bp, Homo sapiens
  MAP TO AL133243.1; EXPRESSED IN PLACENTA, SIGNAL =   3; EXPRESSED IN HELA, SIGNAL = 4.8; EXPRESSED IN LUNG, SIGNAL = 2.7; EXPRESSED IN BONE MARROW, SIGNAL = 3.1; EXPRESSED IN FETAL LIVER, SIGNAL = 3.3; SWISSPROT HIT: Q9NR09, EVALUE 6.00e-48; NT HIT: gi14730293, EVALUE 0.00e+00; EST_HUMAN HIT: BF327210.1, EVALUE 4.00e-89
tcgtccgggtgatgcaaaagcagtttgtggcgaaatgacaagagatcaactcatgtttgatttgttaaaacttgttaacattttagtgcagctgcctctttcaggcaatagggaatacagtgcaagagtgtctgtgaccacaaatacaacagatagtgtttcagatgaagaaaaagtctcaggaggcaaagatggcaatggaagcagtaccagtgttcaaggatcgcctgcatatgttgctgacttagtcttagccaaccaacaaattatgagccagattttgtctgctctgggcctgtgtaatagcagtgccatggcaatgataattggtatgtattgagaatattaatcttaccattgtctctgatactataactggtttttttttaagcaatatatggattcattttctttttactttatagtgtaaaactgctttaagcttttcatgactgatttttattggtgaggacttctgtttaggggcttcaattaatgaatgaaagtgaaatattgacaaatgtcatgtcagtttggtttgttttctttttattgagatgcctcccaggttcaagcaattctcgtgcctcagccacccaa

SEQ ID NO: 9230 - DNA, 501 bp, Homo sapiens
  MAP TO AC011452.5; EXPRESSED IN LUNG, SIGNAL = 1.9; EXPRESSED IN BRAIN, SIGNAL = 1.9; EXPRESSED IN BONE MARROW, SIGNAL = 1.9; EXPRESSED IN FETAL LIVER, SIGNAL = 5.1; EST_HUMAN HIT: AA411842.1, EVALUE 7.00e-78; SWISSPROT HIT: O70191, EVALUE 5.00e-10; NT HIT: AF305687.1, EVALUE 1.00e-38
agggacagggggagggagggggctggtggtagtggtggtggtggtagtggcggcggggagggtggtgggaggggcggggcatctaggaagaagtcttccatctgttccagctccttcttgaggagggaggccatagcttccaggtcaggtggggttggggaaggttgggggagggtgccggggggtaagggaggctccagagggaggagagctgtgaaatcaactcgctcagtcatccagtcagagaagccatcacctgggattaaagtggggagggacacaaaattccctgagttgctggtcttctgcgtagttgggtgctgactcacgtctcattcaggtgcatctgtcccattcattcagtaaaacaactaaccactgaatcatcaaaccagtcaataaaccaacaaaccagtgaagaaaccaataaaccagtcaacgaaccaaccaacaatcaaccatctaaccacccagtcaaccaaccaaccaaccaaccaacca

SEQ ID NO: 9231 - DNA, 503 bp, Homo sapiens
  MAP TO AL022726.1; EXPRESSED IN LUNG, SIGNAL = 0.93; EXPRESSED IN HELA, SIGNAL = 0.87; EXPRESSED IN BONE MARROW, SIGNAL = 0.87; EST_HUMAN HIT: H30039.1, EVALUE 3.00e-55; SWISSPROT HIT: P10238, EVALUE 5.00e-03; NT HIT: U16153.1, EVALUE 1.00e-26
cacccgagacgggaaatgcgcgctcacctggacagcgcggctcagcggcacagaatgctgtcgccctgcttgttcaccgcgccggcctggaacagcaaccgaacaccaagggaaaggttagcaggcgcaaacaacgcgctcgacacggtcctggattgtcctcggaaatcaggctggcgcgccgacgcccccaccccagcctgtagccgggggggcccctccgggctcaggcgggacttgacagcccagggcgcccacagccccgagtcccgccctgcgcgttctcccggacccgcgctcgccgagcccggccggctgctggcggcccgggggagcccggaggagcagggggagggggctgtcattcctggcccgcccctgcccggaggacggtgagcgcccgcgtcccgccaccacgccaccaacctcccatcccccgcggcgtccgcccacggccggcgcccggcctctcaccgggtcggtgttgagcgcagtgagcgggg

SEQ ID NO: 9232 - DNA, 500 bp, Homo sapiens
  MAP TO AC007253.2; EXPRESSED IN HELA, SIGNAL = 1.7; EXPRESSED IN BONE MARROW, SIGNAL = 1.1; EXPRESSED IN FETAL LIVER, SIGNAL = 1.4; EST_HUMAN HIT: AI832245.1, EVALUE 7.00e-01
cgtcccacctcagtgagccccctagctccaggcccctctctgtggaccaccgctcaccccagcatgcgtgaccccctgccacctccacatgtttccctcaggcagctcctctcattgagactgcttcacctgaagcctgggtacagtcgttccttcaagtcccagttagaatagaacaggtcagcaagagtctattgatgctttggggataattggaggatcaaagaaaaggaaatagggcaataaaattgaaattgcttttagatatggtgcactcaaaacctaccaagacccaagggtccatgacagcactcctcctggctagtccatgtgttaggaacctgcttcctaaccacacgtataccccagtgagttctttaaaatatcctgcttttcagtgaaacaagttcctaatcgcaaggcctaggaaaataagttcattccttccatgacctgagacctgcctaccccctccagggggaaaccccaccaggttgagg

SEQ ID NO: 9233 - DNA, 501 bp, Homo sapiens
  MAP TO AC006538.1; EXPRESSED IN HELA, SIGNAL = 0.76; EXPRESSED IN BONE MARROW, SIGNAL = 1.5; EXPRESSED IN FETAL LIVER, SIGNAL = 1.2; NT HIT: AJ307712.1, EVALUE 1.90e+00; EST_HUMAN HIT: BE885242.1, EVALUE 9.00e-59; SWISSPROT HIT: O53416, EVALUE 4.60e+00
aggacgcgcaggtctggctggggacaccccagggaaagagatggaaacggggaaacgcagcctcctctggtcctggtgggaacaagcagctcctcttgccagctccccatcctgttttcccatctgcaggacaagggggccacctccggctcttggttttggagggtacagacagaacaggagggtggagagagagcaggggaggaagaaaagccccagccctgcctcggggtgggcaggggcagcggaggggggggcggtggcctcggtttccccagccgaggtgtcggaggaaggatgagagaagaggaggaggccgaggagggtgtcggtgttgggggaggcagcgggggtcagtgggggtgggcggcgggcaggcgggcgttccgggctcacatgagggtgcatttgcccttgacgcggtctgtcctcttctgcttcccggagcgcttgccgtcgatgttgaggctcatgttccggcgcgtctccagcgtcagcagc

SEQ ID NO: 9234 - DNA, 508 bp, Homo sapiens
  MAP TO Z84464.1; EXPRESSED IN BONE MARROW, SIGNAL = 0.81; EXPRESSED IN PLACENTA, SIGNAL = 1.5; EXPRESSED IN HELA, SIGNAL = 0.63; NT HIT: AB009667.1, EVALUE 0.00e+00; EST_HUMAN HIT: BF819124.1, EVALUE 3.00e-37; SWISSPROT HIT: P09849, EVALUE 3.00e-33
cgcttctccctggactgggccctgattctccctctgggtaaccagtcccaggtgaaccacaccatcctgcagtactatcgctgcatggccagcgagcttgtccgtgtcaacatcaccccagtggtggccctgtggcagcctatggccccgaaccaaggactgccgcgcctcctggccaggcagggcgcctgggagaacccctacactgccctggcctttgcagagtatgcccgactgtgctttcaagagctcggccatcacgtcaagctttggataacgatgaatgagccgtatacaaggaatatgacatacagtgctggccacaaccttctgaaggcccatgccctggcttggcatgtgtacaatgaaaagtttaggcatgctcagaatgggaaaatatccatagccttgcaggctgattggatagaacctgcctgccctttctcccaaaaggacaaagaggtggccgagagagttttggaatttgacattggctggctggctgagc

SEQ ID NO: 9235 - DNA, 509 bp, Homo sapiens
  MAP TO AC009470.2; EXPRESSED IN HELA, SIGNAL = 0.89; EXPRESSED IN BONE MARROW, SIGNAL = 0.8; NT HIT: M69157.1, EVALUE 4.80e-01; EST_HUMAN HIT: BF984950.1, EVALUE 1.80e-01; SWISSPROT HIT: P38447, EVALUE 6.20e+00
tcccaccgcgtttccctcagccacgcctttcgattgggtagcggggcaccgcgcgtgacgccattggctgcattgtctgtcgttcctgtcccaggccccagcttttaagggacacgcggcacggagagtgggccggtgataggcgacagtgtgggagctggggtcagagttcatagggtcgcagaggccgcgtgccgcgtctccctccagtccccgggggactgacccccacaacaaccccgtgccgccgttccgggcccctccttccaacggccacgtgcggcctgcgcgtgcgcactcgcccagtttggcgcccaccaggcagtggggaaggggaaggggaaggggaagagggtgagggtggcagggtggggacagggaatgggaagcagtggtggggatgtgggtggtggaccaggggcgagggcaggggacaatgtctgtggagaaggggggtctgtttaggtttccgctcttggacgggagggagcggcggggtaagcagccta

SEQ ID NO: 9236 - DNA, 569 bp, Homo sapiens
  MAP TO AP001697.1; EXPRESSED IN PLACENTA, SIGNAL = 2.5; EXPRESSED IN BRAIN, SIGNAL = 1.1; EXPRESSED IN LUNG, SIGNAL = 5.4; EXPRESSED IN HEART, SIGNAL = 3.9; EXPRESSED IN BONE MARROW, SIGNAL = 1.1; NT HIT: AF207664.1, EVALUE 0.00e+00; EST_HUMAN HIT: BG674592.1, EVALUE 0.00e+00; SWISSPROT HIT: Q9UHI8, EVALUE 5.00e-92
tgctttccctgcaccagcccttcctcactttgccttgccctcaaagctaacaccacttaaaccacttaactgcattctgccattgtgcaaaagtctatgaaatgtttaggtttctttaaaggatcacagctctcatgagataacacccctccatcatgggacagacacttcaagcttctttttttgtaacccttcccacaggtcttagaacatgatgaccactcccccagctgccactgggggcagggatggtctgcacaaggtctggtgctggctggcttcacttcctttgcacactcggaagcaggctgtccattaatgtctcggcattctaccagtcttctctgccaacccaattcacatgacttagaacattcgccccactcttcaatgacccatgctgaaaaagtggggatagcattgaaagattccttcttcttctttacgaagtaggtgtatttaattttaggtcgaagggcattgcccacagtaagaacctggatggtcaagggctctttgagagggctaaagctgcgaattctttccaatgccgcagaggagccgctgta

SEQ ID NO: 9237 - DNA, 552 bp, Homo sapiens
  MAP TO Z82201.1; EXPRESSED IN BONE MARROW, SIGNAL = 0.85; EXPRESSED IN HELA, SIGNAL = 0.76; SWISSPROT HIT: P04929, EVALUE 2.00e-06; NT HIT: AF233326.1, EVALUE 5.30e-01; EST_HUMAN HIT: BF588757.1, EVALUE 3.10e+00
tgggagcaccacctcaccaggaggctggttccaagcacaatatccaaggacaccagcacagtccacagcatcagtactccacacacacaagcatcattccatacatgtaggcatcataccctacacgcggtcatcattccctacgtgcaggcattattctgtacatgcaggcatcattccatacacacaggcatcattccctacacacaggcattattccctacaagcaggcatcataccctacacgcaggcatcattccctacatgcaggcatcattccctacacgcaggcatcattccgtacatgcaggcatcattccctacacgcaggcatcattgtctacatgcaagcatcattccatacgtataggcatcattccgtacacgtaggcatcattgcttacatgcaagcatcattccatacacataggcatcattccgtacacgcaggcatcattccgtacacgcaggcatcataccctacatgcaggcatcattccctacacgcaggcatcattccgtacatgcaggcctcattccctacacgcaggc

SEQ ID NO: 9238 - DNA, 570 bp, Homo sapiens
  MAP TO AC008283.3; EXPRESSED IN PLACENTA, SIGNAL = 2.2; EXPRESSED IN BRAIN, SIGNAL = 2.9; EXPRESSED IN BONE MARROW, SIGNAL = 2.2; EXPRESSED IN FETAL LIVER, SIGNAL = 2.6; EXPRESSED IN LUNG, SIGNAL = 3.3; NT HIT: AF083824.1, EVALUE 0.00e+00; EST_HUMAN HIT: BG201986.1, EVALUE 1.00e-33; SWISSPROT HIT: P13806, EVALUE 2.00e-08
ccaagcaaactggatccctgccatagaaatccataccagctaagaggtgtagtactgagattaaatataaaacttaaagtagtccatttgaaatgaatgtgataaatgggttcacctatattaattagcattacccacttgaactcatcattttcatttacctttacctatatttacttatttttaaaaatcagatcactttcaataagtagttaatactcatcctaataataaaaaattctgactttttagcaaatatatatcttcttgcctattttatcttttcatggctagctaaaaattcttaccatggtcttctgcgtacatcataaaggtcaatcttatttggagttctactattatcaacccatggtgaagctaaaaaaaaaaaaaaaagagagatattaaatcaaaatattagatatgctctaaaaataatgagactttaaaaatcacaaaaagcaatagatacataatttcacttacgtacttcaatgttcaaatgagagatatcatttttaagcccttatattgctttaacatggaaaacaacacggcagtacaaaaagg

SEQ ID NO: 9239 - DNA, 532 bp, Homo sapiens
  MAP TO AC011841.3; EXPRESSED IN PLACENTA, SIGNAL = 2.1; EXPRESSED IN BRAIN, SIGNAL = 1.7; EXPRESSED IN HEART, SIGNAL = 1.3; EXPRESSED IN BONE MARROW, SIGNAL = 1.2; NT HIT: AL163202.2, EVALUE 4.00e-51; EST_HUMAN HIT: BI064298.1, EVALUE 4.00e-52; SWISSPROT HIT: P18175, EVALUE 3.00e-08
tccagaacactgcgacgagggtctaaatatttgtcattcacatagaattccagaacactgctactgggttctgagtgtttgtccctcacaaaggattcctgaacaatgctgctgtggtctgaatgtttgtctctcatataggattccagaacactactgctgtggtctcaacgtttgaccctcagatatgattccagaatactcctgctgtgatcagggtgtttgtgtctcacatgggattccagaacaatccttctgtggtctgaatgtttctccctcacataggattccaaaacattcctgctgcagtctgagtgtttgtccctcaaacaggattgtagaacactgctactggggtctgaatgtttgtccctcacataggattccaaaaccctgacaggagggtctgaattattctccctctgataggattccagggcactcctgttgtggtctgaatgtttgtccctcacttaggattccagaacactgctgttaggttctgagtgtttgtccctcatgtgcgattcca

SEQ ID NO: 9240 - DNA, 581 bp, Homo sapiens
  MAP TO AF176815.1; EXPRESSED IN HELA, SIGNAL = 0.53; EXPRESSED IN BRAIN, SIGNAL = 1.4; EXPRESSED IN BONE MARROW, SIGNAL =   1; EST_HUMAN HIT: BI026611.1, EVALUE 0.00e+00; SWISSPROT HIT: P55201, EVALUE 7.00e-09; NT HIT: AF176815.1, EVALUE 0.00e+00
gcctccaggttcagcacgccgactgcctgccctgtcccacagcgagggtgaggaggatgaagatgaggaggaggatgagggtaagggctggagctcagagaaagtcaagaaggccaaggccaagtcccggatcaaaatgaagaaggcacggaagatcctggcagagaagcgggcagcagcacctgtggtgtcagtgccctgcatcccaccacacaggtatgtggggagccggtggacaggcagatgagggagaaaggagcctccaggagaggagctggcagcctcctgagtggaatggcagggctgggctatcttcccaggagctgcatagaagttaaaaagaacatattttcaaaacagatagttgtctttagcaggtcacctgactttcacattaagagccagaaatgtcagcttttatctggcatagctaacaggcgttttggaactgcccttcattttgatggtgtggtttgttaagttgggatggaagaggatggaactgccactggcagcaatggaaaaaatggtctgaatatgaagaaacaaatagaatgaaaagcggggaaggggaagctcaa

SEQ ID NO: 9241 - DNA, 508 bp, Homo sapiens
  MAP TO AC004776.1; EXPRESSED IN BRAIN, SIGNAL = 0.8; EXPRESSED IN HELA, SIGNAL = 0.9; EXPRESSED IN BONE MARROW, SIGNAL = 0.84; SWISSPROT HIT: Q9H158, EVALUE 3.00e-45; NT HIT: gi14861872, EVALUE 0.00e+00; EST_HUMAN HIT: AA601497.1, EVALUE 0.00e+00
tgcacagctgttcgcggtccgccggctctctgaccaccaaattgccgctgggtagatccaccccgaagtagagctcgcggtggctggaaaggaagcgaaagttccgcgaggacatagcggccgctggcagcctcaagtccgcggagagattgcctacggctacgccccgctccgtctcctccggcactgagtactcgagctgtcccgctgcagcgccgcaggaaacccacaaacataaaactgccaccccacagcccaccatcctccctctaggcgtccacgttccaccaacacgctacaccaacggtgacccaggaccatgctccggactcctggagagcacgagccgcggggaagagcacgctcctgccggccgtcactgctgcgggctggatactcagcgaccgccgacgttgcgcctcccgaacgccggcattgccggggctggccagctgggagccgggcttgctaggctggaggctgggcagccgtctgggaaagcggagcc

SEQ ID NO: 9242 - DNA, 518 bp, Homo sapiens
  MAP TO AF038458.1; EXPRESSED IN HEART, SIGNAL = 3.5; EXPRESSED IN PLACENTA, SIGNAL = 3.7; EXPRESSED IN BRAIN, SIGNAL =   3; EXPRESSED IN BONE MARROW, SIGNAL = 2.7; EST_HUMAN HIT: BE378793.1, EVALUE 0.00e+00; SWISSPROT HIT: P16818, EVALUE 1.10e-01; NT HIT: AJ277593.1, EVALUE 4.90e-01
agctgctacgctcgggccacgccaccgccatgggcgccttcgtacgcccgcgggccccgaccggggagcctggcggcgtgggttgccagcctgacgacggcgacagtccaaggaacccccacgacagcacgggggcaccggagacccgccccgacggacggtgacaggcgaagagccgaactcgctcgatggcgtggtggagccaggaggctcgcctgactgcatggggggactggggaacccgcctaaggtgagaggtcttaagagactagcttgacgaattggggatgtcagagactcctccttggcgacgcagggggcctagagagccccgtgatggacggcaagggaggcccgccttttccgatgcttggagacaggtcggtgctcctcccccatgagggcttggggcggcctgggacgctggcgggctggacagtgtcaagccaagagctacttgcccgaaggtacggggagccaggacgacccccggtggacagggagagcctgagacgccc

SEQ ID NO: 9243 - DNA, 584 bp, Homo sapiens
  MAP TO AP000038.1; EXPRESSED IN HELA, SIGNAL = 0.81; EXPRESSED IN BONE MARROW, SIGNAL = 0.76; EXPRESSED IN FETAL LIVER, SIGNAL = 0.94; EST_HUMAN HIT: BF810519.1, EVALUE 6.00e-17; SWISSPROT HIT: P15305, EVALUE 1.50e+00; NT HIT: M32788.1, EVALUE 1.40e-01
cccatatgtcaacatggatgatttcccatatatcaacatggatgatttcccatatatcaacatggatgatttcccatatatcaacatggatgatttcccatatatcaacatggatgatttcccatatgtcaacatggatgatttcccatatgtcaacatggatgatttcattgagtgaaaggagctagataccaaagaatacacagagaatgactccatttatgttaagctgaaaaacacttaaaactattccatgatgtaagaggtctgaatagtgattatctttgcagatcataataaagataactgggaaggagcatgaggggattattctctggaaagctctctggtatgctagtaataatattctatttctcaacccagttgtggtaataagggtatgttcattctataataatatatcaagctgtatgtttaagatttatatacttttctacatgtattataatttaaaaagcttattattttaaaaaaatacatttgagcagacggaacagcatatgtaaagaccctgacgccagaaagaatttggtacattcagaactgaaaggcggccaatgagg

SEQ ID NO: 9244 - DNA, 516 bp, Homo sapiens
  MAP TO AC009974.2; EXPRESSED IN FETAL LIVER, SIGNAL = 1.4; EXPRESSED IN PLACENTA, SIGNAL = 2.7; EXPRESSED IN BONE MARROW, SIGNAL = 1.4; EST_HUMAN HIT: BG823624.1, EVALUE 0.00e+00; SWISSPROT HIT: Q15428, EVALUE 2.10e+00; NT HIT: gi14733615, EVALUE 0.00e+00
tggagtgctgtggggcaggacttccagctctctgtggcatttctcaccatagcttggcttttctctctcccaggttttgggcttctttatagctgcatatactctctctctccctgaatccttttacctcctgttctctcaggtctgctgctaccatcttccgttgatgcaagtggagctgcccatcagccttctcacacgcctggccctcatggatcccacctctctcaaccagtttgtgaacacagtgtctgcctcccctagaaccatcgtctcgtttctctcagttgccctcctgagtgaccagccactgttgacctccgaccttctctctctgctggcccatactgccagggtcctgtctcccagccacttgtcctttatccaagagcttctggctggctctgatgaatcctatcggcccctgcgcagcctcctgggccacccagagaattctgtgcgggcacacacttataggctcctgggacacttgctccaacacagcatggccctgcg

SEQ ID NO: 9245 - DNA, 537 bp, Homo sapiens
  MAP TO AL132988.3; EXPRESSED IN HELA, SIGNAL = 6.2; EXPRESSED IN LUNG, SIGNAL = 2.4; EXPRESSED IN BONE MARROW, SIGNAL = 3.2; NT HIT: gi5729892, EVALUE 0.00e+00; EST_HUMAN HIT: BG820598.1, EVALUE 0.00e+00; SWISSPROT HIT: Q13023, EVALUE 1.00e-103
tgcaacccccaaacgaaccatcagagattgctttaattataacgaggactctcccacgcagcctacattgccaaaaagaggactttttcttaaagaggaaacttttaagaatgatctgaaaggcaatggtggaaagaggcaaatggttgatctaaagcctgagatgagcagaagcaccccttcgctagtagatcctcctgacagatccaaactttgcctggtattgcagtcttcttaccccaacagcccttctgctgccagccagtcttatgagtgtttacacaaggtggggaatgggaaccttgaaaacacagtcaaatttcacattaaagaaatttcttccagcctgggaaggcttaacgactgctataaagagaaatctcgacttaaaaagccacacaagacctcagaagaggtgcctccatgccgaacacctaaacgggggactggttcaggcaaacaagctaaaaatacaaagagctcagcagtgccaaatggagagctttcttatacttccaaggccatagaggggccaca

SEQ ID NO: 9246 - DNA, 520 bp, Homo sapiens
  MAP TO AL136112.9; EXPRESSED IN HELA, SIGNAL = 1.5; EXPRESSED IN BRAIN, SIGNAL = 0.83; EXPRESSED IN BONE MARROW, SIGNAL = 0.93; EST_HUMAN HIT: BG720704.1, EVALUE 2.00e-41; SWISSPROT HIT: P12525, EVALUE 3.00e-32; NT HIT: J03069.1, EVALUE 0.00e+00
gctgggcccttacctcacgccatttacaaaaaataactcaaaatgaaccaaagacctaaatataagagctaaaattgtaagcctcttagaaataaacagagggcgggtcgcgcgctcggtggcgcgttgtgcgcgtgtgtggagtgccctgctgcccccagctggaggggaactagtctgctccaggtggcaagctgcgtgagcaagcaagccaacatggaccgcgactcgtaccatcactatttctacgactatgacggcggggaggatttctaccgctccacgacgcccagcgaggacatctggaagaaattcgagttggtgccgccgccctgggacttgggtcccgcagccgggaacccagccctcagctttggtctcctggaaccgtggccggtagggtgcgctggggacgagacggaatcccaggactactggaaagcttgggacgcgaactacgcctccctcatccgccgtgactgcatgtggagcggcttctccacccaggagccgctggaga

SEQ ID NO: 9247 - DNA, 529 bp, Homo sapiens
  MAP TO Z73986.1; EXPRESSED IN LUNG, SIGNAL = 1.1; EXPRESSED IN BONE MARROW, SIGNAL = 0.92; EXPRESSED IN FETAL LIVER, SIGNAL = 1.1; EXPRESSED IN HELA, SIGNAL = 1.6; SWISSPROT HIT: P32189, EVALUE 7.00e-99; NT HIT: gi13653132, EVALUE 0.00e+00; EST_HUMAN HIT: AL550917.1, EVALUE 0.00e+00
ccaatgcagcagactggtcccctaaacacccagatattggcacaccttccaaggccccagctttcattaggccatagatctcagaagaactccggacatttggaagaatttccattggaattccaaaaaattcgcagagttgtttatcccattccaaagaatgaatgttgaaaagcatagtcctacttgcatttgttacatctgtacagtggacacctccattgactcctcctgtcaaattccaaataagccatgaatcaatagtcccaaaaagagctcatttttcttcaacggccttttgaacttttctcacattgtcaaggagccaacgaagtttcactgcactgaagtaagtgctaagtggaaggcctgtcttggacttgacaaagttattatttcctggaattcttttactaagactctcaacggtagactgggttcttagatcaagccacaccacagcattgtagagaggctctccagttatcttgtcccagactacagtggtttccctctggttgctgacacc

SEQ ID NO: 9248 - DNA, 517 bp, Homo sapiens
  MAP TO AP001670.1; EXPRESSED IN HELA, SIGNAL =   2; EXPRESSED IN BONE MARROW, SIGNAL = 1.2; EXPRESSED IN FETAL LIVER, SIGNAL = 1.2; SWISSPROT HIT: Q64152, EVALUE 2.00e-44; NT HIT: AF200465.1, EVALUE 0.00e+00; EST_HUMAN HIT: BF792945.1, EVALUE 0.00e+00
ttgccgtgggaactgttcagctaacttcctaaggcttgttaaactgtcagcaccaagctgacttaatattccaggtatcatttctgtgattggtttggcttctgcatgaccagtaattgcaaaggtgttagcagaaagggaagcttggactttgggattgttgaagtgaataactgtcccatcatctttaatcatgttcatctcttcaataccaactatattattcacagccagtttttttagagaactctgaagctttttgtcatcagccatggctgttttatgtaccaccttctttctgcgagctgtacccttgccccctatccggacctgagcctgaagtttggctaacttttcttgattcatgctgttggtaaatctgaagcagggagggtcctccagcaccagcacgcggcaagagcaagatggctgcccgatatgccccctcttaatcttttcattcctgcgattataccaccatcagaggaaaaatgcctcccctccaaggcaagcctcc

SEQ ID NO: 9249 - DNA, 516 bp, Homo sapiens
  MAP TO AL122035.1; EXPRESSED IN HELA, SIGNAL = 0.89; EXPRESSED IN BRAIN, SIGNAL = 1.1; EXPRESSED IN BONE MARROW, SIGNAL = 0.87; SWISSPROT HIT: P24588, EVALUE 3.00e-83; NT HIT: gi13650434, EVALUE 0.00e+00; EST_HUMAN HIT: BG192648.1, EVALUE 7.20e-01
gggcttgcttgctggggttgaacatcttgtttttccttgatcgtttcaatttcttcaaggattagagttcccgtttgaatagcagaatgcccattatctaatccaagttctactgaaatcactttctctccagaagttgtgctattgctcacatttgattcacagacctcatcaccatctttccgtgagatgccttcacttagatcctgggttgacttagcctttgttgcctgatcattcaatggggtctgtgtttgtatatccaaaatttcagcttcttcctggactttgatgctgcagtctgagtcttctataattttggaatgattactcctttttggccctcttgggaattttatgcagggaatcttaagtctagattttgcctttttcttagaaagatcagcatcctcagcatttattgcaggttgcatttcaccctccaatggcttttgctgctttgaagactctgaccttttcctgcgtgttacaagacgtttgagtgaggcccaggcc

SEQ ID NO: 9250 - DNA, 502 bp, Homo sapiens
  MAP TO AC002306.1; EXPRESSED IN LUNG, SIGNAL = 1.2; EXPRESSED IN BONE MARROW, SIGNAL = 2.1; EXPRESSED IN BRAIN, SIGNAL = 0.8; EXPRESSED IN HELA, SIGNAL = 0.46; EST_HUMAN HIT: BF848035.1, EVALUE 0.00e+00; SWISSPROT HIT: Q92633, EVALUE 2.00e-05; NT HIT: AF011466.1, EVALUE 4.00e-63
agccccagtgccaccacgaccacatccttgggccgccagtgggagctgagctctttgccactgttgttatagaagaagccgatggtctcgttgtagtagcactggcccatgatgaccatctggggacacaagagatcagtgcatgtggcacttcttggaaggacacagggaggggcggcagctgcagaggagggtcagcgcaggaaggacaagggtctcaaattcagatacctcgaagcaaagtggcagtggtgaggactacggtggcctggaaaaagcaagctccatggggctggggtggaggtggaggagcagctgtttcttacctactaataagacctgtgtgcaagacatcacccaagtcaataggtttttgaaccagaagtgaaacaaaacccatctatggtcgaatcccagcccacctgccgccaatgtgtgacccggtttgggttgtggggagaggagggttagggaaagacaaaggggtgtgagctgcgggaag

SEQ ID NO: 9251 - DNA, 500 bp, Homo sapiens
  MAP TO AC012354.2; EXPRESSED IN BRAIN, SIGNAL = 0.92; EXPRESSED IN BONE MARROW, SIGNAL = 1.1; EXPRESSED IN FETAL LIVER, SIGNAL = 1.2; EST_HUMAN HIT: BE547717.1, EVALUE 1.00e-104; SWISSPROT HIT: Q62232, EVALUE 4.00e-27; NT HIT: AF136939.1, EVALUE 0.00e+00
ggcccacagttctgcgctgccccgaagctctctgcttctccacccttttcctctagcgaccgagtagttagttgacaacttcctgaattgctctgcccgctttagacaaatccctgctcgccgggtctccggcatagaaaggcctaagcatcgtccaagtcaggccgggctgccgctgggctgtggccgggcctgggggcccagtttaggcctctccgggggaccggcagaagccctgcgaacccctcccttgggccccggggagctggcgccgaagaaggtctacttactcgtacctttccttggcctcggccgcccggtcgcgctgccgccggttcttgaaccagttgctgacctgtgtggtggtgaggcccgtgcctccgccagctcacgcttctcgcggggtgaagggtaggggttgtgcgcgtaccactcgcgcagcacgctgcgactcttttccttgaagcagtagctggtctcctcgccgtcccagatggagc

SEQ ID NO: 9252 - DNA, 528 bp, Homo sapiens
  MAP TO AL121809.1; EXPRESSED IN PLACENTA, SIGNAL = 2.3; EXPRESSED IN HELA, SIGNAL = 2.8; EXPRESSED IN BRAIN, SIGNAL = 0.93; EXPRESSED IN BONE MARROW, SIGNAL = 0.93; EXPRESSED IN LUNG, SIGNAL = 0.99; EXPRESSED IN FETAL LIVER, SIGNAL = 1.4; EST_HUMAN HIT: AL598585.1, EVALUE 1.00e-125; SWISSPROT HIT: O66423, EVALUE 7.40e-01; NT HIT: AB067490.1, EVALUE 1.00e-125
tggaaggccaggcagaggagcttatttatatgtctactaaaagactgtgagaagtcactgtcaggtttgtataaacaatagtatatgtttacagttgaaggggcagtggtctgaatagacctgggcttcagaaagattaatatgacaggtgggtatacagtgtagctcgtggataaaaatagtatcttttatttgtgaaaatatattttctgtgcttatatttgtttatagctaatttgagattttggtctttggttttgtcttatgaaattaaagagacaactgaagaattggatgtatccattgatattctaacctcaagggaacagtttttctcagatgaagaaagaaaatacatggccatcaatcagaagaaagcttatattttagtaacaccacttaaatctagaaaagtgatagagcaaagatgcatgaggtataatctgtccgctggcaccatcaaagcagtaacagattttgtaataccagagtgtcaaaaaaaaagtcccatcagcaagtccatgggga

SEQ ID NO: 9253 - DNA, 573 bp, Homo sapiens
  MAP TO AF111170.3; EXPRESSED IN BRAIN, SIGNAL = 2.2; EXPRESSED IN LUNG, SIGNAL = 1.2; EXPRESSED IN BONE MARROW, SIGNAL = 1.3; NT HIT: AF111170.3, EVALUE 0.00e+00; EST_HUMAN HIT: BF952094.1, EVALUE 2.00e-91; SWISSPROT HIT: P04280, EVALUE 7.00e-09
tcctgagggtgccacagggctgtcaggctgtcccccgcccccagctgggcgactacgcggacagtggtgtggcctctctctcctgagatgctaggttgttgctcctgagggtgccacggggctgccaggctgtcccccgcccccagctgggcgactacgcggacagtggtgtggcctctctctcctgagatgctaggttgttgctcctgagggtgccacggggctgtcaggctgtcccccgcccccagctgggcgactacgcggacagtggtgtggcctctctctcctgagatgctaggttgttgctcctgagggtgccacggggctgtcaggctgtcccccgcccccagctgggcgactacgcggacagtggtgtggcctctctctcctgagatgctaggttgttgctcctgagggtgccacggggctgtcaggctgtcccccgcccccagctgggcgactacgcggacagtggtgtggcctctctctcctgagatgctaggttgttgctcctgagggtgccacggggctgccaggctgtcccccgcccccagctgggcgactacgcggaca

SEQ ID NO: 9254 - DNA, 504 bp, Homo sapiens
  MAP TO AL356021.1; EXPRESSED IN HELA, SIGNAL = 1.4; EXPRESSED IN BONE MARROW, SIGNAL = 0.94; SWISSPROT HIT: P48027, EVALUE 5.40e-01; NT HIT: AF067801.1, EVALUE 1.90e+00; EST_HUMAN HIT: BE897395.1, EVALUE 8.00e-16
cgcagtgggcaacccctctctggtgtcccaacggtgtcccaacgagtgttcagctcttagcagaaagggtagctcctctccgctgggcaggtcatcctaaggagtgttcagctcctagcagagaggagaccctagggtagatagcacctctttgcagctggtctccagtcatctctttaggtctggctgagtcccaagctttttatgggtctcagaggggaggaagtgcgtgctgattggtcgacgggcgggcctggaaaaaacaccgcatgttcccactccggttcacgggaactgcagccccgccctcagggttcaggtgctccccagcttgaaagtggggattcacagaggactcgtccccttctgcctgtttgcctcctactgccattcatggcattcaggctatttgggccaacaggcacctgtgtgccagcactgagctgccctcaggcccacctggactccctcttgtgttctttggcgcctaaagtccagcggggc

SEQ ID NO: 9255 - DNA, 567 bp, Homo sapiens
  MAP TO AL137818.2; EXPRESSED IN HELA, SIGNAL = 0.94; EXPRESSED IN BRAIN, SIGNAL = 0.78; EXPRESSED IN BONE MARROW, SIGNAL = 0.79; SWISSPROT HIT: Q01167, EVALUE 1.40e+00; NT HIT: AL163279.2, EVALUE 5.40e-01; EST_HUMAN HIT: AW893317.1, EVALUE 5.10e-02
gactgcggaagctcggtggctttagtagtggtagcagcaatagcagcactagcaacacccataccagcacaaatagtgctacagagctagtaaaacctggtgtgtacagacctctagatacacttggtactgcatcagtaagcagcaaaacagtgaaggaatccacagagattcccaccaccatattacaaaaagaaggaattgcaagtagtcaattaggtagtcgtagtactcttaggtcatcaagtcatgaggcaggactacagcagggctccctgggtggcgtttataaaactgttgtacatgctctttcgaagccgaaggcaaatgtttccccacagaggcagaacagaatgccaccagaggctccactgagggatctgtacagtcatgtaatgggctattttggaaggaaagctgcaggtgagcactaacagtgtgcagagcgcaaaaggagaaagacagcaccagtttggcttaatgcaactgaagcaagctataagcaatcaaaaagctttgggatggtcactgctttctctctgtttggttatgcatgcgccttttccc

SEQ ID NO: 9256 - DNA, 525 bp, Homo sapiens
  MAP TO AL096800.20; EXPRESSED IN BONE MARROW, SIGNAL = 0.79; EXPRESSED IN BRAIN, SIGNAL = 1.1; SWISSPROT HIT: P38994, EVALUE 7.00e-25; NT HIT: gi14780995, EVALUE 0.00e+00; EST_HUMAN HIT: AU126052.1, EVALUE 0.00e+00
ctatgcgccggttgccttccgctactttcgggagctatttggtatcccgcccgatgattacttgtgctccctctgcagtgagccgctgattgaactctgtagctctggagctagtggttccctgttctatgtgtccagcgacgatgaactcattattaagacactccaacataaagaggcggagtttctgcagaagctgcttccaggatactacttgaacctcagccagaaccctcggactttgctgcctaaattctttggactgtactgtgtgcagacaggtggcaagaacattcggattgtggtgatgaacaatcttttaccaagatccgtcaaaatgcatatcaaatatgacctcaaaggctcaacctacaaacgccgggcttcccagaaagagcgagagaagcctcttcccacatttaaagatctagacttcttacaagacatccctgatggtctttttttggatgctgacacgtacaatgctctctgtaagaccctgcagcgtgactgtttggtgctgca

SEQ ID NO: 9257 - DNA, 503 bp, Homo sapiens
  MAP TO AC004586.1; EXPRESSED IN PLACENTA, SIGNAL = 5.2; EXPRESSED IN BONE MARROW, SIGNAL = 1.6; EXPRESSED IN LUNG, SIGNAL = 2.1; EST_HUMAN HIT: BI055856.1, EVALUE 1.00e-61; SWISSPROT HIT: P09958, EVALUE 1.00e-19; NT HIT: X04329.1, EVALUE 0.00e+00
cttgcctcctccccgctctggaacagggacgctgaccaagttcaccctcgtactctatggcaccgcccctgaggggctgcccgtacctccagaaagcagtggctgcaagaccctcacgtccagtcaggcctgtgtgggtcagtagtgggtgctgttgggctttgggggcctgagtctgggggtaaggcgggtgcctgtcctgaagcccagctctaacagaaaaaagtctcaagagacctagggcccctggggctcttgggatgaccacagtcctggggctggaggatcctggggatgtggtgacttggcttggggctgctgtggtcctggggctacagtctgtttagctgacacacacttgccctctctcccacgccggcagtgtgcgaggaaggcttctccctgcaccagaagagctgtgtccagcactgccctccagggttcgccccccaagtcctcgatacgcactatagcaccgagaatgacgtggagaccatccgggc

SEQ ID NO: 9258 - DNA, 561 bp, Homo sapiens
  MAP TO AF205588.1; EXPRESSED IN LUNG, SIGNAL = 1.1; EXPRESSED IN FETAL LIVER, SIGNAL = 1.3; EXPRESSED IN BONE MARROW, SIGNAL = 1.2; EXPRESSED IN HELA, SIGNAL = 0.89; EXPRESSED IN BRAIN, SIGNAL = 1.3; EST_HUMAN HIT: AI524643.1, EVALUE 0.00e+00; SWISSPROT HIT: Q06732, EVALUE 2.00e-07; NT HIT: gi15299302, EVALUE 0.00e+00
caccaccaccaccaccaccaacaacaaccaagaacaacaaaaccacacagaactggagcctggattataggactatgaattagaacttttagaaatttaatttgttgctgctgtgttgaattgaaaagaggtataagactggaagtgtgcacattgtcataacataggtatgaggagataatggcctaaactgagccatgccttcaaatataatgctaagtttatttctcttacatatcctcgtcaactaacctttcttttcactctgtatttcagaattaattaataccagtagaaactattcaataatgaagttcaatgagtttaacaaaggtggaaaatgtttctgtgatgaaaagcatgaaataattcattctgaagaggaaccttctgaatataataaaaatgggaacagcttctggctgaatgaagacctcatttggcatcagaaaattaaaaattgggaacaatcttttgaatacaatgaatgtgggaaagctttccctgagaattcactcttccttgtacataagagaggttacacaggacagaaaacctgca

SEQ ID NO: 9259 - DNA, 500 bp, Homo sapiens
  MAP TO AL121948.7; EXPRESSED IN PLACENTA, SIGNAL = 5.4; EXPRESSED IN BRAIN, SIGNAL = 2.5; EXPRESSED IN HELA, SIGNAL = 0.46; EXPRESSED IN BONE MARROW, SIGNAL = 2.6; EXPRESSED IN LUNG, SIGNAL = 2.6; EXPRESSED IN HEART, SIGNAL = 3.5; EXPRESSED IN FETAL LIVER, SIGNAL = 2.4; SWISSPROT HIT: P81133, EVALUE 7.00e-96; NT HIT: gi4827001, EVALUE 0.00e+00
actgccggtgagagccaaagcagtttggagagacagtagggtggtctcctgctgtctgatgaggagatatatccgaatgcagatagtctttagctaggatcaaactggattttgaaatgcgatccgaattgggactacttatccgagatagtgcggtgggactgttgtcatagtcattttcatgggggctcaacatttttccctctctctgctggatatggtcacatggtgaagtgttggcaagagcagagccatggcagacttcacctgttggtgggggctgttggtagtttgcaaaacacagggagtgttttttcccagccccattaatggaagccagttggtctgagggggctttccttagctgtaatctgttctcttcttctttaatcatttgctgagtggctcttataagagtttcaattttgctgggttcatgtgggctactttgatactgctcagtacgatatcggtcacctgattcactggccgacccaggg

SEQ ID NO: 9260 - DNA, 509 bp, Homo sapiens
  MAP TO AC005923.2; EXPRESSED IN PLACENTA, SIGNAL = 3.9; EXPRESSED IN BRAIN, SIGNAL = 2.2; EXPRESSED IN LUNG, SIGNAL =   2; EXPRESSED IN HEART, SIGNAL =   2; EXPRESSED IN BONE MARROW, SIGNAL = 1.9; SWISSPROT HIT: P25276, EVALUE 8.00e-02; NT HIT: gi13325065, EVALUE 0.00e+00; EST_HUMAN HIT: R73357.1, EVALUE 4.60e-02
gtgtcctcccagcggaacgctgggacaggctcccgcaaaagagtgggcaccgcgcgctgctgtggggaattatgggcaacagggagcaagggtcagggcgagagagccacgacatccggagcagaaaggacagccccccggcggaactgtcttccaggggcctcgggatctggccccgagctggattcagcaccacgcacggcgaggacagctcctgcatcaggttcagcaccccgcgagtctcggacagctcccgagccggcgcccaagcgcatgcgctcccggggtctcttccgctgccgcttcctcccgcagcgccccgggccgcgtcccccgggactcccggcccgtcctgaagccaggaaagtaacctcggcgaaccgggcacgctttcgtcgcgccgcaaaccgccacccgcagtttccgcagtacaactaccagacgctggtgccggagaatgaggcagcaggcaccgcggtgctacgcgtggttgctcaggacccggacgc

SEQ ID NO: 9261 - DNA, 532 bp, Homo sapiens
  MAP TO AC007324.38; EXPRESSED IN LUNG, SIGNAL =   1; EXPRESSED IN BONE MARROW, SIGNAL = 0.96; EXPRESSED IN FETAL LIVER, SIGNAL = 1.1; EXPRESSED IN BRAIN, SIGNAL = 0.95; SWISSPROT HIT: P14328, EVALUE 1.00e-02; EST_HUMAN HIT: AW292540.1, EVALUE 2.00e-16; NT HIT: U82671.3, EVALUE 1.00e-07
cacgagagctgaagacgtggttccagtctgagtctgaagcctgagacccacgagagctgaagacgtggttccagtctgagtctgaagcctgagacccacgagagctgaagacgtggttccagtctgagtctgaagcctgagacccacgagagctgaagacgtggttccagtctgagtctgaagcctgagacccaggagagctgaagatgtggtttcagtctgtctgaagcctgagacccagcagagctgaagacatggttccagtctgagtctgaagcctgagacccaggagagctgaagatgtggtttcagtctgtctgaagcctgagacccgggagagctgaagacgtagttccagtctgagtctgaagcctgagacccaggagagctgaagatgtggtttcagtctgtctgaaggctgagacccaggagagctgatggtgtggttccagtctgagtctgaagcctgagacccaggagagctgaagatgtggtttcagtctgtctgaagcttgagacccaggggagctga

SEQ ID NO: 9262 - DNA, 556 bp, Homo sapiens
  MAP TO AC010387.4; EXPRESSED IN BONE MARROW, SIGNAL = 1.1; EXPRESSED IN FETAL LIVER, SIGNAL = 1.1; EXPRESSED IN BRAIN, SIGNAL = 1.4; SWISSPROT HIT: P10272, EVALUE 9.00e-36; EST_HUMAN HIT: BE295714.1, EVALUE 1.00e-79; NT HIT: AJ278581.1, EVALUE 6.00e-87
gcctctgccagctgcttgtgctgctgttctcccctctccttccccttttgatggctttggcagcataagactgccaactccttgggtttttgcactgcatgcaataactccatggtttccttgtgatatttaatggaggttcccccagatgttaggaatgccctttctttccatattgcagcatgggcatgtaggattaggtaagcacacttgctatctgtatacacatttgttctttttccttttcccagttctaaggctcgggtaagtgctaactcggtgctggtcccagggggaagaggcttacactggtccctgggggaagaggcttactttcaagtatggttacatcactaactatcacataatctgccctttgtatcccattctccacaaatgaacttccatcggtatataagttaaggtcagcattagctaaggggacttctaagagatcatcttgggtagcataagtctggactacaatttgttggcagtcatgcttggttggttccccatcctctggcagaaaagtggcagggttgagggctatgca

SEQ ID NO: 9263 - DNA, 536 bp, Homo sapiens
  MAP TO AC007934.7; EXPRESSED IN BRAIN, SIGNAL = 1.7; EXPRESSED IN LUNG, SIGNAL = 1.7; EXPRESSED IN HEART, SIGNAL = 2.2; EXPRESSED IN BONE MARROW, SIGNAL = 1.8; EXPRESSED IN FETAL LIVER, SIGNAL = 2.3; EXPRESSED IN HELA, SIGNAL = 0.36; NT HIT: gi13647879, EVALUE 0.00e+00; SWISSPROT HIT: Q08426, EVALUE 1.00e-86; EST_HUMAN HIT: AI680249.1, EVALUE 0.00e+00
gagcggccacccttggtcaggaccaaaacccaggttaacttcatctgtgaaggagcttggtggtgtagatttagtcattgaagcagtatttgaggaaatgagcctgaagaagcaggtctttgctgaactctcagctgtgtgcaaaccagaagcatttttgtgcactaatacttcagccctggatgttgatgagattgcttcttccactgatcgtcctcacttggtcattggcacccacttcttttcgccagctcatgtcatgaagttgttagaggttattcccagccaatactcttcccccactaccattgccactgttatgaacttatcaaaaaagattaaaaagattggagtcgttgtaggcaactgttttggatttgtggggaatcgaatgttgaatccttactacaatcaggcatatttcttgttagaagaaggcagcaaaccagaggaggtagatcaggtgctggaagagtttggttttaaaatgggaccttttagagtgtctgatcttgctgggttggatgtgggctgga

SEQ ID NO: 9264 - DNA, 534 bp, Homo sapiens
  MAP TO AL136040.3; EXPRESSED IN PLACENTA, SIGNAL = 1.5; EXPRESSED IN BRAIN, SIGNAL = 1.1; EXPRESSED IN HEART, SIGNAL = 1.2; EXPRESSED IN BONE MARROW, SIGNAL = 0.9; EST_HUMAN HIT: AW953688.1, EVALUE 4.80e-02; NT HIT: gi14784855, EVALUE 0.00e+00; SWISSPROT HIT: Q9Y6Q2, EVALUE 1.00e-31
tggatgcgtgccggtttgagctaatgcggttcaggacagtgtttgctgagaagaccttgcctttcacactcaggacggccacaagtgtcaatggggcagaggtggaggtgcagagctggctgaggatgtcaactggcttctccgccaatcgtgaccccctcactcaggttccctgtgagaatgtgatgatccgttaccctgtgcccagtgagtgggtgaaaaacttccgcagggaaagtgtcctgggggaaaagtctttgaaagccaaagtgaaccggggggcaagttttggctccactagtgtttctggctctgagcctgtcatgagagtaactctgggaactgccaagtacgagcatgccttcaactccattgtgtggaggataaaccgactgccggacaaaaactcaggtgggtggtggttcctcttctgtgaaaacaaacatacagttgtgaaaaagctgagatcaaagttccacatcctgtatgaagtgcttgtttttgctgtgtgatgggagtggtgatggaggggga

SEQ ID NO: 9265 - DNA, 515 bp, Homo sapiens
  MAP TO Z68694.1; EXPRESSED IN HELA, SIGNAL = 1.6; EXPRESSED IN BRAIN, SIGNAL = 1.5; EXPRESSED IN BONE MARROW, SIGNAL =   1; EST_HUMAN HIT: BI829620.1, EVALUE 6.00e-91; NT HIT: gi14249717, EVALUE 9.00e-15; SWISSPROT HIT: P20962, EVALUE 1.30e-02
tgcccaggatttctgcaggtccgtgtaaattggaactacccagttaaaattggtatgggtaggcatagccaaggccagagcaaagtttaagggccaatatgctcctacgcatttctcagcacatcctccttaaatgtagggagaagcacctgtggaagtttctgtaaggttggcttgtgtgaacatgtgtaaagtgaaaaggaaaggaaggaatgtaagggtgggagtgcacctggaagatgggatagggccaggaaaaccctaagttaagaaagacaagtactataaggacctgtgttcaacccccaaagccctcagtgtcctgtgtcttctttttgtctcctaggaaaggcaaagaagggaacatctcaacatggaaaagctctacaaagaaaatgaaggaaagccagagaatgaaagaaacctagaaagtgagggaaagccagaggatgagggaagtacagaagatgaaggaaagtcagacgaggaagaaaagccggacatggaggggaaga

SEQ ID NO: 9266 - DNA, 500 bp, Homo sapiens
  MAP TO AC023066.2; EXPRESSED IN BRAIN, SIGNAL = 1.3; EXPRESSED IN BONE MARROW, SIGNAL = 0.97; EXPRESSED IN FETAL LIVER, SIGNAL = 1.1; SWISSPROT HIT: O75376, EVALUE 4.60e+00; NT HIT: gi14738197, EVALUE 1.00e-107
gcctcagcatcgcaggaccctccagcagatccacagattcaagtatggaattctcaatttccactgaatgtctggatgaaccgaaagaaaatggatcaacagaagaagaaaagccttctggacataaactatccttttgtgattctccaggacagatgatgaaaaacagtgtagatagtgtcaaaaattccactgtaggtgggttttagcactgtaatttttaatatctcctgacagttaaatttccttcaaaaaacaaaaacctaaacctgtatttgggcttttatttagtttcagatgccaacagaatacttatgtatatgtacttatgcaaacagagaaaatggtagtccttcccactttaatatttcattttgtttatagtgtctaaccagtaaacttacacgtttgttacatatttaatgtattctctcttatgactcactttttcttaatttatagccataaaatctcgacctgtttcaagagttaccaatgga

SEQ ID NO: 9267 - DNA, 570 bp, Homo sapiens
  MAP TO AC019140.2; EXPRESSED IN BONE MARROW, SIGNAL = 0.93; EXPRESSED IN BRAIN, SIGNAL =   1; EXPRESSED IN FETAL LIVER, SIGNAL = 1.1; NT HIT: gi13643812, EVALUE 3.00e-92; EST_HUMAN HIT: AU119120.1, EVALUE 4.00e-92
ggcacaagagctggggtgcagcagaaagaaaaggaacttgggggaaagacaggagcattcaaaacatgggagcaaaattaaagaagtggagggaagggaaagtagggaatacagaaaaaagggtagaaagccatggagtgggtcagtgaactgaaaatacacacttatgcccataacccatttttattttgaatataggtataaaaagcagttaactcttatgttttaagccctcactttccccttttcatttctatttgaagtttggttgtcatttgctctggcatatgtggaattaagtggatggattacttaattcaaagaagttactgaaaagttctgggcgtttatttggtttgtaatagttccatggtgctaatctgtgttcttccttccaaggtggatcgtatgtctttcccatgcggctgcactaaagaaggatgtagtaacacagcaggtagaattgaatttaatcctatccgtgttcggactcactttttgcacacaataatgaaacttgaactggagaaaaaccgagagcagcaaatccccacgctgaatggctgccac

SEQ ID NO: 9268 - DNA, 502 bp, Homo sapiens
  MAP TO AL008639.15; EXPRESSED IN BRAIN, SIGNAL = 0.79; EXPRESSED IN BONE MARROW, SIGNAL = 2.5; EXPRESSED IN FETAL LIVER, SIGNAL = 0.96; EXPRESSED IN LUNG, SIGNAL = 1.9; EST_HUMAN HIT: BG823822.1, EVALUE 2.00e-65; NT HIT: gi4758017, EVALUE 4.00e-63; SWISSPROT HIT: Q99439, EVALUE 7.00e-29
tcgggcgcgacaacttagggcacgatgaggcatctctaccaccccaagaaccgtatcctgccctctggaccactcgaccatcagcctccagatgggtgcaaacaaacgctccagccagggggcatgacggctcccgggaccccgcagcacatctacaacaccaaactgggagcccacaagtgtgacaactcctccatgtccctgcatatgggtgacacgcagagtgccaaccacagcgtccagggctttggcctgggccagcagatatactatcccaagtactgccctcaaggcctgcagccagtggggctcccttggatgccggcaactgcccaggaccaggggaggcccccgaggatcccccctgctcccaggaggaggccactactgaggcccccgaacatgctggctccctacatcatcgccctgtctgggtttgggggattttcctgtattttcgtctttcttttttttttttaacctgttcagtgctgccaaccga

SEQ ID NO: 9269 - DNA, 504 bp, Homo sapiens
  MAP TO AC005837.1; EXPRESSED IN PLACENTA, SIGNAL = 1.8; EXPRESSED IN HELA, SIGNAL = 1.1; EXPRESSED IN BONE MARROW, SIGNAL = 1.6; EST_HUMAN HIT: BI905948.1, EVALUE 3.00e-12; NT HIT: AL163209.2, EVALUE 1.00e-10; SWISSPROT HIT: Q9Y493, EVALUE 1.00e-10
gggcctttgtgatggcagcgtgggcctttgtgatggcagtgtggtcctctgtgatggcagtgtggtcctttgtgatagcagagtgggccttcgtgatggcagtgtggtcctctgtgatggcagtgtgggcctttgtgatggcagtgtggtcctactttctgttctcttagcaaaatctcagaagccaagtagtggagggccaagtagatatttgccagttgtttatatcactttaggtccttgtctttaagcagcttaggctgatatatcaaaataccacagactgggttgcttaaacaacaggcattatttcctacacttttggaggctgggaagtccaagatggaggtgttggcagattctggttttggtgagggctctctttttggcctgcagacagccaccttcttgctgtactttcacatgccagagagagagggatgtctcttcctcttcttatcagggccctcatagcattgtagggactccaccatcgtgacctcg

SEQ ID NO: 9270 - DNA, 546 bp, Homo sapiens
  MAP TO AL049543.14; EXPRESSED IN BONE MARROW, SIGNAL = 0.8; EXPRESSED IN HELA, SIGNAL = 0.71; NT HIT: gi16174470, EVALUE 2.00e-86
tgctctactgatcacatgttgcgtaccactagtttaagtcataagtaacctccatatttcaaaacattaaccctacttcataaagcctattgattttaaatttttttggttctatttcatgctctccatttaaattcccaaactgaagtctttcccaacacaaacccatatcttccaagcaaatttatcatcccctacccctacaaatacttcttcacttgatttgagaagaagcattaaaagtaattaggccttctttgggggaaatatatccaaggtaataaaaatgtgctttcatataccttgtcacacaacacttattcacagtacactgtaatgagattcttcccctgctttcatctacggcagatattcaatcttacccagtctcctactttgtctggtgaaaatggtgtccctgatggctttagcattttggaaggtttaacaggcaaacttctttgaatctcatcatgtttcctcttcattgtgctggtttcatagcaaaggctacaagttatttgccgaccacagccctcagtccca

SEQ ID NO: 9271 - DNA, 505 bp, Homo sapiens
  MAP TO AL163302.2; EXPRESSED IN BRAIN, SIGNAL = 0.98; EXPRESSED IN HELA, SIGNAL = 0.47; EXPRESSED IN LUNG, SIGNAL = 1.2; EXPRESSED IN BONE MARROW, SIGNAL = 0.84; NT HIT: AL163302.2, EVALUE 0.00e+00; SWISSPROT HIT: P12524, EVALUE 3.10e-01
aagcgccttccttcccagcggcgaggttttccatgactcacttcagagccaggccaaggtcaaagggcaccggacgccggtccctcctcaggcagagggagacaggaagggacacccaggccccaagggggaagggctgctgcagtcgggacagggagcatgtgtgagcgtgagtgagggcgtgaggcctgtgtgcaggcagcaggtcaggtggacaggccggaggaatggccctgactccacagggaccccaccagacagctgattggcaatgccgagagatgctgtgctgctggtccttcctgcagggtcgtggaggagctcggccacttgtgaagctggacgggagaggacagtggtggcagccagaccggactcacatgtattccatcaacacagttgaaatgttttatgaccgcatggcagtatgttcgggtgagggtcctgtatgttttacacgacacatgtttaaacggcattctgtgagcccagaggctttgcctgc

SEQ ID NO: 9272 - DNA, 502 bp, Homo sapiens
  MAP TO AC019222.3; EXPRESSED IN LUNG, SIGNAL = 1.1; EXPRESSED IN BONE MARROW, SIGNAL = 0.89; EXPRESSED IN HELA, SIGNAL = 1.8; EST_HUMAN HIT: BF744936.1, EVALUE 7.00e-01; NT HIT: gi15805042, EVALUE 1.20e-01; SWISSPROT HIT: Q63099, EVALUE 5.00e-11
gcctcgcccgtgaagcactcgagcagcagctgaaggtagagcggcaggatggccaccaggtccaccaggttgagggctctgccgaatgcgctcaggtcgggcgtggaggctaggcgcacaggtactcgagcgtgaagaagcccatgcacagcatctccacgtgctccaggatgggccgcaggtctgggccgccctcgccctgccccgagtgctgctgcatctcctccacggtgttgagcgccacgccaccacggagacgagcacgaaggtcgtggaggccaccccgatggccttggcggccaccgaggagaatggcttctccatgaggttccagaggcggcgcgctgcgggccgtagaagcgcatgtcgcggaagagttcctccgcctcctcgacctgcgcctgcgcgcagctcgtgctggatcttgagccgttcgctcagctcgtcgcgccgctcctcgaagcagatgcggcagcagcgtggcgtgtacttgagccgcacg

SEQ ID NO: 9273 - DNA, 557 bp, Homo sapiens
  MAP TO AC022101.3; EXPRESSED IN BRAIN, SIGNAL = 0.95; EXPRESSED IN HELA, SIGNAL = 0.76; EXPRESSED IN BONE MARROW, SIGNAL = 0.88; EST_HUMAN HIT: AI460041.1, EVALUE 3.00e-09; NT HIT: AF167303.1, EVALUE 0.00e+00; SWISSPROT HIT: Q9Y6H5, EVALUE 3.00e-23
tggcaggtccaccatcagccaagaattgacatcctcacaaatagctgcgtgagagcactgggaaccatttgaaaagcaaaaagaaagacattgagattcaagttaaagaaagtgccgggctctctttgagattaagagtcttcagttgaattcatgcaaagttaaaatgaaataacactccctctatagctatttgttttccctgtattaacttcataacttcttattttaaaactcaaaaggtcacatctcccaactaaagccacaagtaaagattaagtaaaaaccaaaacaaatgcagcatcgttctgttactaacgaatgcagtttattaaaaaggagtctccagtctattgacatgtatactgaactagattatacttaccaggagagagatctgtccttctttaacaatgttcaagatgcttttcacttttttcagatactcactcctttcttctgggccttgggagctggtccggtttaggccactgacctgctcttctggtttggattctgctgctgaggattgtaggtggaaggccctgagctggcag

SEQ ID NO: 9274 - DNA, 567 bp, Homo sapiens
  MAP TO AL157687.1; EXPRESSED IN HEART, SIGNAL = 3.2; EXPRESSED IN BONE MARROW, SIGNAL = 2.2; EXPRESSED IN FETAL LIVER, SIGNAL = 1.9; EXPRESSED IN HELA, SIGNAL = 0.77; EXPRESSED IN BRAIN, SIGNAL = 2.6; SWISSPROT HIT: P15926, EVALUE 1.10e+00; EST_HUMAN HIT: BF922570.1, EVALUE 1.00e-121; NT HIT: gi16189831, EVALUE 1.00e-127
tgccagccaccaagaagcccttggcaatctgccctcaccaagtgagcacaagcttccagaatgccacctggttaaggaggaatatgaaggctcagggaagccagaatctgagccaaaagagctcaaaacagcaggcgagaaagagcctcagctctctgaagcctgtgggcctacagaagagggggccggagagagagagctggaggggccaggcctgctgtgtatggcaggtgagatgacacggagtgaggctcatggggcaagggccaaagcaggtcgggcctatgggagggggcaggaggaggagcagggttaggctgggagcagaacaaccagaaccatcttaacttcagtcccatgtttctgtctgtgtctgtgcaggacacacaggcccagaaggccccctgtctgacactccaacacctccgctggagactgtgcaggaaggaaaaggggacaacattccagaagaggcccttgcagtctccgtctctgatcaccctgatgtagcttgggacttgatggcatctggattcctcatcctgacgggtcagtgggcatcagtgg

SEQ ID NO: 9275 - DNA, 540 bp, Homo sapiens
  MAP TO AL096706.10; EXPRESSED IN BRAIN, SIGNAL =   1; EXPRESSED IN HELA, SIGNAL = 0.65; EXPRESSED IN BONE MARROW, SIGNAL = 0.82; NT HIT: gi6679127, EVALUE 8.00e-37; SWISSPROT HIT: P56975, EVALUE 8.00e-13; EST_HUMAN HIT: BF947486.1, EVALUE 4.00e-24
tgccctcctggcctactgcggcatacgctacctcctcctaccttcacgattctactccctcctggaccctgtctccctttcaggatgctgcctcctcttcttcctcttcttcctcctccgctaccaccaccacaccagaaactagcaccagccccaaatttcgtaagtaaacactgtgtctcaactatgatttactactgagtttcccttctgccctcctgctgtctttttccctcgccgcctgttttctagcaagccccctcccccatcccaggtttggggcagagtgagagctgattaaaactggccaccagcggggaagaaggtgccagcctgctctggttctgggggggtgggggcgtgtaggaacgggagggagattgtcaggctccactggccccactttagcgggtcccaagtgagaacagatctcccaactcccttcaaagggttaacgcgagtgcgatccctcctcactgcagacctgctggcgagctgccggatcccgctccagtagagggccagggagggagagagggc

SEQ ID NO: 9276 - DNA, 593 bp, Homo sapiens
  MAP TO AC002472.3; EXPRESSED IN HEART, SIGNAL = 1.3; EXPRESSED IN BONE MARROW, SIGNAL = 1.2; EXPRESSED IN LUNG, SIGNAL =   1; EXPRESSED IN HELA, SIGNAL = 1.8; EXPRESSED IN BRAIN, SIGNAL = 1.4; NT HIT: gi16167426, EVALUE 8.00e-65; SWISSPROT HIT: P24152, EVALUE 2.00e-03; EST_HUMAN HIT: BF982547.1, EVALUE 1.00e-64
tgcttgctgcgcctggaaagaaaggagtggagggcggtaaggacaggaccctcctggggggtacccaaggaatgggactaagcaggagagctgccacggaagttaggtatcacctctcaactgctaagatccatcatcttctaagataacaccaatcatcctgcaagtgaggacccctgacacggctccaggactctctggactcctcaccccacctcagagcacctgggaccccagcccaatatccacaaacacaacttagttccagtaccctgtcccgggacatcgggctctgggactccctcggaaccctctcccctgccctgaacagcgtcctgtacagcaccatccacctcattaccagatcctaccccaggacaccaccccccggcttcgcccctggacccgccctgggaccctcgcagatcgcccttcctgtcctcaggaccccatgaagcccaccgtaccgggcacccacgaactcgtcgcagggcgggaggcgccgccagcgatgcactgtttcgaagggcccgaagttgagcgtcaggtactcgacactgtccgagcagctatggtcgaagtccacgctcggg

SEQ ID NO: 9277 - DNA, 514 bp, Homo sapiens
  MAP TO AC006128.1; EXPRESSED IN BONE MARROW, SIGNAL = 0.76; EXPRESSED IN HELA, SIGNAL = 1.1; NT HIT: gi14761720, EVALUE 2.00e-93; SWISSPROT HIT: P14282, EVALUE 1.10e-01; EST_HUMAN HIT: AI281158.1, EVALUE 2.00e-93
taggcgcccaccttctggggccggtgtttgatccactcgctcagtgtctcgatgggcgagccattgacgcaccactcggtcacgccgaactgccgcaggtgtgcccgtgcgtggctggccagggccttgcggttttcaaagtaaaggccacacagctcgcagcaggcctcggtggctgcggggcggagggggtgctgctgagtcacagcccaaagggggcaggtgcacccagatggccctgcccaggccaggtgccaatcccgcctcccacacagacccagccatgggggccccacttggggtcagtgtgcacgcttgtggcattgcctggcctggcaggccctggcggtcgccctcccaggaccctgccgcccgctgcttacaggagtgggaggtcttctcatgaagggtctttgccttgaagggcagttcagtctggatgtaggtcttggccttgacctctgctgggaggaggcggtcctcctgcaggggccgcttggctgccactgagccc

SEQ ID NO: 9278 - DNA, 502 bp, Homo sapiens
  MAP TO X66401.1; EXPRESSED IN BONE MARROW, SIGNAL = 0.84; EXPRESSED IN HELA, SIGNAL = 1.2; EST_HUMAN HIT: BF513693.1, EVALUE 0.00e+00; NT HIT: X87344.1, EVALUE 0.00e+00; SWISSPROT HIT: P40600, EVALUE 2.10e+00
ccgcctggggcactggtttccaacctgggacagcgcacaacgcgcagccgacagccccgccccttcgcggcgccgccaggaggcgcctgggtgctgcggggctgctttgcgcgcggcgctaacgtgtgtagggcagatctgccccgagacaagtgacgaggcagccccgccctgaggctggggtgggaaaactggtgcaagtggaaaggcaggaggcagggagaggcgagaagggtgtgcgtgatggagaaaattgggcaccagggctgctcccgagattctcagatctgatttccacgcttgctaccaaaatagtctgggcaggccacttttggaagtaggcgttatctagtgagcaggcggccgctttcgatttcgctttcccctaaatggctgagcttctcgccagcgcaggatcagcctgttcctgggactttccgagagccccgccctcgttccctcccccagccgccagtaggggaggactcggcggtacccggag

SEQ ID NO: 9279 - DNA, 506 bp, Homo sapiens
  MAP TO AL035703.17; EXPRESSED IN HELA, SIGNAL = 3.3; EXPRESSED IN BRAIN, SIGNAL = 1.5; EXPRESSED IN BONE MARROW, SIGNAL = 1.8; EXPRESSED IN LUNG, SIGNAL = 1.7; NT HIT: X53749.1, EVALUE 8.00e-03; SWISSPROT HIT: Q00137, EVALUE 3.20e-01; EST_HUMAN HIT: AW836358.1, EVALUE 7.00e-04
cagtgcgcgaagccaccatcgggacgtcccggcgacaccaggaccagacccacccagggattccctctgtggacacacgcgcgggccgcacatccaccgcatgctcgctcctgcccgcatgaccccaacaccgagtgcttcgcgtggtgacacactccgatggatacacactagttcatgggcagaggctcagagatgggctcagcggcaaactcagaggcacttttaggtgaaaaaccaaaaaaacaccaaaaccaaaactctctccctttccccaccccaacaacttggcatttagggaccacgggattttaaggaggccttagattgcagtggtcaggagggcaggctcagggaccaggaagacaagtgtcctgctgtgtggccttaggcaagtttcttaagctctctgagtctaaaacttcatgtctgtaaaacaagaataccagtatcgatatcctagggtggcgtgaaagggcccaggtggaactcctggcagacggccg

SEQ ID NO: 9280 - DNA, 590 bp, Homo sapiens
  MAP TO AL109653.9; EXPRESSED IN HELA, SIGNAL = 1.1; EXPRESSED IN BONE MARROW, SIGNAL = 0.98; SWISSPROT HIT: O94991, EVALUE 8.00e-23; NT HIT: gi14768941, EVALUE 0.00e+00
agcatgtgtgttcccggggcgcgtgtgtgggtggcctcgggatgggggaatagggagcggagaaaagaaaccgctttggaaaatgcaatgatttcattctgccgtgttgctaaccccctcattctccctcgctcccactccgcctccttgctttaccatttttaatcgggcttccttgtttctttcttccctgcacccgcttcttccccctgcccccacctaaggtttgcctgtaggtacctgagttgacaccgaaggtgcctaaagatgctgagcggcgtttggttcctcagtgtgttaaccgtggccgggatcttacagacagagagtcgcaaaactgccaaagacatttgcaagatccgctgtctgtgcgaagaaaaggaaaacgtactgaatatcaactgtgagaacaaaggatttacaacagttagcctgctccagcccccccagtatcgaatctatcagctttttctcaatggaaacctcttgacaagactgtatccaaacgaatttgtcaattactccaacgcggtgactcttcacctaggtaacaacgggttacaggagatccgaacgggggcattcagtgg

SEQ ID NO: 9281 - DNA, 514 bp, Homo sapiens
  MAP TO AL162633.2; EXPRESSED IN BONE MARROW, SIGNAL = 1.2; EXPRESSED IN LUNG, SIGNAL =   1; EXPRESSED IN HELA, SIGNAL = 1.3; EST_HUMAN HIT: AW271838.1, EVALUE 0.00e+00; SWISSPROT HIT: P15505, EVALUE 4.20e-01; NT HIT: gi10864062, EVALUE 0.00e+00
tccagcccctgtcaccctcctctgataaacagcattacaaaaaggtaaaatctagagttagtggcaaaatcttcacagtaacctgttaataaagtcgtagatggctgtcaagggtgtcagtcaattggaccttggaaaattaatttgatgcagttttgctccccaaccagctgtgtagcacagaaagggcaagcagcgtgaaatgcatgagttccatgaggcaacgggatctgagaccagtattttgcagacttctccgagcacacgtgtccacagggagtgaaagcatgagttggcggtcctgcgtctacataaaatcctgcctcacagccaagccagagaggcacataggggcccacagtcctgcacatgggacactccctctcgttggcctccgtgtcactccgatggccccagttgtggtacccgtgcacgtggccacaactgagatatgcccagggctgcttctcctccaccacctctttcctgttgatgctggggaaggccagggtgt

SEQ ID NO: 9282 - DNA, 516 bp, Homo sapiens
  MAP TO D87002.1; EXPRESSED IN BONE MARROW, SIGNAL = 1.9; NT HIT: gi16167547, EVALUE 0.00e+00; EST_HUMAN HIT: AL045185.1, EVALUE 0.00e+00; SWISSPROT HIT: Q9Y2N3, EVALUE 9.00e-08
tgcatggcagcaggggaaacttgtgtgtactgggcctagaggcctcggatgtggaggagtcattcctgagggtgagtgtctgccctggtgctatatctgctgccttttcacactgggtgtgacctgaagagacagcctgaggcctgtcctcactcactgtctttgaggaactgagggtcagctggcagtgggatgaggctggccccctcctccgctttagccccggcaagcctcccgtggagctgtaggagctggagatggcatttcggttggtgcaggagctcgtccaggaggtctgggatgtctggttatatctgatttctgacctctgggcatggaggtctgtctgcagaggcccgggcccgggcacaaagggagagaggcctccattgtcccgcaggggccgaaatgcagacggtgcatccccggtgacctccgggacccttctctgatcaccaggattctcttggactctagggtccttgtcctgctcaggcatccctgccccgctctcct

SEQ ID NO: 9283 - DNA, 508 bp, Homo sapiens
  MAP TO AL050349.9; EXPRESSED IN HELA, SIGNAL = 1.2; EXPRESSED IN BONE MARROW, SIGNAL = 0.78; EST_HUMAN HIT: BG291145.1, EVALUE 6.00e-23; SWISSPROT HIT: Q9UID9, EVALUE 4.00e-09; NT HIT: gi14772640, EVALUE 1.00e-69
gtggcgggaaaagcccttggcgcagccagcacagcggaacttgtagttgcccgtgtgggcgcgctgatgctcggcgaggtgggcacggcggctgaaggacttgctgcacagggcgcatttgtggagcttcatgcctggagggcaagggaaagtcagtgagaagcatccagaccttcaccccgcaacagtgccctgcgctgggaataaaatccaggctctttccccaccagcacctgtgtgatctggccccagctctctccaccctcgtcgtctgccttcttccagccactctctgcgccagccacactcgctctcctcagagatgccacgctggctcctccctctgcgcctttgtacttgccattctcctctgcctggaacagctgctcactctctgcaccttggctcgctttgccaggtcatctcaggctcagggaggggccgtgacgcctgaggccacccacaggaacatggcagcactaagactccaacccagccctgtgtgtcc

SEQ ID NO: 9284 - DNA, 546 bp, Homo sapiens
  MAP TO AL021579.1; EXPRESSED IN HELA, SIGNAL = 1.9; EXPRESSED IN HEART, SIGNAL = 1.5; EXPRESSED IN BONE MARROW, SIGNAL = 1.7; NT HIT: gi14736442, EVALUE 1.00e-106; EST_HUMAN HIT: BF906495.1, EVALUE 1.00e-104; SWISSPROT HIT: P33527, EVALUE 5.10e+00
tgcccaaattaatgcctgtggcaaatatatgagttaagactgtgagtagcattttgttagctcaggtaagttttgctgccagtgaatttactgcaaaatttcttagttcttgaatttcagaattatgtacctgtatgtcaagaatgtacaatacctatttgtcttttgtctcaatatcattttggcttctcatcattcaaaatcttattagcaaccctgacattttgtggtttgagtacctattttgaaaagtaaaggagccaagttagtgggagttgttaaaagttgcatttatgaactgttgcattcagctgcattattgacaaaaatggtccccgttaattttttaaggtctggaacaaaaagaatgcaaatgaaaaaggaagaagccagacttctaagcttcctccaagatttgccaaaaaacaggctacagggatccagcaagcacagtcttcagcctcagttccacctctagcttcggctccacttccaccttcaacctcagcttcagttccagcctcaacctcagctccacttccggca

SEQ ID NO: 9285 - DNA, 562 bp, Homo sapiens
  MAP TO AP001751.1; EXPRESSED IN BONE MARROW, SIGNAL = 1.3; EXPRESSED IN HELA, SIGNAL = 4.4; NT HIT: AB020480.1, EVALUE 6.00e-44; EST_HUMAN HIT: BF914785.1, EVALUE 3.00e-59; SWISSPROT HIT: P57059, EVALUE 3.00e-41
gggtttctcccgcagcccacagtaacctgggcctgattcccagactcaacaaggactcagaagccagccacgaaggggctgcaggagacacaggcccctgcccaggcgagaccacacgactcaccttgagacatgaagaaggggatgcggaagcggccctccagcacccgctgtctcagcgtcggcaggttaggcccatcgaaggggagagaaccgcagaccaggacgtacagcaccacgcccaggctctgttgaggaccacagagccacatcagcgccagggcggtgcccccgggaacacggcgccctcggggaacgcggcctcgggaagggggtctgcgcgcacagggctcctacccagatgtccagctgggggccttcatactccttcccctcaaagacttccggggcggcatacggggggctcccacaccacgtggacagaggctctcctgacttgtagaaattcccaaatccaaaatctgagcggcaaagaaacagatggatgaggttaaacggcaaatggcaaggggctgcggtttcggcacaggggctgtggttt

SEQ ID NO: 9286 - DNA, 558 bp, Homo sapiens
  MAP TO AL136109.1; EXPRESSED IN BRAIN, SIGNAL = 1.2; EXPRESSED IN HELA, SIGNAL = 1.1; EXPRESSED IN BONE MARROW, SIGNAL = 0.9; NT HIT: gi14738240, EVALUE 1.00e-118; EST_HUMAN HIT: BG389170.1, EVALUE 1.00e-118; SWISSPROT HIT: P42396, EVALUE 9.10e+00
ccagaactgcccagtgggaaaaagaatcagtctcttacactcatagaacttcttaaaaataaaaggatgggagaagaaaggaattctgctatttctcctcaaaagatccataatcagacagcaagaaagagattcgttcagaaatgcgttcttccattaaatgaggatagtccgttgatgtatcagccacaaaaaatggacttgactatgcactcaggtaagaggacgtttatgactatgctatacacagtttaaatgcagttcaattatgccttctttaatggaatctatgtggaaaatactttctcacaatcttcctgtttaagctgctttttttttttacagagcacagattggttattctactgtcatttctgtataactcatcaattgatgctcattagcactgagttctctgtgcctcttttcttggtctgaatgtaaggtgagaacaaaagcagaagaaaaccacacacacacacaataaaaacaacaaacaaaaagctgatctgtaaaaataaaacttgctctggctggaggatggttgtggatgggagg

SEQ ID NO: 9287 - DNA, 532 bp, Homo sapiens
  MAP TO AC005261.1; EXPRESSED IN LUNG, SIGNAL = 1.1; EXPRESSED IN BONE MARROW, SIGNAL =   1; EXPRESSED IN HELA, SIGNAL = 1.2; EST_HUMAN HIT: BF741901.1, EVALUE 5.00e-73; SWISSPROT HIT: O43296, EVALUE 2.00e-80; NT HIT: gi11426566, EVALUE 9.00e-80
cgggtcgcaccttacacggcaccagcgggttcacagtggagagaagccttttgtgtgcaatgaatgtggaaaggcctttacctaccgctccaattttgtcttgcataacaagagccacaatgagaagaaacccttcgcatgcagcgaatgtggaaaaggcttttatgagagtacagccctcattcaacacttcattatccatactggggagaggccctttaagtgccttgagtgtgggaaggccttcaactgcaggtcacacctcaagcagcatgagcggattcacactggtgagaagccctttgtgtgcagtcaatgtggaaaggccttcactcactattccacctatgtcctgcatgaaagagcccacactggagaaaagccttttgagtgcaaagaatgtgggaaagcctttagcattcgaaaagacctcattcgacacttcaacatccacactggagagaagccctatgagtgtttacagtgtggaaaggcttttacccgcatgtcagggctcacaaggcaccagtgg

SEQ ID NO: 9288 - DNA, 536 bp, Homo sapiens
  MAP TO AC011447.2; EXPRESSED IN BRAIN, SIGNAL = 2.1; EXPRESSED IN BONE MARROW, SIGNAL = 1.7; NT HIT: gi14767612, EVALUE 0.00e+00; EST_HUMAN HIT: BI093435.1, EVALUE 4.00e-92; SWISSPROT HIT: Q03923, EVALUE 5.00e-78
tggaggcctgcagaccatgtaaaggctttgccacattcttcacatttgtatggtttctctccagtatgaattatcttatgcatagtaaggtgtgaggagcgggtgaaggctttgccacattcttcacatttgtagggtttctctcccgtatgaatcttctcatgtttactaaggatcgaggatgaaataaaggctttgccacatttatcacacgtgtacggtttctctccagtatgaattttcttatgtgaagaaagagttgcaggatggttaaaagctttgtcacattctttacatttgtagggttgctctccagtatggattatcttatgtgtagtaagggtataggggtacataaaggctttgccacattcttcacaaatgtagggtttctctccactatgaattttcttatgtgtagtaaagctagagaagtacttaaagactttgccacattcttcacatttgtagggtttctctctagtatgagttatcttatgtgtagtaaggtgtgaggaccggttgaaggctttgcc

SEQ ID NO: 9289 - DNA, 508 bp, Homo sapiens
  MAP TO AC022091.2; EXPRESSED IN BRAIN, SIGNAL = 1.4; EXPRESSED IN HELA, SIGNAL = 0.94; EXPRESSED IN BONE MARROW, SIGNAL = 0.75; EXPRESSED IN LUNG, SIGNAL = 1.1; NT HIT: gi15296997, EVALUE 2.00e-58; EST_HUMAN HIT: BF926053.1, EVALUE 2.00e-59; SWISSPROT HIT: P56570, EVALUE 4.10e-01
ctggacgccacgggaattggagctgggaggggtggtcagctgggctgcaatctgctggctccgcgccttggcttctttcagatccttctccgtgaggctagtgctccggcccaacgctacagggagggacaaaagcccagttagcaaacaggaatgcagtgacacaggggtgcacggacaaacaggcagacagagatggtcgcctcggcccttcctacacaggatctcttctggaatttaatcgtcactcactgtttcttagaattagctcacttcgtaatcagccctgacctacctttcatggcccaactcaaatgccaccacgtctacgccaccctgattatcctctcaggattaactggtccctgatttggaatccccctgacagttgctgatatggcactttaccaaactgagtacgaacacctcaccctagaagtcccaccgtgtccccagttcctccccactgccttctcctctctcactaggctctgccacactggcttgc

SEQ ID NO: 9290 - DNA, 511 bp, Homo sapiens
  MAP TO AC001070.1; EXPRESSED IN BONE MARROW, SIGNAL = 5.9; EST_HUMAN HIT: BE798894.1, EVALUE 0.00e+00; SWISSPROT HIT: P25159, EVALUE 2.10e+00; NT HIT: gi14777912, EVALUE 0.00e+00
tgcgtgagcgagaacgcttccgactggttgggggtgtccgagagcggcctcttcggcgtcgagaggaggtccgggaactttcctgccgggcaggtgaccttgagtgataaccagagcctcccctccgccgccgagtaacccgcgaccttgaccggctccgctgtcttcgccgagaggttgactgagaagatccagacctatctcgacgtcgggttgttcttgttttctctctccttgagcgggaacgggacctctggagtccacgaggctttggcgaaggagagcggcctctccttgaggttgtcttagtgcgtggagatgaagctgagcgccgtcggcgtgaagacctcgatttttcggctggctccggggaagacactgagggacttctccggtgccttgggggagttctagagcgagtttctggtgaggatgaggcagagcggcttctacgggacagtctggccttccttgttagctccggagatgatcgagagctgcgacgtcgagg

SEQ ID NO: 9291 - DNA, 520 bp, Homo sapiens
  MAP TO AC012627.4; EXPRESSED IN HELA, SIGNAL = 1.3; EXPRESSED IN BONE MARROW, SIGNAL = 1.4; NT HIT: gi13430887, EVALUE 0.00e+00; EST_HUMAN HIT: AA309966.1, EVALUE 0.00e+00; SWISSPROT HIT: Q03923, EVALUE 2.00e-73
aaaggctttaattggtcctcgacccttactaaacataaaagaattcatactggagagaaaccctacaaatgtgaacaatgtggcaaagcttttaatgagtcctcaaaccttactgcacataagataattcatactggagagaaaccctacaaatgtgaagaatgtggcaaagcctttaaccggtccccaaaacttactgcacataaggtaattcattctggagagaaaccctacaaatgtgaagaatgtggcaaagcttttaaccaattctcaaaccttactaaacataagataactcatattggagatacatcttacaaatacctagaatgtgataaagcctttagccagtcttcaactcttactaaacataaggtaattcatactggagagaaaccctacaactgtgaagaatacggcaaagctttcaaccagtcctcaaaccttattgaacaaagtaattcatactggagagaaaccctacaaatgtgaagattgtggcaaagcctctaacccgtcc

SEQ ID NO: 9292 - DNA, 514 bp, Homo sapiens
  MAP TO AC013591.3; EXPRESSED IN LUNG, SIGNAL = 1.5; EXPRESSED IN BONE MARROW, SIGNAL = 1.6; EXPRESSED IN FETAL LIVER, SIGNAL = 1.6; EST_HUMAN HIT: AI929010.1, EVALUE 2.00e-25; SWISSPROT HIT: Q9P2W7, EVALUE 3.00e-09; NT HIT: gi15311111, EVALUE 2.00e-34
gtggcgtccacaccacagcggggcagtgccacgtgctctgctagcccagccctgcacagggcagtgtggccagctccctccagatgagtagggctagggaggggagggtcgggacgccttttcataggaaagtcagcacattcaggaactgaggatgcaatcttggaatatgggcaactgcgctcaaatagctagagggctgcaaaggtgggaaggaagaggttatgtctgtgtcatcagagctaggaccctcccagagaggattccagggctgcagatttcaaccttagagctaacaggtcaggcaaggcgggggtctgagcagcccctgcagcgggggaggaggagggtgccctggcagggtgggtggcgtcccgctctgaatccagggccgtagccggcgctctcctcccacatcgccggtctcccgactccgcagatgagggcagtgacccccgacgcgaaacgccgcccggcgccgaccccagggagtactgcacgtctgaccgcgaca

SEQ ID NO: 9293 - DNA, 511 bp, Homo sapiens
  MAP TO AL353998.3; EXPRESSED IN LUNG, SIGNAL = 0.94; EXPRESSED IN BONE MARROW, SIGNAL = 1.6; EXPRESSED IN HELA, SIGNAL = 0.5; EXPRESSED IN BRAIN, SIGNAL = 0.8; NT HIT: D87849.1, EVALUE 3.10e-02; EST_HUMAN HIT: BF928560.1, EVALUE 0.00e+00; SWISSPROT HIT: Q9Z0Y8, EVALUE 1.60e+00
accgtgcacctgccctggtccctgaccagcctcaaggccaaagttcccatcatcatcaccagcgcctcagtggactctgccatctgccagctgtcagaggacggagtgttacccgtgaacccagatcaccagaattaagtgcccgaacttttaaatattaaaagctttattagtctctaccaggaggaagccctctctcttgcacaggtgactctcagaggagtcgaggagtgggcaacaggttgtctgcaacctccccaagctctagcggtttaggtatccgtgtctcccctccctagaactatcactgaatgcctggaatggacaaaggaaaccgggaaggtctcccaggacccaaacccggcataacctgccttttccaccctgagtctgccccagcctactggggtctcacagtgccaagaccaggggtcctacttggggagaattctcccctctgctaatgtctggttgtattggctgtcacaactgcaggggatcgggggagaag

SEQ ID NO: 9294 - DNA, 505 bp, Homo sapiens
  MAP TO AF128525.1; EXPRESSED IN BRAIN, SIGNAL = 0.86; EXPRESSED IN HELA, SIGNAL = 1.8; EXPRESSED IN LUNG, SIGNAL = 1.1; EXPRESSED IN BONE MARROW, SIGNAL = 1.2; SWISSPROT HIT: P56715, EVALUE 9.00e-20; NT HIT: AF143224.1, EVALUE 0.00e+00; EST_HUMAN HIT: AI139541.1, EVALUE 1.80e-01
ggaatggcgacccgaagacgaggcgtgcggttcttctgagcaggagggtcacccagagcttcgaggcatttctacagcacctgacagaggtcatgcagcgccctgtggtcaagctgtacgctacggacggaaggagggtgagcgttctgggggctcctcgagcctgagctcattttgagcaccctactaattggattcgtgtgggatatgaatggtggcccccgggaaggaaatcttccttcctccctgcctgtgtatgtgagtgtgtgtgctccgatgctgcctttgttcctttgtcagaatctgactggaatctcatctttccctcatgctacctacccctttctctcttccctgagccctgagttacataatgttttcacatggaatccaatcttgataatattttttggaaaggagtggcaaagagtagtattttcacagaggaagcattttcctgggatccctgctgggacgtaactgactcccccacccaaccttgaca

SEQ ID NO: 9295 - DNA, 509 bp, Homo sapiens
  MAP TO AC008888.4; EXPRESSED IN HELA, SIGNAL = 0.88; EXPRESSED IN BONE MARROW, SIGNAL = 0.76; EST_HUMAN HIT: AL046138.2, EVALUE 0.00e+00; NT HIT: U17895.1, EVALUE 0.00e+00; SWISSPROT HIT: P97353, EVALUE 2.00e-31
agccgacacctcccacacggtcacaaggcactggctctaagcgaatttgctcagctcccaccagctgctactggtgtttagttctgtggtttgtgcattttgtggttgacatactaaggcacagaggttgagtcagttgtccaaactcactcagctatgaagtagataagcctggatccaaactgcatgagggaccgtgagtccatgccccgcacgccccactcactgcccctcgggtcacaggatgaggaccaggcacatgcagggctggctagaggccgttctgtccagcctgtccaaggtcagccgcaaggcccacccactctggcaggaaggccgcttacggcctaaagaccacgttgaaaggggagttgggcagggtgaagttggccaggtagacagtgtccccgcccgcgaggtacgcggcccagaccccgaaggtgcccacggtgatgatggtgtggttgcactgtgtgagcagtgcgaagtccttggcaggtgagccctgg

SEQ ID NO: 9296 - DNA, 502 bp, Homo sapiens
  MAP TO AL118508.6; EXPRESSED IN LUNG, SIGNAL = 1.4; EXPRESSED IN BONE MARROW, SIGNAL = 0.83; EXPRESSED IN HELA, SIGNAL = 1.3; EST_HUMAN HIT: AU133945.1, EVALUE 2.00e-78; NT HIT: gi12742414, EVALUE 4.00e-88; SWISSPROT HIT: P08868, EVALUE 1.20e+00
agccggcagtatctcggggctgtaacgtcttccccccgtcgctgtttccacagtgctgagccagggacccggcagagctgcctgactccttttatgaacaacagcaccgtgatgaaggcagcaggagtcagagaactattcattgcaggaagccccaacatccggtgagaaataagaagtacaacagtacaggatgcgccttgggtcagggggacgtggaaagccctcagcctttgtgtccttctctgcgccggagtggctgcagctcacccctcagctccccttggggcccagctgggagccgagatagaagctcctgtcgccgctgggcttctcgcctcccgcagagggccacacagagaccgggatggccacctccatgggcctgctgctgctgctgctgctgctcctgacccagcccggggcggggacgggagctgacacggaggcggtggtctgcgtggggaccgcctgctacacggcccactcgggcaagctgagc

SEQ ID NO: 9297 - DNA, 501 bp, Homo sapiens
  MAP TO AL031963.11; EXPRESSED IN BONE MARROW, SIGNAL = 0.97; SWISSPROT HIT: Q05347, EVALUE 1.40e-01; EST_HUMAN HIT: BG115945.1, EVALUE 0.00e+00; NT HIT: gi14249519, EVALUE 0.00e+00
tccaggaccacctggctcggtgcaccatgcattgcaatgacaaagccaaagattcaatagatgctgggagtaaggagcttcaggtgaagcagcagctggacggttgtgtgaccaagtgtgtggatgaccacatccacctcatctcaactatgaccaagaagatgaaggaggctgtcttatccattgggaaataaaagtctttgccagtggccaatgagggcaagaatgtattttttataaggaattgggaattttactcttttaagcaaagtttatgaatgaacaaataaaggatggccacaagtgtaaggcatacatcacttacctctggacactggttcttttatgtttcagtcctgaaaagggaagtggaaaaaagtgtgctaaattgggtcagagatattacgggagagttttagagcttattcttcctgtggccagtgcttgtcctggaagtaaggatctcctctgtaacaagccagagccctccaacataccaga

SEQ ID NO: 9298 - DNA, 514 bp, Homo sapiens
  MAP TO AC013396.4; EXPRESSED IN BRAIN, SIGNAL = 0.86; EXPRESSED IN HELA, SIGNAL = 0.76; EXPRESSED IN LUNG, SIGNAL =   1; EXPRESSED IN BONE MARROW, SIGNAL = 1.2; NT HIT: AJ308589.1, EVALUE 1.20e-01; EST_HUMAN HIT: BG742555.1, EVALUE 1.00e-106; SWISSPROT HIT: P14172, EVALUE 1.90e-01
aagaggtggggtggcagggccctccagaggacccccccacagtggtaaaggcagagggagcagaggagggtgagggagagaaggagggagggagaacagaggaggagagagagggagatggagagctcaggttatgaagttccatgggctgcttgggccatgggcctgagagaaggttctggagtcttctacccctgcaggagtgctcagggcaaagtgggatgattggcactatcagctggccaccacggtgacacaacatcctggggttttcatcagcattctcgcagccactgagaaacaccctgtgttcctgtttgcaggccaaggggaaccctgcagccctccctccttccctccgcctcggggtactgagtgatcccaccacatgaggtctctgagcccagcctgggggttgtgctgctggtagaggaggaagcagggctcagcaggggcaagatggaagcccagagaaaccctgaagtgggaggatagtccagccgggtgaggtggg

SEQ ID NO: 9299 - DNA, 530 bp, Homo sapiens
  MAP TO AC006479.2; EXPRESSED IN LUNG, SIGNAL = 1.1; EXPRESSED IN HEART, SIGNAL = 1.2; EXPRESSED IN BONE MARROW, SIGNAL =   1; EXPRESSED IN BRAIN, SIGNAL = 0.78; EXPRESSED IN HELA, SIGNAL = 0.93; NT HIT: AJ133125.1, EVALUE 2.00e-06; EST_HUMAN HIT: BG484375.1, EVALUE 1.00e-101; SWISSPROT HIT: P54120, EVALUE 8.00e-05
tggcacttgtcccacctgcggctgcccgtggtgcaggccctggtcacagacgtggcccccagcctggagaagaaccgtctctggcccaggatgctgttcccagtggcgctcttcccggcccctgttctcccaacaaggatgagcctccgcgtggactcctgccgggactgagcgttctcttctaaacctgtgagaccaagtgttataatcttacttaagtttaaccaacttccccttgggaactggaatcttcttgcctttagcataagtggttaagaatagagatttgaacgcctgggcgttcatttccaccttttccttttgtatttgggttgtctgcctgcaccagtagatgctccaactacagttgattatcatagaaatgcttctttatcagtccagcccaatagttcatctgacatttctggtcatccacacacatgcagacatatttatttcatatttgaaaatttcgatggactctgaaatattctcccagagaccatccccagagacaggcagtgggggca

SEQ ID NO: 9300 - DNA, 500 bp, Homo sapiens
  MAP TO AL161668.1; EXPRESSED IN HELA, SIGNAL = 1.7; EXPRESSED IN BONE MARROW, SIGNAL = 1.1; EXPRESSED IN LUNG, SIGNAL = 1.4; SWISSPROT HIT: Q9UKN7, EVALUE 3.10e-01; NT HIT: gi15300266, EVALUE 1.00e-118; EST_HUMAN HIT: BG762275.1, EVALUE 1.00e-118
ggcccccaagagctgtgctgatccgaggcctggaggtcaccagcactgaggtggtagacaggacgtgctcaccacgggaacacgtgctgctgggccgggctagggggccagacggaccctggggagtaggcaccccccggatggagcgcaagcgaagcatcaggtgagatcccagcccaactggtgctaagaggcggagccaactgcccagtaggaaaagaagatgacattgttgggggtactggctccctcccacacctcctctgccactcctattgtgcctgcagtgcccagcagcggctggtgtctgagctgattgcctgtgaacaagattacgtggccaccttgagtgagccagtgccaccccctgggcctgagctgacgcctgaacttcggggcacctgggctgctgccctgagtgcccgggaaaggcttcgcagcttccaccggacacactttctgcgggagcttcagggctgcgccacccaccccctacgcat

SEQ ID NO: 9301 - DNA, 542 bp, Homo sapiens
  MAP TO AF205588.1; EXPRESSED IN HELA, SIGNAL = 0.57; EXPRESSED IN BRAIN, SIGNAL = 0.78; EXPRESSED IN BONE MARROW, SIGNAL = 0.9; NT HIT: gi15298798, EVALUE 0.00e+00; EST_HUMAN HIT: BI009009.1, EVALUE 0.00e+00; SWISSPROT HIT: Q06730, EVALUE 8.00e-85
ccagtcagctgcaacatggggcatttgtttagcgatttcattccctaagaaatgttttggtatttatgtggtaagattaattttgcttgtttctagaagtctggacagctgatcacctgaaagagaggagccaagaaaaccaatctaaacatttgtgggaagttgtattcatcaataatgaaatgctgactaaggaacaaggtgatgtaataggaataccatttaatgtggatgtaagttcttttccttccagaaaaatgttctgtcagtgtgattcatgtggaatgagtttcaacactgtttcagaattggttatcagtaagataaactatttaggaaaaaagtctgatgaatttaatgcctgtgggaaattgttactcaatattaagcatgatgaaactcatactcaagagaaaaatgaagttttgaaaaataggaacacactgagtcatcatgaggagactttgcagcatgagaagattcaaactttagagcacaattttgaatacagtatatgtcaggaaaccctccttgaaaaggca

SEQ ID NO: 9302 - DNA, 573 bp, Homo sapiens
  MAP TO AL008726.1; EXPRESSED IN HELA, SIGNAL =   1; EXPRESSED IN BONE MARROW, SIGNAL = 1.3; NT HIT: gi14786133, EVALUE 0.00e+00; EST_HUMAN HIT: BG982708.1, EVALUE 0.00e+00; SWISSPROT HIT: P28329, EVALUE 2.80e-01
ggaaggagggcccacggaagtacaacagtgtaagggagtgtgtgtgtgtgtgtgtgtgtgtgtgtgtgtgtgtgtatgggtggatgtgagtgtgcacaggtgcatgagcatctctgggcatcgagaataatcagagttggacctgctcataaggcccaatccagctgtcggccagttcccgcagggtgctatacctccgctcaaactcctccttggtgcagtgctgcaacagctgacccacctcctcggtgaggtgagtcactgccaggtgcttatccagggtctcactccacttgctgcccaggatgctgtctagactggtagcacagcctgccgtccactgagccggcagcatgtcgggctggagcacctggcggcgggcactgagcatggctaggatgtggcggcagggcaggtggaaggcctggttaaagtagcagctgcagctggcagggggctggggctgcaccttatgggtatcttccaggatctgtatgttcatcttttctgagccagagccaatgaggtgtgtggatttctggaccacagcaagctcgcccaggcacagttggg

SEQ ID NO: 9303 - DNA, 588 bp, Homo sapiens
  MAP TO AC061958.9; EXPRESSED IN HELA, SIGNAL = 0.6; EXPRESSED IN BONE MARROW, SIGNAL = 0.85; SWISSPROT HIT: P08547, EVALUE 5.00e-54; NT HIT: AF223391.1, EVALUE 0.00e+00; EST_HUMAN HIT: BG623530.1, EVALUE 0.00e+00
ggccttgtccaacaggaaaataccacaatgctaaacatatatgcacctaacactggagctcccaaatttattaaacaattacaaatagacctaagaaatgaggtagacagcaacacaataatagtgaagaacttcagtactccactgacagcactagacaggtcatcaagacagaaagtcaacaaagaaagagtggatttaaactataccttggaacaaatggacttaacagatgtatacagaacatttcatccaacaaccacagaaaacacattctattcaacagcacatggaactttctccaagatagaccatatgataggccataaaacgagcctcaataaatttttaaaaattgaaattaaatcaagcagtctctcagaccacagtggaataaagctggaaatcaactccaaaaggaaacttcagaaccatgcaaatatacggcaattaaataatctgctcctgaatgagcattgggtcaaaaacaaaatcaagaagaaaatttaaaaattcttcaaactgaatgacaataatgacacaacctgtcaaaacctttcagatacagcaaaggtggtgccaagagga

SEQ ID NO: 9304 - DNA, 504 bp, Homo sapiens
  MAP TO AL031588.1; EXPRESSED IN FETAL LIVER, SIGNAL = 0.99; EXPRESSED IN LUNG, SIGNAL = 1.1; EXPRESSED IN BONE MARROW, SIGNAL = 1.1; EST_HUMAN HIT: BG983595.1, EVALUE 7.00e-75; SWISSPROT HIT: P11087, EVALUE 6.20e-02
acccagacgtcctgagcgggccctggggcctcccggcctcaccccacactttgcttccagggtaggggcccggctgcccaccggcaccctcggccgccagtcacagccggcgcacacgatgccagagccttagagaacgcctcattgtctcggcccgcggggtctgaccctgcgcgggagaccctcacaccagctgccccggggaagaaagcagaacccggtcaggtccttcaggccactgtcctgcgaggagtgggggagagacagggaccagagaaggggcaggtagcaggaaagccaggcctgaagctaaggccttaggggagggctccaggggagtcagaggagagaggcgccttcctcaagcacatctgccctagctggggagcctgggtggcgtgcgctctccaccgtggccccatcaggggctgcatcgtttactctggtttgtgtctctcaagactgcccttccatccctgcggctcccaccacagagcgacaccg

SEQ ID NO: 9305 - DNA, 503 bp, Homo sapiens
  MAP TO AC002040.1; EXPRESSED IN LUNG, SIGNAL = 1.1; EXPRESSED IN BONE MARROW, SIGNAL = 0.84; EXPRESSED IN HEART, SIGNAL = 1.4; EST_HUMAN HIT: BF350346.1, EVALUE 0.00e+00; SWISSPROT HIT: P08920, EVALUE 1.60e+00; NT HIT: AB033029.1, EVALUE 0.00e+00
ttcagcacaaggggaccgcctgcccccgctctctggtccatttgataacaataatcagatcgcttatgtggatcagagcgactccgtagacagctctccagtcaaagaggtgaaagcccccagccacccaggctcactcgcaaagaaaccagagagcacaactaagagatcccccagttccaaaggcacttctgagccagagaaaagcttgcggaaggggagaccagccttggcaagccaggagtcatccctttcaagtacatccccttcttctcctcttcctgtaaaagtctctctaaagccctcccgctcccgcagcaaagcagattcttcttccaggggcagtggacggcattcatcccctgcccctgcccaacccaaaaaggagtcatccccgaaatctcaggactccgtgtcatctccttcgccacagaagcagaagtcagcctcggccctcacctacactgcttcctccacatctgccaaaaaggcctcgggccctg

SEQ ID NO: 9306 - DNA, 550 bp, Homo sapiens
  MAP TO AF228728.1; EXPRESSED IN BONE MARROW, SIGNAL = 0.85; EXPRESSED IN HELA, SIGNAL = 0.36; EXPRESSED IN BRAIN, SIGNAL = 0.77; NT HIT: gi13399331, EVALUE 1.00e-101; EST_HUMAN HIT: AA528101.1, EVALUE 1.00e-101; SWISSPROT HIT: O77797, EVALUE 1.30e+00
cctgctgctctccccgttggtcagtgtgactgccctggggcctctctgctccactagcttttccaggctcccctctgacttactgatgtggtcacaggcttctactggctcagatccctggggatcttcctcaccaaatgtctcctgtgaagtcaactccttgtactcagttctggtcccaagagctgaaacaaaaaacagaacatctaagggtcacctgctctgactctggaaggtaggcatgagatgctgctggccacctgtggggaaccaatttgatcatctccaaagtcccaacagccttgcaaagataagagcctggaactcagaggcttatgcagctcacctggggccacagtcatacagcccttcaaacattcactccttccttccttgatttgacactcacacaacaaacctctcctgggtggccactccccaagaatggagagtgacaagtacccaagtggggtcctgccacatggccgctcagagactgataccagcagccacagtcaggattgattagtcctggcccctacttgccagc

SEQ ID NO: 9307 - DNA, 542 bp, Homo sapiens
  MAP TO AF205588.1; EXPRESSED IN BONE MARROW, SIGNAL = 0.83; NT HIT: Z70664.1, EVALUE 0.00e+00; EST_HUMAN HIT: BF732456.1, EVALUE 4.00e-21; SWISSPROT HIT: P03337, EVALUE 5.00e-09
tgttcaggctgtgtggcgggtcatggctggaactcccggacaccctgatcagtttccttacattgatcaatggctagatttggtccagagccctcctccatggctccgctcacgtgccattcatgatcccacctccaaggtccttttgagctggaccacacttttgccccaaccctcagcgccttcggctcctcctgtacagtctccttctgaagaagaggaaagttctcttcacccatttctgcctccctataaccctcctgcccacccccccccccgccccagaatatttccttgtctcctcgactacatcccctgtggcctctccacctatagccacccaattacggcatcggctggaggaggtggccctccttctcccactgacagaggcccaaatccctctgggcaatgagcgctctgctccatttttagtttatgtccccttctctgtttctgacctgtacaactggaaggctcataatccccccttttctgaaaagccccaggtcttgacctcactgatggagtccgtgctccgg

SEQ ID NO: 9308 - DNA, 503 bp, Homo sapiens
  MAP TO AC003070.1; EXPRESSED IN HELA, SIGNAL = 0.77; EXPRESSED IN BONE MARROW, SIGNAL = 1.7; SWISSPROT HIT: Q9UMN6, EVALUE 2.10e+00; NT HIT: L14561.1, EVALUE 7.50e+00; EST_HUMAN HIT: AI190539.1, EVALUE 9.00e-90
ggcagcagccgaccatcgagctcatttgcatttctgcagcgaaacatgaatattcacacaagtgcgataaataaagaccatcagcagcctcacatcagttcaagcgcaattttgccaccaattggattacgaaaagcctctgggcttccagggagctttggagcttgggaattgctgatgagggactgcgggcgtgcacccctcacgtttcgcggttggggagagggagctcatccgaagtcttcggacagaggtgggcgtcgtgcccgacgctgagcggagcgggtctccttgcgccccggctccgtgcgggcgcggtccctagcgcgccacccgcctccgcgccccagcgcccggggaggtacctgctctgcgctctcctcccgcggcgggacgtgcaagtcctggatgacctcgtagacgttctctgagtcgctgcgcgccagaggccgcgggcacacccaggagcccgccacgctgcaggccttgaagctgccgctgct

SEQ ID NO: 9309 - DNA, 599 bp, Homo sapiens
  MAP TO Z68276.1; EXPRESSED IN HELA, SIGNAL = 2.8; EXPRESSED IN BRAIN, SIGNAL = 0.93; EXPRESSED IN BONE MARROW, SIGNAL = 1.5; NT HIT: AJ007042.1, EVALUE 0.00e+00; EST_HUMAN HIT: BE396201.1, EVALUE 0.00e+00; SWISSPROT HIT: P39193, EVALUE 9.00e-16
acacagtttggccctccgccttctcttcatgggaatgcactcttctctcacagacttggggttttcagcagcttcttcactgactcctgaggattctgccatttctcccaaagactctgcagcaatgccagcctccttggctacttgagggttgagatgaagctggtcccccacatagagaaaggtgaacttggctttccgctcctccactgacatgcttgcagcttcttctgcttgaacaatgcccatttcccactgggccctcaatttccctgaaattggtttcaatagctgggaaaaaaaaaagagacactgtaagtttcactacacaaacataaaagttaactacttttcctaggcacatgattcatgcctataattccagcacttatgggtgtcaaggcagatggatcacttgaggccaggagtttaagaccagcctggtcaacatggcaaaaccccatctctactaaaatacaaaagataagccaggcatggtagtgcatgcctgtggtcccagctactagggaggctgagacatgagaatcacttgaactgggaggcagcggatgcagtaacccgagaccacgccactgcac

SEQ ID NO: 9310 - DNA, 500 bp, Homo sapiens
  MAP TO AC004232.1; EXPRESSED IN BONE MARROW, SIGNAL = 0.92; EXPRESSED IN HELA, SIGNAL = 1.7; SWISSPROT HIT: O14978, EVALUE 2.00e-41; NT HIT: gi14777881, EVALUE 1.00e-123; EST_HUMAN HIT: BF338020.1, EVALUE 1.00e-121
cagccctgctccatcccacccattcctgaagggcagaatcgagaggctcaggtggaaaggaaaattctaagactggtctcggctctgattccttgaccagtggcccgaccctttatcctgatgcttctccagagtgctttacctttaggagaggatgggattctgaggtagaagcagcccttctgggctgctgacctaacaggcagcggcagacaggtgggattttcttttctccagcatagaaataatgtacgggtttggtttctctctctctaccaggagaagagaaatttgagaacctggaaggtgttccgtctgtatgctctgagaacatccaccctcaggtgctgcttcctgaccaggcccgaggggaggtgccctggagtcctgagctgggaagacctcatgaccggtcgcaaggggattgggcgcctcccccagagggtggaatggagcaggccttggcaggagcctcaagtggcagagaactggggcgaccg

SEQ ID NO: 9311 - DNA, 529 bp, Homo sapiens
  MAP TO Z98885.1; EXPRESSED IN HELA, SIGNAL = 1.4; EXPRESSED IN BONE MARROW, SIGNAL = 1.2; EST_HUMAN HIT: BG723413.1, EVALUE 0.00e+00; SWISSPROT HIT: O95696, EVALUE 3.00e-90; NT HIT: gi11321641, EVALUE 0.00e+00
acatgctctgcgacacggcggggacgcagtcgcccttgcgcttctcattgacgatctccagccaggcatagtcctcctcgtccatgtcatactccacctcgttgtccagttcctcggccgacttctcgatgaacttgtagtacacaggaggcctcctgggggcggacggagggctgtactccacgatgcgcaccttgggctccgggagggcactggccgaggccggcgtgccgtgggcgctggggagggcctcgtttttctttttgactctgttgtttttgtgacgcttagttcttaagcagacaggaggccgctcgctgttttccttgttgctgttgcactcactcatctcttgagcagtgaggtcatcttccaatatgatctccaggggatcaaaaatactgatcctgtgcaagcgcccttcaatttctatctctaccatcctttgagcttgagcgtaggtcagcgtttctcgcgtaggggagtgtttaacactgcatggggaagaaggatgcctcgctgcagagcc

SEQ ID NO: 9312 - DNA, 514 bp, Homo sapiens
  MAP TO AL031985.10; EXPRESSED IN BONE MARROW, SIGNAL = 1.2; EXPRESSED IN LUNG, SIGNAL = 1.6; SWISSPROT HIT: P52742, EVALUE 3.00e-41; NT HIT: gi13636749, EVALUE 0.00e+00; EST_HUMAN HIT: BF930051.1, EVALUE 0.00e+00
ggggcaaatccccctgatgtgcaagaaaacattcactcaggagagaggccaagagtctaatagatttgagaaaagaattaatgtgaagtcagaagttatgccaggaccaataggtcttccaagaaaaagagatcgtaaatatgacacacctggaaagagaagcagatacaacatagatttagttaatcattcaaggagttatacaaaaatgaaaacctttgagtgtaatatttgtgaaaaaatcttcaaacagcttattcaccttactgaacacatgagaattcataccggggagaaacctttcagatgtaaggaatgtggaaaagcctttagccaaagttcatctcttattccgcatcagagaattcatactggtgagaaaccctatgaatgtaaggagtgtgggaaaaccttcagacatccttcatcgcttactcaacatgttagaattcataccggggaaaagccctatgaatgtagggtatgtgagaaagccttcagccagagcattgga

SEQ ID NO: 9313 - DNA, 519 bp, Homo sapiens
  MAP TO AP000512.1; EXPRESSED IN BONE MARROW, SIGNAL = 0.75; SWISSPROT HIT: O60231, EVALUE 9.00e-16; NT HIT: gi14752414, EVALUE 2.00e-59; EST_HUMAN HIT: BF725559.1, EVALUE 2.00e-59
gattgcctgcacccaaccccggagagtggctgccatgagtgtggccgcccgagtggcccgggagatgggtgtgaagcttgggaatgaggtgagatttctagggaaccggggggtagagtctggggtctgtgactcagtctacagttccctcaggtccctacagcagaagtcttggtgctgccccacttcacctttccccaagttcctttcagggcacaccagcccacacttggttgctaatggttcccttgaccaggttggctacagcatccgctttgaggactgcacatcagagcgaactgtcctccgctacatgacagatgggatgcttctccgggagttcctctctgagcctgacctggcgagttacaggtatctctaatctctggcctttctctcccttcttcccacccagccaattcagccattgtcttctgattaatccacccgttcttgaatctttgtggttcaaatggtccttgaactgacctccaggtaccacggagatggggctggagg

SEQ ID NO: 9314 - DNA, 504 bp, Homo sapiens
  MAP TO AC068323.6; EXPRESSED IN BRAIN, SIGNAL = 0.82; EXPRESSED IN HELA, SIGNAL = 0.98; EXPRESSED IN BONE MARROW, SIGNAL = 0.92; EST_HUMAN HIT: BE709906.1, EVALUE 7.00e-01; SWISSPROT HIT: P57552, EVALUE 4.60e+00; NT HIT: AF405693.1, EVALUE 2.00e-59
tgcccctaaaatgtggtgaaagccacatggtgacactacttttcattgataatgagtaaattatttaaccagaagtttgtctgctaaacaaattcttttttcttcacattatactagaaagtacttgaaattctagtttctcactcataaattttcttgttacaggtggatccccaggtcctgggggccagctagcagaaaccaacctccaggtgacagtaatggttccattcaatgatgatccctttggagtttttatcttggatccagagtgtttagagagagaagtggcagaagatgtcctgtctgaagatgatatgtcttatattaccaacttcaccattttgaggcagcagggtgtgtttggtgatgtacaactgggctgggaaatactgtccagtgagttccctgctggtttgccaccaatgatagattttttactggttggaattttccccaccaccgtgcatttacaacagcacatgcggcgtcaccacagtggaa

SEQ ID NO: 9315 - DNA, 520 bp, Homo sapiens
  MAP TO AC035144.2; EXPRESSED IN BONE MARROW, SIGNAL = 0.83; EXPRESSED IN BRAIN, SIGNAL = 0.9; EXPRESSED IN HELA, SIGNAL = 1.1; NT HIT: AJ278581.1, EVALUE 0.00e+00; EST_HUMAN HIT: AA668227.1, EVALUE 1.00e-120; SWISSPROT HIT: P21416, EVALUE 1.00e-05
gagctggcacttgccccaggcaccctcaattctgttgttggatcatctggttgggggcttctggcccagagaacctttgtcctctggggcagtgcaccttccagtgattgcctcggcatagtgaacatggatgagggggcagcttgtttctcattggacaatctttttaaaagtgtccttgcaaaccacactgataataagccccaccaggtgattggtctactccattttctgtcctctttgaaccaccaaggtttgtttatctgagggccatgactaaggctgtggcctttctctgatctcgcttttcctgtccctcttggtccctattacagaacacggaggttgccaggtttaataatgcctccagattttgttcagggcccagggctcacttttgaagctttctcctgatatctgtggctgattgggtaataaacttatcttttaggatcagttgactgttgagggagtcacaggggagagtatatttccttaaggcctcccgtagccgctcgag

SEQ ID NO: 9316 - DNA, 535 bp, Homo sapiens
  MAP TO AC005565.1; EXPRESSED IN LUNG, SIGNAL = 0.95; EXPRESSED IN BRAIN, SIGNAL = 1.2; EXPRESSED IN HEART, SIGNAL = 1.2; EXPRESSED IN BONE MARROW, SIGNAL = 0.9; SWISSPROT HIT: Q05063, EVALUE 9.90e-01; NT HIT: X86780.1, EVALUE 7.90e+00; EST_HUMAN HIT: BF995865.1, EVALUE 1.00e-129
gggcctggaaggtggcagtgaggacggggccacattcccaccattaaccgaatctcaacagtagcacagggaccccaagcctttgcccaaaagcacaaggcagaacttgcaagagctgcccaagccagggctcagcgaaaaatcacacgggctatgcttatccacgcttctaagacggccaaccgcgagcgcaggcaggttcacagattcacacgggctatgcttatccacgcttctacgacggccaaccgtgagtgcgggcaggttcacagattcacacgggctatgcttatctaggcttctacgacggccaactgcgagtgcgggcaggttcacagattcacacgggctatgcttatccacgcttctacgacggccaaccgcgagtgcgggcaggttcacagattcacccgggctatgcttatggggccttctacgacggccagccgcgagtgcgggcaggttcacagattcacacgggctatgcttgtggggccttctacgacggccagctgcgagtgcgggcaggttcaca

SEQ ID NO: 9317 - DNA, 551 bp, Homo sapiens
  MAP TO AC010494.4; EXPRESSED IN BONE MARROW, SIGNAL = 0.77; EXPRESSED IN HELA, SIGNAL = 0.39; EST_HUMAN HIT: AA372001.1, EVALUE 1.00e-85; SWISSPROT HIT: P08640, EVALUE 6.00e-01; NT HIT: gi7706558, EVALUE 1.00e-85
cgagggagtacaggtggggttcgaacttcctgaaatagtcgtcggggttataggtccgtctgagcaccgaaggttggatgggctccttcttggcgctgagaacgccaaactcgatgggtttaatatcgatgagtggagagctgggacgtcttgactcaagacctgagagccaccagaaataacaatgaagacagccacatacggggcagacctgggccactttgcaggtaagcagattcttgcattgtttactctgcttcagaatgacctttgccatctttctccacactctgaaatactcactgattctgtgacagatagtttggtggcactattgacaccttgccatcatcacagcagctaagtgccaggcactgctctaatggactgtgtacactacatcatcgcatatgtgcaatcacaatcttcacatccccttgaattattagataattactattatccccactttatagacgaggaaacagaagctttaagtaactttctgaaggtcacacacttgcaagtgtaggagccaggggtcaggctgg

SEQ ID NO: 9318 - DNA, 507 bp, Homo sapiens
  MAP TO AL034562.2; EXPRESSED IN HELA, SIGNAL = 0.56; EXPRESSED IN BRAIN, SIGNAL =   2; EXPRESSED IN BONE MARROW, SIGNAL = 0.92; EST_HUMAN HIT: AI363143.1, EVALUE 2.00e-63; SWISSPROT HIT: P25311, EVALUE 3.60e+00; NT HIT: gi4758977, EVALUE 5.00e-47
tgccaggtggagcatgacgggcagccagcggtcagcaaaagccatgacctgaaggtctcagcccacccgaaggagcagggctcaaataccgccgctggtgaggcctctatttcagctgacccagcttttttaaacttttagttttgtgggttttttaaatgttaaaagtagtaattcatgcttattatagaacaatctagaagtctataaatataaagtagaattttaatgtcagctccatttccccaaatcccacactccaagagtcaccactggtaagagtttgatgcacatcttgatagatcttttgacatagatttatatcacaggaggaaagagggagagagggggcccatctgttcatggtgtcctgcctcttgccttcttcacctgacagttgtcatgctccccattcctcactggcccagcccctcttccctactctttctagcccctgcctcatctccctggctgccattgggagcctgccccactggaagccagggt

SEQ ID NO: 9319 - DNA, 560 bp, Homo sapiens
  MAP TO AC006369.3; EXPRESSED IN BONE MARROW, SIGNAL = 1.3; EXPRESSED IN LUNG, SIGNAL = 1.5; EXPRESSED IN HEART, SIGNAL =   2; EST_HUMAN HIT: AL572131.1, EVALUE 0.00e+00; SWISSPROT HIT: P28858, EVALUE 2.70e-01; NT HIT: gi14733248, EVALUE 0.00e+00
gtggggctccagcggttctgcatctcagtccagccaaggcagagacagccactcctccagcctgtccgaacagtaccccgactggccagccgaggacatgtttgaccatcccaccccatgcgagctcatcaagggaaagactaagtcagaggagtccctctctgaccttacaggttccctcctctccctgcagcttgatcttgggccctcacttttggatgaggtgctgaatgtaatggataaaaataagtaacaagatgccaacttttttcctttggggtaaaaggtacaaaaacaaactaaccacagttgaagagaagggcttccggagctgtatttgcagttttgtgttgggttttctaaaataatattcttacaaagtatttttttacctgttatgccctgtttgcaaaaacaatttagaaaaaaacaacaaagcaaaacctatcttggcaaaaaaaggaagtgagtcagagcccattttcaggaggcattggtgatgttcggctcacatattgtttgcagacacacaagaaatctggcttggccaggattggcac

SEQ ID NO: 9320 - DNA, 545 bp, Homo sapiens
  MAP TO AC006057.5; EXPRESSED IN HELA, SIGNAL = 1.2; EXPRESSED IN BONE MARROW, SIGNAL = 0.77; NT HIT: gi14757869, EVALUE 8.10e+00
gcagagcccctcctctgggcttctagaatctgataatcccatctcttccttctgttccgcagccctagggctgccagctgttttccctggctatgatttctgcattacttctttgttctcttagtggtttttcaatacttgcttaaccagtttcctatattaaattctctctgatgaattacctgttttggattctgttttcttggctagactgtgtttatacattggttattcaacaatttccaacctactacaattgtaaggagatataaattatactagatataatagctaactcttattatagagaaaatgatgaaacatttgcttgtgtcagccagggccgaaaacatactcctctccttgggagagagagatttgaaataactgaagtgctattaccctcctcctctgtatttgctttaaacccagagagtggtcaagatgtcattcgtgaccaaacgcctattacaccttccaacactttggtatctgcaggaggatctgggaacatgggaggtgatgggggactccgtgctggtcca

SEQ ID NO: 9321 - DNA, 563 bp, Homo sapiens
  MAP TO AC010491.2; EXPRESSED IN BONE MARROW, SIGNAL = 1.1; EXPRESSED IN HELA, SIGNAL = 4.3; SWISSPROT HIT: P40227, EVALUE 2.00e-83; NT HIT: AB063318.1, EVALUE 0.00e+00; EST_HUMAN HIT: BG165787.1, EVALUE 0.00e+00
tgctgggaaccaacctggggcccaagggcacaatgaatatgcttgtttctggcgctggagacatcaagcttactaaaaagatggcaatgtgctgtttcacgaaatgcaaattcaacacacaacagcttccttaatagcaaaggtagcaacagcccaggatgatataactggtgatagtacaacttccaatgtcctaatcattgaaaagctactgaaacaggaggatctctacatttctgaaggccttcatctcagaataattactgaaggatttgaagctgcaaaggaaaaggcccttcggtttttggaagaagtcaaaataaggaaagagatggacagggaaacacttataaatgtggccagaacatctcttcatactaaagttcatgctgaacttgcagatgccttaacagaggctgtagtggactccattttggccattaaaagacaagatgaacctattgatctcttcatggttgtgatcatggagatgaaacataaatctgaaactgatacaagcttaatcagagggcttgttttggaccacggagcatggcatcctg

SEQ ID NO: 9322 - DNA, 506 bp, Homo sapiens
  MAP TO AL121935.12; EXPRESSED IN HELA, SIGNAL = 1.1; EXPRESSED IN BONE MARROW, SIGNAL = 0.87; SWISSPROT HIT: O00270, EVALUE 5.00e-14; NT HIT: U65402.1, EVALUE 0.00e+00
gccagggccaggttgagcaggtagacagcgtacggcttccacaccctgacccggaacaggaaggtccacagcgccaccgcgttgcccagcagacccagcccacactccagccccagcaagacacccacagctgtggccaccacagtgctgggggctgagcagtttgggaatggcatcacccggccgtgaggggctgcaggcacagctggagcaggtacaggaggaactctgtgctctttcttacaaaatgaaagaaaaggccttttcctgccacagagtagacaagatctacatttgcccaacaagaacagttcctcagcagaatagagtccacagcaaaccaaaattcatttggggaaagaggatgagcaggggagggaaaagcccctttgcagttgtgttctgttttcttccgccataaaaaaggggaaatggtgtttcgcttcacatcaccgggctgcaaagctgaggagtaatgtcctataacgtctgggggtccagggctt

SEQ ID NO: 9323 - DNA, 539 bp, Homo sapiens
  MAP TO AC004531.1; EXPRESSED IN BONE MARROW, SIGNAL = 0.85; NT HIT: AF329821.1, EVALUE 0.00e+00; EST_HUMAN HIT: AU138872.1, EVALUE 0.00e+00; SWISSPROT HIT: O14497, EVALUE 3.40e-01
cagacccctgtctcggcccctaggcctgatcattcattcaaactctcaataaacacggattaccagaccctgcgcagggaacacatctgggaaaacagctgcaacctcggataccagcacgggacaagctatctcagggcaatgaggaacaactaaagagaatcccaggaaccaggtaaccaatcgccagaagccctccgccctcatggtccattgggtcaaggccccactgccgcctcgtatcgccagcctccagtcctgcctccacgacgcgcccttccccaaggctggccgggtctggatgtcgccatcccctattcggagctacagacctcgcagctgaactcttaaaaagaacctcgcttcttcctcacggtgctccagctccacacaccgtactgagcctcgccagccaccgtacgcgaggtcgcggcgcgtccgtgacgtcactgatgtgcgcttctcccgcactaagggaaacatggctctaacgcggccggtgcggctcttttccctcgtgactcggttgctcctggcgc

SEQ ID NO: 9324 - DNA, 555 bp, Homo sapiens
  MAP TO AL163285.2; EXPRESSED IN HELA, SIGNAL = 1.2; EXPRESSED IN BONE MARROW, SIGNAL = 0.74; NT HIT: AL163285.2, EVALUE 0.00e+00; EST_HUMAN HIT: BG008447.1, EVALUE 1.00e-64; SWISSPROT HIT: P23074, EVALUE 1.00e-12
agccccacaccactggacccctagaaattttactgaggtagaaggtccctgaattttagtcatatttatttcccatctcctggcacataaatgtctcaccaataagtccagtgtgtttgctacttcttgctcactggatccaatcagcataatgtcatcaaactaatggaccagtgtgatatctcgtggaaacgaaaagcgatcaaggtctctccaaataagattatgacataaagccggagagtttactgtcctacccctgaggtaggacagtaaaggtgtattgccggccttgccagcggaaggcaaattgcttctggtgggccttatggacaggaatggggaaaaagtcatttgccaagtcaatggctgcataccaggtaccaggaggtgtgttaatttgctcaagcaatgaaaccacatctggtacagcagctgcaattggagtcaccacttggttaagcttacagtaacccactgtcattctccaagatccgtctgtcttctgcacaggccagatgggagagttgaatggggatgtggtgggaatcacca

SEQ ID NO: 9325 - DNA, 500 bp, Homo sapiens
  MAP TO AP000345.1; EXPRESSED IN HELA, SIGNAL = 1.5; EXPRESSED IN BONE MARROW, SIGNAL = 0.84; EST_HUMAN HIT: BG433460.1, EVALUE 3.00e-49; SWISSPROT HIT: P10263, EVALUE 1.00e-12; NT HIT: Y08032.1, EVALUE 1.00e-04
tcattggggccatcagagcctaaaccacgatcgccatcaactcctcctcccgtggttcagatgcctgtaacattacaacctcaaacgcaggttagacaagcacaaaccccaagagaaaatcaagtagaaagggacagagtctctatcccggcaatgccaactcagatacagtatccacaatatcagccggtagaaaataagacccaaccgctggtagtttatcaataccggctgccaaccgagcttcagtatcggcctccttcagaggttcaatacagacctcaagcggtgtgtcctgtgccaaatagcacggcaccataccagcaacccacagcgatggcgtctaattcaccagcaacacaggacgcggcgctgtatcctcagccgcccactgtgagacttaatcctacagcatcacgtagtggacagggtggtgcactgcatgcagtcattgatgaagccagaaaacagggcgatcttgaggcatggcggttcctggt

SEQ ID NO: 9326 - DNA, 511 bp, Homo sapiens
  MAP TO AL034380.25; EXPRESSED IN BRAIN, SIGNAL = 0.87; EXPRESSED IN LUNG, SIGNAL = 1.7; EXPRESSED IN BONE MARROW, SIGNAL = 0.91; SWISSPROT HIT: P31947, EVALUE 5.00e-23; NT HIT: gi14734357, EVALUE 0.00e+00; EST_HUMAN HIT: AA837505.1, EVALUE 0.00e+00
cgatcagaggcagcaggggcaggagggaggcaagaggaggggagaagtagcctggtcctggggtcgggaggaagcgggtgcggagagcaggggtgggggcatgaccagtggttaggtgcgctcaacagctgcaagaagagtgggatccccagccccaggtggcctcagctctgccagtccctctccacggagccctttggagcaagaacagcgcctaggggagaagggtggggcctcccaccccatactagtcctctcggcagggtgggggactggagggggcagggcggggcggtggcgggcaacactcagctctggggctcctggggagcctcgcccccctcttccccggcgttgtcggccgtccacagtgtcaggttgtctcgcagcagctgcatgatgagggtgctgtctttgtaggagtcctcgctgagggtgtgcagatcagccatggcctcgtcgaaagtggtcttggccagagagatggcctcctcggggctgttggcgatct
